United States Patent Application Publication US 2004/0034888 A1 - sequence listing, part 13

SEQ ID NO: 29593 - DNA, 2589 bp, Glycine max
  Clone ID: UC-GMFLMINSOY077C10_FLI
aagaaagcagcgattttgaagtctctccaaaccattatggttgtcttcctgctgatagtactctttagcagcaacaccaaagcagaaaaagaaacaatccacgaccatgcaaacaaaaagacctacataatccacatggacgagaccaccatgcccttaaccttcaccgaccacctcagctggttcgacgcctccctcaaatcagcgtccccctccgcggagattctctacacttacaaacacgtggcccatggcttctccgccagactcactcccaaggacgtagacacacttgcaaaacaacccggcatcctctccgtcatccccgaactcaaatacaaactccacaccacaagaactcccaacttccttggacttgacaaagccaccaccttgttacccgcctcggagcaacagagccaggtggtcattggactcctcgacaccggcgtctggcccgagctcaaaagcctcgacgacacgggcctcggcccggtcccttccacctggaaaggccagtgcgaaattggaaacaacatgaactcttccaactgtaacagaaaacttgtcggagcgaggtttttctccaaaggctacgaagccgcacttggacccattgacacaactacagagtcaaagtcagcgcgtgacgatgacgggcatgggagtcatactttaaccaccgcggcaggctcggttgtacccgaagctagcctcttcggcttggcgtcgggtacggcgcgtggaatggccacgcaagcgcgtgtggcggtttacaaagtgtgctggctcggcgggtgttttacttccgacatagccgcgggaatcgacaaggccatagaagacggcgtgaatgttctgtccatgtccattgggggaagcttgatggagtattacagggatataatagcgattggatccttcactgccatgtcacacgggattctggtgtccacgtcagcggggaacggtgggcccagtcagggaagtttgtccaacgtggcaccgtggataacaactgtgggagcgggaactatcgaccgcgatttccctgcttacataaccctcggaacagggaaaacatacaccggagcttctctttatagcggtaaacccttgtcggattcgccgcttcctcttgtttacgctgggaacgcgagtaactcttctgtagggtatctatgtttgcaagattctctgattcctgagaaagtttcagggaaaattgttatatgtgagagaggtgggaatccgagagtggaaaagggtttggtggttaagcttgctggaggtgctggaatgatattggcgaatagtgaagcttacggagaagagttagttgctgactctcatcttcttcctgctgcgtctttgggacaaaaatcaagcgagattttgaagaactatgtttcatcttcacctaatccaacagctaagattgctttcttagggacccatttgcaggttcaaccttctcctgttgtagcggcttttagctccagaggaccaaatgcactcaccccaaagattctcaaaccggatctaatagcaccaggagtcaacattttagccggttggaccggtgcggttggaccaactgggttgactgttgacacccgccatgtcagcttcaacataatttctggaacatccatgtcatgccctcatgtaagtggcttagccgcaattctcaaaggagcacaccctcagtggagccctgccgccatcaggtccgcactcatgacaacagcgtacacgagttataaaaacggtgaaacgattcaagatatttcaacaggacaacctgggacgccgtttgattacggtgccggacacgtcgatcccgtggccgctcttgatcctggtctcgtctacgatgccaacgtggacgattacttagggtttttctgcgcactaaactactcgtcatttcaaatcaagcttgctgcgaggagggactatacgtgtgacccgaagaaggattacagagtggaggattttaattatccttcttttgcggttcctatggatacagcttcggggattgggggaggttccgatactctgaagaccgtgaagtactctagggttttgactaacgtgggagctccgggaacgtacaaagcttcggtgatgtcgttgggggattcgaatgtgaagattgtggtggaaccgaatacgttgagtttcacggaattgtacgagaagaaggactatacggtgtcgtttacatacacttcgatgccgtctgggacgaccagcttcgcacgtttggaatggacggatgggaagcataaggttggtagtccaattgcgttcagctggacatgatgggctgtggaaaatgtatgacccaaataaaagggcccactcaagtgttgtaggctcttcgtggtttgcttttgggcccggcccgatacggcttgtttttattatgtatctcacttattcactttgctgtttttattccgtaggctgaagttcaggagaaaactttatatatggaataataacaataattgtacatagaaaaagataatggtcgcatctgtatgtatgtatcataatggctttgaatctgaattatcc

SEQ ID NO: 29594 - DNA, 1837 bp, Glycine max
  Clone ID: UC-GMFLMINSOY077G08_FLI
ctttcactagaaagcatgaaacttttttgttttttacagggacagaaaacgagggaaaaaacgttgttggcctttctcggttgtatgtatttgctgctgcaccgttcgagagctcgccctttcccttagctgctgagagaacacgaagaaaagaccctcttgatggcttcaataagtacatttatggatggaatatcactagcagtgattattgggcttctgtggcatataccgcagctcctttgttcagtattgcagcagtctggttcttgggctttggcttatgcttagtgatcatcggtgtttgttacttctgtcataaaagagagccatatggttattcaccaacatgctatgccctttcccttattctcctgatattattcacatttacagcattgattggatgtgcagttctctacattggccaaggaagttttcatcatagcatgacacatacattgcagtatgtggtacatcaagctgattctactgtggataagcttaggaacgtgtcagattatcttgctcaagctaagcaggttggaatcgatcgagtttttctccccacaaatgttcaaactgatattgatcaagcagaaacagatatcaataactctgctagcacccttgctgataagacaaaggagaactcagacaacatacaagatctcttagattctgcgtaatgattgattataatgttttctgctccagatatttggtttttgctttatcttttactctataacatgaacatgagtacataacgctgatacaggaggctagcacttatcataatagctgctgtcatgctagtcttgacatttcttggatttttattctcgatttttggcatacagctccttgtgtacatcttggtaatcgcaggatgggttcttgttactggcacccttatattatgtggcctgttccttgttctccataatgcgacagcagacagttgtatagctgtgaatgagtggatccagtatccgactgcacatacggctatggacgatattctgccctgtgtggacaatgccactgcacaagaaacattgtcacgaagcaaagaagtaacttctgaactagtcaatttggtcaaccaagttatcaccaatgtctccaacttaaattttgcccccaatttcactccactctactacaatcaatctggtcccctcatgccactcctctgtaatcccttccatcctgacatgacggatagacaatgtgatgctggtgaagtcaccctaagcaatgcaacacaggtgtatggcaattttgtgtgccaggtttcaccatctgagatatgcatgacacaggggcgtttgacccctaccttctacaaccaaatatctgctggaataaacgtgggcaacgccttgtatgattatgctccgtccctcattgagctacaagattgcaccttcgttcgagaaactctaagcgacatatccagggaccattgtcctggtttacagcgttatagtagatggatctatattggattggtaatggtctcttttgccgtcatgttctcattgatcttctggatcgtgtatgggagagagaggagacatcgtctatatagaaaagagtcaaaggacttcactcctacacatgcaccagcaccagcaccaggacaagcattagcattggcccagatccctgaaggataattaagcaaaaactaattgataatgatgttgctagttggtggatgaacatgtgtgaactaagtttagcctttttccggtgttgggtgtataatgttgtagcttcttttgtatgacacactagttttttttttataatgaaatatcattatttt

SEQ ID NO: 29595 - DNA, 1882 bp, Glycine max
  Clone ID: UC-GMFLMINSOY080H10_FLI
ccgccaccgccaccgcctcctcatccatcacctccgccatcatcgacgccgccaccgaccgccacctgtcctactccctcctcctccgccaagtcaaatcccttacctcctcccttcaatccctcacacctctctccaaaggccacgtggcactcatcctcaccccttcctcccttcacgtccccgtactctatttttccctcctctccctcggcgtcaccatcgcccccgcgaatccactcagttcccaatccgagttgactcacctggtcaaactcgcgaaacctgtcatcgcgttttccacctcgaacgccgcgaaaaacattccctcctccctcaaattcggcacaatcctcctcgattcccctctcttcctttccatgctcaacaacaacgaatacgtcaacgccgattcacgaactcgccgagtcgaagtgagtcagtctgactcggcggcgattctgttctcctcgggaaccacggggcgcgtgaagggcgtgctccttacgcaccgcaacttcatcgcgctgattggagggttctatcaccttagaatggtggtggatgatgatccgcacccggtgtcgttgttcacgctcccgctgttccacgtgttcgggttctttatgctggttagggccatcgccgtcggagagacgcttgtgttcatgcataggtttgatttcgaagggatgctgaaagctgtggagaggtatagaatcacctacatgccggtgtcgccgccgctcgtggtggcgctggcgaagtcggaactcgtgaagaagtatgatatgagttcgctacggtatttgggcagcggcggcgcgccgctcgggaaggaggtcgccgaggactttagagcccaattccccaacgtggaaattgggcagggctatggtttgactgaaagtggaggaggggcagctagagtgttggggcctgatgagtctaagcgccatggttctgtgggtcgactatcagaaaatatggaggccaagatagtggaccctgttactggagaagcattatctcctggccaaaaaggggagctctggttgcgaggtccaacaatcatgaaaggttatgtaggagatgagaaggccacagctgaaacattggattcagaaggatggctgaagactggtgatctttgttattttgactctgatggtttcctctacattgtagatagactgaaggaattgatcaaatacaaagcttatcaggttccccctgctgaattggaacatatacttcacaccaatcctgaaattgctgatgctgcagtagttccgtatcctgatgaagaggcaggacagattccaattgcctttgtagtaagaaagtctggaagcaacatcactgcagatcaggtcatggagtttgtggcaaagcaggtttcaccatacaagaagatacggcgagtttctttcatcaaatctatcccaaaatctccggctggcaaaattttgagaagagaattagttgattatgctctatcctgtggttcatccaaattgtgatcaagaaaagagcatggagaaaatgtacttggcctcgaaactattgtgacctgttcagatgcaacaaatgcacgatatcgtgtgaagcatctggcctaccatgtggttcatcgccctagtccaccactaagaatgttggtggtttctacccaaaaatcagcaatcattttattcacgcacacctttcagaaatttaatcattttaatcaactacctcggtttccctcattttatttaccaaaataaattatgcacctttaggtttgttcacaaaataatgtgtgcaagaaacattttcattcgttgtaaactatttgttcattttgtatagttgcatttatatattttctttactcttc

SEQ ID NO: 29596 - DNA, 802 bp, Glycine max
  Clone ID: UC-GMFLMINSOY080H12_FLI
acgaaatgctttccatatttcgcaaaggagaggagttcaaccatggagtggagtttgtgcttctgatatcatttaatgaggatgcactgggtaaccaggcagagcatgcattagcctctctggcatcaatgatgttggaatctccttccttgatagtccaatttacacatggtttgaattttagtccaagctctaaggaatatactcatggagttgtgattcgatttcgatcagttgaggcatttgagatatttataaacagcaaagagtacaaaaatgcatggcattataagttccagcctattgtccacaaatctttttctcttcacttctctgttgatccagtgggaactgaaattatgtagtgaggatggtttgtggttttcaagaatagatgcggcttggtttccactttttagaaacaagaatgaaggtcatcttgttggaattatttcattctgatgaatcagatagctttgagaattgccgagacgatacaatttaggtactgctgtattaaacttgagcttcagatggataaaaactgagcttttaaattatgttgtccaagaaagcaagagtcctctttggtccttttactctggtggagtgccaactaaaaatactgcttaaaaaaaggatgagaccgttgacttctctatcaattgggtctcttatgccgctcatttagagttttgataatttaattgtgtgataataattgtgaagacttgtgagggctttcatatacactgtccctggattagaatgacagctagtgctggtgcctattttccgattc

SEQ ID NO: 29597 - DNA, 948 bp, Glycine max
  Clone ID: UC-GMFLMINSOY081A01_FLI
agatggaggctagcatcatggatggtccaaaacgacgatgcggcgccgtttcgggtcttaccaccgttaagaacccgatctcgcttgctcgtttggttatggacaaatccccgcattcctacctcgccttctccggcgctgaagaatttgctaggcaacagggtgtggaggttgtggacaacgagtactttatcacacctgacaacgttggcatgctcaagctggcaaaggaagcaaacacaatcctgtttgattaccgaatcccaacatcggggtacgagacgtgcggatccggtgtggagagtccactgcaaatgaatggactcccaataagcgtgtacgcgcccgaaaccgttgggtgcgtggtggttgaccgggagggccggtgcgcggcagcaacatccacgggagggctgatgaacaaaatgaccgggcgcatcggtgactcgccgctgataggcgccgggacctacgcgtgcgacgtgtgcggcgtatcgtgcacgggtgaaggcgaggccatcatacgtggcacgctggcgcgtgaggtggcagcggtgatggaatacaaagggttgaagcttcaagaagccgtggattttgtgatcaagcaccgtctcgatgaagggatggctggtctcattgctgtgtccaacgctggggaagtggcttatggtttcaattgcaatggcatgtttaggggctgtgccactgaaaatggcttcatggaggtcggaatctgggaatagcttcattattttccttcatggttgtttcgatgcaacttttggatttctgtaccatgttccactgtagtgtagggtcttcctgctggtgcccgatttagataaaaaatggtaaccttgtttctaagaattagaaaaaaatgtgaaataataatatggtaactttgttgtctttctcttaaataaagacttgtgctagaccctc

SEQ ID NO: 29598 - DNA, 3609 bp, Glycine max
  Clone ID: UC-GMFLMINSOY081B05_FLI
gaaaattatttggtctaagcataatgaaattcagactgtcaatataaaaagtgtaggagcagatgtagaggttgctgacggagaaaggttacctttagctgttaaggagttgggcacctgtgatctctacccccaaaatttaaagcacaatccaaatgggaggtttgttgttgtatgtggagatggtgagtacattatatacactgcattggcatggagaaataggtcatttggttcagcactggaatttgtttggtcttctgagggagaatatgctgtcagagaaagtacatcaaagattaaaattttcagcaaaaatttccaggtttgtacttttttaaaaactttgtttcctctctaatctcgtgcaatcttgttctgtgtgtaatgaaccaacaagttcttgctatttcttaaaaggaaaagtttaacaagatgctgccattcttgtaccgtgttagactgttaggcatcccacagttgcagaagttatgagaggggaaaaaaggataataatgagggggaaggatcagaaagaggaactaggctgtaatgaccttgcttatgtggcaaggggtgtgggaagggaatgtgggggagcaaggatgaaagttagaagaggatgcaacgataaaagttagaagaggatcatagtggattcattcagtcgtggagtaaggaaattgaagcctttgggcaaggatgaagcagcctccctatgtattgcagtatctctgtctattctttctatttctgttctgttttccatagatgtatggattagatcctggactcatatcagtaacagtgatcatattccgggtattcaataaaattattgttatatttgtgggttcttataattctgtttttgacaaggagtgtgtataaaactatgcaagctattaattttccttatgaaaatcatttatgtctgaactagagattgacaaatttgcttcaaagcctgtacaaagacttctttactttcattatcgtttattgactgccttggttatcactctggaaggttcacaaaaatttaatcctatcattgttatagctgtcttcgaattgaaataaatttgctctagggaatacttagtttagttggaatttaaacaatgggtatttcaggaaaagaggagtgtccgaccaacattttcagctgaaagaatattcggtggcactttactggcgatgtgctccaacgatttcatctgcttttatgactgggctgaatgcaggttgatctatcgcattgatgtcaatgtgaaaaacctctactgggctgacagtggtgatctagtaacaattgctagtgatacatcattctacattctgaagtacaatcgtgatgttgttgtatcacatttagatagtggaagacctgtagatgatgaaggtgttgaagatgcttttgagctcttacatgaaatgaatgaacgtgtcaggacaggcatctgggttggggattgctttatctacaacaatacctcttggagacttaattactgtgttggtggtgaggtaactacgatgtttcatttggaccgccctatgtacttgttgggatatcttgcaaaccaaagtcgtgtttatttgattgacaaagagtttaatgttatgggatacacactgcttttaagcttgattgagtacaagacacttgtgatgcgtggtgatttggaaagggccaatgatattctgccatcaatccccaaagagcatcataacagtgtggctcatttccttgaatcacgagggatgatagaagatgctcttgaagtagctactgaccctgagtacagatttgatctatcaatacagcttggaaaactagatgttgcaaagagtattgcaatagaattacagagcgagcctaaatggaagcagttgggagaattaactatgtctactggaaagttagaaatggctgaggaatgtttgaagtatgcaatggatttgagtggcttgttactgctatattcttctttaggagatgctgaaggaatatcaaaacttgcaatccttgctaaggagcaagggaaaaacaatgttgcattcctttgcttatttatgttgggtaaattagaagactgccttcaactgttggtagaaagcaatcgaattccggaggcagctttaatggctcgatcttatctcccaagtaaggtctcagagatagtggcaatttggagaaaagacctcaataaggttaatccaaaagctgctgaatcattggctgatcctgaagaatatccaaatttgtttgaagattggcaggttgcactagctgtcgaatctaaagctgtggaaacaaggaatgtgtaccctcctgcggagcagtacgtcaaccatgctgacaaatcacaaattacccttgttgaagcctttagaaacatgcagattgaggaaggagaggagcatctggagaatggggactctactcatgagttgacagaacaaagtggagaagagcactacacagaggatcaggaggaacagaatggagaggaaggaagccaagaggaggcagttgtagtggatgcagattctacagatggtgcagtactcgttaatggtaacgaggctgacgaagagtggggtacgaataatgaaggagccccgtcagcctaaaagcaattggttggggtggtgtgaaaatcgaaattttgtctctggtgattaattgtttctgaagtgccatttctaactaccatttgacaactagctgtttttactataactactaccacctgagtcctaacaattctaattcctctcaatttttaatgtattggatactactctgcaattacgctgtatatttgggaatcagggaggaaataataaaataacgtccattgtgtcaataatgaaacattgactaaatcttgtgactattttcccatgattatatacaactattgggtttgggagtctgtaaaagtcacctcaataaagctctttcctttttaaatttgttccgattggttcttagtcctaacttgaatattcatctttgttggcagtgcttgcaccacatcactaggttccatcaagacagtctattccagcttctgggatattttatgaggtttatcaatcgattaacagtttttggttattattatgatcttattaccacccggatagactatttttggtttgataaagcattccttcattcaatttggatgctcacatagacgagtagtgttgcaaaaagaagacatgctcgtgtttatgtgcatccgcaggtcttctcaaggttacatgaagagattttttggactggttgtttgtttcctggtgttgtggatttgtagtgccctgaattttgtcattttgctcgttgtatgaacaatattccttagggtcagttacaatttactagagtttatatatagcacattcttttgaggcttttacctcaatatactcgtgccattgtgaatgtagaaaagcggaactagagacgggttgcccgtttaaactttagataagttttttaaaaaaatattttttcttgaccattattttaatttttatattttcctggattgtaaacatggatggttaatagagaaaataatgattcttccc

SEQ ID NO: 29599 - DNA, 857 bp, Glycine max
  Clone ID: UC-GMFLMINSOY081B08_FLI
ccgggaaatacatgatcatccatagtgacgtgaaaaccaccaacatcttgttggatgatgactgggtggccaaggtttcggactttgggctttccagatttgggcccatggactcatcccaagcctatggcagcaccaccgctgtaagaggcagctttgggtatatagacccagtgtattataagcggcatcatttgacggacaagtctgacgtgtacgctttcggggtagtgttgtttgaggtactgtgcgctcgtccgcctcttatacgcaatgaagatcccaaacaggagtcgcttgctaagtgggttaggtactgttaccaaagtgggaccatggaccagattgtggaccccacgttgaaggggaggatcgcgcctgaatgcttccagaggttttgccatattggggtgagttgtttgtcagaggttgggatgcagaggccgtcgatgaaagatgttgttttcatgttggagtctactctgcaggtgcaagagagcgcggagaatgtaaaaagaggaaattagtgaaaatatcaatatgtctagtagtgagttgagtatggctactactagtggagagcatagtggggttttataaggaacccaaagcctctttgagcaaatcgagttaacacaacgctggcaaaacaattagctatacatgctaaatttttttgtctattttcaaaatcgttagattagaatgcctgtgtacaggaatcaacttgcttctatctcttgtgaaagaagacaagtgcaaggttgtgtttgtaagtcataaatttcaactcttcttttgttagcctgtatgatatgtgttgatttatttataacatttccccttccaatgtgatc

SEQ ID NO: 29600 - DNA, 971 bp, Glycine max
  Clone ID: UC-GMFLMINSOY081C12_FLI
tttcttactttctctcactcaccaaatagttttctcacaaaggaggaagaatggcatctttcatttcactctctttgttgcttctctttctcaattaccccttcctttccctctcaaccaaccctgaagggaacgctctgcatgctttgagaagcaggatttctgatcccaacaatgtgttgcagagttgggacccaacactggttaatccctgtacttggttccatgttacttgtgactccaacaatcatgtgattcgcttagacttgggcaactctaacgtttctggaactctgggcccggaacttggccagctacagcatctgcagtacttggagctctacaggaatgagttaacagggaagattcctaaggaacttggtaacttgaaatcacttattagcatggatttgtatgataacaagttggaggggaagattccaaagtcatttggaaagttgaagtcacttaaattcctgcggctgaacaacaacaagttgacaggatccatcccaagagaacttactcgtctcactaatctcaaaatctttgatgtttccaataatgatctctgtggaacaataccagttgaaggcaactttgaatcttttccaatggaaagttttgaaaacaacaggtttagtggtcccgagctgaaaggacttgttccatatgattttggatgctgaagaaagatagaaatcgcattattatcatctaaacagactacaatgaagaggcttagtttacgtagggagggagtatcacaaagggaaaagctggtgttattttcacatcaatatttcctcaccatttttacacttttcttaattaaaaaaaaagaaaagaaaaggaagtgtgaattgaaatctatgtttttcatattttattataaaaaggaagctatgtaagaatgctctcaaaacaattgtatgtaaataacattattgatgtaacccgaatatgaatct

SEQ ID NO: 29601 - DNA, 1812 bp, Glycine max
  Clone ID: UC-GMFLMINSOY081D01_FLI
ccaaggtgtactacgcgcgtaacatcaaaaccggcgaaggcgtggccatcaaggtaatcgacaaggagaagatcctcaaaggaggtttggtggcgcacatcaagcgtgagatctctatcctgcgccgtgttcgccaccctaacatcgttcagctcttcgaagtcatggccaccaagagcaagatctatttcgtaatggaatacgttcgcggcggcgagcttttcaacaaggtcgccaagggaaggctcaaagaagaggtcgcgagaaagtactttcagcaattaatctctgctgtgggattctgccacgccagaggggtgtaccacagagatctcaagcctgaaaatttgttgcttgatgagaatggcaatctcaaagtctctgattttggattgagtgcggtgtctgatcaaatccgacaggatggtcttttccacactttttgtgggacacctgcgtatgttgctcctgaggttttggcgaggaaagggtacgatggtgctaaggtggatctttggtcttgtggggtggtgttgtttgtgttgatggcggggtatttgccctttcatgaccagaatgtgatggcaatgtataagaagatttatagaggggagtttcggtgtccgaggtggttttctcctgatttgtccaggcttctcacaaggcttcttgataccaagcctgaaacccggattgcgattcctgaaattatggagaataagtggttcaagaaagggtttaagcagatcaagttttatgtggaggatgataggctttgcaatgtggtggatgatgatggccttatggacaatgatgatgacactgcttcgattgtttctgttgcttcgttttcggattactcggtttccgagtctgattctgagattgagactaggaggaggatcaatgctcccttgcctagacctcctagtttgaatgcctttgacattatatcgttctcgccgggctttaatctttcggggttgtttgaggagaaagaggatgagacaaggtttgtgactgctgcaccggttaacaggatcatttccaagctggaggagattgctcagttggttaggttttcggtgaggaagaaggattgcagggtgagtttggagggtaccagagagggggttagagggcctttgactattgctgctgagatatttgagttgacaccttctttggttgtggtggaggtgaagaaaaaaggaggggatagagccgagtatgagaggttttgtaacgatgagttaaagcctggattgcagaatttgatggtggaggagtctgctacttcttcagagttgtctacacctattcaaccttccctactacgtggcctttctgaacctgtgccggatatttcttctgatattgaaaccccgctctgtataccttctgatgattgaagactcagatatagagaagaagagaaaaatggttaaggactttctctctaatctctgtatcacacacactctttctttctctctctctctttttttttttatgttatagattgtgtatggaaattggtaaaaaaatttccacacaggattgattgtcctgcttttaggtttgcttcttgactggagcgttaggtgcctactgtttgtctaattgccatacgagaaaaaaggctaattgaaatatagtgaatgagtatgtatttattttctacttttcttggctctgtatagcaagtgataataaaaataacaaaacggtttagtgctaatccatgcggcattgcactggctttgtgtttggctctatattcaagttaaataagatcatttgaaattggag

SEQ ID NO: 29602 - DNA, 5704 bp, Glycine max
  Clone ID: UC-GMFLMINSOY081F03_FLI
cccagtgatatgttttatgggaagatcatacctgcacttaaagagaaaggaatcaagagagtgatttcccgaagggattggcctcatgaagtcaaatgtaaagttcttcttgatctcatgaaggaggtgcctaggcatcttctttaccaggagctatggtgtgctagtgaaggatataaagctttcagctcaaaaatgaagaggtattctggaagtgttgctgcaatgagtatggttggtcatgttttggggctgggcgacagacatctggacaacattcttatagatttttgtaatggggatattgtacacattgattacaatgtgtgttttgataagggacaaagactaaaaattccagagattgttcccttccgtctgacccaaatgattgaagcagctttagggcttactggaatagagggtagcttcaaatcaaactgtgagacagttattggcgttctaaggaagaacaaagacatacttttgatgttattggaagtatttgtttgggatccacttgtggagtggacacgtggtgattttcatgatgaagctgcaattggcggtgaagaaagaaaaggcatggagttggctgttagcttgagtctatttgcatctcgagtacaggaaattcgtgttcccttacaggaacatcatgatcaattattgactagcctgccagctgttgaatcagcacttgagagttttgctgacattctaaaccactatgagcttgcctctactctatactgtcgagctgaccaggagaggtctggtcttatattgcgtgagacatctgcaaagtcgattcttgctgaagcaaccagtaattcagagaaaattcgagcttcttttgaaattcaggctcgggaatttgcccaagcaaaggctatggttgctgagaaagctcaggaggcaatggcttgggctgagcagcatggaaggattcttgatgctttacggtgcaacttaatcccagaaataaatgtttcttttaagctgaataacatggaagcagccttatctcttacatctgcagtcactgtagcaggggttccactaactgttgttcctgagccaacacaagcacaatgccatgatatagatagggaagtttctcaattcgtagctgagttgggtgatggactaacttctgccacaacttctttgcaagcatactccttggctctgcaaagaattctaccattaaattacctttcaaccagtgcagtccataactgggcacaagttctacagctatctatcaatgccctgtcatcagagattctctctcttgccagaaggcaggcttctgaacttattgcaaaatttcatgtagatagcattgattctatcaaatgcagtcatgatgatctttgtttcagagtggagaagtatgcagtagaaatagaaaaattagaaaaagagtgtgctgaaatagagagttctattggctctgaatcagaatcaaaaactaaagatcgctgtttatctgctttcatgaaattcatgcagtccattggtcttttaagaaaggaagatgtgatgtcttctgttcaatctagacctttaggtgagctagaagaggagagggaaaaggcactatcaattctcaatattgctgtgagttcactttataatgacgttaagcatagaatacaaaatatatataatgatatgtctggaggaagaaatcaatacaatatgttgcagaatgactctggaactatttttgctgagtttgaagaacaagtagagaagtgtaatcttgtgacagagtttgttaatgatctatgtcaatttattggaaaggacactccttctgttgatattaacaaagttcgttcaaagttttcttctgaaagtaattgggtttccattttcaaagccattttgatttcctgtaagggattggttagtcaaatgacagaagttgttctgccaaatgtaatacgagctgctgtttcattaaattcagaggttatggatgcatttggattgatctcacaagttcgaggatctatagaaactgcactggagcagcttgtggaggttgaaatggagagagcatcactgattgaacttgaacagaattattttgttaaggttggtcttattactgagcaacagcttgctcttgaagaagctgcggttaagggcagagatcatctttcatgggaagaggcagaggaacttgcatcccaagaggaagcttgtagagcacaactggaccaacttcatcaaacttggaatcagagggatgtaaggacttcttctcttataaagagagaagctgacattaaaaatgccctggtttctgtgaattgtcaatttcaatctctagttggttcggaagaagaaagggagctacatattttgagaagcaaagcactattggctgccctctttaagcctttcttggaactggagtccatggatattatgctgtctgcagctgatggttcagttgcattgccctcaagtaaatttcatactttggcagatttgataaattctgggaattctatatctgagtatgtctggaaagttggagatctattggataaccattcattctttatttggaaaataggcgtcatagattattttcttgatgcatgcatacatgatgtagcttcgtcagttgagcaaaatctaggctttgaccaatcactcaattttatgaagaaaaggcttgaaatccaacttcagaaacacattggtcattatttgaaagaaagaattgctcctagtttactgacttgtttagataaggaaaatgagcacttgaagcaacttacagagtcatcaaaggaacttgctttagaccaggtgaaaaaggatggggctgcgaaaaaggttttacttatgcttgaagaatattgtaatgcacatgaaactgctagagcagcaaaatcagctgcttctctcatgaaaaaacaagtgaatgaattgaaagaagctctacgaaaaactgcacttgaggtagttcagatggaatggatgcatgatgttagtttgaacccatcatataacagaagaatcagatttgagaagtatcttgatactgatgacagcttgtatacaatcatcttaaacctcagcagatctaaattaatggacaatatacaatctgccgtgtcaaaaatcacaacatcaatggattgtctacagtcttgtgaacgaaattctcttatagcggaaggacagcttgagagagcaatggcttgggcgtgtggaggtcccaattccagtagttctggaaatacttcaactaaaaattcaggaattcctcctgagttccatgaacatattaagactcggaggcagattttatgggaatctagagaaaaggcatctgatattgtgaagttatgtgtgtcagtgttagagtttgaagcatcaagagatgggtttttgcttataccaggccaaccatatcccttcaggagtagtgttgatggtaagacatggcagcaagtgtacttgaatgcactaacaagattggatgttactttccattcttatacacgtactgaacaagaatggaagcttgctcaatgcactgttgaagctgcttccaatggattatatactgcaactaatgagctctgcattgcctctctaaaagcaaagtcagcttcaggtgatttacaaagcacggttctttcaatgagggattgtgcatatgaggctagtgttgcactgtctgcttttgctcgggtttcaaggatccatactgctctaacttctgaaagtggttctatgcttgaagaggttctagcaataactgaagatatacatgatgtttataatctggggaaagaggcagctgctatccacctttctcttatggaaggcctttcgaaggcaaatgcaatcctttttccacttgaatcagtgttgactaaggatgtagctgctatggctgatgctatagctcgggaaagtgagatcaagaaggaaatatcacacatccatggacaagctatatatcagtcgtattgtttaagaatcagggaggcttgtcatacctttaagcccttggcaccctctctgacgtcagctgtgaagggactttattcattgttggctagactagcaagaactgctaatgtccatgctggcaatctgcacaaagcgcttgaaggaataggagatagtcaggaagtaaaatcagaggatattgctttgtcaagatcagatggtggtggtggtgatgctgttgaatttgatgataaagaaggggaaagtctctctaggtccgaagatgataagactgatgattttattggcttttctcgactttctttggaagacaagggatgggtatcaccaccagatagcatctactgtagtagctcgggatctgacatctcattagctgaagttagtcttcctgatagcttgaatgattcagcaggaaataaagacctgctttcacaggggtctggtagcagaatccccacaggttatatgcataccactctattgtctcaaactgatgtggaacaaatctcaccttttgagttgtcagaatcttctcctgtggaaactgatcttaatcgtgctggttctgtgaagtcaattaatgaggctactgaacatgctgaagctatatctttatcaggtgataaatctgttgccatccctggcaactcccaaattccatcgaatgagaacctagacaaatttgatggtgaagatgaactgctgtctgcaaaagaagttaaaaatgctgctgaacatcatgaagctcctgatccctacataaatgccaatactcgtgttggaaggggtaaaaatgcttatgccttatcagtattgaggcgggttgaggtgaaaattgatggtcgagatatctctgaaaacagagaaattggtactgcagagcaagtagattatctactaaagcaagctactagtgtagataatctctgcaacatgtacgaaggttggacaccatggatttgaggtttcaagaggttcctcagactcaagcatctcaagtcccattatattatgcaagatttggcctcaagaattgttgtgttgaccatggtaaggaataagtcctttggcctgattatttcctgatgataggaagctgccaggacaatgtttttgcaggtcccattagtctggactcgggccatatcttgaagtctgccattgatcacaatcactgatctatccatggccaaactgtttagcttctgccatccctttgatttcagcatttctcctggcagagttactattttccaccttgcagcgggcttgcttgcatctgtcattccatgtcatctcacagggaagtccttggctcccagctggtctcgtgagagatgaaaaagcatcaccatgccttcaattctgctggtttaaacggtagcttttaacacctaccacttgcattgccatattgattgaggagtatgttctggatccttagctcttgaaggctgaaagaaagaatatcgtatgctaacaaccaggcagcgaaatggctggagcatcatacttttgcaatagtgaagtccagatatgagttgcacatatccatgtatcatttatctgttgataggtgaaagaatcaactgcacattgctggtttattcttcatgtgattggacgtattgaatccaacatagtgattgttctttttgatcaattgacggaattgtaacttttttaatcc

SEQ ID NO: 29603 - DNA, 1604 bp, Glycine max
  Clone ID: UC-GMFLMINSOY081G11_FLI
ggcctctgtctctgagggaagctatagtgcactattatctgtttgagtactttcaagatgacttaattgttgttcttacaaattcggttccggattcaaagaatgccacaggaaccctttgtggtttcaacaatgaggcaattcctgaagcaagagaggttgtgagagttgatttggtgggaggctttgctttgcaaaaggtgacatcagaaagatgttactttcggacaatagcaaatatggatataaagttggattttgtgcctccatcccttataaactttatttcaaggcagctcattggtaatggtttcagactttatcagaagacggtgtcttctatgacaagccacgataaaggggaattcaataaggccttgggggatccattatatgttcgaattcgggaagctctatataacactagtggatcaaaggccatgaatggtaaagagcttcagcaagttgcaagtgttctccctgctgaagatcttgttgaaagtaagcagggtggggaaaaagatgcatctaaggaagatatgagtaatcaatatgcaaataatgtcatgccaatggcagtgaataacaaagtactagatagtagcaaaacctttaatgagattgtagaagtagattgtgaagaaattgtacaaggtaaggaaaaaaatgcatctaaggaagatataagtaatcaatatgcaaataatgtgatgccaatggcaatgaatacaaaagaactaggtggtaggaaaaaatttgctgagattgtagaaatagatattgaagaaattgtactaattgaggaggacactgaagaagtaaaagacattcaaaataaggaagttgaaatgagtgtactaaggggcaagaggagtatatatatcagatcagaggtagaacatgctctagaaacattagaaaaagccatttcaatggttcgtgaacagcgacttcattctcgggtggtatcttctagcgttgccgacgaagagtccccttttatgaaaaatgatgataaagttgatacatattcctcaaaactcactcaaccaagttccaaaaatgaggttagtgttgaagtacctaatggagatatttcggagggagcttcgcaagaagcccttgggaataaccctggcatccaaaattcaaggtgtacaggaacagatcctaactcaaaggacgtaaattctaacaaagtagtaccaacttcatcagagcagaatgtttcaacatctattttgttaagccaggctgtttcacatcccttgggaaacggagcaattctggaccaaacaacaatcagcaacaagcaattaaacactgattcagtccaagacacgtctttagatcatgcagacaagtcaagcaggcagaaaaaactaaacaccattgtaactcaaagtatgaattcagatgtaccaaagaagttaagcaggcagaaaaaatttctgttgttttgttgttttctgcattgactaaagagaaaaggttaattggccatgaacagaggaagaaaacagggaatttgtataccttaattggtcgtgtatactgacagggttctcccttttgttttgttggaagaatcttctctctctctc

SEQ ID NO: 29604 - DNA, 1083 bp, Glycine max
  Clone ID: UC-GMFLMINSOY081H05_FLI
gttgtcaccaacatagtaacatttaaccacacctgtggccaaatgacatcctccaccttattgctttgctctattgctcttctctactctgcatcatttggagctgaagcatggacctcgccctacatacccgtctcttcgctcatcagcaaaagtctttatgacaaatttttccttcacaaagatgacactgcatgcccagccaaagacttctacccctacgacgccttcattcgtgcatccaaatccttccctgcatttggtaccaccggatgtttagcaacacgcaagcgtgagattgctgcgtttctcgctcagatttcccacgaaaccactggcggctgggccaccgcacccgacggcccatttgcatggggtctctgcttcaaggaagaaattagtcctcagagtaattactgtgattctactaacacccaatggccttgtttcccaggcaaaagctacaagggtagaggacccattcaactttcttggaactacaactatggtccagcagggaaggctttgggatttgatgggctgaggaacccagagattgtggcgaacaattctgtgatagccttcaaaactgctatgtggttttggatgacagagcaaaagccaaaaccttcatgccacaatgtgatggttgggatatatgtgccgacagaagatgacatagcagcaaaccgaacagcgggttatggtttggtgactaacataatcaatggtggactggaatgtgggattcctggtgatgcaagagtgaatgatcggattgggtttttcgaaaggtatacgaagttgttcaacgtggacactggacctaacttggattgtgcatatcagaaacccttctaactctttcgttatgtttttgttttgtgtttttcttttcctttaatttaatttttttttctctgccaagactttaataatgtattgaaagaaagcaaatactacctgcttcatggaattttcctaatgtactcaaaacagaagttgacaaacaaagttttatattattcttgatcgtgtagtgccaccattgccggaggatattctatacacgttctcagatgg

SEQ ID NO: 29605 - DNA, 1188 bp, Glycine max
  Clone ID: uC-gmflminsoy082e03_FLI
aaacaacacacctcgctcacttcttcttcttcctcctcctccctctctcacaatttttattttttaatgatactattttgttattgttattgatggtatcatcatcgggaaaaagcagagaaatggatagggtgaagggtccatggagcccagaagaggacgaggccctgcgggcgctggttcaggcccacgggcctcgaaactggtcggtgataagcaagtccattccggggagatccgggaaatcgtgccgcttacggtggtgcaaccagctctcgccgcaggtggcccatcgccccttctcgcaggaggaggacgaggccatcatcatggcccacgccaagttcggcaacaagtgggccaccatagctcgcctgctcaacggccgcaccgataacgccgtcaaaaaccactggaattccactctcaagagaaaatcctccgccgttagtgacgacgacgtcgtcacgcatcgtcagcctcttaaaagatccaacagcgtcggcccggcccacttgaaccctgccagcccatcagtctccgatttgagcgatccgggccttcccgctctgtcaaacccctcaccttcggcccattacatgcccaatctcatggaaactgcttcttccgctcccgatccagccacgtcacttagtttgtctctccctgggttcactgtacctcaaccagtgtctccgccgccgccgccactgccactgccggcggagacggtggaggagcgagggaagcaaatgttcaacgcggagttcttgagagtgatgcaagagatgataaaaaaggaagtgaggagttacatgtcagggatggaagaacagaagaatgggttcagaatgcaaaccgaagcgattgggaacgcggtggtgaagcgcatgggaattagcaacatcgagtgaagaaaaagaaaacggtgtcgtttcgagattcgaatcaagccaactggcacatgaatgatgatgaatcacaagagtaggagaaaagtgagaaccgagaatgggaaacggtgttttttttttttcaattttttattttattttgtagttaactttaaattttaagtttaatttccctttacttaagggtaaaaaataggtaataattttggcactgtacagaacctcagaacagaagtaaaggatgataatcaatcaaatagtgctttttcctgtt

SEQ ID NO: 29606 - DNA, 1061 bp, Glycine max
  Clone ID: UC-GMFLMINSOY083G02_FLI
ctgggtattgggctaagttgcctatgattaggaggttgatgttgtcgcaccctgaggtggagtggatttggtggatggatagtgatgctttttttactgatatggtgtttgagcttcctatgtctaagtatgatgagtataatctggtgcttcatggttaccctgatttgttgtttgagcagaaatcttggattgcggtgaatactgggagttttctgtttaggaactgtcagtggtctttggatttgcttgatgcttgggctcccatgggccccaaggggccggttcgcgaggaggccgggaagatcttgacggccaatctcaaggggaggccggcgtttgaggccgacgatcagtccgccttgatatacttgctgctgtccaagaaggagaagtggatggacaggacgtttcttgagaattcgttctacttgcacggttattgggccgggttggttgatcggtatgaggagatgattgagaagtatcacccagggttgggggatgagaggtggccgtttgtgacacattttgtcgggtgtaaaccgtgtgggagttacggagattatcctgtggagaggtgcctcagtagcatggagagggctttcaattttgctgataatcaggtgctcaagctctatgggttcaggcaccgtggtctcttgagtcctaagatcaagaggatcagaaatgagacagttagtcctttggagtttgtagaccagtttgatattcgaagacattctacagaaaacacggaatcaaagagctagtgagaaagttgttgttcaatgggtggtattatagagagtaattatttagaagtggagtttcatttggggacagttcacatgtaacttttgcttcttctgtcgtcttggtacttctgtgagaattttaggatagaattctttcgtaagttcttctttcttccagatttgagcaatcagcaaacaaattttatttactcatctactgtatactgagcttcctttgtatttgggcttttgtgacatgaaatgaattcagaaacttaattaatacacattcctgtcctcttg

SEQ ID NO: 29607 - DNA, 2225 bp, Glycine max
  Clone ID: UC-GMFLMINSOY084D03_FLI
tttctagtgtgagctgaatcacatcctccaagatgatacattttctggtcacataaagagtttccttggtactgtgtggaatggatttatatatattctgcagcactcttgtgtgtcactagcgggagctatactattactaattgcggcatattcttttgttccacccaaattgtcacggaagaaacgagcaataattggagttcttcatgtttctgctcaccttgcagcagcactgatacttatgttgcttcttgaaataggtgttgaaatatgcatccagcataagttgctagcaacttcaggtttggtttttctatatgttgaacaatttgtattgatacaacgttttgtaacttgttttgctcaagttgataaataatatatcttagcttaattttaaattacacttttgatccttttagtttcacgaaattcctattttcgtccccacttttaattgcaacttgaagttttgaaatcaacacaatgaagtccccttgtcagattgacattaacttagcattcttttgctgatgtggtgttatgccatgccatttccaaaagtccagcaaatagaatcttatcattcattttattgaaaataatattggcatgtcagctgactgccacatcagcactaatctgagggtacttaacttcatgaatttgaaaatggttagaaatataaaattgttgggcttccaccaaacattgtaagctttggggtgaattgaccattgacatggtattaagagtttgtacgatcaagttgttaggggttctcattttcataattaagttagatttcagttgaaggtaaaatggccatttgcatagtccatattttaaagcaaaagtggtattgcatgggggtttggggggatgctagaaacaacacactactattatgaggataaaattgtgactattgcagtgaatggaactaaatagagcttcagttaaatgaggaagatgagacgcataatttcagatttttattgtgtgtaatcctgcattccagattttacaagtcacaccatattgtcatatccataagggcatgttcattgttacgttgcttataaaggatagacttccatctttataattatcttgttggaaattatatttctattgttgtatctttattttgttggaagctagattcaataggttcacaatgacctgctggaacttagctttggtgatattgatatgactcctgatctggtgaattttggcacaaggtcctttgactaatttgccattactcatcacaaataaattagagaaaaagatttcagcactttgtaaagtgggattgtgtgtgtgtgatgatgatatttagtttataatgtctggtgtttttttgggggggtgtaatccagggtatcacactttatatcagtggtatagatcagtggaaagtgagcactttcctgatccaactggactcagagctcgtatcgaacaatggacatttggactttatccggcatgtatcaagtatttaatgtctgcttttgatgtgccagaggtcatggcagtctcccggaacaatatttgccagaatggattagaatctatttcccgagggggtgctgtaatatattatgcttctgtcttcctttatttttgggtcttctcgacccctgttgtttccttggtgtttgggagctacttatacatttgcatcaactggcttcacttacactttgatgaagccttttcgtctcttcgaatagctaattacaaatcattcacacggtttcacatcaattcggatggtgatcttgaagtttatactttggctgttgataaggttccaaaggagtggaagcttgatcctgattgggatggagagacaaaacatccacatgagttgagtcatttaagaaggtttcccagcaaatggagggcagccattgcccacctggatccagttcatacggttaaaattgttgaccatttcgttattggacgcacagataagaatgactgtgctactactgcacctaacgggccagttcaatgatttgttgatttggtttggttatcctgtttgtaacattatttaggaagcaatttgaagaaaaaaaaaatagtagtttccacatatttttgtttcttttttctatttctgcaaggtgagatagttggactagtgcgaattccatggtctttaatgcaagtccctgacaagtcaaacctcggttgaattt

SEQ ID NO: 29608 - DNA, 1079 bp, Glycine max
  Clone ID: UC-GMFLMINSOY084E05_FLI
cacaaagtagcagcttctactttcacaaatcaatgacaattgttttctttgtgggaatgacaaatgccactgccatgcagggatcaattcttgagaatgttcgttggaaagcacttggagttcttttcactgtctgggtccttatacttgcctccgagattgcaaaagttggtagatatgaaatcagcaattccaatccggaatttccattttgtttttcttcctacgtggagtagtgatataattatgcctttgttttcaaacagagtcacacaacaacttgttcagtggaatattgggtacttaatctattacaggtccctgtggcattaggagcgacttcatatcaagctgtgcttctgtacacagggaagagagtgatagcatccaaaggagatcaacgaactcaatggagagcgcaccagctaattatgtattgttcctgtggcatatgcgctggtatagttggtggcttgcttggtcttggtggaggttttattttgggacctcttttcctcgagctaggaatccctcctcaggtgtcaagtgctacagctacttttgccatgacattttcagcatctatgtcagtggtggaatattaccttctaaaacggtttcctattccttatactctttacttcgtggctgtatccacttttgcggcctttgttgggcaagttttagtgagaaagctggttgccatactagggagagcatcgctgatcatttttatcctctccagcaccatttttgtcagtgcaatatcactaggtggtgtgggcatatcaaacatgatccaaagaattgcaaataaagagtacatggggtttgaaaacctttgtacctactcagcctagatattagaattcggattacaaattcaatttcaaggactatataattgacatttttcaattcgaattgttttttatctagtcagaatttttagtagtgttatgtcaagaattttaagcgatgaaaaataattcagcgcttaattttttattttttatttgtcaaacatggctgtatcttggacagagtttcttaaatatataatcaacgatatctctctt

SEQ ID NO: 29609 - DNA, 1223 bp, Glycine max
  Clone ID: UC-GMFLMINSOY084G04_FLI
tgaggttcgaagatggaataagcaggataactggggtagaaagacattgaaagaggccagtgaatccactgtgcctaagattgttggtgagggaatctatggggttggtccagttttggctgcattgtcagctgatcgaagggaattctatgcattgtatgttcaagaaggattggatttgagtggcaacaataggaagaagaaggacaagaaagggtttgagagagttctgaagattgctgaaaagcttggtttgagtgtaaaagaagcatcaaaacatgatctgaatatggtggctgataaccgtccccatcagggtttggttttagacgcttcacagctagagatggtgaaagtaaatgaactggatcctgtttctattgatgaagggaagggttccctttgggtagccttggatgaggttactgatcctcagaatttgggggcaataattaggtctgcatatttttttggagcttctggggtggtgttatgtgccaagaattcagccccattgagtggtgttgtgagcaaagcaagtgcgggatcacttgaattaatggaacttagatattgcaagaatatgatgcaattcttagtgtcttcagctgaaaatggttggcgagttcttgggggctctgtctcctccaaagctattgctttggatgaggttgtgcctggtccaccgaccattcttgttttaggtagcgagggcactggtttaagaccattggtggagagatcatgtactcagttagttaggattcctgggaacattcattttgactcaagtactagtgaattggatggtgaaagtagtggtttaaattcccagagctctggtaaagagttcctctcatttttggccgtggaaagcctaaatgttagtgttgcagcaggtgtgcttattcaccacttaattgggaaaaagttggtagattcatttccagaggagcataaacagattgacatgtctgagtgagactgcatcgcctcaatttatttagtctgatctcaaatagtgtttgttgatggagcacagtttttattcctttgaagtgtagtttgttcttctttatcaatttatcatgtaatcagtttactatcatatgttagtaagttggtctgtgcaactcaggagtcagttcacagttgtgacagcaatttcaaatgaaagagaattgatctctttaaattacaagtcaaggcttcttttggttatc

SEQ ID NO: 29610 - DNA, 1812 bp, Glycine max
  Clone ID: UC-GMFLMINSOY084G12_FLI
ctcattttgttggtctggtcctagagaactgcaatcttccatatgcaaaccacgggcacgttatcttgggtgatccttctcccattttgttttatcccatcagtagcactgagattcggtgtttggttgatgtgcctggccataaattaccttcccttggcaatggtgacatggcccgttatttgaaaacagtagtagctccccaggtacaaatatcctagtctttggcttggcttaatattcaaaacatggaacatattcttcaattccactaatggaggaaattgtgttttaggttcctccagagctgcgtgactcttttatagcagcagttgagaaaggaaacataagaagcatgccaaacagaagcatgcccgcatctccttatcccacacctggtgcccttctcatgggagatgccttcaacatgcgtcaccctttaaccggagggggaatgactgtggctttgtctgacattgttttgctaaggaaccttcttagacccctgcatgatctgcatgacgctaatgctctttgcaaatatcttgaatcattctacaccctacgcaaggttaatatatatataatcgaaagagtttaatagtcatgcaccttagaataaaagtattttctttataaactaattagaaaacatccttattccttagtatgcagtactatgactttggtggttattataaaagtgaacgagtttatcttacatgacagtttgtaattgaataatcgtataagaaacctttacattgttttcttaaccaaataccctgtcatgttttatcagtattggtttgagcaaatttaataggtggttcttgattgtgtttgcagccagtggcatctacaataaacacattagctggggcattgtacaaggtgttttgtgcatcccctgatccagctagtaaggaaatgcgccaggcatgttttgattatttaagccttggaggtgttttctcagatggaccaattgctctactctctggtctaaatcctcgtccattaagcttggttctccacttctttgccgtggctatatatggtgttggtcgcttactcataccattcccttctccaaaacgaatgtggattggagctagattgatttccgtgagtgtttcttgcatttctttatagacataatttttcacatattaaccataacctttgctgcaacaatattctattacaaattatgaataattctagcatgagtagagtgtttaatattcaaataaattcaacacggtctatatattttgattaattgagtctgtaaatgttgtggtcataaaagaattgttcccaaaatattagttaatggtacaacaaaatttatgattttgaaccaagtttgttcttgacattttcagggtgcctctgctatcattttccccattatcaaggccgaaggaattagacaaatgttcttcccagtaactgtgccagcgtattacagaacaccccctaccaatttggaagattaaatacacatcttggaaggaaaggcatgaatacaaaacataatctgtgcccgcattctttgtaactgtgattagtcctaccaaaattaaaggaataagagagcctagcggggaattttgttagaaggctccatacatcagggcactggttttgttcgtgtgcaatatattttgttttaataaaactttttaaacgtattattgtctactttagtttaggacaaaatctaagtttccaagtcaatctttgcaagcatcagaggtaaaaaatgtacgctttggctttaataacaagtccttgatttttggc

SEQ ID NO: 29611 - DNA, 1554 bp, Glycine max
  Clone ID: UC-GMFLMINSOY085A11_FLI
tgcaaaaccgaaaacaaaaaaccaaacccaaacgaaaccgaccaaaatctcgccaatttcactttccgcttcatgtagtttctgcgttcccaactccttctcccgactctaccctgactcgcccgagtccacactcaaacccgcgctcatggcaaataacccttccgacgctcccgccgatgacttccttgaacaaatcctcggcctcccgaacttcgcttccgccgactccggcctttccgctgccgatgtcggcctcgccggtgcggccactcaggctccgatgatgctgcaactcaactccgccgacgccaacgctcacctcgccggcgccgccttccacgcgcccgtgtatcagctagggctgagcttggaccagggcaaaggtgggttcatgaagcccgaggaagcctccgctagcggaaagcgctttcgcgacgacgtcgttgataatagagctaagaatgtttttcatgggcaacccatgcctactactatgcctgctgctccacatcctccagcaatacgtcctagggtgcgggccagaagaggacaggctacagatccacacagcatagctgaacgattacgcagagaaagaatagcagaaagaatcagggcattgcaagaactggttccaagtgtcaacaagacagatagagctgccatgttagatgaaattgtggattatgtcaagttcttaaggcttcaagtgaaggttttgagcatgagtagactgggtggagccggtgcagtggcaccactggtaactgacatcccattatcatcagtcgaggaagaaggtggtgaaggtgcgcgaaaccggccagcatgggacaagtggtcaaatgatggcacagaaagacaggtagctaagcttatggaagaaaacgttggggctgccatgcagtttcttcaatcaaaggctctctgcatcatgccaatctcactggcatcggcaatataccagtcacaaccaccggacacttctagcatagtcaagcctgaaactaatcctccttcatagacctaattcacatgttgcacaatctattattattggtcccatcccaggctcactaatacttgctgggacccacgcctaacgcgttatttgtctgttccaaatcccccccccataaataagtcattggcaagcatcaagttgcaatcaaagtcagatgccataattcttccttttttgcctttctttcagcttttgtcaatacagggttcgatatcaatgccttggaaaagacaagcaaacccctatatcatgtcttgccgtatttcaagtagagaggaagacattgtcaaaagttcaattgatatgcgcttcttttctagtgtcaaatgggtgggggtagtggaccatgatgtaggcgcttttatagtggggcttagtttttgtagtgggctgtgggaccttctaaaaggttagagtgtggtgtgtgtatatttttaatagtagtgaagctgaaatggacaatagttgctttaacaatgctgggctttgccgagtcctgcaaaaaatgatgatgctttttgtttgtt

SEQ ID NO: 29612 - DNA, 967 bp, Glycine max
  Clone ID: UC-GMFLMINSOY085H05_FLI
aagagatcgagccatatttaaatggacgctgtatatatcttgttgatcagtctcttggaatgatgggctctggaaagacaactgttgggaagatattgtcacaagtgctttcttatttgttttttgatagtgatgcattggtggaggaggaggttgatggaacagccgtagctgatatattcaagcacaatggagagcctttttttcgtaataaggagactgaggtattgcggaagttgtcaatgatgcatagatatgtcatttctactggtggaggcgctgttgtgagacccatcaattggaaatatatgcagcaggggattagtgtttggttggatgtacctgtagaagccttggctcagagaataacagctgtaggaactgattctcgaccacttctacattatgaagaaggagatgcatacacaaagactttcatgcgtttgtctgccctttttaaagaaagaagtgaagcatatgcaaacgccaatgtgaaggtctccttggaaacttaatgtttttggtcttgagtttcgggtataaggtctttaaagattgtccaatgatatggcagcaaaattgggtagcagagatgagtcagatttatctccaactgctattgcaatggaggcgctcgaacagatcaaaggctttcttatgggtgaagatggctgttaagcacgtgctagcacaatcttcaacacaaacatgctttagcatggcaatgtggcgtatctttttgcttagaaaaagaatgatgcatgcatgatcaagatgcacatgttttagtttttatgcgtaatttgtgtaagcataatttgacgggtagatgtgatgtttgttgtataatcctcgggtagaatgtgacgtgtatatatatttttgttcttgtatatatacgggtagatgtgatgtttgttgtaatccgaactggatagatcagtttatgcattcttccttttaatgc

SEQ ID NO: 29613 - DNA, 2854 bp, Glycine max
  Clone ID: UC-GMFLMINSOY086A06_FLI
gctaacgataacaataacgctcgccgattagttaatttcttacacacactcttactcttttatctataccaatataccatttgcgttgtcgcagtcacaggcttaaggcaaaaccctaaattctctcacactttcgtcggaatactattttggctttttccgtgacaagatgccggcgaaggacgacggctccgacaaggagaagtgcctcgatctctttctcaagatcggcttagacgagcgcacggctaaaaacacggtcgccaacaacaaagtcactgccaatctcacttccgtcatcgacgaggccggtgctactgatggatgcagccgaacggtcggaaattttctttacacggttgcgacgaagtaccctgcaaatgccttgccgcatcgcccaacattactacagtacattgtctcgttaaaggtgaaaacaactgcccagttagatgcagcattatcatttcttgctaccacaggctccgagaatcttgatttggaccggtttgaagaagcttgtggtgttggtgttgaggtttcagaagaagatatcaaacaagctgttagtgaagttgttgaggagaacaaggctacaattttggagctacgttatcgaacaaatgtgggtgagttgctggggcatgtgcgcaagaggctgccatggggtgatgcaaaagttgccaagcaacttgttgatgcaaaactatatgaactacttggtgatcggacagcagcagatgatgaaaagccttctagaaagaagaaggagaaacctgctaaagtagaggataaggcagctcctgtttctacccctgaaaagtcacctgaagaagacgttaatccatttttaatattccctaatccagaggaaaatttcaaggtgcatactgaagtgccttttagtgatggtagtattttgagatgttgcaatacaagagatctgcttgacaaacacttaaaagcaacaggtggaaaagtcttgacccggtttccacccgaacctaatggatatttgcatattggccatgcaaaagcaatgtttattgattttgggttggcgaaagacagggatggaggttgctatctgaggtatgatgatacaaatcctgaagcagaaaagaaagagtatattgatcatattgaagaaattgtccagtggatgggttggaaaccatttaagattacttacacaagtgattacttccaagaattgtacgaattagcagtggagctcataaaaaagggtcatgcttatgttgatcatcagacacctgatgagataaaggagtatagggagaagaaactgaacagtccttggagagacagaccaatttcagagtcattgaaactctttgaggatatgaaaaatggcagtatcgaagaaggaaaagccactcttagaatgaagcaggacatgcagagtgataactacaatatgtatgaccttattgcatatagaattaagtttaccccacaccctcatgctggagacaaatggtgtatctatccaagttatgattatgcacactgcattgtggattctctagagaatatcacacattcactgtgtacacttgaatttgagacacgtcgtgcatcatactattggttgttgcatgcgttaggcatttaccaaccttatgtgtgggagtattcaaggttgaatgtctctaacacagttatgtcaaagcgtaagctaaatcgtctagttacagagaagtgggttgatgggtgggatgatcctcgtttgatgacactagctggtttgcggcgtagaggcatgaccccaactgcaatcaatgcttttgtccgaggaattggaataactagaagtgatggcactttgatttctgtggaacgccttgaatatcatgttagggaagaattgaacaaaacagcacctcgtgcaatggttgtcctacatccactcaaggttgtcattactaatcttgaagccaactcagcaattgaggttgatgcaaagaaatggcctgatgctcaagctgatgatgcttctgctttctacaagattccattttccaatgttgtatatattgaacattcggacttccggatgcaagattcaaaagattattatggccttgctcctgggaaatctgtgatactcagatatgcatttcctataaagtgcactgaagttattctagctgatgataatgagactattcttgaaattcgagccgagtatgatccttcaaagaagaccaagcctaagggggttctccattgggttgctcaaccttctcctggagttgatccattgaaggtggaagtcagattgtttgagaggctattcctatcagagaatcccgctgaacttgacaactggcttggcgatttgaacccaaattccaaagtgataattcccgatgcatatggtgtgtcttccatacagaatgcaaaagttggggacaatttccaatttgaaagattaggctattttgtggttgaccgggactcgacatcagaaaaacttgtttttaataggactgtcaccttaaagggcagctatagcaaaggtggaaagtagggtccctgaatattgattagaagtaacaaggtgggacaggcaggtctgcgggtaatacttgtttaaatagctacttataatgcatagttttttctttgagggggtggggggttatgtacaaacatatttactggccacttagccatgtacattttcttaagggattactcaatagttccccaattatttaattattttgtttggttggttttgtagtttgaagattttttctgtttactcccaatgtagtaccaaattgctgttattttcctaccattttgtgtaaaattagttctgaag

SEQ ID NO: 29614 - DNA, 1433 bp, Glycine max
  Clone ID: UC-GMFLMINSOY086A11_FLI
tggattagggaggcacaacaagtcaacataattactatatattccccaactgaaatccaaaataagaggtcattgtgggagcatgtaaggcagcagaaacactcattgtccggggacctttggtgtatttgtggtgacttcaacagcataagagaaccagctgaaaggttcggcataagtcaaagggacccagggaacagcaccatcaaagagttcaatgattggataaatgatctggaggtagttgaggcaccttggctgggaaggaaattcacctgggtcagactaaatggaacctccaggagtaagcttgacaggttcctgctctcccctgaatggctggacaaatggcctgcaagcactcaaatcaccttacccagaaacttttcagaacattgtccactattgcttaggtccatatcagttgattggggtcctaaaccttttaggattttagattgctggctatcaaacaaatctttcaaagaaactgtgtacaattgctagtcttctattcagcaacagggttggagagggtatgttctcaaagaaaaaataaaaagactcaaacaaaggctgaaaatctggaataaggagagctatggagacacttacaaaaaggtcaagaagttagaagatgaattaaataaagtggaggaggattcaattcaaagacagctttctaagcaggcattgtcccttgtggtatggctacaatgggaagttgaagcctctgatgaggcttgcttatattaacaccattgtctacccgtttacctcaatcccattgattgcttactgtacgcttcctgcattttgtcttctcacaaataaatttattattcctgagataagcaactttgccagtatgtggttcattcttctctttgtctccatttttaccacttcaattcttgagcttaggtggagtggggtcagtatagaagactggtggagaaatgaacagttctgggttatcggtgggacatctgcgcatctctttgctgtgttccaggggcttctaaaagtgcttgctgggatcgatacaaattttactgttacatcgaaggcatcggacgaggatggggactttgccgagctttatgtgtttaaatggacatcacttctcatccctcctacaacagtgcttattgtgaatttggttgggattgtggctggtgtatcctatgccataaacagtggttaccagtcttggggtccactatttggcaagctgttctttgctatctgggtcattgcccatctatacccattcttgaagggtctcttgggcaggcaaaatcgtaccccaaccattgttattgtttggtccgttcttcttgcttcaatattctccttgctgtgggtgaggattgatcccttcacctctgactccaacaaattaaccaatggtcaatgtggcatcaactgtt

SEQ ID NO: 29615 - DNA, 1730 bp, Glycine max
  Clone ID: UC-GMFLMINSOY086E02_FLI
gtgcaatgcagagatcacgtgaagctcttctacaaagaagaagagctaaaactcaactctctctctcgttgctttttgttttatggcctctaatcttcctcttcagtcgcgctcatggttacactcctacaccctcaggtaaataaatagaaattatggtcttgcttttcaataatcaaaacaatattcttattagtctcactttatcatctatggatctgaagttcgattgtcaaattggaaggaagataagcaccgacagtgtaaaacctctaattctgctaataaatgtttgctcaaagaaactcatgattacattctcccaaattataaggaagattgtgatactcccactgtagtggatgctcaaatgtctgatcacttaccttgggctgtgcctctcggtcttgatgaattcaagagcagggcaattagttctaaaattaagtctggcacttctggttcctctggaagtgttatgcatagagtggagcctggtggtgcagaatacaattatgcttcagcctccatgggagcaaaattattaggttctaacaaagaagccaaaggcgcctctaatatcttaagcagagacaaagataagtatcttcgcaatccatgttccgccgaagacaaattcgtcatcatagaactttctgaagaaaccttggtagatacaatagaaatagctaattttgagcaccattcttccaacttaaaagcttttgaacttctcggaagtctgagctttccaacagatgtttgggttttccttgggaatttcactgcctcaaatgtgaggcatgctcagaggtttgttcttcagcagcctaaatgggtgagatacctaaagttgaatcttcaaagtcactatggttctgaattttattgcacactaagcgtagttgaagtttatggtgtggatgctgttgagaggatgctggaggatttgatacatactcaagataatctattggcacctggagacggtaatgctgataaaatgacagtatcaccccatcctaatcctcctgagagtgaagatgctcatcaaaatacttttggagggatcaattcttatcctgcttcagatatctcttctgcaaatcatgagaaactaaatagtaacgttcctgatccagtggaagaaatccgtcaacaagttggcaggatgcctggggatactgttctcaagattctgatgcagaaagttcgtactctagacttaaatttgtttgttttggagcggtatatggaggacttaaatactagatatgtcaatattttcaaagagtacagcaaagacattggaggaaaagatatacttatacagaatatcaaagaagacattaggaatctcgttgaccagcaagatgctataacaaaagatggaagtgatctcaaatcttggaagtcccatatttccatgcagtttggtcatctactcagggacaatgctgttttgaggtccgaggttaatgaagtccgcaggaagcaagcatctttagaaaacaagggtgtgttagtgttcttagtgtgttgtattttttcaatgctagttatattacggctatctctagatatggctacgagtgtctatagagtattacaaagtgttaatagaacagattgctccaggaaattttgtgccgttagctcttcatggtttctcctattattgaattgtatcattattatttttatattaactctgtgatagtccatttttt

SEQ ID NO: 29616 - DNA, 1724 bp, Glycine max
  Clone ID: UC-GMFLMINSOY086H12_FLI
tctgcttcatataaccaaactcttcactctgcttctgcttctttggaaagcacttaaccaaactctctgtttcagcttcctctgttttttgggtacgaacagagtttctctgtttttgacgatggccataaaggcgattgaactgttgaaagggtgcggatcacaagaagaaataatggaagtgcttgctgcggtggcttcggatttgggggatgtgatcgatgatgtgaacaccttgcaggtgattccactgaatggtgcaatgaccaatgaggtttttcagataaactggccaaccaaaaatggtggtgagatcagaaaggttctggttcgtttatatggggaaggtgttgaagttttctttgacagggaagaagaaattcgaaactttgactgtatttcaaagcatggtcagggtccacgccttcttggccgattcacctctggcagagttgaggagtttattcatgcccgaactctctcagctgctgacctccgtgaccctgaagtatctgctttgatagcatctaagatgagagagttccataatcttcatatgcctggtgcaaagaaggttcagatttggcacagaatgaggaagtggctcggtcaagccaaaagtctgtgctccccaaaggatgaaaaaaattttggcttggacaatctggatgaggaaataaatatcctggagaagaagttatctgaaggatatcaagagattggtttttgtcacaatgacttacaatatggtaacataatgatggatgaagagacaagattaatcactataattgactatgaatatgccagttataatcccattgcatatgacctcgcaaatcatttttgtgaaatggtggcagattaccacagtgacacacctcatgttcttgactacacgaagtatccaggactagaggaacgtcaaagatttatccgcaactatctgagttctgaaggcaataaaccaagcaatgctaaagtgaaccagttagcgaaagctgcagaaaaatacactcttgcaaaccatctattttgggggttgtggggacttatttcgagttatgtgaacaaaattgattttgactataaggagtatgcaaggcagaggtttcagcaatactggataaggaagcctactttattggactcaccaagcatcgtttccctagatgaaactgtgaatggattgatgccatccttcacgtgattttgcttcagatttcttatagcctttttggagatgtagggtgcgataccaaacatgcatttactgaagtttagtcttagtatatatattaatatattaataacacctgaaggtatgatatgcagcatcatatatgtaaacaatatgtaatcactaacaatgtgtgatgagttttggaaatttaaggattgtttaccagtccctctcttttgggattgagttgggggataagagtgagaataagtagtttatattgtttgcaatattgatgggatatgcatatagcaaatagatagatttgttctcgcattttacttacacattaaataatgattgaggttgagatttgatattaatcactcagaagtttttgtttttaactattgtaattagagtatttgactttagaataaaactccaaaatatttctattagtttcaattctttaggtttactataagtctaactactgtattatataatatttctcttaaatatagcattcagttcctat

SEQ ID NO: 29617 - DNA, 1699 bp, Glycine max
  Clone ID: UC-GMFLMINSOY087A10_FLI
gggtttatatgtcaaaatctattttgttccagatcttgttaatgtgtttgaggtgtttctacctcaacttctgctgtatcccaatccatcagaccccttgaatggagaagctgccgctttaatgatgcgtgaccgaccaagttatgaacaaagggttaaagttgttttattttggtcttcctcatgtcagccacaatcaaaatctaagccaagagggactattgaactaacaacattttagacctctgggtagtagatgtagacctaccatcactactcagcaaattggatgtgcacatctgcttgaatgtgtcatgcacatatacactctcacaaacaattataagaactttgttttttataattcttaacctcatttgattatcttattaatatcattaacacaacttgctgctcttctactaactgcattataatctttaacatttcaagtttgatccgccaatggaattgaccttgttgacatctgctaccaatatcatgctgctttgttttatgatagcatcaaatccataacataaaaatgagaaaggttggagtagccgagcaggacaaccatttaatggaacttcttctgtgttataagaacacgagaaattttggttcagctacaattgtagtggtgatataaaaaatgttaaaaagcatggaatggcagaattttgatctctggcaaaatactagtggaagtatggcaatggtatactcagattatagttttaatattttcatttgaaaatttggaaactaaaccaggctttggtggagcttgttttgtttctacttcaagcaaaaccatttttttgggctatgtttggatttaaagaaatggatggaatagtgtaatggaatggaattatattaggttccattgtttagattgtttaaaataaaatggattggaactaaacctaatggagtgcattttattcatttcatccaatgccttgttatctatctagttatctatctatggacaatgaatgctaactttactctatttcgtttcattctattctgcacatcattagatatcccaaaatagccttctttatctaactttttagacagtatctcactttaatattttttaaaaatctaggcttaaattcttctgagaaccaatttctggtttttatttcagaaacaattaaggtttattttttatttaattcacaattgactgatgtgtcattggcttcgatgtcagagtactgtgagaagtatgctaaacccgaagacataggggaagccacagaagagaaatccagtgatgaggagatgagtgaagatgaatatgattctagtgatgaacaggttgttggtaaagcagacccctagctttgcatgcatgtcctgttcttaactttgcattttatctgtacatgatgttcttcttctagttctgttaattcacctcaccacatgtgagcttattatggataaggggggaaattccccttcctttctagtttccctgtcgctgtaaataaagtaccattgatttcctgatgcaatcttatttcatgtttagcactttcaagtgactgtgctgtgctgtttagccatggtaatttaatcaacaatgttagcacacagtgtataaatgacactccttgtattgggtgattcatgtttgttccattaaatgatgtgaatcttactctatttatttagt

SEQ ID NO: 29618 - DNA, 1312 bp, Glycine max
  Clone ID: UC-GMFLMINSOY087F02_FLI
gcatctctcctccacctgaggaacatataataagaactcgtcatggtcgtgtctccgttgctgtgtatggggaccaggacaagccagcgctaatcacgtatcctgatttggctttaaattatgtctcctgctttcaggggttattattttgtccagaagcctgttcactgctgctccacaatttctgtatatatcatattagtccacctgggcatgaggtctctaactttatgtcttgaaattttgggagctgctgccattgatccagatgatccaattctttctgctgatgacttggctgatcaaatagctgaagttcttaactattttggtcatagtacagtcatgtgtatgggagtaactgctggggcttacattcttaccttatttgctatgaagtatagacatcgtgttcttggtttggtactagtttctcctttatgtaaagcaccatcttggactgaatggttgtacaacaaggtcatgtcaaatttactctacttttatggcatgtgtggggtggtaaaagaaatattgctaaagcggtactttagcaaggaagttcgaggcagtgattatttgtcagagtcagatgtagttcaagcatgccaaaggtcattggatgagaggcagagtttgaatgtgtggcggttccttgaagcaattaatgggagatatgacataagtgaaggattgagaaaattacagtgtcgttcactaatttttgttggggatatgtctcctttccacgctgaggctcttcatatgacgtccaagttggatagacgactcagtgccctagtcgaggttcaagcgtgtggatcaatggtaacagaggagcaacctcatgccatgttaataccgatggagtattttctcatgggatatggcttgtacagaccatctaagctgagtgtcagcccaagaagtcccctgagtccctcttgcatttctcctgagctttactctccagagagtatgggtttgaaattgaaaccaataaagacacggatttccgtggagatatagtagtagtagtaggtgaataaagattgccgctctttttgttttgattgttgaacaagtttatatatagttctttgttttgtcaaaaatctgacaagggagggatgtcataaccttgtagatagagggagacttggaaagaaataaacagagggaaaaaaagggggaagagtttagttgaaagcagctgtagtcattctttgatttgtaatcatagactttcgtttggttggtaaagcttcgaaattgttgtttttggacaaataaaaataataaagttcttgtt

SEQ ID NO: 29619 - DNA, 828 bp, Glycine max
  Clone ID: UC-GMFLMINSOY087G12_FLI
cagaagaaggtattaaggagcctcaggcaactttttcagcttgttttggtgcagcattcattatgctacaccctacaaagtatgcagcaatgcttgctgaaaagatgcagaagcatggtgctactggatggcttgttaacactggttggtctgctggaaggtatataaatctgtcattgaaaattgagatagaatttctctctaaatagtattgtaatttgtaccctacaaaatctagaactcaccaagttcttgcacatgtcaaactgcagctatggtaatggaagccgtattaaactacaatacacaaggaaaatcattgatgctattcactccggaagtctcctgaatgcagagtacaagaagactgaaatttttgggcttgagattcccaccgaagtggagggtgtcccttcagaaattctggatcctatgaacactgttagttatcctagagctctctacctatttttttttctatcctttgatatggtatatttgttaacattggagtttttgatgtattgcagtggtcaaacaaaaaggcctacaaggagacactattgaagttggctggattgttcaagaacaattttgaaaccttcaccaactacaagattggcaagggaaacaacaacctgacagaagagattctcgcagctggtccaatcttttgagacaatgttatgcaacatgttgtgtggttgggaatgttagggtggtagataaaatctttccttagaataaaatattgtaccattggtttggttgggctcaaaatgtcatttctagtcttcctccaaaaatgaagtttattttctagtcttt

SEQ ID NO: 29620 - DNA, 1907 bp, Glycine max
  Clone ID: UC-GMFLMINSOY089C05_FLI
aaagagacttggctaaaattacccccagaaacagtacatatgatcagttttgcaggacttattggtgatggagcaccgttgatttctttatccagtggtaaatcaactaatgtcagtgcagtccattccattaaatcggtgaatatggttcacactggtgcaaggaagaatgggttttctcactggattaaaagtggaaaccctttccagcaaaaattaccaacctccaatgaaggtcgtggttactcgcaacctaatggatcagtttgtggtgaatttgacggaagttcaaccaataattttcatgacgataaaacacccagaaagaatgatatcaatcaaatgaatggtgccaattctgtttcagaagatgaaaatgaggatcttcttgctgactttattgatgaagatagtcaactaccaagtcgaagttctaaaccccatcattcaagagctctctcttcacatgttaatgacgaagagaatacaacacaaactggatcttctctctgtctattaaagtctatggataaatatgcaaggcttatgcagaaattggaagtggtaaatgttgagttcttcaagggagtatgccaattgtttggattttttttctattttatatatgaaacatttggtcagcaaaacgctagttcaactggaaaaggcacttctagctctcttaactatcgcctgagaacagctttatccagagtaaaccaagattgtgaagagtggattaagtctcaatcatcgtcaccaacatctttgagttcaccatttgtacatgctgagttgacacctacacaccctcccaatacaaattatggtcactcctcagggacttctttgggtctgaaggaaagatgtgtggctgttgacactatatctcttgttgctcgaatactgaatagatctaaagctcatctccaatcaatgctcttgcaaagtaattcaactatacttgaggatttctatgttcatctggtggatgctgtaccagatcttacagaacatgttcatcggactacagtgagactactgttgcacattaatggatatgttgaacgtgttgccaattgtaaatgggaagtaaaagagcttggcatggagcataatggatatgttgatttgatgctgggggagtttaagcactataaaacacgacttgctcatggaggaattcgtaaagaggttcaagacctattattggattatgggcttgaaattgtggcggaaactcttgttgaaggactttcacgggtgaagagatgtagtgatgaaggacgggcccttatgtcattagatctgcaggttttgatcaatgggttacaccattttgtgtcgctgaatgtgaagcccaagctacaaatggttgagactttcatcaaggcttactaccttcccgagacagaatatgtgcactgggcacgagcacacccggaatacagtaaaagccaggttgttggactggtcaaccttgttgccactatgaaaggttggaagaggaaaaccaggttggacatactagaaaagattgaatgagcatgtcttttgttgtgtatcaagtcaggcaaatagaatcttctgctctttttcccctttgtctttcttttttggcagagcttcgtgtaaaggtagtgtatattgcttggcatttgatcccctattaattatggagtattttccaaatctgtgcgttggtgtcttgtagatagtcctttgaaaataagctgtaattgtactataattttaccttataattttttttatcatgttattcaggtaactgatcggttattccctctccttgattaacataactcgtgagggaatgaattatcatatcaaaattttgtatttatcttttagtttctaaatattcaaaaattttaagagtcctactt

SEQ ID NO: 29621 - DNA, 2018 bp, Glycine max
  Clone ID: UC-GMFLMINSOY089F02_FLI
gctcgagtgagagaaaccctagagagagaaacagagagaggaatggaagagcaaatcaagtccgaattcaaaagaagtggtttcggcctcgaagacgaacaagaaattctcagcaaatgtgtcacttactgcatcaactacagtctcactccttccgatctcgtctcaagctgggaagtttattacctcaatagacagctgaacgaaccaatagtacaaaatactgaaattgatggctttctgttgcatctacaaaatgagaagaaagagactgttataaaggaaaaggaggaagctggcttgcatatttactctatcggagatgtagaaatgatcttaaataatgatgatgatacaaaggataatactcccggaactccaataaatcatcatcaagatcctttatctcctgcacttgatacaacatctttaatgtatgagaatgttttatcttctggaaaaccatcaaaatcaaaactaataacacccttttcaaagagaacagataagtttgtggtgaaatttagcatcaacactgtccctaaagtagagaaggctgaaaatgatgaagatgatgttcttacaagagttccactccatgaaaggtgttcattatccattcacagatcaggacccaaaccaggttgcagatttttgtatgatagaacagaggataggcttaatgcaatagaaaaccgacttaggaaatatacaagggcatttgtagcttctgggctctatgaagaaccaacagaccctacaactgcttcacagagaagcatttttgctgttggcatgatttgttgtgatggagaaggccgtttaaatgagaagtctgtcatgctgcagagcagtattgagcattctggaggagaatgtgttcgcctagatttgcaacgtttaagccattattcaatttttcctggccagatagttggtattggagggcataatcccagtgggcattgcttcgttgcaactaaattggtggattctatacctacctacattgccaatgaggattcaaatcctgcaaagaagcaagctgttgataaggagaatcagccaactgatctgctttgtaaagaaagagaattatcaatgattattgcagctggcccctttactacaacagacaatttgttgtttgagcctcttatagcactgctgacacatgcaaaactaagaccaccacagttgcttgtattgctgggaccatttgttgattctgagcacccagacattaagaaaggaactgtagacaggagttttgatgaaatatttgaggaaatcctgaagaagttggaagaatatgtagattcagctacgcgtgttgttcttgttccgtctatacgtgatgctaaccatgattttgtttttcctcagcctgcattggacatgaaatctcagatagtcagtctcagtaatcctggaatctttgaggcaaataaggttaaggttggttgctgcaccgtggatattctgaagcaaatcagtggggaggagatatcacgaactgcagcagatggaaaacccattgatcgcttgagtagactagcaaaccatattcttaaccaacaaagcttctatccactttacccaccagcagaaggtgttcccttggacttttcgcttgctccagaagcccttcaactgtcgtcgattccagacatacttatactaccttcagacatcaagtactttgtcaaggtgcttagtagcgaaaatgaagggattaaccacacgaaatgcatagccgtcaatccgggaagactagccaagggagaaggagggggaacttttgttgagcttgattattgtgggggttccgaccaaattaacgcttcagttgttggcatatgaatattgaagatgtgttttttttaaggtaaccatttagtttagctatagtcgctgaggcacagaaactgcttatgactcgtgcaccgttatattatatagtttgtaacctgcataatttaagtttgttaaacgaaaattgtaaagttaattccttc

SEQ ID NO: 29622 - DNA, 1345 bp, Glycine max
  Clone ID: UC-GMFLMINSOY089F09_FLI
ctgagattggccttggctctcaacctgcctttaaagttcctgagtatgacttccggtcccccggtgggcttctggattagtgggagggtattatgccccgtctctctttattggtggtgcaactgggatggcttatggaaaattaattagtttggctgttgctgagtctaatcccacaattaacctctctgtgttggaagtggcatcaccacaagcttatggcctgttccttttgcaggttggaatggcagcgactcttgcaggagtttgtcaagtaccacttactgcagttttgcttctgtttgaattgacacaggactatcggattgttctaccacttcttggagcagtaggcttgtcgtcatggatttcatctgtacagacaaaaagaggagatgatggaggggcaaaaaaaattgagttagaaaactcaaattctcctttacttccagaaacatcttctcgtagttcaattgagtcatctgctggtaatacctttgctgaagatgtgtcatatttgagtgatttgtgtcaagtggaaagttcactttgtgtagaggatgataatgttgaaacaacatattttgtaaggagaacatttgtttcagaagccatgaagacgagatatgtggcggtttcaatgtgcacaccgcttatagaagtaatagatctcatgcttgcagagaaacaatcttgtgcagtaattgttgatactgatgatactttaatcggttttttgacgcttagagacattcaagagtatggtaaatttgcaaaagcaagaagcacaaaacataaggagcttttagtttctgaattttgccttttaaatggagaaatatgcagcgtgccatggacagctacacctgatatggaacttcattatgctcaaatgattatgaaggagcgcagattcaatcatgttcctgttgtgaggaatatctatgaaagaacatatccagttggcattatagacccagagagtatcagtctaacatgcagtgctttggccaccagacagtccctcagctaatatttcacactgacttaatcaccgttaggaggctgaagactctttcttggcactataatatctgcctttaacacgtcaagttaaatcctgtcacgttggtttcgtgggtgtacgtaaaaaaaggttcagtggagttcatgtgtatagttatgttcgatgaaagtaaatgtagttccccaagagagaacccttgtaatttgatatagcacgtattgtctgatatttaatttgcagtgatcaatttggtactgcaatataatagtaataccaccatgactttgcaattttcaatataatttcaattttcaatat

SEQ ID NO: 29623 - DNA, 1361 bp, Glycine max
  Clone ID: UC-GMFLMINSOY090F11_FLI
catgaatagtggcaagggagaaaggagttatgcaaacaactccatgctacaaagaaaattaatgattaaaggcaaacatatactagaagaaactataacgagattttatagcaattattctccaagctgcatgaaagtggcagatttaggttgttctgtaggaccaaatacacttcttgtgatatcaaatatcattgacattgttgataccacatgcacccgcttgaatcaagaaccacccacgttccaattttatctcaatgatttgtttggaaatgatttcaataccaccttcaagtctcttcctgatttctataaaagattggatgaagataagggacacaagtttggttcatgctttattaatgctaccccgggatccttccatgggaggctctttcccaataattccataaacctttttcattccgccaacagtttacactggctttctcaggatccattattggagtttactaaggaggcagaatcatttaacaagggacactgtcatatagttagcacaagccctccagctgtataccaagcttaccttaagcaatttcaacaagactttaaattttttttgaaatcacgttcggaggaacttgtgccaggaggagcaatggtcttattgtttcttggcaaaaataaaactcatagaagaactggttgggaaataattagcctagtactcaatgacatgctcttggagggtttgattgaagaagaaaaattggactcctttaacataccagtgtatgaacctacagttgaagaaattaggcatgtgattcaggaagaagggtcattctttcttcaacaattagagattttaatcttgccttgggatgaaggcttaaatgaaggtgttgatgcaaatataaaagcccaattcatggccaaggtcgcaagagcaataatggagcctctcttgtctgcaaagtttggaagagaagttataattgaagtattcatcaggtatgaaaagaaacttgcgcaactgatggaagtggagaaattggagtctactacttttgtgatatccatgacaaaaaatgcttgaagaggtgttgctcaatagaatatttaaatactagtttttaatttcttcctctgtgaacctgttttgttctggtgaaataaagttaaggcgtatagaagaggctgatctagttcaagcttaagatctatatatatattagtatgtcacagatcataaaaatgaatcgtaatacctatgtttctacttgaaaaatatgagataaaatcttataattaagtgcatagcataatatcagatgaacacaatttggaaaaaattgaaaataaaggggaaatgcttgaaacaaattgaaagg

SEQ ID NO: 29624 - DNA, 894 bp, Glycine max
  Clone ID: uC-gmflminsoy091e02_FLI
ttttcatgatcccaccgcaccctcaccaatctctaacattagggtacgcacagcgcggcggccaagccatctcaagccggagctgctcttcacccttcctcctactcggtacaacacaacaacatttgttgtggagtgaatgggtgcgacggaggccaacacgacacttcaagctcgtcccgaaacgacgtcggagaatatcgaagcattgcttgatgctgcaagatacgatgacatggatgatgttaagagcttagaagccagtggtgttcctcttgattccaaggatgaacaagggaggacagctcttcatatggctgcagctaatggacatattgatattgtggagtatttaatcagtagaggggtggatcttaattcaccaaatgaggaaaagaatacacctcttcattgggcatgtctcaatgggcatgtggaggctgtgaagaaattaatcatggctggagctaatgttagtgtcttaaacagtcacgagaggactccaatggatgaagcagtgagtgggggaaagccagaagtgatggatgcgattaatgaagcagtggcactagttgaacttcgtggtgctatggtttttgcacaggaaacttgaagtttatgctacactaactagcttgtaatatgagaaatctgtgatggttatacatgttttcctataatgggtattttgttagttcgaacaagatcatgagtgttttggtatcctcctccctcccaagtttccattatggaattcctcttcggaaaatggaattgaaggagttggaatgaagtggatagttttacttttgaagttaattagttattttttttcctggaaaatcaatgaaatgccatacactcgaatatgagaaattaacattttatttatcc

SEQ ID NO: 29625 - DNA, 1348 bp, Glycine max
  Clone ID: UC-GMFLMINSOY091F08_FLI
tctctctcttctcagtaagggggtggaggacaatgccaatcagcttggaatatctgataaatcaattaattatacaaatgatttgaaacaaaatcgtgttcgtcttttggaaatggaagaggaagccagaaaggagatccctcttgatatgtacctcattttgggagttgaaccatctgtttcgatatctgaaatcaagaaggcctatcggaaagctgcacttagacaccacccagacaaggctggccagtctttgaccaaaaatgacaatggagatgatcagatatggaaggttattgctgaagaagtacacggggatgttgatcagcttttcaaaataattggggaggcatatgccgtgctgtcagaccctgccaagcgggcacgttatgatgcagaagaagaaatgaggaattcccaaaagagacgccatggacctataggtaaaaatagtgtggatgcccagtattacccatttgaacaaagcaacaggagacagtggagagaagttaatagatcatatggtaattcgtcttttcgaggttatgaacctggccgatcgagcaggaaataataaaatctgcatggaatgttaatcccgtgaggatctggattgctgtttgagtatttaaatgtggcctagttagatggtgccttttaagttatccgctgcatttggccttctgaatttacgcactatggtaagttcagtactgcattttgatccagctgttacgcggcttcaatccttcgagttagaagagatccaagaggtacacaattccgcttatgatgacatagcagttggagaagcttggctgaatggctagtcaatgcttccagttactttgggaggtagaatttctcttggaaagagaaagacaacaaacatgcttgcattctatataattgtcatttacagctgaccacgactttgagcgaggagttggtgtttttagcttggctgataaacccagcacatgaaaaagaagcttgaaaattttgcattatggttggttgagtgagggctggtttttttagatatgtaaattttactgacacacgttgatattgagatgtacagacgaaattaacttataccactacaaagattgtaattaccaaagcacagttgggcttgtgtagaaagagttcataaaaattcaacttagcacttgcgagttagtattccaaccaatgttcatctacaaaagtccaaccaatactgtcagagtttttgtttataaaataaattctagtattaggccacattcgtacggccaacgattggcattttgcctagagccataaatatgcaatatattaaagtgtcatggctgttgttttt

SEQ ID NO: 29626 - DNA, 1172 bp, Glycine max
  Clone ID: UC-GMFLMINSOY091F12_FLI
ctgggcttgaaaaggcaaagcaagctttaatggagatggtcattttgccaactaaaagaagagacttgtttacgggacttcgaaggccagccagaggtttgcttctctttggtccgcctggtaatggaaaaaccatgcttgccaaagcagtggcttcagaatcacaagcaacattttttaatgtcacagcagcttccttgacatcaaaatgggtgggtgaagctgaaaagcttgtccggacactattcatggtagctatatccagacagccatctgtaattttcattgatgagattgatagtataatgtcaacaaggttggcaaatgagaatgatgccagcagacgattaaaatctgaatttcttatccagtttgatggggtgacctccaatcctgatgatattgtgattgtaattggtgcaacaaataagccacaagaattagatgatgcagttcttaggagactggtaaagagaatatacgtacctttaccagatgaaaatgttcggaagcttctgctgaaacacaaactcaagggtcaagcattctccttacctagtagagatcttgagaggcttgtaaaagagactgaacgatattctggcagtgatctgcaagccttgtgtgaagaagctgcaatgatgccaattagagagctgggtgttgacattcttactgtaaaggctaatcaggtaagaggactgagatacgaggattttaagaaggcaatgactatcattaggccgagcttaaacaaaagtaagtgggaagagcttgagcgttggaatgaggaatttggctctaattgaagtcatattctgatgcatatatatgcatcaaattatttttttaaaaaaaaactgtgtacataactgaaattagactagacgaaggcatcaaggttagtagctaaaacaatgaatcagggtgcttcttattttgttaatggctatcctgaaatcctattctagccgcctgtctcaaatgactgcctttatttatttttattctttgtatatctttctgattactatatcaagtgattgtaaatcccttcccccgggggttttctgggaagaaaaaagattgataaattgccccggaaatgaggggagaaagacattgaaaacaaggttttttaaacatggcagtatatgaattttaaagctttt

SEQ ID NO: 29627 - DNA, 1893 bp, Glycine max
  Clone ID: UC-GMFLMINSOY091G06_FLI
tccttcaccataatttgcatgaaatcaaacagtgataccagcaaatagtgacaagcagaaaattcatactgaaactaggaggttcattgtagaaggtggaagaagagaagttttccacgaagaaaaaccaacaacaacaatgaaagaaattatacaatgatcaacagcacaaaagaagctgattttccactaaaacaagaaggtctttcatcaggtgatcatgaaaaggctaaggctccatcgacctcatcatcatcatcacaatggctaaaactgaaggatccaaggattgttcgtgtgtctcgagccttcggaggaaaagacaggcacagcaaggtgtgcacaataagagggctaagagatagaagagtgaggctttcagtccctacagcaattcacctctatgatctccaagataggcttggactcaaccaaccaagcaaggttgttgattggttgctcaatgcagcaaaacatgaaattgatgaacttccaccacttcctattcctccaggtaacttcacccttggttatccctctcttgtttcttgtaatgaagttagcacctctcgtgaaggttcaggccagaacactttattgtggaaaccaaaatcaggagaaatggttagtgatgataaagcaaattggatgaatagaagtgaaggagatgatgataataatcataataatagtaatggtaaagaaggaagcaataataatatttgtcatggtggtacacttgttttgccaaataatctcttgccaagaccaaaccatccttcttttttgagcttgatgaacattatgccatcacttggttaccaatgggaggctaataattcagctcatgatgttaatattggtcaatggcaaaaccatggatttcttaaccaaacagatgtacacagcatcaatgtggttccatttccatcaacattggctctatcaactgggagtgatactactactacttctcagattttggtgtgtcctcctcatggagcaacaacacagccatatttcccttcttcacatcatgttgcagcaatggagatgaatgcaagacaaatcaaccactatcagatgctgagttcaagttctcatcaaaatctcttggcaaattctctcaatccatcatcacagcaactcatgagccaatcagagaaattgccattcagcttgggaattaggcctaaacttttccattctcctaacagaagtgaaagccattcccaaaaagaccaggatttgccttccaagtgatgcacaaatagtgcaaaataaagttgtcaaaatttcttctcctcacaagttatggattgatatcatgagggcagtgtgagaagttcattattatagttgcaagacatctttttattcaacgttttgcggtttgaacaaacatttcgttttagtcaaagttatgtttggttaattttctgattttccattcagtttgatctatatggataccaagcaaaggtctacaaaagaatggctttttttcaagggtaagagcttatcctgaagtgatagtgtgattgctacgctaaagggaacgcatgctcagataagttctctctctctctctctctctctcttctacattgagaaaggttggaaggttgaataataatgttatcattttgatagtgcgttttggatttggttaaacatgtttttcgtttgaatcagacaggatttctcagtgtcctatgttatatattatgtctaatttgttaattaattacctttttattaaggaaatcatgttttattctttatttgtgattgtattttccatgagatgagactgagaaaaataatttctccttcatgagttcatgtacactcacccggcacatgaaaaatgatgcatagacacttgtttgc

SEQ ID NO: 29628 - DNA, 1597 bp, Glycine max
  Clone ID: UC-GMFLMINSOY092A09_FLI
acgcccttgagctgaagcttcaatctccaatttggcaggttcgcatgaaagctgtttgtgtccttgaggccatccttagaaagaaggacgatgatcacttttcaccagtggaatcctacttcactgaaaataaagatgtggtgctgagatgttctgaatctccccaagcctctttaagggaaagggctatgaagtaatgaaaaaactagggaaccaggaagaagaaaaattggtcatttagagtcaactaaggttcttggccttttaggtggaggccagccaaacagctctacagttaattcagagaagactgtgaaaacagagaatgctactgttgctgagttgcctgacttgatagacactggtgattcaaatgattaccatggaactgatgacactctaaagggtacaagtgatcaaaatatagcaaatttgacatcatcaactcctctggttgatgatttatttggagattttagtgcttctattggagctagtcaagaactaaaaaatgatgatccatttgctgatgtatcatttcacacaaatgagaacaaagaacatgcagatgatctcttttctggaatgactgttggtagcaataagcagggcgatcatgagagtcacaggcaggggaatataactgaacctcaactttttgacatttttgcttccaattctgaacaaggaaaccataaggagcctgttagtgatttaatggccggtctgtcaatggatgaaaatacctcaagtacgaagcagaagggaacatctcctttcatgcaatctgaatctttattttcaggtttgaataaccatatccctgacaatacttcaggtggcatgttgagctctcagccaatggggtttaatgtaaatcctatgtttcccactggtcctatgccttataatatacagcctggtttcatgttgaaccaaccttattcttcccagcctctcaattacggtgccatgggaactcttttggctcaacagcaattcttggcaacaatggctaatttccaacaccttagtaatgtcaacatgcaagatgatggtgttgctcaaattgccggacctaatggaagatcacctttgccagacatatttcaaccaaattttcaaactcaaactcctagctcaatgatcaacacttcaaggaaagaagaaactaaagcatttgactttatctcggaccatatgtcatctgctcgtgattcaaggagaatgatttaaattttctatcttgtgctgttgtggaggatatttacggtgtggaattgatggattgacattaatagatcaaacagtttatagtttccttacctgtgcaaaaagttgatttctcttgccgtgatggagcattataaatggcattctacatgtccatgttgacaacaaaataataaaatgagaatacgttttggacatgaagaagagattcaaattggttgcgcttttaattagattttagcatgagaatgttgtgtagcactgtaatgttatatttccatgagtatgttgtgtatgtagttaatggttgagattttgcaactgtaattcaggcatcaagtaaaatacaactctcagattttgc

SEQ ID NO: 29629 - DNA, 798 bp, Glycine max
  Clone ID: UC-GMFLMINSOY092G02_FLI
ggctcctgaaggccgtcatatccttcatatattcacaacttcttccatggaggactgggagggtctctcaagagtagaatatgaggcaaagaagcagcttgtagcagatgaaatcacaagcagattagagaataaattgtttcctggtcttagatcatccattgattttatggaggtagggacacctaagacacaccggcgatacctggctcgtgatgagggaacttatggtccaatgccacgcagaatcccaaaggggttattgggaatgccattcaataccacaggcatagatggtctttactgtgttggcgatagctgcttccctggacaaggtgttattgctgtagctttctcaggagttatgtgtgctcatcgagtagctgcagatattgggctggagaagaagtcacctgtgttggattccatgctgcttcggttgcttggttggttaaggacaatggcatgagatatataggagcatttgttggatgcagtatcatcatcccttttgcataagaagctcaactttcattacagcattggttcactgcagatttcttccacaattttcaagagtcaccaaattgtcacagtatatagatgctgttagttgcaatttgatccatgcagtggcagagcttggaaaaaataattgaaggggccaaagtttgaagtgtataaatttaatgcaataattttgataatatcatgtcttataggtgttttctttccccttgctgaaggatatcatgtcttacaggtgatttaagtaattgatggtaatatttaaatatt

SEQ ID NO: 29630 - DNA, 295 bp, Glycine max
  Clone ID: UC-GMFLMINSOY092H04_FLI
cgatgatgttagaaaccacggattagcaggctagcagcagcagtgagaactgaacgatcggcatcaccataataatcctccttctcactgctgctgctagcctgctactacgatgatgttagaaaccacggattagggagtgtacaaaacttctaataacccattttgtaggattatttcattgatttgtttgtttatatcatctggatatgtacgcggattaaggatcttatgtaagtagaagcaactgttcttccgtttgcttttaaataatattgaaatattactcttcgct

SEQ ID NO: 29631 - DNA, 2666 bp, Glycine max
  Clone ID: UC-GMFLMINSOY093D09_FLI
tgttaacaatggtttcaatttcaaatctacgccatagttcttctcttcctataaataccaaatcccaatttctttctccacgtccacacacttttctttcaggcacccatctaagactacccgataagaagcaactctcaatttctgattttcgaattcgcagacatttctttaatcgagtgcttccggtggtatcattcaagaggagagtagaggaagataaagagatgacgataaaacctgttgttcgtgtttcggaggggaagctggtggtgaaggagcgaacgattctgaccggaatgccggagaacgtggttgaaacatcgacagtggaaggaatgtttatcggagtagatttggagaaggaagacagcagacacgtggtttcgctgggaaagttgaaggatgtccggttcatggcgtgcttccggttcaagttgtggtggatggcccagaaaatgggagatcgagggagagacattccgctggagacgcaatttctgttgatggaaaccaaagatgggtcccacctcgagtcagataacgacaaaaacaagaaccagatcgtgtacacagtttttcttcctctgctagaaggctcattcagagcgtgcctccagggtgactccgacgaccagctccagctctgtctcgagagtggcgacgccgaaaccaaaacgtcgtcgttcacccacgctctcttcgtcagcgccggcattgaccccttcgccaccattcaccacgccttccgtgcagttaggaaccacctcaacacgttccgactccgccacgagaagaaactccctggcatcgtcgactgcttcggctggtgcacctgggatgccttctaccaggaagttactcaggaaggagtcgaggccggaatcaaatccctagccggcggaggcacgccgccgaagttcgtcatcatcgacgacggatggcagtccgtcggcggtgacgacgacaaacaaaactcaaactcgttgcagaggctgacgggaataaaagagaacggcaagttccagaagaaggaggaaccggaattggggataaagaacatggtggaggtagcgaagaagaagcattcagtggagcaggtgtacgtgtggcacgcgataacgggctactggggcggggttcgtccaggggtgaaggaaatggaagagtacgggtccgtaatgaagtacccaaaggtgtcgagtggagtgacagagaacgagccgacgtggaaagtggacccgttagcggttcaaggcttgggcctagtaaacccgaagaaggtgttcacgttttacgaccatttacacagttatctggcgtccgctggtgtggacggcgttaaggtggacgtgcagtgcattctagagactctcggcgcgggactcggcggaagggtggagctcactagaaattaccatcaggcccttgacgcttcgatttctagaaacttccctgacaacggttgtatcgcctgcatgagccacaacacggacgcgctctactgctccaaacagacggcggtggtgagggcttccgatgatttctacccgcgtgatccggtgtcgcacactatccatattgcgtccgtggcgtacaatagcgttttccttggggagattatgttgccggattgggatatgtttcactcccttcaccctgtcgcggagtaccacgcttccgctagggccataagcggcgggcccctctacgtgagcgacgcgccgggggagcatgactttgatctcctcaggaaactggttttgcccgatgggtcggtgttgcgggcccggctcccgggtaggcccaccaaggactgcttattcaccgacccggcccgcgacggggttagtctgctgaaaatatggaacatgaataagttgggtggggtgttgggggtttataactgtcaaggtgctgcgtggagtgctaccgaaaggaagaatgcgtttcaccatagtacggattctggtgctgctgtcatcacagggtatgtgaggggttgtgatgttcacctcattgcggatgctgctgctgatgatgattggaacggtgattgcgcgctctactctcactactccgggcagctgattgttcttccgcacaatgtggcacttccggtgtcccttaaggtgctggagcacgaggtgtatgctgttgcgcctgttaagaaggttttgggtggtggtgctggctgcagctttgcggctcttggacttgtgaacatgttcaatgctggtggtgccgttgaagggctggtttacgagcaggggttggttcgtgtggaggtgaaggggtgtggtaagtttggggcttattcctcggctaaaccaacaaggtgtatgctgggaaacaatgaggtggtggatttcgattacgacgctgattccggcttgctcatcttcaacatagatcatttgccgcaagagggacacagggttcacttagttgagttagtttatagtctatcttcttaattatttagttaccatattgttgaatcagagagggagaggatattggtatggtggtgtggtggtatttctttcttttgctggataggatacagtagagggttttcaacaatttctactttgtaagatttcacgagccatctttgttttcgaattttgatagaaattgaatacatgtttcttactctagtt

SEQ ID NO: 29632 - DNA, 465 bp, Glycine max
  Clone ID: UC-GMFLMINSOY093E05_FLI
cacgcatccaagcccagttatgggtcgctccaacaactttggttcggtaattatgtctggatctgctggaaactacatgtcccaatattatcagcagcagcatcaacaagtccacatcgatgcattgtcctctttgggtttcctctcttcttcgtcttcaaggaatgccacttttcctcaagagactgccttgttaagtgactatgggcttcttcaagatgttgtttcttcacatatgttgaaagaagattagatgattacttcattactgtttttatgtgatttcttgttattagtttctgtaggagaatatagatgaggactttgttgctgcactgggatatttaagttttagttttcattctcatcatgatcacacttgtaaaacccacgttatctttttgcacatatactatataataggccttggcatgaaaattattgtaacatgatggattttgatcc

SEQ ID NO: 29633 - DNA, 695 bp, Glycine max
  Clone ID: UC-GMFLMINSOY095E02_FLI
caccgccgtccgccaggacctgtccggacaggtgcaggccatgacgcaggacttggcccgcatgaccgcagacgcgaaacgggttccggcgctgagggctgatgttgaggccatgaaacaagagttgcagtgtgcaagggctgccattgagtatgagaagaagggatttgcagaaaactatgaacatggtcaagtgatggagaagaaattggttgcgatggctcgggagatggagaagcttcgtgcggagattgccaatgcagagaaaagagcacgggctgctgcagcggctgggaatccaggtcaagggtataatgcaaattatggcactgctgatgttggatatgctggaaatccttaccctggcatttatggcatgaatccagtacagcctggagtggagaattttcctcagtatggacctgggcctgctgcttggggcgcatatgacatgcagcgagttcaaggacaccgataaattcctgttgaggaatcttataactggtatcttgggttgcaactatctagatgattgattcagggttttaagagttatctactcatgaacgtcatggaatttgtctattagatggtccttgaagttgtacttatattaaaaagctcatatgtaggttgatggtgcagtagatgatgtttatctacggtgtcaaataaaggacattttgctttatatt

SEQ ID NO: 29634 - DNA, 1081 bp, Glycine max
  Clone ID: UC-GMFLMINSOY096E04_FLI
gttgagtttgtatggctcggattacagatatacaaaaaacgattgaaccaaactttctttcaattgattgcgtggatgccgcaaatttttcgtgtttctcagatgggtccccgtgtgttatgggaattgatgaggcggggaggggtccggtgctcggaccgatggtttacagctgtgctattgtcaaggcggacggcttagcaaagctggactcaatcggggtcaatgactcgaaggctttgaccagtgccaaacgaagagaaatattcgcgaaaatgcaggaactaattgcgtctgttgacccaaaacaaattctcacatattctcttcgcattgtccatccccgcacaatcagtgcgcaaatgcaacggcgcgtcaaacagtcactcaacgaaataagccatctttgtgcaatttcactcatcgagaaagcaattcagaatgggatttgcattagcgaggttttcgtggatttagtaggcaacaaagaagaagtgtatcaaacctttctcaatgagcgttttcctacactcaaaatcaccgtttccaaaaaggctgatgcaatttttcgcattgttggcgctgcttccattgttgccaaagtgacgagggatgacaaattggccgaatgggtctttgacgaaattggttttattgcgcctgaacgaggattggggtcaggatatccgtcagacccaataactaaacacttcattcgcactatggtggatcccatctttggctatccgtcgttggtcaggttcagttggaaaactgtcgaaagggttctcgagaggaaagcaatcaaatacacatgggattcttcttcctcacttttggacacatcgaaacaatttacactcactgaactttggacaaaagcgaaagtaacgaaacactgtcagacgaagaagaaatatcggcggcactcatttttcactgaaagaggactctccaacacgacggaactcagctgacggggccgaatttaggatgatttaacaggaaaagcatttcagttactttgagctcagggaaaaattcgttttgtataaacttttggtaaattattcgtatgtac

SEQ ID NO: 29635 - DNA, 1226 bp, Glycine max
  Clone ID: UC-GMFLMINSOY097B09_FLI
cttctttctccaatttcctctctcacatcacgtcacatcacatataaccatcttcttctttgaaaccttaaattgtgctcaaaaatactatatagttaattaaggttgtgtgaaaatgcgaatgagttgtaacggatgtcgtgttctgcgcaaagggtgtagcgaagattgtagtataagaccgtgtttgcaatggatcaagaacccggagtcacaagctaatgcaactgtttttcttgccaagttctatggtcgtgctggcctcatgaacctcatcaacgctggtcctgaaagccttcgtcctgccatttttcgatccttgttatacgaagcatgtggtcgaattgtgaacccaatttatggttcggtgggtttgctatggtccgggagctggcagctatgtcaagccgccgtggaagccattttgaaaggcgagccgatcacgccgataacatccgaagccgcggctaatgggcgggccccaccactcaaggcctacgacatacgccatgtgtcaaaagacgagaactcggcaaacgaaactccaaaggccaagacccggtcccggttcaaccgaaccggtagcacactcattaaaccaaaggctagcaagggaaccccaactgggttcgttccgattgaaccggttgaaccggagacagcaaaccggaccacaagccacgagtcggggctgagccacttgtcggaagccgccgtgatggtggagggagaaagcaaagaaagcgaaagcgatgtgtcagtggaaacttcgaatctatttcacgaagaaccggagtcggttgcgaagacgagtgatcgaaccggtgaaagtggtaatgaaatcggcttggaattgacgctcgggtttgaaccggtctcacgtgtgcatcacgtggttccaatgaagaagagaaagataattgcgtcgaagagttatggtgactcggctgagaaagactcgtgtaagatggagctggggcttgagtacccggcttgaataatggctcgcttggatttggcttaaccggctttattctctagaaacttgtaggtgagatgagaaatttagaagcagttgttgttattatgcttcttttttttttttttaaatttttttttacaacttgggttaatctttgtgaatgcggtgttgtacaaacatggttgatatcaaaatatgtagagataaaaagaaattagagaattacaagtatttattgcaaatg

SEQ ID NO: 29636 - DNA, 1772 bp, Glycine max
  Clone ID: UC-GMFLMINSOY098D02_FLI
gccaaaccatatctcaaccaaaactattacctctctctcttttctctctaacaaacactccataaacggaaaagaaaagccacacaacaattaattaagttgttaaatttttgtgagatggagaggagtttatcaggaagtagtgaagaggagatgtcaataacgaaaggtccatggacagaggaagaggattctgttctcttcaattacatcactgtccatggggaaggtcactggaactctgtcgctcgctacacaggtctaaaacgaacaggcaaaagctgcagattaagatggttaaactacttgcgtccaaatgttcgacgtgggaacataaccctcgaagaacagctcttgattcttgacctccattcccgttggggcaacaggtattatcatttatgtttattattcattaaattttttaggttaaaatattccttggttcatgtaatttttcttatttttagtctcttgtacaagaaaattgtaaattttaatcccttcacatgcatccatgtttgctaaagttttggttcgcgtcactactaacatatatggaagactttttaggttttagtagtataaagcagccacaaacactttctccaattaatataagccgctaaaaaaatgttgtacatacattaaaactgaaaaatgtttgagaaacactcaatataccatcatatacttaatgagaaaaatatagataggaggtaaataaaatctgattaataattatttttatcaagaagcaaactcaaatattattcaaatgattcaaccttaatttcaacagcacatgaattacttatgctgaatcccctaattaggtggtgatttcctgcacagaactgaaacttaagatgaagcaagcaaatagcagtttgaccaatttttaatctgttagtgatagaacttggtaattgaagtgatgttgtgttatttgttttataaaatgaaggtggtcgaaaatagctgaacatttaccaggaagaactgacaacgagataaagaactattggagaacgagagtggtaaagcaggctaagcaactaaagtgtgaggtgaacagcaagcaattcagggacacgttgcgttttgtgtggatgccacgtatgttagagcggatccaagctcaggcctcatcatcatcatcatcatcatcaggccaagcccaccaaaccacgttaatctccaacgctcaagcacacagtgacccttgcggagtcatgacgaccaacccaagtttgttgtcggaggtgtcatcatcagcccttgatgcccacgcgccttctctctatgactctagtgcgtcttacaatctaatgggtggtggtagttcctcatcgtatagtgcagaatattgctactactcggacatagcaggaaatggttttggtggttcggacttgtggacggatgaaaatatttgctttctgcaacagctgctcgctgatcatgacttgtcgtgaaacatgcatctttgttttaaacttaggtgaaattaatttgcatctatcaagtatcaacgtaactattattatgtatacttcaattaatttcaagagaactgctatttgttgtaaatttaatttagcctgatttctaagagataatgatgagtattttaatttcccagaagacgattttgttcacaacaaatagaattaataatagagtaataaaatgtgattcgaaaaaatcatacaaatgcatgagtgtaagtttttgacagaaataacatgtgatgagttgtatttggctgg

SEQ ID NO: 29637 - DNA, 1154 bp, Glycine max
  Clone ID: UC-GMFLMINSOY099C05_FLI
aagaggttcacctactcagaaatcaaagctgccaccaaagatttctccaacttaataggcaaagggggctttggagatgtgtacaagggtgagttacctgaccatagagtggtggcagtgaagtgcctcaagaatgtcacaggtggagatgctgagttttgggcagaagtcacaatcattgccagaatgcaccacctcaacttggtgaggctgtggggattctgtgctgagaagggccaaaggatacttgtctatgaacacatccctggtggatcattggacaagtacctcttcagggtcaataagtctcataacaataaccatctcaaggagcaatcaagtagtttgaatccaaacacaccacaacaagaaaggcatgttttggattggagcatgaggtacagaatagcccttggtatggcaagggccattgcctacttacatgaggagtgtttggagtgggttttgcactgtgacatcaagccagagaacattctactaggtgatgacttttgtcccaagatatcagattttgggcttgccaagttgaggaaaaaagaggacatggtgaccatgtctaggaggaggggcacaccagggtacatggcaccagaatggatcactgcagacccaattacctcaaaggctgatgtgtatagttttggcatggtgcttttggagcttgtgagtgggattaggaactttgagatccaaggttctgtggttaggagtgaggagtggtacttccctggttgggcctttgataagatgtttaaggagatgagagtggaggagattttggatgggcaaattagggatgcttatgatagtagggcacactttgagatggttaataggatggtgaagactgcaatgtggtgtctgcaagataggcctgagttgaggcccactatggggaaggtggccaagatgttggaagggactgtggagatcactgagcccaaaaagcccactgttttcttccttggtgaagagtagattcatgataaagtttctgtgtgatgttcagcctttcttgtttaagtttctctcgttatatctcttgtaccggcatggtagcatgtatgctcaatagttggaacgatggcaaataaattgggtgatcaagtgtataaatattacctttgtttttc

SEQ ID NO: 29638 - DNA, 2030 bp, Glycine max
  Clone ID: UC-GMFLMINSOY099C12_FLI
gaaaaacagcattaacacaaataaactagaaaacatttttttttctcgttattctccggttcctcgcaggcaccaattccacatatctgcgtgtaaatactccaacttgtcccaattcacacctttgcctcgcgattctccgatgcgttacacctttgtccaccgattcctctttaattttcttccctttttcccccaattcaactaaattttctgctatctatattcccaggtaagtaaagtcagatttttcttggtggacggacatgcagaagaaggctgcactcaacttccaagctttcctctagaacaaaagcaaagattatactgtcataaaaaggttttgtacttattttaatgggtgctcctaagcagaaatggaccgcagaggaagaagcagcattgaaagctggagtagtcaaacacggggctggaaaatggcgcaccatacttacagacccagagttcagttccattttgcgcatgcgttcaaatgtagatctcaaggacaaatggaggaacataaatgtgacagcaatatggggatcgaggcagaaagcaaagctagctcttaaaaagaacctactaccatccaccaaaattgacaataaccacttggccttgagtactgtagttcaacgtgacaaagaagttgcaaatcccaagcctttggcagtttctagtgggacatctcctaattcaaaggaaaaaatatcgaagctacagaacttccagttggataatcttatattagagtccattatcaagttgaaggagccaaggggttctgaccaggcagcaattgctgcatatatagaggatcaatactgttctacgccgaccctcagaaagttactgtcaacaaaactgaagcacatggtggctagtggaaaattaatgaaggtaattttactgttagttaatcccttaacaaggcacattgttcttggcttattggaacttagtttcccaataatcaacatttttatctgcaaacctttgtaatgaagcatagtcagtctggataaattttagatcatgtatgacagatactttactgacaacattttttatgttatttattgaaggttattgacaaaatatgatttgcgacaagaaagtaattggttatatgtgtgcacagatgtgaatagaaatatgttctcttgtggcagttgaactatgcatatctgggcacgctctttagcaggagtgaaaaaactattttgaattgataaaattttcccatttaataaactaatattactgttaaataaatattgggtatgcaattaaactctatttggtcaatagatcctgagtgtgacatatctaacgagtaatgacaggtaaagcataagtacaggattgcaacaaatttaacaatatctgagaaaagaagatgctcttccctgttactcctggaagggaggcccaaagattctccaaaagcagagaagactggtgtcaacatcctttcaaaatccgaaattgatgcagagctatcgaaaatgaagggtgtgacacctcaagaggctgcggcggcagctgcaaaagcagttgcagaggcagaagctgccattgccgaggctgaggcagcagctagggaggcagatgctgcagaagccgaggcagaggctgcacgagtgtttgcaaaagcagcaatgaaagcactaaaatgcaagacacttcgtatttgatggtgtcagcttctgcgttgctgacatgaggagtatttgagatcataattctgctgctagacttcctgcatgtattcaattactgtacataatttaggcttgtaaatttggaatatgcgggattgatctatgaaacgttttgtcaggagtcattatgagcgtattatttatttatttattttgaccttatttttaagaaagacaatgaggcgagagtacaaagtattagtggaagagtggaatcagtgatctagtgttatgatggaatgtgtgatagacatcctctattagtaaatggaagaatacaatttttattagagttccaatgac

SEQ ID NO: 29639 - DNA, 1257 bp, Glycine max
  Clone ID: UC-GMFLMINSOY099E02_FLI
ttttttcctttctctgctctttgccttctctgacacatttggtgccttgtagagcgtgttttggcaggaaggtggtatggcgaaggacgttgaggttgctgagcgtggctccttctctgggaaggactaccaggaccctccaccagcaccactcattgatgctgaggagctcacaaagtggtccttttacagggctctcattgctgaattcattgccactttgctcttcctctacattactgtgctcacagtcatagggtacaatcaccagactgacctcaaggaaaatggtgaaatctgtggtggggttggcattcttggcattgcatgggcctttggtggcatgatcttcatccttgtctactgcactgctgggatttcagggggtcacattaacccagcggtgacatttgggctgtttttggctcgcaaggtgtctttgatccgagccatcatgtacatggtggctcagtgcttaggtgctatctgtggagttggtttggttaaggctttccaaaagtcttacttcaacaagtatggtggtggggctaattccctcgctgctgggtacagcacaggtactggattgggtgctgagattattggaacctttgttttggtctacactgtcttctctgccactgaccccaagaggaatgccagagattcccatgtgccggttttggctccacttcccattggatttgctgtgttcatggttcacttggccaccatcccagtcactggtactggtatcaaccctgctaggagtcttggagctgctgttatctacaaccaagataagccatgggatgaccattggatcttttgggtaggaccatttattggggcagccattgcagccttctaccatcagttcatcttaagagcaggtgcagctaaggctcttggatcattcaggagtaacccccataattgagttgtctttctcttccttatgatggctctagtggaaagaagataattggagagatgggggttgatatggcaagtttaataataattgggaatgcttttggcttgtgttttgcaacgtttctttgaccctctcgattatgtcttcaagattgtggataagtgtagattaaagtctctttcatgacagggggagccttttgcactttcctctgtggtgttcttccctttagtgtgtcatttttttcttttaagttattctcttcagctgtcatctctgtactcaaaatatatttatggaaaatgttaaattttaatttt

SEQ ID NO: 29640 - DNA, 2218 bp, Glycine max
  Clone ID: UC-GMFLMINSOY100E04_FLI
caactaaaccacaccattcgcatcaacacagcacttgtttgttcccaactccgaaaaatatcatgctcctaacgtaaaatcctcggtttcaacgttcaaccgcgatctcaaaaaacaaaactatggcatcactctcaggcatttgctcctcttccccgactctcaaaaaattcccaaaccaatccccatcgttgaccgaccctctccgcaaagaccacgtgtccttccccgcacgcctcgccgatcggaccctcagcctcgcgccgctccgtgcggtggctcgggaggtttccgacggagcgttggcggcggcggtgaagaaggggttggagaaggatccgcgcgcgctgtggcggagatacgtgggttggctataccagcacaaggaacttgggatttacttggatgtgagtcgggtcgggttcagtgatgagttcgttaaggagatggaaccccgtttccaagcggcgtttcgggcgatggaggagttggagaagggcgcgatcgcgaatcccgatgagagtcgcatggtgggacactattggctgagggaccctaagcgtgcgcccaactcgttccttaaaacgcagattgagaacactctcgacgctgtttgcaagttcgctaacgacgtcgttagtggtaagattaagcctccttcgtctccggagggtcgatttactcaaatattgtctgtgggaattggaggttctgctcttggaccacagtttgttgcagaagcattggcacctgataatcctccactcaagataagatttgtggacaacacggatcctgctggaattgatcatcagattgcacaacttgggcctgagctagcttcaacacttgtgattgtgatatcaaagagtggaggtactcctgagaccagaaatggtttattggaagtgcagaaggcctttcgtgaagcaggcttggattttcctaaacagggtgttgctataacacaagaaaattctttgttggataacactgccagaattgagggctggttagctagatttcctatgtttgattgggtgggaggtagaacgtcagagatgtctgcagttggcctgcttccagcagcccttcagggcattgatattagagaaatgcttgccggtgcatcattgatggatgaggctaataggagtactgtgttaaggaataaccctgcagctctgctggctttatgttggtattgggctacagatggtgtaggatccaaggatatggttattcttccatacaaggacagcctgttattattcagtagatacttgcagcagctggtcatggaatctctaggcaaggagtttgacttggatggtaatcgggttaatcaaggaattagtgtctatggaaacaaaggaagcacagatcaacatgcctatattcaacaattgagggaaggtgtacacaatttctttgtaacattcattgaggtgctacgtgatagacctcctggtcatgattgggaacttgaacctggtgtcacatgcggtgactacttgtttggtatgctacagggaacaagatcagctctgtatgccaataaccgagagtccatcacagttactgtacaagaagtgacacctagaacagttggtgctcttattgcactctatgaacgagcagtaggaatttatgcctcccttgtcaacataaatgcttatcatcaaccaggtgtggaagctggtaaaaaaagcagcaggtgaagtactagcacttcagaagcgagtgttggcagtgctaaatgaggcaagctgcaaagaacctgtagaaccattgaccctcgaagaagtagcagaccgttgccatgctcctgaagatatcgaaatgatttacaagattatcgcacacatggctgccaatgacagagcattgattgtcgaaggcagctgtggttcaccacgcagcatcaaggtttttcttggggaatgtaacattgatgggttgtatgcatgagttagacgactaccagaattcatgttttggtaatgttgcaattgtgtttgaatacacggaccaacagaagagaagttgcctgcaataatttggtttcaatgttgaatctccatcattaacgaaagtggaaatttctgttaagacaaattcttgaaagtgttttggtgttctgaattggaactacgtgtaaccaaatggagaatccagtgggtaaatataattaataaaattgttcctttcgctgcct

SEQ ID NO: 29641 - DNA, 2430 bp, Glycine max
  Clone ID: UC-GMFLMINSOY100H07_FLI
attaatacaatgatagaagataacgatgcacgagctttgatggctgcaacagctttaaattcttgcaaagagacccttgctaagttgcaagagacacaggcacaatcatctgaagaggctaaagaatcctaccaaagggttaaggaagctcgtgacatgtttgaaaccattagaggccaattcatttctaaacttaatagtcaagaagaccaaggaactgaaccaaaaagcatagaggaagaagacatgtctagcttggaagaagaaaggcatgagcctgatgtggagttgttgagagacacgattaaggaaaagcttgagaaagattcaggtagctccctctctatgacagaaatgacagagaagattgatgagcttgtaaataaggtgattaccctggaaatcgcggtctcttctcagactggcttggtaaaaagactaagatcagaagcagataaacttcaaaaaaacatactgagcttggaagaggacaaggaagtgctgacagaagattcagaaggaaccaaaaagaagttggaagaagtggaggaggagttgaggagagttaaaattctctatcaaagtgccaataggcaagacaacagtctccaaacacattttgctgaagctagttgtgatcttgaacatctttcaggaaaattgaacgatgtgaagctagatgaggagggggagaacttgcaacttcacaaaaacaaaagtgcacatgatggagaaataaaagtggagtttgaaaaatcaggtgataacacagaacacatgaaagatgttgagacagcaaaggaagattgcagtgtaaattttggtgatgttgaaaatgaagataacaagtccaattcgaaagaaaatattgattttaggactgaagagattccagagcaaatgctgcagaataaggatgatttgtctgaggcaaggagtaatcttgacactgaatcacttgatcaggggactggtgaggaagaaaatcaatccaacaggagtcagatgatggcaagtggactagatgacggagaaaagattctgacggaattcacatcagttttaaagaactacgaggatgtaaaggacgagctcaatgatgtggtgaagaaaaaccaggacagcattttccagttggcacttcaggtgagggaattgagggatactgtagaaactaaagatcaagagataaacattttgcaacagatgctgacctgctcaaaaacaaatccagatgaaagtccttccacgcctctcacagattataaacatacaccacaagaagcacttcttggaactgcagctcaaggaacagaccctcaggaccctgaaaatccatcttcaaacacaaatgcaagtgcagttactacttcttatgcagggcaacaccaaaaatatgttgaaaacaaagcaaggattggcatattgatgaaggtgagatcaaaccagcttgataggacccactcactttcaaccttggaaaagaaatttcgttccaacatggatgacttgctagaggagaacttggagttctggttgaggtttagcacctcagtgcaccaggttcaaaagttccaaagttccatacaggacttaaaatttgagcttaaaacaataagggacaacatgtcccaagagaactcaagttctatacaatctgagataaaaccaatatttagacacctgagagagataagaaccgagttatcgctatggctggaacacagtgaagagttgcatgaagagttgcaatgtaggcatccatcattgtgcaccttacaagatgaaatagcaagagcagccaatccaaactctgcatcatcaaataacatggcaaaactaagtggatatcaggctgcaaagtttcaaggtgagattctcaacatgaaacaggagagtataaaggtttctagtgaactgcaagcatgtgtgagttttgtgaaggaactaaaaggtgaagttgagaagatggtagaagaactgagtcaggaagttggagttaacaatcatgaccatatgaaacactccacaagtcgtcctagaatacccttgaagtcttttctgtttggaatcaagttaaggaagcaaaagcaaacggtcctctcatgtgtaactccaacaaagaaacaacacagggatctagcattggctgaagaagatgcccctatatagacacactttcatcttctgtttgagtatatgatgggtaaactctacattctgtttagtgtttttcgaaggtttgttagtctgattatgattttgaagttttctcgtacaaactattttgagatatttaccattatggtatgtgatcagcatttgcgtatgtgtatatatacttacacggaaatttaaagattctctctagattttaacctatccatccaatacgcataatattataaaaaaaattataatcacttcatt

SEQ ID NO: 29642 - DNA, 3108 bp, Glycine max
  Clone ID: UC-GMFLMINSOY103A04_FLI
caaattttaggattcagttgagttctatttgcaaagatcttgtcaaaacacatcttgatatcctggatttgtatgaatattatttacatttttcattagcttggcttcaaaaaaactcggaagcgcttttgtatatgttggaaccattcttggttgcacaatctaatgaccgtaatccttacaacattgatattgtgaatctgaagaagcttatcccaaaaattgggcagttgttggctcaaacttctttcatgtctaatatacaaaaccttcaactatccgaacgtgcagaagataaactagttgcagatataaagcattcaattcctgatgatgaaagatggaagattatagggacctgcttgtggcagcatatgtctagattcatgatatttaatttgaatctggttcttgccaaacttgaagatggtaaactgtcgggtcctttccacagaaaatatacttatggggagtcttatctcataaatatggattctgaaagcatcagcttgccagagaagattcggttagtcttgtttagcctatgtgatctactgatgacaacagttactcacatttcttcttatcatgttaaacaacaagcagaatttctgtggcagaaagtagggaatgatttgaatgtaatgactcttcaatggttaaaacaaaaatcagaattcagccagaaccaaaacctggacattttggaactggggaacatgaaagataactattcagttaatcagttattatgggatcgctgtgcggatcccaaattgatatctgattgctttgcacaggaaaaactcaattggccaaatgatttggatcagatgaatactaaaggatggaatgatttgtctataattatgacaggactgcataaaactgatgatacatgtggtgatggatgtaaacttagcactagatcttctaatcatgaagttggaactcctgttaaaggaacatctctaagtggcaatgcttctgcaagatcaaaccagaaagatataacttatacaaattttgcagttttccagagtcccagagaaatgtacaagagaaatggagaacttttggaggcattgtgtataaactctaccaatcaacgggaagctgcagttgctggcaacaggaagggtataatgttctttcattgggaagatgagattccttttagtggtaaatcagatgatcttttgtgggccacagctgattggcctcagaatggatgggcaggttcagaatccacccctgctccaacatgtgtttctcctggtgttggccttgggagcaagaaaggggcacaccttgggctgggtggagcaactattggtgtggactcttcagcttggcccagcaatgacttgacaggtggtggagtattaggaatgctaggttatactggtattggtgcctctggattaggttgggaaattcaacaagattttgaagattttgtggatccacttgccactttggagaacataagtaccagggctttgtctagtcatcctatgagaccttttttcttggttggttctagcaatacacacatttacttgtgggagttcaacaaagacaaagctactgctacatatggagtgctgcctgctgccaatgtccctccaccttatgcccttgcatcaatttcagccttgcagtttgaccactttggacaccggtttgccagtgctgcattagatggaactgtctgcacgtggcagctggaggttggaggaaggagcaatgttcgtccaacagaatcatctctttgctttaacggtcatgcatcggacgtcacatatttttcctcaagtggatcgataatagctgtggctggatatagctctaatggtgttaatgtggtcatatgggatactttagctccacccactacttctcgagcttccattttatgtcaaggtggtgcacacaccgtgtctgtttttgataatcatgtgggaagtggttctgtatccccccttattgtgactggtggtaaaggtggtgatgttggacttcatgacttccgctatatagctactggaaaggctaaaaggcataagcgtgctgataacattgggcaaagctctgtctcatctttaactcgtgataaggatcaaaatgtagatgggatgctttggtacattccaaaggctcactcagggagtgtcacaaaagtagttaccatcccaaataccagcttgtttttaactggaagcacagatggagatgtcaaactctgggatgcccagagcacaaagttaatacatcactggtcaaagatacatgaaaaacacacctttctgcagccaagttctcgtggatttggtggtgttgttcgggctgctgttacggatatacaagttgttccccatggttttctttcttgcggtggggatggaattgtaaagctggtacggctggacaatcacctgcgtgcccatggaattgagttatgatacttctgagatcctttgtgttgatgacaactctactatgctgcaaatgcttcacgacagtggtcatcatcggtcagaggttatcaaatctgcattattggcttcgtcaacagcttaatataagaaatgtgaacattgctgaagccaccatccattttgaaaaaggattcttcattggtatgttcagatatccaaaacaactgcaacttgggcaagccatacatcccggaacataaacatctcatgctagtgaacctcattgcttctttgaacagattggatgggttcattttgattcgagtcagtctttctgcatggaacaaaactttagtcagtggccgggctataattgtattaagttatgaatacctctcgaggttggcaacatttttgagacaaaacttgtctttgttcttggtgtacattacctgtttgaatttgttgaggcatgtgagtatagtgtatacacacggcaaaaacttagattctctagtgagttttgtttacatttgtagtcatactttgcagcatgtatatattaagaaatagtgtcggtgattttaattagaacttgagaaaagttataatatactactgttcataacttcttgggaatcaaaagcttgaaaccttttccaagtgc

SEQ ID NO: 29643 - DNA, 2074 bp, Glycine max
  Clone ID: UC-GMFLMINSOY103F05_FLI
gaacaaagcacttagtgctattcaataattacgaaaaaccaacagcgagtgttgtttttgtttggtccaggctggaccagggaatgaatagagatgagaggctttcggttgaagagaactgagttaagcggcgaagccaaacgcagaatcggcggcagaaattgccaccggaagcacgtcgaagacgggtgaaccaaacacaaaattccatccaccacttctcttttcaatccccaactcaaatctgtgaagaaaatctcaatttctaaattgtaattcttagcactactgctagtagtagtaaaaaaaaacaattagaaagtagtagagtgtttttttttctttttttcgtttgttttacttttaagatgggtgagaagagcaacgttggcggcgacgcgattaacacgactctgcttcacgggaagtacgagctgggccggctgttaggccacggaaccttcgcgaaggtgtaccacgcgcgccacctgaagacgggaaagagcgtggcgatgaaggtggtgggcaaagagaaggtggtgaaggtaggcatgatggagcagatcaagagagagatctcagccatgaacatggtgaagcacccaaacatcgtgcagcttcacgaggtcatggcgagcaagtccaagatctacatcgccatggagctcgtccgcggcggcgagctcttcaacaagatcgccagaggccgtctccgggaggagatggccagactttacttccaacaactcatctctgctgtggacttctgccacagccgcggcgtctaccaccgtgacctcaagccagagaaccttctcctcgacgacgacggcaacctcaaggtcaccgacttcggcctcagcactttctccgagcacctccggcacgacggcctgctgcacactacgtgcggcacgccggcctatgtcgcgcccgaggtgattgggaaaagaggctacgacggcgccaaggccgatatttggtcttgtggcgtaatcctctacgtacttcttgctggttttttacccttccaggatgacaacctggtggccttgtacaagaaaatttaccgcggtgacttcaagtgtccgccgtggttctcctccgaggcgcggaggctcatcaccaagctcctcgaccccaacccgaacacgcgaatcacaatttcaaaaatcatggactcgtcgtggttcaagaaacccgtgccgaagaacttgatgggaaagaaaagagaggaattggatctggaggagaagattaaacagcatgagcaggaggtttctactacgatgaatgcttttcacatcatttcgctctcggaggggttcgatttgtcgccgttgttcgaggaaaagaagagagaagagaaagagttacggtttgcgaccacgcgccccgcgagcagcgtgatttcgagattggaagatttggcgaaggcggtgaagttcgacgtgaagaagagcgagactaaggtgaggttgcagggtcaagaaaaagggcgaaaaggtaaactcgctattgctgcggacttgtacgccgtgacgccgtcgtttttggtggtggaggttaagaaggacaacggtgacaccttggagtataaccagttctgtagcaaggagcttcgtccagctcttaaagatatcgtgtggaggacttctcctgcagagaatcctacactcgcttgaagaacaaccaagactcccatgctaattgtcgttcctttgtagttgtttttgttaattcttgtttcaggactgagatattttagttatttgcttgcttctttgttatgttttggcctctggggtgtgtcgtcttttaccccgaaaggggaattgttgaaaaggcgaatgcagtaatgaaccgaaatggacatcgaggagttgttgtcgatgatgattcaggtacatgtgctgcgtgttgttgtgctcgtgggtgatgttgttgctatgttggcgtgattgtgaatatgtttgcaaattgattggtgtggctcatgggtcattcatggctgcgtttaattttgttttatttatattttttcggtgaattagtgctttgtttgggggcggcc

SEQ ID NO: 29644 - DNA, 1033 bp, Glycine max
  Clone ID: UC-GMFLMINSOY104B02_FLI
ctctcacacacactctataaatacccctgtggataaacttcccttgttcttatttgttactactaccgctttgccttcatacttaactcaattctagttttgtagagagaagaaaaaaaccaaccactctttttctttcatttgcaatttctgtgtcaccaatcatacacacaatgtcggcttacagagacgaggatccccgtcttcatggcatcaaaactaagattcgtgttgtccctaatttccccaaacctggtattatgttccaagacattactactctgttgcttgatcccagggtctttaaggacacgatagatttgttcgttgagcgatacaaaggcaaaaacatttctgttgttgcaggaattgaagctcggggtttcatttttggttctcccattgcactggcaataggagcaaagtttgtaccattgaggaaaccgaaaaaattgcctggcaaagttatttctcaagagtatattctggaatatggaagagactgtcttgagatgcatgttggagctgttgaacctggtgagcgtgctttagttgttgatgatttgattgcaactggaggaacactctgtgcagctatggacttactagagcgagtgggagcagaggtagtggagtgcggatgtgtaattgaattgccagaattaaagggccgtgaacggttgaacgggaagcccttgcatgtgttagtggaatgttttgagtgctgtgaatagatgaagatgtagatgggggaatgcgtcaccaccaagtgggtactttcctatatggaaatcctctgcttcctcctttttaacgattaatgaaatagaaagactttccctattgagactcaatgaatggctttgccccaagattttgatgtggaaaaaatgctttttggggcaatatgattgtaattggaactaggaacaattacacataaaattaatgactctgtatgacccctttggtgtatcctctctttgcttacccacccttctatttcaaataaaaccattactttgactacagt

SEQ ID NO: 29645 - DNA, 1527 bp, Glycine max
  Clone ID: UC-GMFLMINSOY104B04_FLI
gtggataagaacaatggtcaaaaacagaaacagtcttcctcccaagatccttcaccactgtttatccagatcattgacaaaaagaaagcacaaaatttattgattctgttgcgagcattgaatgtgacaatggaagaagtttgtgatgcactttatgaaggacatgagcttcccccggaattccttcaaaccttgctgaagatggcaccgacatcagatgaagaacttaagcttagactttttagtggtgatctatctcaacttggacctgctgaccgtttcctgaaagccatggttgacattccatttgcatttaagcgaatggaatttctgcttttcatgggctcacttaaagaggagcttgcaaccattatggagtcttttgccattttagaggttgcttgtaaggaactaagaaacagccggctgttcctcaagcttcttgaagctgttctcaaaactggcaaccgaatgaatgatggaacattccgtggtggtgcacaagcatttaaacttgatacacttctgaaattatctgatgtaaaaggaacagatggcaagactacactcttacattttgttgttctagagattatccgctccgagggcataaaagccatccgaaaggcaaaagagagccagagctcgtctagtattaaatcagatggccttcctgatagtacccaagaaacagaagattactaccatgaaattggtcttcaggtggtttcacgcttgagcagtgaacttgagaatgtgaaaaaagcagcagttatagatgctgacagcttaacaggaaccactgccaaacttggctatggtctcataaaaacacgagacttggtaacaaaaaccatgaagaatgtggaggaagatagggggttttttgagacggtgaaaagttttgtgcagaatgctgaggctgatgttacaaagctgctggaagaggagaagaaaataatgactttggtgaagagcactggtgattatttccatgggaatgctgggaaggatgacggcataaggttgttcatagtagtacgagacttcttaataatggtggataaggtatgcaaggaggtgagagatacacggaagaagctggcaaaaactctaaaacaagagactcctagaggagcatcttcatctgaaacacgtccaccacctgattttcgtcagcggctttttccagcaattgctgaaaggaggatggatgacattagttcagacgacgagagtccatagattcaaattgaaagtggtattgagactgttacccttactaacatgacattgtatagcctagagcgtaattgaagacttggatagtgtttggcctggcttttctagaccctaaaaacctactttatgttaagaacaagcttcaattctagttaaacttgcttgataatttttcaatttcttagcttagaagtaacttgtaatttaaaagcttattgatagtgctctcttgggcattggaatttggaatatataagtaggaagagaagcactaaaaattatagt

SEQ ID NO: 29646 - DNA, 1999 bp, Glycine max
  Clone ID: UC-GMFLMINSOY104E04_FLI
tataaatagtgctcttctaagcacaaatccaagttttcctgacactaaccattctagaggccaatctctagatcttgggacagaaaatactgctacaagttctgccagaaactcggacattgatcatgccttaagtcgagtctctagttgcaaaagctttatttcagatactgaatcttggatgtatgatcaaaattctagcaaggaagtgcaactagaaactacacttccatcacctaataggcaggcaaaatttaaccttgagctggaaaagttgagaattgaactaagacatgcccaaggactgcatgcagtagctcaaagtgagaaaattgaagcatcccgaaagctaaatgagctaagcaagagacgatcagaagaaaccatgaaaactaaagagattattgctaaggaggagaaggcaaaagatctagcaagactagaaagagataaatatcaagatgcatcaagagaagctgcatatttgaaagaatgtgctgaaagagaagctgcagaaaggaaagaaacagagttgaaagccattcttgctgcaaaagagacaaaaaagctggagggtgctctaagtggttccacaccccagtaccggaagtttgcctgggatgaaatagtcttagctacttcatctttctctgaagatctgaaaattggaatgggagcatatggaatagtgtataagtgcaatctgtatcacacaaatgttgctgtgaaagttctcactctcaaccccaatgaaaaccgcaaaaggaaacaatttcagcaggagttagagattttgagcagaattcgtcatccaaacttgcttcttcttcttggtgcatgtccagatcacggatgccttgtgtatgaatatatggagaatggtaacttggaggacagactactaagaaaaaacaacacttccccaatcccatggtttgagaggtttcgaatagcctgggaagttgcatcagctctcgcctttcttcatagctcaaagccagaacctatcattcatcgtgatttgaaaccggcaaacatcttgcttgatcgtaaccttgtcagcaagatcggtgacattggcctttctacagtgcttcattcagataatttgtctaccatgtacaaggacactgcacctgttgggacactcagctacatagatcctgagtatcaaaggaccgggttaatatctccaaaatctgatgtttatgcttttggaatggtgatcttacagttattgacagcaaaaccagcaatagcacttgctcataaggtggaaacagctattgatggcgggaatttaactgacatattggatacagaagcaggagcttggccatatcaagagacactagagttggctttgctaggactgagctgtgcagaacttcggcgtagagaccggcctgatttacaagatcacgtgcttccaacactagagagattgaaacaagtttttgatagggcccaacattctgcttcaattgttactattaaatccaaacctcctaatcactttatctgtccaatacttcaggatgtgatggatgacccttgtgttgctgctgatggatacacatatgatcgcaaagcaattgaaaagtggcttgaagagaaccacaaatcaccaatgacgaacatggctttacctcataagcatttaattcctaattacacacttctctcagcaattttggagtggaagtccagagaatcgtgatatcagtattatctttctccatgttaatattgagaccattgatttctctgatgtagagtggctagaaagttcagtgggtatggcatttagcagtgtcttggatgcattttttattttatttttttgtagttgtaccattccaagcatgctttctggttaatttaggtagagtgattttcaagtgtagataaatttgattctattggctgattctgtgtatacatgcatatgtcaaatcttgttcttactataaataaaatgagaaccatatttacattc

SEQ ID NO: 29647 - DNA, 2472 bp, Glycine max
  Clone ID: UC-GMFLMINSOY106C11_FLI
gaaatgtgtacaactgaacagttggataaagcaatgaagatttggacaacatttttagaacctatgcttggtgttccttctcgaccccaaggtccagtagatacagaagatgttgtcaaggctaataagaataattctgccaaaactggcactggaattgatgatggggatagtagtcctgcaacaaatcctaagaatttaaacactaatagaaatggggatgagaactttccatcagaacaatcaaattcctgcaaacaatggcaaacaagtggggataataaggttaaagaagataatcatcttgatttggaacgctcggcacataagaatgaaaccttgggaagtagtacacagcatggtaaagtgcatataaatgcatccacgactgatgaagtatcaagagccaataagcaagatcattccattgaacggttggtgaatgctaatgtctcattgaccttgggtatggagctaattagtagaagaacaaatgtggataatgcatcaggacttactgctactccatcaagacctggtaatatttctggtgagggaggacttggtttaccttcattagagggtgctgattctacaagaccagttacatccacaaatggggccatcaatgaggacactaaagttcacagatatcatgaagaagttggacacttcaaaagtgaaagagaagagggtgagttatcacctaatggtggagactttgaagaggataactgtgaagtttatggacatgctggtttggaggcagttcataaaggaaaagatggtaccatttgtcgacaataccaaaatagacatggggaagaagttcgtggtgaagctggaggagaaaatgatgctgatgacgaaggcgaagaaagtccccatagatcaatggaggacagtgaaaatgcttctgaaaatggtgatgtttctggtactgagtctgccgatggtgaggagtgttctcgagaacatgaggagaatggagatcatgaacatgataacaaggctgagagtgaaggtgaagcagaaggaatgactgatgccaatgatgttgaaggagatggtgcctcattgccatattcagagcgctttcttgtcactgtaaagcctctggcaaaacatgttcctccagtgttgcatgacaaacaaaggactgttcgagtcttttatggaaatgattccttttatgtgctgtttagacttcatcagacattgtatgagaggatccaatctgcaaaggttaactcatcatctgctgaaaagaagtggagggcttctaatgatacaggctctagtgatcaatatggcaggtttatggatgccctttacaatttactggatggttcttctgatagtacaaaatttgaggatgagtgtcgagctattattggaactcagtcatatgtcttattcacattagacaagctgatatataaacttgttaaacagcttcaggttgttgccaccgaagagatggataacaagctgcttcaactatatacatatgaaaattcaagaaaacctggaagattcgttgatttagtttatcacgaaaatgcccgtgttcttctccatgatgagaacatatatcgtattgaatgttctcctgcacctacccaattgtcgtctattcaactgatggactatggatatgataagcctgaaatgactgcagtgtcaatggaccctaatttttcagcctatctgcacaatgacttcctatctgttgtccctgacaaaaaggagaagtcgggaatttacctgaagaggaataagcgcaagtatgccattagtgatgaatattcaagccagaccttggatggactacaaattatcaatggtctagagtgtaagatagcttgcagttcatctaaggtttcatacgttttagatactgaagattttttacatcaaacaagaagaaaaaggagaaccttgtatcagagcagttcatgccatggacaggaaaagtccccaatcatttgttcaagcagagcacaacggtcctgcaaattattttcaatttgaagatggtattcattttgagcccgagatgtgtttttggtcatgcatcaatggcaggcagaggtgccagatggaaatggcatcccgtccaagaagttgagcaaaggatgttttaatgaaattcatttttcttgcattcctcgcatcttctataccaacaaccaaataaggcaacacagaagggagatggggcacagagattgtagtataatactttgacatggtgactgatgagtttcaatcatgtaaatagaggtaatttgtgacaaaaccaaaggacattttctttccattcatcaatagttgttatcgtaataagttttattatttttctcttaattttgctggctacttttacgaggttattgattttatgaaaaattaggtggctgtaattggcccccatattctaattcgtagtgcatggaccagtttcccttt

SEQ ID NO: 29648 - DNA, 1802 bp, Glycine max
  Clone ID: UC-GMFLMINSOY106E08_FLI
acattcatactcgagtcaaaggctggcttggctagcttgcgtctttgttaagactttgatgacatgttcacaaccccgcccgagaacctacttttttgtttcataggaataaaacatttactttgatcaccttttcattccttttatgtaaaaaaaaaaaaaccacaacacatgggtgtgtagtagaattgcagtgaaattggaaaaatactcaaacatggagcgctatgagatcctcaaagatattggttcaggaaattttgctgtggccaagcttgttagagacaactacaccaatgagctttttgctgtcaagtttattgagagaggccagaagattgatgagcatgtccagagggaaatcatgaaccacagatcattgaagcaccccaacattattagattcaaagaggtcctgttgacaccaactcatttagccatagtaatggaatatgcttctggaggagaactctttgagaggatatgcaatgctggtagattcagtgaggatgaggcaagatttttctttcagcaattgatatcaggagtcagttactgtcattcaatgcaaatctgtcatagagatctgaagcttgaaaacacactcttagatggaagcactgcaccacgagtcaaaatttgtgactttggttactcaaagtcatcagtattgcattcacaacctaagtctacggtgggaacgccagcttacattgcacctgaggttcttacaaggaaagaatatgatggaaagattgcagatgtttggtcttgtggagtcaccttatatgtgatgttagttggggcttatccttttgaagacccagcagatccaagaaacttcaaaaaaaccattggtaagatacttagtgtccagtactcagtcccggattatgtacgagtttccatggaatgtagacatcttctatcacaaatattcgtggcaagtcctgaaaagagaataacaataccagaaattaaaaaccatccatggtttttaaggaacttgcccatggaactgacggaaggtggaagctggcaaatgaatgatgtaaataatccatcacaaaatgttgaggaagtactgtctattatacaagaggcaagaaaatctcttaatgttcccaaggttggaggccttcttactgggggcagcatggacctggatgactttgatgctgatgaagatcttgaagatctagaaacaagtggtgaatttgtgtgtcctatttaagtgtgtacatgaacaagctgagctatagtttgctgtgaaaatgtaaatagatttttctgtaggggctaaaattccttggtggttaatttttcaattaagatcagtagccccacttgcacggcttgttatttatcagttttgagttttgacatttaaagggtttttttttatttctttatgtttatttttccctcttccctatcacacgtgtggatgtgatcagatttaggaacttccgaaaccatgtgctgttttcctagagaagtaataccacatgttccaaagatgagaatataaaataaagcaagttgtggcaggttccacttttgcatcatgggaaactgagacatgggaagtaagtagacttttgttagtggattttattttatattgtagagtgggaattgagcaagcaatgctctccttggaggctttgccctcaaccgtgacgtcccccccattatgtaggatttcttttgtatatttacatatatcctttttttaaaaataactattgtaattaggttttcgattttttgagttgattataagactaatctttcacttc

SEQ ID NO: 29649 - DNA, 1302 bp, Glycine max
  Clone ID: UC-GMFLMINSOY107A12_FLI
aaaattcgaccacctctctctctctctctctctctctgacagggatcgcgacgagcggcgccaccgtcactgatcgaagagaaacttcgacatcggaacctgccgcagccacctccaccaccaccgcgcacttcaactctctttcagcaaaaaaaattgtcactcaaatggatttggagacggaaaacagattagctgctatgcttatgagggaagcagcagaattacggcggcagtctgaaagggaaggagttctggcttatcttcgcaagcctaatatacggacccgaccaaattcacgtttcctcactgcaactgttcgtggagtacaacaagcaaatcgagctgtggaagtgaatgagatgtggcgattgaggcaaaaagagctcgagctggataaacgtgttaaagaaaaatccttgggtaaaagcagtagagatagaagccatggggatgataactcatcaagaggcacaggaagacatgctagtattgataatagcacttcaacctcctcctcttcaaggtcaggtaaaagagagtatgagttggataaatgggttaaagacacatcaaaagataaaagcagcggtgacaggagctatagggctggaaactcatcaagaagcgccggaagacatgctgcagtggataaaagcactagtgcacatgcttcatgctccagtgaaagagaatatgagcatggtctggaaggtttaaaggatgaagagcttgaggagtttctacactcaaggaccaagcgaggcagaggtgctgttggtccaaggatggatgagactggaccttaccttcctcatttggaaggggagcctagtactagtcccgatgtaagggagcatcgtgtttatttatggtccagagaagcctctgtcattgaggccatatgaatcttctgatgaggaggagcttcatgaagaaaggcggaaaaagagtaaaaagtctcattctaagaactcagacaaggagcgttctaagaagcacaggtccaaagataaatctaagcataagaaaaagaaaagggaggagaaacgaagtaaacatcatcactgaggctcttctgtaacttgatattctcacatgaaggttataactagcggatacagggaattcggatgcagctcgtgtgtattttgtacagataattttctgtaaaatcaaatgcaaatccaaccagtttggccatttgatgcaaaagtaattattaatttcaattgacttgtgttaagggagaatatttaagctagttatttgcccacttaaaattttttactcaggcaaggc

SEQ ID NO: 29650 - DNA, 987 bp, Glycine max
  Clone ID: UC-GMFLMINSOY108C12_FLI
cggctatcttatgcttaaaattgacttcgagaaaacatatgataaagtggattgggaatttcttcgggtaactttatgtgaatttggcttcccttatactattattgccttggtcctgaattgtattacgtctacattgctggctttgaggtggaataatgagattatagaaggtttcaatctaagcagtgggctttgtcacagagatcccttatctccttatctttttgttctatgcatggagaagttggcccttcttatccaacaggaagttgagaataactcttggagtccagtgagaatgacccttcttacaaagaatggccctagcatattgcatttatttttgtcgatgactcgcagatttatttgtggtatatcttggagttccacaactatagtcattggagcccacatgcttatttatttgagttttatcctaacttatatgatgctcaatttttttatttttgtctgatgtaggacttcaattcatacttataatccaacatcagacaccttatttgtgaatctgattcaacttgtgatttgacacttataaaaactggcacaattagttctcatgtgcattatcctttggtgaataagattaggagtttcctggatcttgattggcgcatccacttctagcatacatacagggaggggaataacattgcagactatcttgcaaagacaggagctggtcaagtctcgcagcttgtaatcttggaatcctgtcctgctgttcttaagcctaagttattagcagatgctttaggcacttactttgttagttagacacagctagtttttttttttagctctttttctgctttttgtccttttcgctatctgctgcataaaaaaaattaaggtgccatactggggtccactttatctgttaaatagaaaaaacaaataataagaatgtgcagaaagaaaagtatgagaaatagaaatatagtagcacaatattttgttttg

SEQ ID NO: 29651 - DNA, 1173 bp, Glycine max
  Clone ID: UC-GMFLMINSOY108E06_FLI
aaaaaatctcactgctcaacggagtgactggaaattagttcaccatacccatcaatttcttaggaaggaaatgaaaaaggtctccaaccacggataaatctccagggatatctgctagggaaccccataacaacaagaaatgaaggaaatgatcaaatcccatttgctcatggaatgggacttatttctgatgaactatatgcgtcacttcagagaaattgtaaaggagagtatgaaaatagagattccagaaatgtgttgtgtttaagagatctcaaacactatgatgagtgcctttcaggaatcaatactttctatattttggatcgctattgtaaatctgattcgcctaaaaaacatgaagctcagtggaggagatctctgactcagaagtttgaggcctctcttaattctcatctcagagtgccagacataagatgccaaatttttgggtttttccttgccactcaatgggccaatgacgaaagtgttcgcaagtcactgcatattcgagagggaactataggcaaatgggaacgttgttacactacagattttgaggaacagatcttcagtagctttgagtttcatgtaaatctcagtgcaaaaggatatcgttctttaatatacagtggagatcatgatgcagttgttcctttcatgtcaacccaagcatggattagggctctaaactactccattgtggaagattggaggccatggcttctagaagaccaagttgcaggatacacaaggatttactcgaatcaaatgacatttgcaactgtgaagggttcaggacatacagctccagagtacaagcctgaggaaggttttgccatgttcagtagatggatagctaatatgcctttgtaactcagccgctatgttggcagaaatctaggttatcaatgttatgctcatttgtctatgattttttattttttgaattgtcaatgtttaaagatcctgtattttaaagtgagcaaagcagtagtgtcaaataactgtttgtactatctgaaattttttctttaatttcttttaatccgacatcttcggattcatctagagaacggtcttgtaaagtgcaattcctactttatgaggggaatggggaatatttggagacgttgggattttactatggaaaattaaatactaaatatccag

SEQ ID NO: 29652 - DNA, 1745 bp, Glycine max
  Clone ID: UC-GMFLMINSOY108E12_FLI
ctttgaaagggtttgattaatttagagagatgggtgggagcaagaagaggaagagaaacgaggggcaacgaggaggcacagtgtattcagaaaacccaccagactttgctcttttggcttctctctaccctgaattccaccctttccttcaattctcgcatcctcactctcgccccaccatcgattggaccgacttcaacgccactcgccaactcacgcgcgtcttgctccatcatcgccacgctctcacctggtggattcctgatggacacctctgtccaactgtgcccaacaggtgcaactacattcattggcttcaacatcttctctcatcaaacatcattcgaaacaccgtttcaagtgatggcaagttcaggggatttgacattggaactggagccagttgcatttacccccttcttggtgcttctcttcatggatggagttttgtaggatcagatgtgactgatgttgcaattgagtgggcggagagaaacgttaatagtaatccacatatttctcaactgattgaaatcagaaaggttcaagacaatgcaagtgctccctgtgtggaagttgaagagtcggtgactggtgacaggattactttgtgcaggagtactgatgtggaggtagctcctttgcctcttgatttgcattcttgcaagaataggaattatcatggacctcccatacttgttggtgtggtcaggggtgatgagaattttgatttctgcatgtgcaatccgccattttttgaaagcttggaggaagctggactcaatcccaaaacttcttgtggtgggacttctcgggaaatggtttgccctggtggtgagagggccttcattactcgtattattgaagatagtactcaactgacggagcaatttcggtggttcacttcaatgataggtaaaaaatcaaatctcaagtaccttacatcaaaactttgggaggttggagttgccatagtgaagacaactgaatttgtccaaggcaggacatcccggtgggggcttgcttggtctttcttaactcccattcagaagacaccaatttctttgcccaacaagaaaaacacatccttcacgcttgagggccttcaacgccaacatggtgccattaatttgttggaagctgtcaattcttacttctcttcacatggcctattctgtacattgaatacctcctctttcacagtggatgttgcagcatcaaaagatgattgtgattcaatcttgaggaatgaattacacatcatcaacaaatccatcaattgccaacctacacaaaagacatctaatgggtcgagtttgaatctctcttctgagagattatgctttcgtatatcggtttttcagcaaattcctgggacactgttggtgaaaggttcattacaagacaggaattgtgcagtatcaggagcattctcggtgattttccaaaaactagaggaagctttgcggaataatttttgtactaaatcagcgtaggggtttgattatttgatttattgtttgggacagtgactgtatatgatatgggatgttgagaagttcttcagtactaatctgtggactaatgatttatacaaagcaagtagtgatggtgctgttttggcgtgaaaaggaaatgaagggcaacatgcattgttgctctttgggaaattttgggtagattatgtgcattattttgttcaccaaaccaacaagaatcattcagttgatttgtaaattgtactt

SEQ ID NO: 29653 - DNA, 866 bp, Glycine max
  Clone ID: UC-GMFLMINSOY108F10_FLI
gaagtaagaatgatgtgaaactattgagttttttgttgagtccagttggtcacagagttgaatgggctctgaagctaaagggtgttgaattcgagtatgtagaagaagatatcttcaacaaaagcaatctccttctggaactgaacccggttcacaaaaaggttccggttcttgttcatcaccagaaaccaatcgctgagtcactcatcatcgttgaatacatcgaccaaacatggaagcagcatccactgttgcctcaacatccttatcaacgagctcttgctcggttttggggtaccgttgctgataagcttgtgaagacatcatatgttgcaatgtgtagcagtggcgatgaacaagaaaagagtgtgaaggaagccaaagaagtaatggataaaatagaagaagagattattaaggggaagaaattctttggaggggacaatattgggtaccttgaccttgcatttggatggatcccttactggcttcccatttgggaggaagttgggtcaatgcaaatagttgacccattgaaacattgtgccatctctgcatggaacaccaattttctcagccaccctatcatcaaggattgcttgcccccaagagacaagatgctcgtttattcccaccgtcgcaaaaatgagttttcttctactcttcgtcgttgattcatgttttttcctctatgtctaattcaatatgttataggcagagggaaaaacctattagagtcaattatattccaagatatagggattgactcaactgtattaatgcagattatatacgtttatcttgggttgttaatcatctctgctgttaaataaattatatataagccttatgagaggatttcagag

SEQ ID NO: 29654 - DNA, 1129 bp, Glycine max
  Clone ID: UC-GMFLMINSOY109A01_FLI
cgcgtgatgggttatttttcttctcctcttttcagcccttcctctgataaacgtttctggagcactctcaggagcaggatcgacgcgctcctcgatgctcgtcaatccgaaacctcaactcactctcctacgaatgaacaaggcaacaaccggttgaaggaagattctatgttgctgatgagagggtttgactcagttgcccacacactctctctgttgtccaataatttggacaatgcccttcatggtgctagggaattggcgaatccacccacattaactgacatattccacagcaaatatgataaggtggaaaacaaagaggattcgggggagaaacagaaagaggaggaggagtcaaagcaaggaatgaaaaggaaatttgaccctaatgatgtctctgaagagaatgctgttgactcacaaaaggaggagaatgggaaaaaaatgatggatacgaacatcaagaaagctaaaaatcttgcagtttcaatggcaacgaaagcggcctcactagcaagagaattgaagtccattaaatcagatctctgttttatgcaagaaaggtgtggtttacttgaagaggagaacaggagactgcgtgatggatttgcaaaaggagttagacctgaagaagatgatctggtgaggcttcagctggaagcacttcttgctgagaagtccagactggccaatgaaaatgcaaatctggtcagagaaaatcaatgtcttcatcagcttgtggagtaccaccaacttgcctcacaagatctctctgatgagtcatatgagcatgctcttcagggaatgtacttagacttctcgtctccgccgccaacaattccagaagagacaagggatggagatggcgacgaagacgaaaatggagaaccaacacacacacgcaggaaccatatctgcaagttttctgcttcgattgatgatggagaagagtaaactcagaatggagaaccaaaaacacccatgaacgatatcagcaagttttgtgtttcacttgatggtgaggagaaaactataatattaggcaccatcataacaccccttgtaatgatgctgctgctaaaattcctcttatttccgccaaaaataaattcttttctcatctaat

SEQ ID NO: 29655 - DNA, 1285 bp, Glycine max
  Clone ID: UC-GMFLMINSOY109C12_FLI
tccaccttcaccaccaccacacccaacctcgtggtgtgtccccttccctgagccatgccttcttcccccaagtcctacgccatctcctacgcgcgccagcccacgcgcagatccaccctctaccttttcctctccgccctcctcctcctcttcctctttggaatcgtcgccttcctcgcccagattcgcggcagccgctgcgtcaacgcgcacccccggtcggtacgcgtcgtttgggaacactccgctggcgctggcaccgttgccggcgatgggggcaggcataaggtgatggggtttgtgggcattcaaaccggattcggatccgctgggcggagagtgtccttgaggaagacgtggttcccctctgatcgccaaggacttcaacgcttggaagaagctactgggttggcttttaggtttatcattggtagaacaagtgacagagcaaagatgtcagcgcttcagaaggaagtagcagaatatgatgatttcattttgttggatatccaagaggagtacagtaagctcccatacaaaacgttagctttcttcaaagctgcttatgcactttttgatgctgaattttatgtcaaagctgatgacgacatatatttaaggccagatcgtctatcattactactggccaaagagcgatctcatcctcagacatatataggatgtatgaaaaagggacctgttttcactgatccaaaactcaaatgtttccggatgttcagcaatgaggatgttactattggagcttggatgcttgcaatgaatgtcaaccatgagaataatcatgaactttgtgctacagattgtacagccacatctattgcagtgtgggatattccaaagtgttcaggcctatgtaatccagaaaagaaaatgttggaactccatcaaaaggaagcctgctctaagagcccaactctggaatcagatgatgaatagaatttgtgggtataatataaagcaaagtaagctcagaaggtagtgtgaaggaattgctgctcttgttattgattactgccacgatatgctaccacttccattcttttgatctttctaattctcctttcttccagttattagaagagagggtgactgtgttttatttccttagttttcattcccctatacttggagaggtttgcattggccgatatgaggaacgttctttagggaaggcttttatatactacatgagagaatagatcaagagatcattgttaatttactaatttcctgattttaatgtcagtctttcttggggttatac

SEQ ID NO: 29656 - DNA, 854 bp, Glycine max
  Clone ID: UC-GMFLMINSOY109D02_FLI
aaccaaccatcttttaaattaaacaatttccagtttgtactacaactttgaaaaggatctgccggcaacatgggataaagcgttggccttctcgaaagatcaaaaaggttggtcactctctacaaaaacttcaacttgtcatcaactcagttcaaggggcctctggtgcatttcaaatcggttccttctattcaaacttcccggatctagcttctccaaatttatcaggaactggcttcttctcaactttgaatcaaagtgattatccaaactcaacaagcacacagccagatcatggctcattgagcccagaaggtgcatcaaaatcgccatcttcatcgtgcagtcagagttccatttcaagccattcctgctccagcatgtcagagctacaacagcatcgcacagctaacggtgctggtaacaaagtttccaccacggttagtgaagattctgctggtgttgtgttgaagaggatcagtagcgaggcagagcttaaaagccttagtcaagatagagcaaagctcttgccaagatcacaaagccaggaaacacttggtgaacaccctaaaactcagtatcaacagcctttattgaaaaccagtagcagcaaggtggattctcacagagtaaaagtcgcatatggagatgagaaaacccggtttcggatgccgaagagttggggctatgaagatcttctgcaggaaattgcaaggagatttaatgtgagtgacatgagcaaatttgatgtcaaatacttggatgatgactgtgagtgggtactactcacttgtgatgctgatttagaggagtgcattgatgtttgtcaatcttccgagagtggtaccatcaaa

SEQ ID NO: 29657 - DNA, 1003 bp, Glycine max
  Clone ID: UC-GMFLMINSOY109E03_FLI
gcgatttgcaagttgaaatctttgctttctctttcgaaatgcaactctgcgttggtctcctcttcaatacgcgctttctcttcggcacaggtgattgatgtttacactggaccaaatggtttgcttcatggtggaaaactcctaaggccatggttgttgttagattcatccactattgatccacaaacatcaagaaacctttctgctacagtaactaattatattctaagagaaaagaaaggtgaatgggaaaaacctttcaagttggatgctcctgtatctggaagtgttactgcagctgaagctgggacacttacttttatggttggtggctctgaggaagcatttcttgctgcaaagcccttactcttttcaatgggtaaaagtgcaatatattgtggtggagcaggaagtggttctgcagcaaaaatttgcaataatttggctttggctgtgagcatgctgggaatatcagaagctcttgctctaggccaatctctaggtgtttctgccagcaccttgacaaatatatttaattgctccagtgctcgctgttggagtagtgatgcttacaacccagttcctgggctgatggaaggggtgccctcgtcaggggattataacggagggtttgcatccaagcttatggcaaaagacttgaatctagcagtagaatcagctaagctggctggatgtaaatacccactaacatcacaagcgcaaaagatatatactgagctctgcagcgttggccatgaagccaaagacttttcatgtgcttttcgccattattactctggaattgacgaacctcatgatcagtaaattaagacgttggttgtatgcataaaactgttgtgatcccatgcctagtatatatggcaagaagatcaattgagctcaatgaagttgtagaaacagttgcgagttattcttgttttcaatcagaaatagtgtggttccgcaagacgagcaaatatcaaaacacaaattctaaacgagt

SEQ ID NO: 29658 - DNA, 2549 bp, Glycine max
  Clone ID: UC-GMFLMINSOY109F01_FLI
cttcagtacgatgaattgttggggaaaggagccttcaagactgtgtatgcctgcctctctctctataactcatccattcctttgccgcttttatttattgttatttattttgaatttgaatgttgttgttttttatatgttggattggtgcagatacaaagcgtttgacgaagtggacggaatcgaagttgcttggaacatgatcagcgttgaggacgttgtgcagacgccgcagcagctggaaaaattgtactcggagattcacctgctcaagtccttgaaacacgacaatgtcatcaagttgtataattcttgggtcgatgataccaccggcaccatcaacatgatcaccgaattgttcacctccggaagtttgaggcagttgagtttatttattttcctataaatactcattcattttagggtttggtctgttgaatttgattgtctgattgagatgagtgtctccattaatccaaatcacgtttttacattgagatgagtgtctaatcctattaatttttatccggtagacgtgtgccaaggcccaaggatatttacattgaaatgtggtttttttgttgttgttggagaatgtcagaatcgattttctaaattgaaaacaatcacgggctcagccttttgctttccttttctcatgagttgagttttttgaatttgttctaaacactaagtgcttgattgatttacggtttggtagatttgatgttgttgacattgatcaaatttgattgagatgtgagcctatgctaatctgaatcacttatttaccttgaaagtgcaagaattgatgttttcactttaaaacaaataggggttaagcttttctgcttaactaagaatgtggatccttcatgtgcaggtaccggaataagcataagaatgtggatatgaaagccatcaagaactgggcgcgtcagattctccgcggcttgtgctttctgcactgtcacagtcctcctattgttcatagggacctgaaatgtgataacatttttgtcaatgggaatagtggactggttaagattggagatcttggattggcaattgtcatgcagcagccaactgcccggagtgtcattggtacaccggagtttatggccccagagctttatgaggaggaatacaatgaacttgttgacatatattcctttggcatgtgcatcttagaaatggtcacctgcgagtacccgtacagtgaatgtaataatcctgcacagatatataagaaagttacctctggtataaagcctgctgctcttgccaaagtaaatgatcctgaagtgaagcaattcatcgagaagtgtctagttccagcatctatgagattgtctgcatctgaactactgaaagacccattccttgcaactgaaaacacaaaggagattaatcatgatatactggagctgcctaatcctcacaccaaattggtgaatccaccaacatgtgagcctcatcccatggagatagattctaaatccaggcgtacttcacctggctcctccatgggaagaattgaagaaacttctcaagtttcattttttgatcttgtgaggatgaccgagaataacaaatttatgctaagaggggagaaaaatgctgaaagtacaatttcactcacactgagaattgcaaatgcttgtggtggagcgaggaatatccatttcccattctatatcaattctgatacagcaatttccattgctgaggagatggtggaacatctggaactcacaaatgaggatgtatctgtcattgcagagctaataaatgacatgattgctaagcttgtccccaacttgaaacccttaagtgagaaactctcatccggaacagatcaattgtacaggccttcttcggaagttcagaatggtgaacaattcaactgccactggccattacaatcaagtgattatgatatgaagcctgtgtttaaggatctagttcactcatggcctgttgacggggatgatctggagaaacaagaatctgttatgtcagatatatcagtggagtgtgggataacagttgcctcagattctaaagttgtagagcctgacatttttatttttgatgaattctgggaggggtttgatgcattcaattccacttcagatgtcaggttttgtgggcaagaggatggacacaagaatcaatcagagaactcatcaggctctttaatcaattcatgttgctgcccattcaaaaactttgacatatcaagtatatgttctcttactctagctgacaaagatccttcagaagggctgcggttggaaattgaagcaatagatacatactttgaacaacgctttcgtgagcttgagatgatgagggtggcagccatagaaagtttgaagaggagacatggcgagaaacatacctgtgatgtgatgcattaggatgattttctttgattttttttaaatatgcaattttttttgcattcatttacatcatttgatttatgttaagagtgtgtttggatagagaattttaactaaggaaagtaatttatcagagaattt

SEQ ID NO: 29659 - DNA, 2455 bp, Glycine max
  Clone ID: UC-GMFLMINSOY109F02_FLI
tccgcacctgttcaagatattatttctctctctaaagtcgatcgccctctctctctctctctctaaaaacctttaaaatccctggaatctgtattgcgtgattgacatttgttcacgatctcccctaacggaagaagctagggttcggattgatttctctgctcataataataataatctgatttgctttttggaaaataattttgctatggcaaactggagagaacgagatttgtttcacatcgacgagatcgatcccgtggacgcgtcgaacggcgaagatttcgacgattcttcgtcggtagacagtgctacttccgatggttcgaggacgcaggttggacttacggagcgtttgacggatattctcgttgacgagcgcgacggcgatctgttgattcagcagactaatagagaggaccggttgttgtggtggcttcaggctctcgatatgcaagttatgggagcgtgtcgcgccgacgagcggttgaagcccttgctgaagatgaacgcttcctgcggcgtcgcggaagatcctctactggctcaattgactcagcattttgagccatctgaagttggaatattagcgagatgcttctgcgtgccgcttgtttcgttccgcgtcgggaagatcaacaaggaagggactcgcttcagccctacctcgaataggggtaacttgacactcgtactactgccaagttctgatcttcgtctctcattcattggggatgatggtagaacagagagattattcacccttaccaacaaatcccaatgctctgctgttgtggttgatgaaatcccaactgatagttctggccgatcgttccttgtaaggactccagatagcagagctttttatttctggtgctctgaaaagtctaagcttttgggaattgaattgcttggaaagatgaaggatttgctcaagaggaaaccatccattgttgagctgagtggcattagcaagtcacgacttgactgctttgcaactcagcttcgggcttttcttgtggggacaacaggaggcagtagtcatgatagttcagtttgtgcttcaacatctgctaattccatgtcttgctctaatgttgcttctgaaagttcgcacccttcatcttcaaaatttccccgatctcgaaacattggaggtcagacagcaaagggagatacaacactttaccagagtattcttagtccaagatcaagttcttttaaagaggttccaccaagaaacttgtcttctcacaggattgcagccagggagaaaattaagcgtcgtggtgacaatcatcagccaacggttgacaccttgacaaatgattcaacacacattttggatttatcttcaacttctgatcatgacaaagcatcagaagttaccaaaactcttgcattttcaccaagttttctgggatcacttggaaagcttggtggtgttccatcaagcctggggctgagtggggaggtccctcccattgtgtcacccattttttctccctattattgttggtgtcccccaggtatttctacctgtccttccattgcagcagttacgcaatccccaaactcatctattgaaacactgcctttcccctcaggtgcctctttattagccaatcctctatcggttaacttgttggatccagtacaacctctcggtacttccatggactttcctccttttttgcctgatccactggtcagaatgtccttgccaacatctcagcagattcccacattcacaccattaatgtgtgatccaattgttcatgtcccagtgattgacgtgtgctcttcaggtcagggctatcttgtgagtgctggccctgcaatgtcacctagcattccaccattgcatccaaaccttgtgaagccattgattcctgaatctgatgctgtggtgaagggtgcaagagagactctaagattgctacttagtggttcaagccagggtaaccaacagatgatgagggacactctgcctgcaattttaactaatccagacgaaaatcaaaacaatatccttgtggctggaagtcgtggtctttacactggaaccagagatattaatgctattgcaaacagcattgctgctatgggattagtatcgctgtctggggtatccaaggtagacagtggagtctattcggagctatgtgaaaactatgggaatttggaagcagtgaaaaattccaacgattcaggtggtggtgcctttttggatgatgagggcggatcttctttggattcgaagcagtagtgtagtgatgaatgcaattgtttttctttttttatttatgtagatctcttttgtttagcaaatgtagatatgcgctgtagcacttttgaatggttttaaagttaaaatttcaccattcaagccttgatcccacgtaggaggatgcattgatgattctttgttgattagatatttggaatgtggctg

SEQ ID NO: 29660 - DNA, 1524 bp, Glycine max
  Clone ID: UC-GMFLMINSOY109G05_FLI
gctcaatccaaggacaacgtaattgcaattatgcttgataccaagggtcctgaggttaggagtggggatttgccacaaccaatcaatttaacaactgggcaggaattcacttttaccatccggaggggtgttggaactgcagattgtgttagtgtgaactatgacgatttcgtcaatgatgtggatgtgggagacatgcttcttgttgatggtggtatgatgtctttggtggttaagtctaagacagaggattctgtgaaatgtgaagttgttgatggaggagagctcaagtcaaggagacatttgaatgttagaggaaaaagtgcaacactgccttccataactgagaaggattgggatgacatcaaatttggagtggataacaaagttgacttctatgctgtttcttttgttaaggatgcacaagtagttcatgaactgaagaattatttgaaaagctgtgatgctgatatacacgtcattgtaaaaattgaaagtgcagactctataccaaacttgcattcaattattacagcgtctgatggggccatggttgcaagaggagatcttggtgcagaactccctattgaagaggttccacttttgcaggaagaaataatcaccatatgtcgtagcatgggaaaggccgttattgtggcaacaaatatgctggaaagcatgattgttcacccgacaccaaccagagccgaggtatccgatattgcaattgctgttcgagaaggttctgatgcaataatgctttctggggaaactgctcatggaaagttcccactaaaagccgtgaaagtaatgcacaccgtagcattacggacagaagccactatacctggtggtcaaatgccaccaaatattggtcaagtattcaagaaccacatgagtgagatgtttgcttaccatgcaaccatgatgtctaatacccttggaacctcaactgttgtcttcactagatcaggcttcatggctatccttttgagccactatcgaccttcaggcaccatatttgcttttacagatcaaaagaggatacaacagaggttggctttgtatcaaggagtctgtcctatttacatggaattctctgaagatgctgaagagactttcacaagggccttggatttgctgcagaagcaaggaatggtgaaatcaggagaagaagtagcactagtacaaagtggcacgcaacccatatggaggttccaatccactcacaatatccaggtccgaacagtgtaaacaaaataaaaaggtgaagatggctatgaattaagtttcagtctttcaggacactacattttaatttagaagagcatgttcccttttggtgggttgatgccaatttgataagtccagtagcattttagttgtttgtttgttgcctaggtttttttttttcttcatttattactttcttgttatcattatttttttggtgattgttctatatttatcacggacattagacatatgatagtgtcattgaaattttgattagaaattgcaatg

SEQ ID NO: 29661 - DNA, 1950 bp, Glycine max
  Clone ID: UC-GMFLMINSOY109H04_FLI
gtggacctcgaaaccggccaggtggtgagccaggaagccatcacctggtcggtctcaggttaccccaccatgaccctagaggacatggtgggagtacttgaggttcccctcaagagcaccgaattcaaccgctccatcactaaacgcggtgtcaatttagcagacctggcatgcttgccaatctcttcagggtggtatgggacacaagtggaggagaatacaaggttgattaaggtgcagtgctattccaaagaaggcactgtgaacttctacatgaaaccaattgagggtgtgactgccttagttgacatgaataaaaaagaggtgctgtcaatttcagataatggccaaaacatccctgtggccaatggaattaacactgactaccgttactccattcagaagctgaatggaggagagttgaggatgctgaatccaatatccttggagcaaccaaaaggtccaagcttcacaattaatgggcacttggtgaaatgggcaaactgggaatttcatctgagaccagacccaagagctgggatcataatttcacaagccaaggtgagggaccctgacacatcaaagctgagaagtgtaatgtacaaagggttcacctctgagctatttgtgccatacatggatcccacacaagattggtactttaagacatacatggatgctggtgagtatggatttgggttgcaggcaatgccactagaccccttgaatgattgccccaagaatgcttactacatggatggtgtctttgcctcttccgatggaacaccatatctccaacccaacatgatttgcatttttgagagttatgctggtgacattgcgtggcgacatgcagagtgccccatcactgacctcaaggttacagaagtgaggccaaaggtgacactagtggttaggatggcagcagcagtagcaaactatgactatatcgtggattgggaatttcaaactgatgggctaatcagagcaaaggttggactgagtggtatcttgatggtgaaaggaactacctatgagaatatggatcaagttcccaaccaagaatatctttatggaacccttttgagtgaaaacattataggtgtaatccatgaccactttatcacatattacctagatatggacgttgatggctctgacaattcatttgttgaggtaaacataaagaagcaagagacctctccaggagaatcacccagaaagagttatctaaaagctgttaaaaaagtggcaaagacagagaaagatgctcaaataagacttcaactctatgacccatcggaatttcatgtggtgaacccattgaagaagacaaggatagggaaccctgttgggtacaaattggttccaggtgccacagcagctagcctgctggatccagaagatcctccacagaaaagagcagcttttacaaacaatcaaatatgggttactccttacaacaaaagtgagcaatgggctggtggtttatttgcttaccagagcaaaggggatgatactcttcaagtctggtccaacagggatcgtccaattgagaataaagacattgttttgtggtacacaatagggttccatcatataccctgtcaagaggactatcctgtcatgcctactgtatcatcaagttttgatttgaagcctgctaatttctttgagagaaatccaatccttggagtccctcccaatttcgaagatgatttacctgtttgcaaggctcgtgattcagcttgagatcccatcagttggtttttagtctaattagatacatgctttatttatgcatgtagcaaatgatgatgcccagactgaactttaaacctaacttaaagtaaagagggtctagttctgttgattaaacagaatgtataaatattgtaaaaccttttgataccatgtttaattcttatgtataagaaaaattatgatgtt

SEQ ID NO: 29662 - DNA, 1297 bp, Glycine max
  Clone ID: UC-GMFLMINSOY111A06_FLI
gtcaacctttgctcattatgccataaataaatcaattataacagattagtttgtaggtttacgaggtggagatttttagtgatcaactatttggtttgctcagctaaagaatcattcaaggatccagctgagcaagtacgaggaagatgggatctttcataggtcatatattgccagggaccttgtttcttctagttgggacatggcatatatggggctctgtgatgagatatgtgtcaaaccctaagacattcagagtccaggtgtggaatcctgtaccggggtttaatgggaggctcaagcacttggagctctatgtcatttcaattggtgctttcatagatttgtgtgtggagctcttacttgcaacccgcctcaggttttttgttgggggagccttgaacaccacttacttcaacaactttgagcactcgggaatgcttctgatgtttcttatctttggtgttgttgctctcctctcagaaaagacaagacgtcttcccttgcctgaaaatgctctttgtttgattgctgctgcagcattctgtgcagagtatcttctattctactttcactcaacaacacacaaaggccttgaaggctattaccatgtcctccttgctttcctcattgggctttgcattatatcttcagtttctggtgcccttttgccaaccagcttcccagtagatttatgtaatggtattgctatagcgctgcaaggaatctggttctatcaaaccgcttttgttctttacggccccatgctaccatctggttgtaagctcagggatagtaatatcacatgtcacccaaaagagagtgaggttcggggtgaattgtttgctaacgctcaactctttgttgcagtccttgctgttcttgtaggaactgtagcatcctatggctttgcagcttcaagatatgggaactgtgaagagcttgctagcaatgctagttgaattgaactaggaactgtgcatgcatcaattctggtggtggggagttagcatagatgcacgaagacttaagtctgattctcattgttgtgattgtatgcacatggaatgaagtaccaatatggtttggcatggttgacagataactttatttcttaaacatgtaattaggggtttgatctctaggttcatatgtatgaaaaaatatttgttgcaagatatcagtctcttaaatggatttaaacatctccaagaattagtcttttgcttcttgactagggaatattctggccaaaagaaatgaggaatgaagtagactatgcaataaattggcagcc

SEQ ID NO: 29663 - DNA, 2496 bp, Glycine max
  Clone ID: UC-GMFLMINSOY111H09_FLI
caaaaacaaaacctcaatctctctttcttcctttctctccctctcttcttcattcttaggagagaaaaacacaataaaactaaaccctctcttttcttaacgccgtaacgggcattcccaaaggcaccgtcacaaaccctcacgtgcgagtcacgtgtttttgtgaattctctttgccatggctctggaccagctttcgaatcccaacgccgttgacggtgccggtaacggcgcgacgccgtgctccgctgtggacggcggcatcgaggacgggaggccggctgcgaggctgccgcggtggacgcggcaggagattctggtgctgattcagggaaagagcgatgcggagagccggttcagaccgggccgtggaagcggttcggcgtttggttcgagcgaaccgaaatgggcgttggtgtcctcgtactgcaagaagcacggcgtgaaccgggaaccggttcagtgccggaagcgatggagcaacctcgccggcgattacaagaagatcaaggagtgggagtcgcaggtgagggacgaaacggagtcgttttggctcatgaggaacgatttgaggagggagaggaaattgcctgggtattttgacagggaagtttacaatattctcgattcgccgtcgtcaacggctgcggctgcagctgcggctgcggcggcggagactccggtgccggtggcgacggttgaggaggaggtgcacctctatgatagtaatcggagggtggggagtgaggatgggttattctcggattctgagaaggacgaggttttgcttttagctactaccaaggatgttcctgcacctgttcctatctcagaaaaattatgttgctgaaactgatggtagaaattggttttatgattgggccactggggtatatgttgaaaatttattgatgttcaagtaagaagcgtacttagaggatgaaggagagtgacaaaattttgaaactactaagggactgtttgcataaccgttaacggacatttcacacttttggagacagaaacacagaagcaagagaatggaagcgttaacttggctttcgtttcaacggaattacaaactagcaccgagagggatttagcatgtgtttggatttgcattaaattatctatagttacattgaaatacaactaatgtgattttaggaatatactcacataattagttttataccgaggaattgattctgattcataattgatatttgagttgaaataactttgacttatatttgtattggataatttattttatagagctttcctactaactggttttagaatttaaaacactaaacataaattactttatcgaatacgttagttttttaaacataaatcactttagtttaaatcaattttaaccaaacttagtcttgcaaaattatttttgcaaatgctcactcaaacacacacttagagttcaaagttaaatattatggcattattatttgatttatgtagcaagttcagctcggtggaaaaagatttggttgatattattgttgttgttggtaatgtctggtgttttttggtatatactaatgctgttgtgtttcttgtctctcgtgaagttggaaagtgtataggtatgttactagctttcattgctttggggacacttcttttttttatgaaagactaatttttagtgtttttcttttcttaattttattttttgattctagcaatgatgttgtttgttataaagttggaagtagtggaatgtggaggggaggatactgggattcccatatggcattcttcaattctatatttgttttttcttgatttttctttttcttttgatttgcagagaagcaatatcagccccatctccaaggctgcgaaggggaaggcaaccctcaaggtactaccaatgagaaacgggcaaacccaaatccagaaatgggttctacatctcaaggggaacggaagaggaagtggttagcaaccgatggagaggaggaaactttgcaaagccaattaattgatgtcttagaaaagaatggcaaaatgctacgtgatcaacttgaagctcagaaactgaatttccagttggatcgtcaacagcagaaagacactgcaagtaacatagttgctgtactagataagcttgcagatgctctagggagaattgctgataaattgtagagcaaggaggatcagaatagaatagtgtacataacaatttggagtcaacaatagtggttcccataatttatctcaggatagtttctagaagatgaacatcatactagttaccctttcttttttttaatcttctgtctgcattatgccacttttttgtggtttactactgccactaaggcattttatacacaaatttggaggttactgcattttatttattctcttctttcagtgaggttatatgaatctttctccggtcaataatagtggttgtacagatgataatgatattactattacttattaaggtacatttttatt

SEQ ID NO: 29664 - DNA, 1223 bp, Glycine max
  Clone ID: UC-GMFLMINSOY112A08_FLI
tatcttccaaggagttacccttccagatgctccaagatttggaaaggtgtttggggggcagatgattggacaggcactggctgcagcttcaaaatctgttgactgtcttaaggttgttcatagtttgcatgcctattttattcttgcgggggatttaaacaatggcgaagactttttggtcgtaagcactgaattttgcccaaaagataaggcaccaatattatatggacatcactaaagccaggagctccttcatgtaatttgatttcagcaaagaattatctaaaagagccttgttataataagctatgggtctgaactcctgcattgcaatagctcctatgcccaactcgaaagcatcacattcaacaatgaatggttttgagaaattaggtgtcactaaacagtgccaattacatatcaaattcaccgtctccgtgatggaaagagcttcgcttcaaggaaagtggatggaattcaaaagggaaatgtcatattcactctgatggcttcatttcaaaaagaagaatcagggatggtccaccaagaggtagctataccatctgtccctgctccagataagcttctgccgatggaagagctacgggagagacgtcttactgaccctcgtttaccaataacctatcggaacaaagtagctacatctcaattcatcccatggcccatagagatacgattatgtgaatatgaaactgcaacaaatatgacaaaatctcctcccagtttgagatactggtttagagccaagggaaaactttcagatgatcaagccttgcataggtgtgtggtggcatatgcttcagatctaatatttcttcaagtaagtttgaatccccaccgtgagaagggtttcaggacacgttctgttagtctggaccactctatgtggtttcaccgatccgtaaaagctgatgactgggtgctatttgcgatctttactcctagtgcccatagtgcacgtgtctttgtcaccggccaaatgttcaatcagaagggagagcttcttgtatcattggttcaagaaggactagccaggaaaattaatcccggaaattcagccattaaatctatgttatgaactgctgaaaaatgcacagattagcatgtatccattttatagttttattttaaaaaaattccatgtatccatcaccataacatcttagtatctaaattatatatgtaaatttttgtattgctct

SEQ ID NO: 29665 - DNA, 2045 bp, Glycine max
  Clone ID: UC-GMFLMINSOY112F04_FLI
cacaatacttgtgttcatcgaaaaaatattttttcattcttttagcaaaactctatccgcaattcagcctctccggggcgggaggcagagatgatcaaacgaaccgtagggcgctgcattattacagaataataacacaaaccctagtcccaaaaatcaaaaaggaaaaaaaaaatcagataacaaacttatcacttcgctgcgagattcaattcccatctataaaattctcaaatccgaattcgattcccaattccgcctcttgttcagaaattgattctgtgtcgttacaggggaaaatttctctgcacgacatgtctgatgaacgagcagtgcatcctgattgccggaatgctagtaacccttatcatgaatgtagtgattactgttttagagtaatagctgaagccaaaattaggtcacaacaacaggaatcagttggacaagctagtggtggaaacaactctaagcaagccatcccagatgaatcctatgtggaaaaggaaatacacaatggcagacccgatcttgaagaaaactctgatagtgatcctgaccagcctgctgtgcaggaagcagagcaagaggttgactacacaaaactttctgcgagacagaaaaagtggatggagttgagatccaagatgcaagaagcaaaaaagcgtaatcaaattgaaatagctgctgagaaaaagaggatggaagctccaaccgagtctaggggtgtttctaaacagaagtggctcgaggataggaagaaaaagattggaaaacttcttgatgcaaatggattggatatgacaaaggcatatatgcttgacacacaggaggcagcagaagaaaaatacaagaaatgggagaaggatcctgctccatttgggtgggacgtctttaatcagaagacattatacaatgcatacaaaaagcggaccaagaatgttgaagtcgatgtagaagaatataatagaatgaaagaagctgatccagagttttaccgtgatgcttcaagtctccagtatggaaaggcaccaaaaatctcagaggagaagattgataggatggtacgggagctaaaggatagggatgagaagcgcaactcttttagcaggagaagacgcttccatgaagagaaagatattgactcaatcaatgaccgtaatgagcatttcaacaagaagattgagcgagcctttggtaaatacacgctggagattaaaaataatcttgagcgaggaactgcattgcctgactaaggtacttatgtagtgatgtgttttatttcacactgtcctgatagtgataagtttcagtggtggattgcactttttagagtgctttttaatcatgtaatactatagtctaatattttgcaatgcacatggagcattgcggagtcatttcgaacttcaaacattatatgcttgcttgagatatgggttcttcttagaggtactctttccagtcattatgtagatatggaatttatacctccccacgtatatgtaagtctgagtttgatcggggttaggtttttttccctctcctttcatttgggatcgtgatctaatgcatttgggatttaatttgttatcacttttcgtagggctctaaaaattgtagttaactcatttgaattgatggaaaggagtaggaatagaatgaaatttaggctttgtttggattgaagaaatggcatgagatgaagtggaatgaaatgaacttttaattagttctgttgtttggattacttaaaccacaatggaatggaaaagagatcgaacatttcctttcaattccatccaaaacacttatttttttcataccctccaatatgggaggtagaggacaatatgttggttgaaattaaatgaaacgttgaaaacttaacctgctcattgagggttcttccgtttcagttggccatgcacattgacacacggtcaaggaagtcttcctgaactatttagtacctcactcattttttaaacagtgaaatggatttttcttttcatcataaagtatccaatgaaatggtatttttattc

SEQ ID NO: 29666 - DNA, 902 bp, Glycine max
  Clone ID: UC-GMFLMINSOY112G04_FLI
tgggaattaggatatggagaggaaggaagcttctcttttccaaatgttccacccaaggcagatttagtttatgaagttgagctcattggctttgatgaaaccaaagaaggcaaagctcgcagtgatatgactgtggaagaaaggattggtgcagcagaccggagaaagatggatggaaatgctttgtatcaggaagaaaaactagaggaggctatgcaacagtatgaaatggccatagcatatatgggagatgacttcatgttccagttgtttgggaagtatagagatatggctctggctgtaaagaatccatgccatcttaacatggcagcctgtttgattaagctgaaccgctacgaagaagctataggacaatgcaacactgtactgggtgaggatgagaacaatgtgaaggcgttatttaggcgaggtaaggctagagcaacacttgggcaaacagatgctgccagggaagattttctaaaggcaactaaatatgcccctcaagacaaagcaattgctaaagaattgagattgcttgctgaacatgacaaggctgtttaccaaaagcagaaagagatatataaaggaatatttggaccaaggcctcaaccagttcctaagccaagaaactggctcatacttatttggcagtggttgctttcagtattctatggccttgtcacgctattcaagcgtgaaaggcataaatctgactaaacaagaagaccattgctgagttgagttgacaattatttacgtgcatcctacgaaaggccacgtcttgtgctactgaggaaataatcatactttttactatttttgctttgcttgtggaacaatcagatgttgaaaaagcagtgctgattttactcttacgagtcatccttgacaatgctatc

SEQ ID NO: 29667 - DNA, 3759 bp, Glycine max
  Clone ID: UC-GMFLMINSOY113F07_FLI
attactcattttcattcatccactcaactccctttcctaccatggcactagaattggttggtggtgctcttctttctgctttccttcaggttgcgtttgagaagcttgcttctcctcaagttctggacttctttcgtggaagaaagcttgatcaaaagctgctcaacaacttggaaatcaagctgaactccatacaggctctggctaatgatgcagaactaaagcagttcagagatccacttgtcagaaactggcttcttaaggtcaaagatgctgtgtttgacgcagaggatatcttggatgaaatacaacatgagatctccaaatgccaggtcgaagctgaagctgaagctgagtctcaaacctgcacttgcaaggtaccaaatttcttcaaatcttctcctgctagttcctttaacagggaaattaaatccaggatggaagaaatccttgatagattagatcttctctcaagccaaaaggatgatctaggcttgaaaaattctagtggtgttggcgttggatcagaattgggtagtgcagtaccacagatatcacaatcaacatcttcagttgttgaaagtgatatttatggcagagataaagacaaaaaaatgatttttgattggctgacatctgacaatggcaatcctaaccagccatcgatactttctattgtgggcatgggtgggatgggtaagaccacacttgctcaacatgtattcaatgaccctaggatcgaggaggctagatttgatgtcaaagcttgggtctgtgtttcagatgattttgatgctttcagggtaacaagaacaattcttgaggccatcactaaatcgactgatgatagtagagacctagagatggttcacggaagattgaaagaaaaattgacggggaagagatttcttcttgttttggatgacgtttggaacgaaaaccgacttaaatgggaagctgtgctaaaacatcttggttttggggctcaggggagtagaattattgccaccacacgtagtaaggaagttgcttctaccatgaggtcaaaagaacacctcctggagcaattacaagaagatcattgctggaagttgtttgctaaacatgcattccaagatgataatattcaaccaaatccagattgcaaggagattggtatgaagatagttgaaaaatgtaaaggacttcctctggccttgaaaacaatgggaagtctattacacaacaagtcatctgttacggaatggaaaagcatattgcagagcgagatatgggaattttcaacagagcgtagtgatattgtacctgctttagcactaagctatcaccatcttccttctcatctcaagagatgttttgcttattgtgccttattccccaaagattatgagtttgataaggagtgcttaatacaattgtggatggctgaaaaatttctacaatgttctcaacagggtaagagtccaggagaagttggtgaacaatacttcaatgatctattatcaaggtgcttctttcaacaatcaagcaacacagagagaacagattttgtcatgcatgaccttctcaacgatttggcaagatttatttgtggggacatttgtttcagattggatgggaatcaaacaaaaggtacaccaaaagcaacccgtcattttttaattgacgttaaatgttttgatgggtttggaactctatgtgacacaaaaaagttacgtacttatatgccaacaagttacaaatattgggattgcgagatgtcaatacacgaattgttctccaagtttaattacttacgtgtcttatctctgtttgattgtcatgacctaagagaggtgcctgactctgtgggtaatctcaaatatctccgttcgttagacttatccaatactaaaatagaaaaactacctgaatcaatatgttcactctacaacttgcaaatactgaagctaaatggttgtagacatttgaaggagctgccctcaaatttgcataaactcactgatttgcatcggcttgaattaatagaaactggagtgagaaaggtaccagcacatttgggaaaactggagtatcttcaagtattaatgagttcgtttaatgttggcaaaagtagggagttcagtatccagcagttaggagaactcaatcttcatggaagtctatcaataaggcaactgcagaatgttgagaatccatcagatgcattagcggtggatttaaaaaataaaacacaccttgtcgaggtagagttagaatgggattcagactggaaccctgatgattcaacaaaagaaagggatgtaatcgagaatctacagccttccaaacacttggagaagttgaggatgaggaactatgggggtactcaatttccaaggtggttattcaacaattcatcatgtagtgtggtgtccttaaccttgaagaactgtaaatattgcctatgtttgcctccccttggacttttgccatctctgaaggaactttcaattaaagggcttgatgggatcgtgagtatcaatgctgattttttcgggagtagctcttgttcatttacatccttgaaatctttggagttctaccatatgaaggaatgggaagaatgggaatgtaaaggtgtgacaggtgcttttccacgtcttcaacgtctttctatagagcgttgtcccaagctgaaagggcacttgccagagcaactatgtcatttaaattctctaaagatttctgggtgtgaacaacttgtaccttctgctctcagtgcccctgatattcataaattatacctaggagactgtggagagctgcaaattgatcatgggacaactttgaaagagcttaccattgaaggtcacaacgtggaggcagccttattcgaagagattgggcgcaattactcttgttcaaataacaatattcccatgcacagttgctatgatttccttgtaagcttgcgcatcaaaggtggctgcgactctttaacgacctttccgctagatatgttcacaatactcagggaactttgtatctggaagtgtcctaatctacggaggatttcacaagggcaggctcataatcatctccagactctggatatcaaagagtgcccccaattagaatcattgcctgaaggaatgcatgtcctccttccatctcttgattctctgtgcatagatgattgtccaaaagttgaaatgtttcccgaaggaggtttgccatcaaatttaaaagaaatgggtctctttggtggtagttacaaacttatctccttattgaaaagtgccttgggaggcaatcactctctagaacggttagttattggaaaagtggattttgagtgtcttcctgaggaaggtgtactgccacactctcttgtttctctacagatcaatagctgtggagatcttaaaagactggactacaaaggtatctgccacctctcctctctcaaggaattgagtcttgaagactgccccaggctccaatgcttaccagaggagggtctgcccaaatccatttcaactttgtggatttggggggactgtcagttgctcaaagaacgttgccgggaacccgaaggcgaagactggccaaagattgctcacttttgcccgttgctcaatcaacgttgccgggaacccggaggcgaagactggccaaagattgctgacattgaaaacgtgtatataaggtagtgaggttgattataaagaataatggtgaaagatgtagatgcttctctattgcctgcaatttact

SEQ ID NO: 29668 - DNA, 1354 bp, Glycine max
  Clone ID: UC-GMFLMINSOY114B03_FLI
aaaccgtacatccaccacagaaggaaaactaagtagaggtataaatcaagaaggaatagactattacaacaatctcatcaacgaactagtggctaatggtatacaaccattggtaacgctttttcattgggatcttcctcaatctttagaagatgaatatggtggcttcttaagtcctcgcatagttaaagattttcgagattacgcggaactttgcttcaaggaatttggagatagagttaagtattgggttactttaaacgagccatggagttatagtcagcatggttatgcaaatgggggaatggcaccgggtcgttgttctgcttgggtaaatccaaattgcactgggggtgattctggtacggagccttatttagttacgcactaccagttacttgctcatgcagctgctgttcgtgtatacaagaccaagtatcaggtatcacaaaagggtttgataggcattaccttagtagctaattggtacctaccattctcgaataccaaagctgatcaaaaggcgactgaaagagcaattgacttcatgtttggatggtttatggatccactaacatctggagactatccaaaaatcatgcgatctcttgtgagaacacgattgccaaagtttactacagagcaatctaaactacttattggctcatttgattttattggcctaaattactattcttcaacctatgcctctgatgcacctcatctaagtaatgctagacctaactatgtaacagattctttggtcacccctgaatttgagcgtgatgggaaacccataggtataaagattgcttctgattggttgtatgtttgtccaagaggaattcttgatcttctattatatacgaaggaaaagtataataatcctttgatttacattactgaaaatggtataaatgaatttagagacgaaacactatcattagaggaatctcttttagatacatttagaattgattatcattatcgtcatcttttttatcttcgatcagcaattaggcatggtgtgaatgtgaagggatattacatatggtctttattcgacaattttgagtggtcttccggttatacggtgcgatttggaatgattttggtggattacaaaaataatttgaaaagatatcataaactctctgcaatatggatcaagaattttttgaagaaaactagcctttatgattctagcatatgatattgtcaattatgagattcatcatccattagatagttatatttgtaaataataatttgtgtatatttttttatttattccaataaggtctcagtggaccagaatgaaaattaaaaatgaagatacaaatttattgatttt

SEQ ID NO: 29669 - DNA, 2698 bp, Glycine max
  Clone ID: UC-GMFLMINSOY114B10_FLI
gtttatatgatcacaagaaaaacagtttttcatcagttctcaatttcaaatcagacgttaaaccttcaatccttcatgtcattatctgctttgtcttctacctctatcactgctgcaaaataaggttgtacttttaaattcaaagcttataaagaaagggtattgattttgacattatgcttatttgtgtattttgcagggagtagcttcttctttctaagttgacatatgcacatggcttctcttggggatataggacttgcagcagcaataaacatccttagtgcatttgccttcttactggcttttgccatacttcgaattcaacctataaacgatagggtgtattttccaaaatggtatttgaagggtttaaggagcagtccattgcaagcagggatatttgtgagcaagtttgtcaatttggacttcaagtcatatataaggttcttgagctggatgcctgcagcattgcaaatgccagaacctgaactaattgaccatgcaggcttggactctgctgtgtacttgaggatctacttacttgggctgaaaatatttgtcccaattgcagtcctagcattttctgttatggttcctgtcaattggacaaatagcaccttggagcgttcaaatttgacttatagtcagatagataagctttctatttcaaatattccaaccggatcaaatagattctggactcatttggtaatggcatatgcttttaccttctggacatgctatatcttgaaaagggagtatcagatagttgcaacaatgagattgcattttcttgcatcagaacgacgccgtcctgaccaatttacagtacttgttagaaatgtaccacctgatcctgatgaatcggtcagtgagctagtggaacatttctttttggtcaaccatccagatcactatctcactcagcaggttgtttacaatgcaaagaaactttctagtcttgtttcaaagaagaagaaaaggcagaattggcttgactactatgaacttaaatattctagaaatcaatccacaaggccatctaaaaagactggttttcttggcctttgtggtaatagagtcgatgcaattgatttttatactgatgaaatcaagagactatcagaagaaatagaattggagaaacataaggtgatgaagaattctaaatatacaatgccagctgcttttgtttccttccgaactcgttggggtgcagctgtttgtgcacagactcaacaatctagaaatccaaccgtatggttgactgaatgggctccagaacctcgtgatgtgtattgggataacatggcaataccatatgtttcactaacaataaggaagcttataattgctgtagctttcttctttttgacattctttttcatgattcccatagcattcgtacagtcactggctaacattgaaggcattgaaaaagcagcacctttcctaaaatcttttattgaaatgcaattcataaaatcctttatacaaggtttccttcctgggattgctttgaagatatttctcatatttctgccagcaatattgatgataatgtccaagttcgaagggtttataagcacgtctgctctagaaaggagagcagccacaagatattacatcttccagttcattaatgtatttcttgggagcataattactgggactgcattccaacagctagataaatttatccatcagtcagcaaatgaaattccaaaaacaattggtgtctcaattccaatgaaggcaactttcttcataacttacataatggtggatgggtgggctggatgtgctggtgagattttaaggttgaagccattgatattttatcacttgaaaaacttcttcttagtgaagactgaaaaggaccgtgaagaagcaatggatccagggacatttggtttcaatacaggcgaacctcaaatacaactgtatttcttacttggccttgtgtatgctgtagtcacaccatttctacttccatacatcatagtgttctttggcttggcatatgtcgtctaccgtcatcagattattaatgtctacaaccaagagtatgagagtgctgcagcattctggcctgatgtccatggacgtattatatttgcgttagtgatctcacagctgctgttaatggggttattgagtacaaaagaagctgctaactcaactccattgctcattactctcccaattctgacaatatcattccatctgtattgcaagggacgatatgaacctgctttcgttaagcatccattacaggaagcaatgatgaaggacacattggagcgcgcaagagagccaaacttcaatttgaaagagttccttcagaatgcatatatccatccggtgtttaagggtgatgatgacagtgacagtgatgtaatgagcgaaaactgggaggagcaagaacctgtacttgtacaaacaaagcgccagtcccggaaaaacacaccattgcctagcaaacatagcggttcattatcatcttgaatgccacttcttatgagcataaaactagagcaatagatagtttgaagttcactattggtggcactgctgcatgatatacccaaactctactctcttttttttctgtatataaatcagaatctagataatctttcaatgaagtatataacagaagtatgcaggtcaaattttgacagtctgatccgtg

SEQ ID NO: 29670 - DNA, 2475 bp, Glycine max
  Clone ID: UC-GMFLMINSOY115D06_FLI
tgcaaatgcaagttccggtgggagggcgagtccccacatggttctctcggcgaagactcctcgaagagaagctctgcgacctccacaagtgcaccaatttggactctgtgaaccaaatccacgcccaagtcctcaaagccaatctccaccaagacctcttcgtcgctcccaaactcatcgccgccttctccctctgccgccacctcgcctccgctgtcaacgtcttcaaccacgtcccccaccccaacgtccacctctacaactccatcatcagagcccacgcccacaacagttcccaccgttctctccccttcaacgctttcttccaaatgcagaaaaacggactctttcctgataatttcacgtacccttttctccttaaggcttgttctggcccctcctcgcttcctttggtccgaatgatccatgcccatgttgaaaaaattggtttttatggggatatctttgtgcccaattcgcttattgactcctactccaggtgcgggaatgccgggcttgatggggccatgagcttgtttttggccatggaggagagggatgtggtcacttggaactccatgattggtgggttggtcagatgtggtgagttgcagggtgcgtgtaagctgtttgatgaaatgcctgacagggatatggttagttggaacaccatgttggatgggtacgccaaggcgggggagatggacacggcgtttgagctgtttgagagaatgccttggaggaatatcgtctcgtggtcgacgatggtttgcgggtatagtaagggtggtgacatggatatggcgaggatgttgtttgacaggtgtccggtgaagaatgtggtgctttggacaacaataatagcgggatatgctgaaaaggggcttgcgagggaggcaacggagttgtatgggaaaatggaggaggctgggatgaggcccgatgatgggtttttgcttagcattctggcggcgtgtgctgagtctggaatgctcggattggggaagagaattcatgcgtctatgaggaggtggaggtttagatgtggcgctaaggtgttgaatgcgtttattgatatgtatgccaagtgtggttgtttggatgctgcctttgatgtctttagtggaatgatggcaaagaaagatgtggtgtcttggaattccatgatccaggggtttgccatgcatggacatggcgagaaagcacttgagctcttttcttggatggtacaggaaggttttgagccagatacgtatacatttgttggccttttgtgtgcttgcactcatgctggccttgttaatgaagggcgtaaatacttttattcaatggagaaagtatatgggattgttcctcaagttgagcattatggttgtatgatggaccttcttggacgcgggggacacctaaaagaagctttcatgcttctgcgcagcatgcctatggaaccaaatgccattatattgggtactcttctgaatgcttgtcggatgcataatgatgtagatcttgcaagagctgtgtgtgaacagctgtttaagttggagccatcggaccctgggaattactcccttctgtcaaatatttatgctcaagcaggagattggatgaatgttgccaatgtgaggttacaaatgaagaatacaggaggtgaaaagccttctggggctagttccatagaggtagaagaagaagtgcatgaatttactgtatttgatcagtcgcaccctaaatcagatgatatatatcagatgattgacagattagtacaggacctcaggcaggttggatatgttccaatgatacatcagtagagatgaatgaaaatcaaattggttgcattattatgtaagcacagctgaaatgatgcttcaaggaatgaatatgatttttttagttgagcacagtgcattgctggtttactaaaaacaagtaaacaaatcattgtattcatcactaccactggtttagcaacaaagttgtatgcatggctcatggctgaacctatgcttctggtgcaagcatcacagtacggatcccaaaagctctgcttgcagcatggcgtgatatctcttgcatgattttgcctaacacagtaattgcttggttgttacagaatgaatctctttgttggtttggtgatcccaactttgtcagaatttacatgtcatcagttggttgttcgattttgtgttaggaagtttttttacggttttaccttttaaatatgttggggagattgaaagaaagactataatattgatgagcaggcaaagaacaaggttgtatgcatggctgaacctatgcatctgttgcaagcatcatctgcattcctactaacgctggcaggagctctgttgtaaagtcaaagaaagggaaaattgtgtagagaaaatgctctagttcttcctgtctaccacttattgtaaaaagaagctacacttaacatatgtatactgggtgacaattcgactc

SEQ ID NO: 29671 - DNA, 811 bp, Glycine max
  Clone ID: UC-GMFLMINSOY115D11_FLI
ggagaagctgagaaaaatgttagcaatactgatggtgtgaatctatatgctcaaatgattgatgatgctgaggggttggagaaaattgaaaacctccagagtcatgataacactgagatttatgaaaaggcagtgaagattcttgagacatactggatggaggaagacgacgagactatgcctccaggggatgcttctcaatcagggttcaactttggtggcactcaaccacctgcggtgccttctggtggattcgactttaattagaaggagttttgactggtctatcagtaaagtcctccagtttgacagtccaacagtttggggtcaagtcaatgtcctttgattgcccttggctcctacaaggttcagccttggtaaatagggggttgctggaccagcgtgggtttttgaaatggctggttttacatacaccatggggacagatgggttgtggcttgatttcttagccacacaagagttatatatactagagtttgctttctgccaagtgatcattccgaatgatttggctttatagagttgttgtgatcattctggatgttttgacgaaataccaaatgctgctatcttttgcttcatattaatagttacaagatggaatttttctttcaccctttccttgtaagttcttttgaagtttaccgtaaagttctattcattatgttctttaggtctcgttcaggttcgtaatgtaatgtttactaatctggtttaggaaagaagtcttacactttgttctcaggcattatatttggttacagtgtgggattttctcttccacttcgtt

SEQ ID NO: 29672 - DNA, 1947 bp, Glycine max
  Clone ID: UC-GMFLMINSOY115E02_FLI
caaggatggccataaaggcaattgagttgttgaaaggaagcggaaaccatgaagagatatttgaagttcttgcagcagtggctgcatctttgggggatgtaatagatgatgtgaacactttgcaggtaacacctttaaagggggcaatgaccaatgaggtttttgaggtaaattggccaaccaaaagtgatggtcatcaaagaagggttcttgttcgattatatggtgaaggtgttgaggttttcttcaacagggtggatgaaatccaaacctttgagtgcatgtcaaagcatggacagggtccacgccttcttgggaggttcaccactggcagagttgaggagttcattcatgccaaaacactctcagctgcggacctccgtgaccctgaaatatctgctttgatagcatctaagatgagggagtttcacaatcttcatatgcctggtgcaaagaaggctcagctttggcagagaatgaggaagtggcttagtcatgccaaaagtttgtgctcccctaaagaaaccaagaattttggcctggacaatctagatgctgaaataaatatgcttgtggagttgttatctcaaggaaatcaacagattggtttttgtcacaatgatctacaatatggtaacataatgatggatgaagatacaagagcaatcactttaattgactatgaatatgccagttacaatcctattggatatgatctggcaaatcatttctgtgaaatggtggcaaattaccatagtgacgaacctcatgttcttgactacagtaaatatcctggtctggaggagcgtcaaaggtttgtttataattatttgagttctgaaggttagtccactaaaatcttactcccacataccactgaaaatacatattattggcagagatctggatttaggtaactgctattgatctattctcagctgaaagaataaacttgctctacaatttggttgatttgtgatatcactccagcttatatttttagtttctatacttggattttaattgaattatactgacagtgtaaagttttttctaactgtcatccaatcatggactgtcatataattgaaaattattgacttttgtaataattattttaagagtcatatgtaggataatttcttattagtcaacaatgtaaaaatctttacattattaaacacttagcatgataggattattaaacacttaaagcatgatagggaaaaacatgcttctttttggtaagaattgtaacagtttacactattaatcattctgtccttgctgatatggagcttgcaggcatttctttaacttatttgtagtatattggatgatttatttaatttgcttatgcactcttcagggtaggcacgaatgcaagccccccttatctcttcaacttcaatgttgacgtaattttaagaattgttttactgaccaaagataactcattaaagctttcaatcatgttagaaaaactgaagtcatatcttcaaaacgatgcttctgaatttcatacacgtttaccaattttaattcgaaacttgtgcacaggtaagaaaccaagcaatagtgaagtggatcagctagtgaatcttgcagaaaaatacactcttgcaaaccatctattttggggcttgtggggacttatttcgagtcatgtcaatacaattgactttgactacaaggagtatgcgaggcagagatttcagcaatactggttgaagaagcctactttattggactcaccaagtatcgtttcccaagatgggattgccaatggtgtgaaccattgacatggatgcttcttatgtatttagcatgttcagcttggtatgtgttgactaatatatagaaaggcatgatgtgatgcataaaatttgtaaataatatataactaaaaatgtgtgatttgagaatttttacaacagttatgttagt

SEQ ID NO: 29673 - DNA, 1341 bp, Glycine max
  Clone ID: UC-GMFLMINSOY115E11_FLI
ttaagaagtttcattcggatcgtgagagaggttaagaagttttctagagttgttgtttgatagagaaagagagaaaatgggaagagctccttgttgtgacaaggcaaatgtgaagagaggaccatggtcaccagaagaagactcaaagctgaaggattacatagagaagcatggcactggagggaattggattgctcttcctcagaaagctggtctaaagagatgtggaaaaagttgcagattgagatggctgaactatctaaggcctaacattaagcacggggaattctccgatgaggaagacagaatcatttgcagcctttatgctaatattggaagcaggtggtcaattatagctgctcagttgccaggcaggactgacaatgatatcaagaactattggaacaccaaacttaagaggaaactcatggggttgcttccttcatctcatcaaagaatagcaccctatcaacaattctcctctcaaaacccttcatcatttccttctcactcatcgctatcctcttcacaatatagggactactactacaactcctctcatcattattacatcccagcaccaacctcatctttcacatgccttgaaccaatttctgctccttcaagtaattacacaaacacaacaacaacctccaactctctctctttttaccaacaccaagagcccttggtcagtgttagtcccaggcagtattaccccatcacagacagttccatgcttgtgtttggtagtgaaacaagttgcagctcctctgatggaagctgcagtcaggttagccttggcagagagatcaaacaagaagacatggggtttcagaatttcatgtttggagatcatcagaacatgaacaaattcatgaacattaatcatgatggaggtgaagaatatgtgaaccaatggacacagaggccaaacgggtacatttttcagactcaacaaacagcattggattatgatcttgaggtcattaagaacctaatttgtagcaacagcagtagtaatagtaataatgggtacttgagtgttgatgaaaacaagacggaggagaagggtgtgtactacaactactgcaactgaactgagtgcaactgatgaatgaactgactactgcaagtgatatcagagagatatgatcagtgagaagcatgggattgggaagattcagaaaagactttgaggttgtgtggagttctgtgttgtgttctttaatgaaatgagataattcttattttgacagtacatggtaaaagcttctttatatttttgtgtatatcccctaggaagtgatgatttgatgacgatgatgttagattttttct

SEQ ID NO: 29674 - DNA, 845 bp, Glycine max
  Clone ID: UC-GMFLMINSOY115G10_FLI
gttcattttttagccttcgtaatctgaatttttcttgggtttttagtattaaacaattatattttcctgttgtgtgttgtattttatgaataacgtgtgaattgtaaatgtggtgtggttggtttttctgtgtgcagtggaagagactgagatgggttcaaaaaccaagacttttacctttgaagaggtggctaaacacaatcacaggaaggattgttggattatagtcaaagggaaggtgtatgatgtcaccccatttttggatgatcatccaggaggtgatgaagttttagtgactgcaacagagaaggatgccaccactgattttgaagatattggccacagtgattcagcaacacagatgatggaaaaatactttgttggggaggttgacaccaacactcttccagcacaagttaccagcaacaacagtgtacgccaaccaacacaagcaccacctgcctataacaatcaatcttcaggatttgttgtgaagatgttgcagtacatagtgccattgctgatattggcctttgcatttggcctgcagtactatggcaaaaaaaacaagtccactgagtcagaaaattgaatttgagtttgtgaccattgttttagtggtaataatagactggtggcagtgttgtttcttttcttttctttttggggtatcatttaaaactacttcactatctcaaataccatgcggggattaattttgtattcttagtgtgttgtggcctcttgctcaagttatgcttgttgttatttaggtaccgttcgattgagtggaaagaaaagaaataaaagttctaaatcagagtaaaaaggtgttggatcatctc

SEQ ID NO: 29675 - DNA, 1093 bp, Glycine max
  Clone ID: UC-GMFLMINSOY115H05_FLI
gcagaagtattaaaatcagaaattaaacgaattgaattaatgcttgctgttgtcactgaggaaaggaataaattaagaaatgtggccaatttgaagaatgatgaagctctggatgcatcgaaaaatgcaaatcctgttcaggagcctgaatcatctcttatgaagaaagatgattgcattaaagatttagaaagtaccttgcatgagcaaagaatggttaataatcgtcaattagatgaaatgaagttacttaatgaaaagttgcatggtgaagcaagaagagtgaagtcactggagagggagagtgaccggctccggtcagagatttcattattagaggcaaagttgggtcatggtgatttttccgctgctaatacaaaagttctgcggatggtgaatacacttactgtcgataatgaggccaaacaaaccatagaggcactgcaaactgagcttcaaaaaacgaaagagaaattaaaagctgttgaagaattgaagagtcaatcaggcgaagctggaaagctggtagatagctacatatcggataagatgttgcaattaaaagagcaaatcgcaacacttgagaagcgagaagaaagatacaagactgtgtttgcagacagaatttcagtcttccggagggcatgctgtgagctttttggttacaagattgtgatggatgaacaccagcgttctaatggaatcccggtgacacgatttaccttgcaatccatttatgcacaaagtgatgacgaaaagcttgaatttgaatatgaatcagggaatactaacattttggcaaatcattatacatctcagcctgaggtttctcgtcaggttgagatattcattcggaagatgaattcaattcctgctttcactgccaacatgacagtggagtctttcaatagaagaaccttgtcttaaattcaacaatcaacttgtgtctaagtactggtattttttgctggcaactatcagctatgatgtatatatcttgcatcttcaatttcaggaatttggtcagctggtaaggctgttacgactggacacattttgtatccatacattggtaatggatggcttggatttg

SEQ ID NO: 29676 - DNA, 477 bp, Glycine max
  Clone ID: UC-GMFLMINSOY116D10_FLI
catggaacagccagtgtacaacagcaccttggactgctggaggaagatctataggacagaggggttggcttcattttaccgtggtgcagtttctaatgtgtttaggagcacaggagcagcagctatcttagtcttgtacgatgaggttaagaaatttatgaactgggggagaatttaacagcaccaacgttcattgatttcattttgacaccggagactcaacttcaatacgtcaacatgttgcaaatcttgaggcttaggataattttgtaaaagcacaaatgagctccattacagttcattagtaaatgtgtctttattggcattccaacgctaaggccattgattttgtggctttgctattactaattttcctttgtatcttttaagacgatggaagatcagaaatcagatatgatgaaaggggatttttattggtaacaaaagaaaattgatcttttgttgtctaattttttc

SEQ ID NO: 29677 - DNA, 1891 bp, Glycine max
  Clone ID: UC-GMFLMINSOY117C04_FLI
cttttctttcagggaaaacctatatgttcagaatctcaaatgtaggcttttcaacctcaattaacttcagaattcagggtcacaccctaaaattagttgaggttgaaggatcacacactgttcagaacctttacgattcacttgatgtccatgttggccaatcggttgctgtgttagtaaccttaaaccagcctccaaaggactactatattgttgcctcaacaagatttacagagacacctctcactacaactgctgtactacactatgcaaactctttttcctctgcattgggacccgtgcctgctccccctgttgataaatatgactttgactggtccatgaagcaagctagaacctacaggtaaggtcactaaaaaaacaaagtaaaaaaaaagacttcctgagttgttttaatttattgataaattctaatctgtttaaaatgaattattcctgcagatggaatctgacagcaaatgctgctaggcctaacccacaagggtcattccattatgggaagattactcctacaaaagtaattaagttggccaattcagcacctttgatcaatggaaagctccgttatgctgttaacagtgtctcctatgttaaccctgacacccctctcaagcttgctgattacttcaacattcccggaatcttcagtgtgaatttactccaaaactctccctcaaatggtccaggatacataggcacctcagtgttgcaaacttctctccatgattttattgaggttattttccagaacaacgaaaacaccatgcaatcttggcatcttgatggttatgatttttgggtcattgggtatgtcagcttccttgaattataagttttgtttctattatcaaaacaatttagaattagcttaggaaagttttaatgattgatcattgccacaattgcagtcatggtttcggccagtggacagatgccagcaggaaaacatataatctagtggatgccctgactagacacactacacaggtaaacttaacatgaaagttccctattccttattttgagttttctttagagacccttataataattaatagaatgtggctatttgtttgtttgtttctgacatgcatagctggtgtgcttcaaatgaatgtaggtgtatccaaaatcctggactactatattggtgtctttggataaccaaggcatgtggaacttgaggtctgcaatatgggaaaggcaatatcttgggcaacagttctatctcagagtgtgggatgcacagaaaagccttgctaatgaatatgacattcccaacaatgttctgctttgcggcaaagctgttgggcatcacccttagaacatatatcaactatcagcctcctatttatcggtgtattttctggtcatgagggcttgactacaactagaattccttttcctttttcttaaaaatgaaaaaggacaatgagaagctactttctccaaatttcggatagactcgagtatatttgagaaaaaaaaaagtatttttattaatttttcattgctcgtttgtgtattaacaattgatttcatacttaatttatttatagctataagttgtgaagaaaccaggttacgtttcattcgtttaaaacttgatcaaccagcaaattgagtttgacatggccgaatgctacgttcaatattaagattcgagtaccttataatcatggttaacttgtagtatatttgaacagaaactagtcctgtaaaaaccccttctggtgatacttaaaagtaaaatataaaatgggaggtcaggttgccagatccatcttgtgatacttaaactaattcctactattgtaattgaattggcacattgagaaatcacaatcattggattaggagattttatgct

SEQ ID NO: 29678 - DNA, 2115 bp, Glycine max
  Clone ID: UC-GMFLMINSOY117F06_FLI
aaagccactgagtgcgattcaataattgcgaaaaaccacggggagtgttgtttgtttcggtcccggctggaccagggaatgaatagagatgagaggctttcggcttaagaaaactgagttaagcggccaagccaaacgcagaatcggcggcagaaattgccaccggaagcacgtcgaagacgggtgaactaaaaagaagaatctcatccaccacttatcctttcaatccccaaccccaaaaaaatcacaacttctagtagtaaaaaaaaaaaaagactagaaggtagtatagtagagtgtttttcattttttattttttattttaatgatgggagagaaaagcaacagcaacagcggcgacgcgattaactcgacgctgctccacgggaagtacgagctggggcggctgttaggccacggaagcttcgcgaaggtataccacgcgcgccacctaaacaccggaaagagcgtggcgatgaaggtggtgggaaaagagaaggtggtgaaggtaggcatgatggaacaaatcaagagagagatctcagccatgaacatggtgaagcacccgaacatcgttcaacttcacgaggtcatggcgagcaagtccaagatctacatcgccatggagctcgtgcgcggcggcgagctcttcaacaagatcgccagaggccggctccgggaggaaaccgccagactttacttccaacaactcatctccgcggtggacttctgccacagccgcggcgtcttccaccgcgacctcaagccggagaacctcctcctcgacgacgatggcaacctcaaggtcactgacttcggcctcagcactttctccgagcatctcaggcacgacggcctgctgcacactacgtgtggcacgccggcctacgttgcgcctgaggtcatcggaaaaagaggttacgacggcgccaaggctgatatttggtcttgtggcgtaatcctctacgtacttcttgctggttttttacctttccaggatgaaaacttggtggctttgtacaagaaaatttaccgcggtgacttcaagtgtccaccgtggttttcctccgaggcacggaggctcatcaccaagctcctcgacccgaacccgaacacgcgaatcacgatttcgaaaatcatggactcgtcgtggttcaagaaacccgtgccaaagaacttggtgggaaagaaaagagaggaattgaacttggaggaaaagattaaacatcaggagcaagaagtttccactacgatgaatgcatttcacatcatttccctttcggaagggttcgatttgtcgccgttgttcgaggagaagaagagggaggagaaagagttacgtttcgccaccacgcgccccgcgagtagcgtgatttcgagattggaagatttagcgaaggcggtgaagttcgacgtgaaaaagagcgagactaaggtgaggttgcagggtcaagaaaatgggcgaaaaggtaaactcgctattgctgcggatttgtacgccgtgacgccgtcgtttttggtcgtggaggttaagaaagacaacggtgacaccttggagtataaccagttctgcagcaaggagcttcggccagcgctcaaggacatcgtgtggaggacttctcctgcagagaatcctacactcgcttgaacaacaaattcaattcaattgtcgttcctttgtagttttcttgtttcagaacagagacatattttaattatttgcttgcttctttgtttggattctaattctatgttttagcctctcgggggtgtcgtcgtctttttacccaggaaagggggaattgttgaaaaggcgaatgcagtagtagtgaaccgaaatggacatcgaggagttgttgtcgatgattcgggtacatgtgctgcctgttgtattgctcgtggctgatgttgttgctatgttggcgtgattgtgaatatgcttgcaaattgattggtgtggctcatggtcattcgtggctgcgtttaatttattttttctattatttatttttttggtgaatgagtgctttgtttggggtcggtcagtgatgacgtgtatgttaatttctgaactctggaccttaattgccaaataaaagaggaaattgacttctg

SEQ ID NO: 29679 - DNA, 1536 bp, Glycine max
  Clone ID: UC-GMFLMINSOY117G04_FLI
ggcacaccctcgccggaaaagtcgtaatggtcaccggcgcctcctccggcctcggccgcgacttctgcctcgacctcggtcgggctggctgtcgggtcgtcgtggcggcccgcagagtcgaccgcctcgagtccctgtgcgacgaaattaacagcatggccgccggagacggtggccgaagccgccgcgccgtcgccgttgaactcgatgtcgctgccgatgaccccgccgtcgacaaatacgtgcagaaggcgtgggaggcgtttggtcacattgatgctcttatcaacaacgctggtgtcagagggaatgtcaaatcacctttggaattgtctgaggaggaatggaaccatgcgttcagaacaaacttaactgggacatggttggtctcaaaatatgtatgcaaacgcatgcgtgatgcacaaagaaaaggatcaatcattaatattgcttcaattgctggtttgaaccgtggtcaattgcctggaggtgctgcatattcatcctcaaaagcaggcgtcaatatgctaacaagggtcatggcattagaattgggggcacacaaaatcagagtgaattccatatcacctggacttttcaaatctgaaatcactgaaaaactaatggagaaaaattggttgaataatgtggccatgaaaacagtacccttgagaaaatttggcacttctgatccagcattaacatcgctggctcgttatttaattcacgattcttctgagtatgtgtcaggcaacaattttgttgtggatgctggagccaccttaccaggtgtgcctatttattcctccctataaacaaagaataaattctgctctatccggtgttggacttgagctaaacaatttttttatatggtaaaatattgaggagtatagcattatgttgatttaccagtcgatataaaaaattgtggttacttcccatccaactataaaattaacgtaatcgaaatacttctcttttttgtattgagtatgtgtgcagtaattgaacccaaataaatttaggattgtttgttgggagaggtgtccacctttttttccccgtgatatcttgaacagaattgtctttaaagaaaaatatttgtgagaaactatatatatatatatatatatatatatatatatatatatatatataaagcttttggcagcacatgatattgtccagttgaaaagctactagaactttactacaataattccctttcctaaaagcataaaagacgaaggcatgccatgaactttactactctagaaacctttcggaaatcttctgtggaaacctcagatgcttgcttctcctttgttgatgtgctcctcaatacccacaaagagtgacatgacataagctgtaatacagagaaatgaggaaatatattactacttaatcattgcagtccttaccaagattgtgaattgttgtacaagtttatgacagcaacaaataaaattttttgctttgtaatttttttatttcaaataatatgtttgataaaatattgtttcacaacat

SEQ ID NO: 29680 - DNA, 945 bp, Glycine max
  Clone ID: UC-GMFLMINSOY117H03_FLI
tggagctgaagaggattgagaacaagataaaccgtcaagtgacatttgcaaagaggaggaatggtttgctcaaaaaggcttatgaactctctgtcctctgtgatgctgaggttgcccttattatcttctccaaccgtggcaagctgtatgagttctgcagcggccatagcatggccaagacacttgaacggtatcacagatgcagttatggagccttggaagtccagcaccaacctgaaatagagacacagaggcgctaccaagagtacctgaagctaaaatccagagttgaggcactacagcaaacacaaagaaacctccttggggaagaattggagcacttagacgttaaggaccttgagcagcttgaacgtcagctggactcttccctgaagcaaatcaggtcaaacaagacacaacaaatgctcgatcaactcgctgatttgcatagaaaggaagagatgctactggagactaacaatatcctgaggaacaagttggaggaaatcaatgtagcccttcaaccaacatgggaaactagggagcaaaatgctccatacaattaccacccttcccaatcagagggatattatgagacagcacattgcaacagtacattgcgaattggctatgattcttcagggttaaatgaagcaggaggagctgcaggaacctcagcccaaaatgctagtgaattcatgaatggatggatgaactaaatttatttccaatttagtttaatttatgattatcagaaaaaaatgatgcttttgtagagatcttggcctacaagaacaggctgtaataataggtgtcatgcagcataaaatatacttatgctattcttaatattccaataagacatgtttttcatgtttataactagatggattgggtgattattaaatgaatggattgaatagtcactccaattagtattctaag

SEQ ID NO: 29681 - DNA, 1284 bp, Glycine max
  Clone ID: UC-GMFLMINSOY117H06_FLI
cttcctcctcctcctccgccgccgccaacgccatgggtgacgttcagatccacaagaccaaactctgcatcatcggaagcggtccctccgcccacacagccgccgtctacgccgctcgagccgagctgaagccgatcctcttcgagggctggatggccaacgacatcgcccccggcggccagctcaccaccaccaccgacgtcgagaacttccccgggttccccgacggcatcctcggcggcgagctcatggaacgctgccggagccagtcgctccgcttcggcaccgagatccacaccgagaccgtctccaaggtcgatttctcgaaccgtcctttcagggttttcaccgattcccgaaccgtcgaggccgaatccgtcatcgtcgccaccggtgccgtcgccaagcgcctccccttccccggctccggcgacggccccgaaggctactggaaccgtggaatctccgcgtgcgccgtctgcgacggcgccgccccgatcttccggaacaagccgctggcagtgatcggcggcggagactccgccatggaggaagccaccttcctcaccaagtacggttccgaagtttacataattcaccgtagggatacgttcagggcttcgaagattatgcagagcaaggtgatgaataatagtaagattaaggtgatttggaattcggtggtggttgaggcttttgggggcggagataacaagagggtgcttgggggattgaaggtgaagaatgtggtgactcaagaggtgtctgaattgaaggtttctgggttgtttttcgcaattgggcacgagcccgcgaccaagttcttggacgggcagcttgaattggattctgatggatatattgtgacgaagccggggacgacgaagaccagtgtggagggagtgtttgctgctggggatgttcaggacaagaagtataggcaagctattactgctgctggcactggatgcatggctgctttggatgcagaacattacctgcaaaatgttggtttacaacaagataagagtgattgactagcttgggtgtgtccggagatcagaaaatgcttaatcagaagcaatgtttaattcctatagaagaatagagaaatcagtctgcatcctactagaatctccatttgtgggttgctacattcatatttttattgcagacacagatttgcattattttttaagcagtgatgctcacgtgcaccagtacatgtattaagaatattatttattggccgcattttacgtgcattattgtgacaatgcagag

SEQ ID NO: 29682 - DNA, 1248 bp, Glycine max
  Clone ID: UC-GMFLMINSOY118B05_FLI
caaaaaaataatataaaataattcagtggttattttaaaaaaatataaaaatgaaaactaactaatgttattttataatgagtattcaatttgtagaatatacggaataagacatagtgacatacagcaacagcagcagcatttccttcgttctgagaatcgagcagcaacgttaacagtgagtgtggtatgttccacgccctctcccaatgcctgtcctccagcacagcctccctgtcccaggcgcggcaagcccacgccctcattctccgactgaacctcttctccgacacccaactcaccaccagcctcctctccttctacgccaacgctctctccctctccaccccccaactctccctcaccctctcctcccacctcccccaccccaccctcttctccttctcctccctcatccacgccttcgcccgctcccaccacttcccccacgtcctcaccaccttctcccacctccaccctctccgcctcatccccgacgccttcctcctcccctccgccatcaagtcctgcgcctccctccgcgccctcgaccctggccaacagctccacgccttcgccgccgcatccggcttcctcactgattccattgtggcatcctccttgacccacatgtacctcaaatgcgaccgcattttggatgcccggaaactgtttgatagaatgcctgatagggatgtggttgtctggagtgccatgattgccgggtactcgcggctcggcctcgtggaagaggccaaggagctctttggggagatgaggagtggtggagtggagcccaatttggtgtcgtggaatggcatgcttgccgggtttgggaacaacggcttttacgatgaggccgtggggatgtttcggatgatgttggtgcaagggttttggcctgacgggagtactgtttcgtgtgtgcttcctgctgtggggtgcttggaggatgtggtcgtgggggctcaggttcatggttatgtcatcaagcaagggctggggtctgacaagtttgtggttagtgccatgcttgatatgtatgggaaatgtggctgtgtgaaggagatgagccgggtgtttgatgaagtggaggaaatggaaattgggtctttgaatgcttttcttactgggttgtcacggaatggtatggttgacaccgcgttggaggtgtttaacaagtttaaggaccaaaaaatggagttgaatgttgtgacgtggacgtcaataatagctagctgctcgcag

SEQ ID NO: 29683 - DNA, 2049 bp, Glycine max
  Clone ID: UC-GMFLMINSOY118D08_FLI
cagtaatggaaactacacagccaatagcatctaccaaaccaacctcaataccctcttatccaccctcacttcccacacagaaatcgactatggtttctacaatttctcgcatggccaaaactcagacaaagtatacgcaatagggttatgcagaggagatgttaagccagacgaatgtcgcagctgcctcaacaattctagagtgagtctcacacggttgtgtccaaagcagttagaggcaatcaattgggaagagaagtgcatgttgcgctactccaaccgcgcaatttttcacaccatggatgcttctttttcgtatcatatgaacaacgtaaacaatgcaacggatgcggaagagttcaataaagtgttgggtgagttacttagaaatctgagtgacaaagctgcatcaggtgactctcgtcgcaagtatgccgcggatactgcagtctttgcgaatctccaaaccatatacggtcttgtgcagtgtacgcctgatttgtcaaggcaagactgcggtaaatgcttgcattggagtttggcagatttcggaaatgttttcaaaaacaaagttggtgctgtagtgcttagaccaagttgtaatgttagatatgaaatctaccccttctacgatgaacctacaccatcagcatcggtaccactttccctaaaagaaaagggcaactcactgcgaactacaatcgccatagttgtgcctaccgttctcgttgttgttgctttgctcattttcattagcatatattttaggaggaggaaattagcaaggaaaaatcttctcgctgatgaagacgatgatgaaattgaattggctgaatcattgcaattcaacttcgacacaataaaagttgcaacaaataacttctctgactctaataaactcggagaaggcgggtttggagctgtttaccaggctctctaatggacaagtgattgctgtcaaaaggttgtcaagcgattctggccaaggtggcgtggaatttaagaatgaagtccttttactggccaagcttcagcaccgaaatttagttaggctacttggttttagtttggaagggaaagaaaagctacttgtttatgaatatgttccaaataaaagccttgattacttcatatttgatccaacaaagaaagaacgactggattgggatagacgatacaaaatcattcaaggtattgctcgaggtcttctttatcttcacgaggattcacgattgcgcattatacatcgtgatctcaaagcaagcaatgttctcttagatgaagagatgattcctaaaatatcagattttggtatggcaagactgattgttgcaggtcaaacacaagaaaatacaagtagagttgttggaacctatggatatatggcaccagaatatataatgcatggacaattttcaataaaatcagatgtcttcagttttggtgtactagttcttgagattgtaagtggccaaaaaaaccatggtattcgtcatgggaagaatgtggaagatctactaaactttgcatggagaagctggcaagaggggacagttacaaatattatagatccaatattaaacaatagttcacagaatgaaatgataagatgcacccacattggtttactctgtgttcaagaaaatctagccaacagaccaaccatggctaacgttgcactcatgctaaatagttgttctatcactctcccagtgcctacaaaacctgctttttttatggatagtgcaactacaagccttccaaacatgtcatgggaagttaattcagggacaacacgatcgaatcagtccacaaccaaatcagctcacgactcagtaagtgaaacttcaatttctgagctataccctcgttagattctggtcatagttaggggtgatatatgcatttgtcgtcaatgttattaatacatgttttggaacttgtaatttatttgtgcaaagtatggttacttaaatagaccatagaacttaattgtttcagtcaactaagacagaaacatgaaatataaatgaatggtgtattggtctt

SEQ ID NO: 29684 - DNA, 2074 bp, Glycine max
  Clone ID: UC-GMFLMINSOY119A11_FLI
cagatatatcaacccttttgtgtttttaatggacgcccgtcattggaaatgcaatttgtgctatcgcgcaaatgaaatgcctgaggatttcgcatgggaccctcaaacgaaaacttttggcgacccatctagaagacccgaactccaagaaaccactattgaatacattgcaccatctgaatacatgcttcgtcctcctcaacctccgatttatttgtttgtttttgacgtcggttccgcagcaatcgattgcggttacctcaacacttttgcagaacaactttcgctggacattgacaaattgcctggccaggaaagggctttcattggctttatcggtttcgattccgctttacattttttccaattcgatgaaaacgagagagagccgaggcatattattgaatttgatgttgaagaaagttttgcgcctgtgttctctggactttttgttgaacttaatgttttcaaagagatcatcaaaaaatttatatacaacataccatcaatttttgaacgttctatgtcatcctcaaattgtctcggttctgcacttacagttgcaaaaaatttaattaacgaaatcggtggacggataactgtttttaccgcatccatgccaaatctcggaattggtgctctgaaatgtttggaattcaacactgcaaaaaagatcgcatttacacctcaaattgacttttacaaaagtttggctctcgaatgtactggaaaacaaattgccattgaccttttcgttgtcggatgtcaaaacgtagatcttcgaacattatctgatatgtctcggttcagcagtggcaccgtgtaccatttccctgaatatcatttccttcgggaccaagtcgaagtcaaacggttccaaatgattttacgacgttactttattcgaaagcttggtcttgaggccgtgttgaggatacgttgctcgaggggactttctcttcacactttttatggaaatttcttcgtccgttccactgatttgctcgccttgcccaatgtgagtcccgattcggccatgggcgttcaaattaaacacgacgaagtgatcacagccagtcaagtgtgtttccaagcagctttgctgtacacctcgacgaaaggtgaccgtcgtattcgcgtccacacactttgtctccccgtgctcacacaagctgcacatgtattttcttcgctggacattaactcgtcaatatcgctactttcaaagatggcttctgatagagctttgcaaggcgctagtttatcagactgtcgtgaggcactaataaatgccattgtcgatccgaccgtctgttatcagcgatcacatggtcaagttggttccatgttgcgcatgcctcctgaaggtggtcttcaatacatgcccatttacatacttggattgttaaaaaatagggcgttttcggattctctgcaaagggtcaccatcgatgaacgtgtggcaacttttctgcttttcaaaaatgctccgttggaagttctcttacttgagttgtgcccagctctttacgcttttcaccaaattctttactgcgaaccgaatcaggatggacaggtcccttttcccgaccgtcttcctcctacttatgagcatatctcccaaaatggcatttatttgctcgacattggcacatttgtctatgtgtacgttggctctgccttaaatgtctgtattttgcgttctctttttggcaccgattcgttcgctaaattggattcggattcaacagtaattgaaattgacactccgcaaagcaaacatttgcatgcctttcttcgccatttacaagaacagagagggaatatgtatgctccagctaaaattataaaggatgacagtccaaggcgggaggcatttacgcgacggctcatccaagatcggtcggattcttcacattcttacaacgaatttatgcaattcctccaacgagaagtcagcaaagccagtaaatgaagaggatgaatgaaatttcttgtgatatcttcgttttattcgtcaggaaattagtctctgttaataccgttgttcactaattggtaaatacatgtaatg

SEQ ID NO: 29685 - DNA, 701 bp, Glycine max
  Clone ID: uC-gmflminsoy119e02_FLI
agaaaactctttcaggatttacctaagatcagtagtgggttgtctcaactaagcttgtttgatagagacagtagacagagtagaatgtctctccaacaacttggggtgatccgaagccaacgccaagtttggagacccatcagagggttgcctgaaacctctgtggctattcttcgttcttggctcttcgagcactttctccacccttatcctaatgattctgaaaagttaatgctggcatctcagacaggtttaactaaaaaccaagtctcaaattggttcataaatgcacgagtacggctatggaaaccaatgatagaagaaatgtacaaagaggagtttggagagttttctgaagactccaacccggctggtaacaactacttgacgagggaagataccacggattgtgtagaggattgaatcaaaagctccagtgaacaaaaaacttattgtttgacaaacatgggcctttaaatgcttgcctttttcctccaaaatcgagagataaacattatgtaacatgacaagatgatgagccaatatgttcgggtgaaattcaagatttgtttttttgaatgctgaaaattcaagatttggaaaatcatgacttatgatgttccttagattaagtgaccagcttgtaacacatcgtgaggcttgttatgtcaggtttgcaattaataccagtttataggatt

SEQ ID NO: 29686 - DNA, 736 bp, Glycine max
  Clone ID: UC-GMFLMINSOY119G07_FLI
gaaatggctcaagagtactttgaatctgctaaaggtggactaattgttgatgttagctgtggtagtggtttattttcccggaaattcgccaaatctggagcatattctggagtcatagcactagatttttctgagaatatgcttcggcaatgttatgaattcattaagaaagatgacacactttcaaccactaatattgctcttgtaagggcagatgtttctagacttccgttcccatcaggttcagttgatgctgttcatgctggtgcagctttgcattgctggccgtctccctccaatgctgtagctgaaatcacccgggtactaaaaagtggtggagtatttgttggaagcacttttctgcgttatagttcattaactccctggtttttacgccctttcagagagaggattccacaaggttatggctatctaacagaggaagagatcaaagacctttgcacctcatgtggtcttaccaattactcaagcaaaattcagcaggcttttattatgttcacagctcagaagccgtaaaattgggtctgatctatttataacattcattctcccctgcattttatcaattccttctgtatgtatgtataatgtattgtatcacttgtttcatctgtaaagaaattgtaaataaatgagaaatggaaaggtcaaaacctgagtctggtgtaaaggttcacaggttgtaaaaatatatccaaattctgacaactttcgt

SEQ ID NO: 29687 - DNA, 1114 bp, Glycine max
  Clone ID: uC-gmflminsoy120d10_FLI
ggagaagatcttggtcctttaagcagcaaagagctcgagtctcttgaaaggcagctagattcgtccttgaagcaaataagatcaaccagggtactcaagtttccaacttttcttttccaatttccatatgaaattgtagatctaggaacatattaagagcccaatcttgaaatatccctatgtctatatggtcaagcccattttgagagagttatttaagtcatgctctgagtaatgtaagaaatggaaatacaagtattggggcacattattaccattaaaattgaaagggtaaagtaactaacaaggaaattgctgttttttaatttctctattgattaatgaagagaaactcttggttacataattctaaatatagatatatcaatctcaaaatgtgtaatttctaagtacaaatgtagtatatgtatttaattttgttaagtttgtttccttaatttacagacccagttcatgttggatcagctctctgatcttcaacgtaaggtatgtatgaaaacaattttagtttcctttgccaccgtttaccatctcatgccatacctccgtttgttctccaattgatacatgtcactggtgtaggaacacttgctaagtgaggctaacaggtctctcagacaaagggtaagttagaaacttagaattcatcaacctatatatgtaaatatacatcatcccacaaagtatatagcatataattaatacattttaaaatagaattaggaatcatgcaagaccaaaacattgctataagatacaactgatattgtgatatcgaaaattgatgggtataaatgactttatctgatttgtagcagttggaagggtatcaaataaatccactccaactgaatcccggagttgaagagatgggatatggcaggcatccagctcaaactcatggtgaagccctctttcaacaaatggagtgtgagccaacgttacaaattgggtatcagcctgatccagtatcagtggtgacagcaggcccaagcatgagcaattacatggcaggatggttaccatagtttgcgtttcctgcataagatccactgcaccagcacatttgccgttccaattttatttgaaaacg

SEQ ID NO: 29688 - DNA, 1836 bp, Glycine max
  Clone ID: UC-GMFLMINSOY120E03_FLI
cttcgtcaactacagctccatcattcagtacctgacgcgctccaacaaaatcgactctccaattctccagaaactctacgccgaaatcgagaccgataaaatcgaaatcgacggccacctcatgaacgacatcattgtaggattctccaaagccggcgatccgactcgcgcgatgcggtttctagctatggctcagagcaacggactgaaccctaagccctcgacgcttgtggcggttatcttggcgcttgggaattcgggaaggacgcatgaggctgaagcgttgtttgaggagattagagagaacggcttggaaccgagaactagggcttataatgctctgcttaaaggttacgtgagaacgggttcgcttaaggatgcggagtttgtggtctctgaaatggagaaggctggggtcaagcctgatgagcaaacttatagtttgttgattgacgtgtatgcgcacgcggggaggtgggagagtgcgaggattgtgttgaaggagatggaagcgagcaatgtgcaacctaattcttatgtttttagtagaatcttggcgaattatcgcgacaaaggggagtggcagaaatcgtttcaggttctgaaggatatgaagagcagtggtgtgcagcctgataggcatttttacaatgtgatgattgatacgtttgggaagtataactgccttgatcacgccatggccacgtttgagaggatgttgtccgaggggattccgccggatatcgttacttggaacacgctgatcgattgtcattgtaagtcgggacgccacgatatggccgaggaattgttcagtgaaatgcagcagaggggatactcgccttgcatcactacttataacattatgattaactctatgggggagcagcagaggtgggagcaagtgactgcgtttttgagcaagatgcagagtcaggggttgcagcctaattcaattacttacacaactctggtcgatgtgtatgggaagtccggaagatttagcgacgctattgagtgcttggaggtcttgaaatctactgggttcaagccaacttcaaccatgtataatgctctgatcaatgcctatgcgcaaaggggtttgtctgaactagcagtaaatgcattcaggttgatgacaactgagggtctgacacctagtctcttagctctcaattcattgatcaatgcattcggtgaagacagaagggatgctgaagcctttgctgtgctgcagtatatgaaagaaaacaacattgaacctgatgtagttacttataccacactaatgaaagctttgattcgtgttgaaaagttccaaaaggttccagctgtgtatgaagaaatggtcgcatctgggtgcactcctgatcgaaaagctagagcaatgctgcggtctgctcttagatacatgaagcagacactaaaatcatagttaaattatcaagcacattctttcatgaagacagaacagaatcaaatttgctcaccttacatggttataattctgaaggttaatgtaataataaaatcacgattccttgtagactagcataacccccgctgtcccctcacagcaggtgctttggggcagtatgtctgggtcatgccggatatgtacgctccaacagttcctgaatgagaaatgaagctgtggaaaatcacgacatggaatgcatagaaaatttatggcttcctgtaatgctgtatcatgtatttgttgatctgtccctcaatatatgaaatttaaactgattctctctttgtgatttatgtatcatacgttaatgtaagtaaaattaatttgttgaaatgcatattttatgcacttcattt

SEQ ID NO: 29689 - DNA, 2698 bp, Glycine max
  Clone ID: UC-GMFLMINSOY120H07_FLI
ctctctaaggcctaagctaccaggagctccctatctacagtgtttccctctctttctctctctctctctctgcaaaagctacgaagctgtgttctgatccttcaaattaggttgtttgctttttttggggagttaaatggatgctaggccgtggatttggtcaatttgatctcaattgaaattttttagtatttctgatggactcgaaaactagttctagagctctcccaaaacaccatcagaagacggctgggattcaaacccttgaggcaaaagacacagggtcttctttgcagaagggggagaaaacagagctggctgctcctgtggatttgtctatgtatgcagcgaacgcatccaagcagaataccggggaaactgctgaaatcaagaagttaggaggtttaaccctaaaggggtctgctgattccatgagcattaaaagtggttctggtgcttcctcatctgttctcgacaaagtagttcatgctgctaatgagaacataggctcacaggaaagctctattgatctagacaaaaagacgtcggaagatggaagtgtgaagaacagttctgtttctgccaaagttagtgatggggccagcagtcttgcaaagacaagtggaagtgccaagatcagcaaccgggctgattttgttgagagtggtaagagcagtatttgcagaggaagcacaagcagtgatgtgagtgatgagagtacttgtagtagctttagtagcagcataaacaaacctcacaaggctaatgacttgagatgggaagctatccaagcagttcgaagtagagatggggtgttgggtttaggtcactttagattactgaagaggctgggttgtggggatattggcagcgtttacctctccgagttgagtggaactaaatgttactttgcaatgaaggtaatggacaaagggtcccttgcaagtcgtaaaaagctacttcgtgctcagacagaacgagaaattctgcagtctctagatcacccttttctcccaactttgtacacccattttgagacagagaagttctcatgcttggttatggaattctgcccaggtggtgacctccatactcttaggcagaagcaaccagggaagcattttcctgagcaggcagtaaaattttatgtggcagaggtcctactggctttggagtatcttcacatgcttgggattgtctaccgtgaccttaagccagaaaatgttcttgttagggatgatggacatattatgctctctgactttgacctctccctccgatgtgctgttagtccgaccctcgttaaaacctcgtccacagattctgagcctttaagaaagaatgctgtttactgtgtccaacctgcatgtattgagccaccttcctgcatccaaccatcctgtgttgctcctactacatgcttttcaccccggcttttctctagcaaatcaaagaaagacaggaagccaaaaaatgaaatcggcaaccaagtgagtccgttacctgagctcattgcagagcctaccgatgcccggtccatgtcatttgttggaactcacgaatacttggcaccggagatcattaagggtgaaggtcatgggagtgcagttgattggtggacttttgggatctttctatatgagctgttgttcggtaaaacgcctttcaagggatccggtaaccgagctacattgtttaacgttgtcggtcagccactgcggtttccagaagcacccgttgtgagttttgcggcaagggatcttataagggggttgcttgtaaaggaacctcagcacagattggcatataaaagaggcgctactgagatcaagcaacaccccttttttgaaggtgtgaattgggcattgatcagatgtgctaccccacccgagatccccaaggctgtagagtttgagaagataccctcaccagcttcatcaagtggtggtgaaaaggctgttaaccatatgtcaatagctaatcagaaaggttctgataattatctggagtttgatttcttctagagagagggtagagacaatatattgattgcaaatggtttctgttaagagggggaggaactgtttttcaatgtttcaggaacagatatgatgaggaattgtatgtttgtttttgttggctatttgcagtttcaaatttgtatggcataattaatgcatagcttctctgtcatctcaaaaaaaggcttataaaaacaacatttcaacactgcctgtcaatgcactactaggaattccaaccagccaatggtggtgatgatgctcttaaggtcccaatggtattggtaagtatgtaattgtggaaaatggagcacatgggcatcaaacaaaatgaagatttagtatatttttatttgctttgtaaacaagtgtcatgtcatcacaaaaggacttttttccgcttagaaattcaccattgcctgaatgcactgtcatagaatctaaatccaaaaatcaattaaaatgcagaattagtctgtttaggtgtttttatttatttgttatggcaatataattagtaagatttttctttccatgagcattactattggtcgttggacactgtaggattacgtttagttgagaaatttgtatcctctcctcttggtaaagttcctccaagggatgaatgtaatgtaagacattcttagctaattgaacgttttattttagacagt

SEQ ID NO: 29690 - DNA, 669 bp, Glycine max
  Clone ID: uC-gmrominsoy027a11_FLI
caatatacaacactgaaactttcaaagctcttttgagaacttgttattgcaatggctgacatagatcgctcctttgataataatgtttctgctgtttctactgagaaatcaagccaagtttcagatgttgaattttctgaagctgaggaaatccttattgccatggtgtataatctggttggggagaggtggtctttgattgctggaagaattcctggaagaactgcagaagagatagagaaatattggacttcaagattttcgactagccaatgatcggtggcagaaaacgaagcaaggaaatttttggtgcctacaagtcattacagtgactttgtggggatatgaaatggaaattgatcctattaatcatatgggtacttatatttgcattttgcggtaaccaacaaaaaggggcatgccattctaaaagcccttatgtttaatgttacttaattttatctttgtaatgttcccaagtgttttaggcaatctatgattcagatctgttcgatcatggcaagaacagtatgtacttaattaatgcagatcacctgcatgtgcatgtgtatttctggttcatttagccttcttgctaatggttacaactagctttgccttggcctatagcattggatttggaagcggattttttctttgcatgtatac

SEQ ID NO: 29691 - DNA, 1505 bp, Glycine max
  Clone ID: uC-gmrominsoy028h10_FLI
cgagagcagcgaggtgcagagctccgcgagcttaatgcgtaagaggaaatcagaaccgttggttggggttttggagttgatcaaggggcacgaacacagctcattgttcgagcgccgtcttgatagccaggatacggatagatacaaagacctagtgaaacagcccatggacttggaaaccatacaattgagactccaaaagggtcactattcctcatgcaccagtgcattcttccgcgacctcctcctcctcttcaccaacgccaccgtgttcttctcccatgactccctggaatcgcaggcggggcggcagctgcaccgccttgccaccgcggagatgaagaaccacggccaagcacaatcggatcctatcccccggaagaacgattcactccctccaaatgcaccattagctaaaccagattctctcctttccaagaacaaagcctctggtcctatattggtttgccgcaaacgcagttcaatgtcatccaaaccttcctctgccacctttggccaaaagggtgaccaacccgtcttcaatgacaagaaggaaaggccatcttctgatgcaaagccacccatgaagccctcttcttctgatacagacgaagaggagcttcccaaagctaaggaaaagcctgttactggagcaagaagcttgaggcggagcaacaagaacctcaatagtaatagtagtaataataataataagaaaccgtcctctatctccactcctaaggcagggtcctcggggaacaagccttcggagactgttaaaccggaaaagagcaaagcagaggggggggcagacaagaagaggagtgcagctgcagatttcctgaaacggattaagcgcaacacttcagcggaagcatcgaagggtggtagtggcggtggaagcgggggtggaggaggaggaggaggaggaagtagcagcagcagcaaaggtggtggaggtggtaatggtgccaaagagcagaagaaaatggtgaacaatggaaagggagacaaagggaaagaaagggcatcaaggcataataacgttggaggaggttcaggctctgcggataaaaggaataataagaatattgagaacagctctcagtcaaagaggagtgttggtagacctccaaagaaagcagcagagacaaatgcaggtagtgcaaagcgtgggagagaaaatagtgctagtgctggaaaggataagcgccccaagaaacgttccaagaaatgattccaaatttcatggttagcctcttttgtttgtcctctgtatattaattattattattactattgtcaaagcatgtatttctttctttattttattttatactgctaatttattgatcagctgtagcctgtagtcagttgctaggtacatgtaacagtattttgatttgggctaaaaccttgtaacaacattgtcctcttggggactgcttttcttgattttttggtttaacaggaaagtatagtcaaagcttgtgcttgttttggtc

SEQ ID NO: 29692 - DNA, 1609 bp, Glycine max
  Clone ID: uC-gmrominsoy033a05_FLI
ctgaaaatggtcatcttgatatactcaaggaattgattagataccatgatattgggttggccagcttcaaagctagaaatggatttgatgcattccacattgctgctaaaaatggacacttggagatattgaaagtcctcatggaggcctttcctgaaatttcaatgactgttgatctgtcgaacactactgtgttgcatactgctgcagcacaaggacacattgaggtagtaaattttctcttggaaaaaggtaatagcctggtaactattgcaaaaagcaatgggaaaactgtgttgcattcttctgcaagaaatggctacttggaggttgtcaaggcccttgtgagcaaagaaccagaaattgcaatgagaattgataaaaaggggcagacagcactccatatggcagttaaaggacagaatcttgagttggtggatgagctcgtgaaattgaatccatctttggccaatatggtggatgccaaggggaacactgcactgcatatagcaacccggaagggtcgtctacaggttgttcagaagttactagattgcagagaaataaacacagatgttatcaacaaatctggagaaactgctttagatactgcagagaaaaatggtcgtttggaaattgccaactttctgcaacatcatggagctcaaagtgccaagtccatcaagtcacctactacaaacacggcccttgagctcaaacaaacagtgagtgacataaaaagtgaggttcataaccagctggaacacacaattaaaacgcaaagacgtatgcaaggtatagcgaagcgaatcaacaaaatgcacactgaggggcttaacaatgcgatcaactccaacattgttgttgctgtccttattgcaacagttgcttttgctgccatatttaatgtcccgggccagtatcctgagaaaccaagtgaactctctcctggaatgtctcctggggaagcatatattgctccagatattggattcatgatattcataatctttgattctactgccctcttcatatcattggctgttgtgattgtccaaacatcagtggttgttattgagaggaaagcaaagagacaaatgatggcagttataaataagttgatgtgggttgcatgtgtgctgatttctgtggcatttattgcaatgtcatacataattgttggggatcataaagagttggctatagcagccacagctctaggaacagtgattatggcagctactttaggaacactctgttattgggtgattgctcatcgccttgaggcctcaagattgcgaagtcttaggacaacaatgagcagtaggcagtcaatgtctatgtcaatgatgtcaggatcagagaatgagtataagacagtgtatgcaatataactttgatttctaccatttcagagttctccctccttttttggccagttacactaacattgtaggtgtttgttgcttagtaaaacaaacattaactactgcaacaaaagcatgcctttgcagaacataggcaaaagatgtaatcatagtccacttgataagtgaatgttattctaaattgaaagtattggatcatcatgcctattttaggtattttc

SEQ ID NO: 29693 - DNA, 503 bp, Glycine max
  Clone ID: UC-GMROMINSOY044A01_FLI
gataactggtgagaacgagaaactgaagaaggataacgaaacgctgagttgcgagctggcacgtgcgaggaagcagtgcgatgagctcgtggcttttctcagggaccgtctgatggtgggtcccgatcagatcgatcgcatcatgcggcaaggaagttgcggatctgaaaacgcggtaggtgaaggcggtggtggaggacactgtttgaaactgtttggtgtttggttaaaaggggatacactaacagacaaaagaaacaaccacaagagaggccgcgaagaccaaatgggcttcggtgggcctcgcctcaaggagtcaaagcccgttgttgactttagtaggaataggatgatgatgattaatgaaaaaggaaaaggctaagcggtaatcatgtttgggtaaaaagaccaaatgcgctagcctatgcttcctaaacatgttgaggctgtgtaatttttaatgtacgtaggtaaatgcctctatgaatattgattgggaaatt

SEQ ID NO: 29694 - DNA, 2120 bp, Glycine max
  Clone ID: uC-gmrominsoy047b05_FLI
taccattagcgaagtatgttaaagctgtgtatcatactcgagtttcagttggtatgcggttcaggatgctgtttgaaacagaggagtcaagtgtgcggagatacatgggtacaataactggcattagtgacctggatcctgtccggtggcaaaactcacattggcgctccgtcaaggttggctgggatgaatccactgctggagacaggcaacctagagtgtctctttgggaaattgagccattaactacatttcctatgtatccatctccattcccccttaggcttaaacggccatggcctccaggactgccttcattccatggcatgaaggatgacgattttggcccgaattcacctctgttgtggctccgagatcctgatagagggcttccgtctcttaattttcaggggattgggattaatccttggatgcagccaagatttgatcccaccatgttgaatatgcaaacagacatgtaccaagctgcggctgttcaggacatgaggagtttagatccttccaaacagcattctgcttccttacttccatttcagcaaccacagaacttcccaaacaggactgctgctttaatgcaggcccagatgttgcagcagtcacaacctcagcagatttttggaaatactcaagagaatcaacattccccacaatctcaggctcatcttcagcaacatctacaacatcaacactcgttcaatagtcagcatcatcatcaccaccagcaacaacaacagcgacagcaacatcaagtggtagataatcaacagatttctagtgcagtctctacaatgtctcagtttgtttcagctcctcaacctcaatcaccacctatgcaagttatctcttccatgtgccaacagcaaaacttttctgattcaaacgggaacactgtgactactattgtttctcccctgcacagtatcttgggttcttttccccaggatgaaacatctcacctcctgaaccttcctagaacaagctcttggattcctgttcaaaattcaagtgggtggccctcgaagcgtgttgcagtggatcctctcctttcttccggagcctctcaatgtgttctacctcaggtggagcagctagggcagccacagagtaccatgtctcaaaatgctatttctttaccaccttttcctggtagggagtgctcaatagaccaagaagggagcaatgatccacaaaaccatctcttatttggtgttaatatagagccctcgtcccttctcatgcctaatggaatgtcaagccttaagggggtctgtggaaacaatggctcctcaaccttgccatatcaatcttctaattatctgaatactaccacacggactgattcttcattgaatcatggaatgacccccaacataggcgactcgggtttcctgcagtgtctggaagaggcaggacaaggaaacccactgaacaaaacctttgtgaaggtttataagtcagggtcctttggaaggtcattggatatcactaaattcagcagctaccatgagctgcgtggtgaactcgctcgaatgtttggccttgaaggcgagttggaggaccctgtgagatcaggctggcagcttgtatttgtagaccgagagaacgatgttcttctccttggtgatggcccctggccggaattcgtaaatagcgtatggtgcataaagatactttctcctcaggaagtgcagcagatgggcaacaatggccttgagctgttgaactcgtttccaattcaaaggctctctaatggcatctgtgatgactatgtgagccgtcaagacccaagaaatttaggcactgggataacaaccgtggggtctttagactactaaatagtcttcacttcttctatcacatgtaatattattacccttacttctcaaccctttctttgtgtacggtgggaagcacctttgcctaagtgtagtttacatagcctactctttagcctttggatgttttcctgttttttcctgctaggacatttcataaactaatactgtaactatatggcatctagtcattgtgctagccacaatatatacgatacttaatccgttaggaaatcaatgcgtgagatatgttctcttaacttg

SEQ ID NO: 29695 - DNA, 1398 bp, Glycine max
  Clone ID: UC-GMROMINSOY049D08_FLI
ttcttcttctttttcatcaatcatcaccagtggttcttttccttctgagaagatcgaattgtgttttgcaaaaatgggagttccagagaaagaccctctttcccaattgagtttgcctcctggttttcggttttaccccaccgacgaggagcttctcgttcagtatctgtgccgcaaggtcgctggccaccatttctctcttccaatcattgccgaaattgacttgtacaagttcgacccatgggttcttccaagtaattatcaaatcgctcacccatctccatttttttttaagttaattactttgttctaaattgaatagatttgattgattaattttgcaggtaaagcgattttcggtgaaaaagagtggtactttttcagccccagagacaggaaatacccgaacgggtctcgacccaacagagtagctgggtcgggttattggaaagccaccggaaccgacaagatcatcaccaccgaaggtagaaaagttggcataaaaaaagccctcgttttctacgttggcaaagcccccaagggcaccaaaaccaattggatcatgcacgagtatcgcctcctcgactcttcccgaaagaacactggcaccaagcttgatgattgggttctgtgtcgtatatacaagaagaactcgagtgcacagaagacggcgcaaaacggcgtggttccgagcaacgagcacactcaatacagcaacggttcctcttcttcttcttcgtcccagctggaggacgttctggaatctctgccatcgattgatgaaaggtgtttcgcgatgccacgcgtcaacacgctgcaacaacaacagcaccacgaggagaaggtcaatgttcagaacttgggtgcagggggtttaatggattggaccaacccttcggttctgaattcggtcgccgatttcgcttcggggaataatcaagtggtacaggaccagactcaggggatggtgaactacaactgcaatgacctttatgtccctacgttatgccacttggactcatcggttccgttaaagatggaggaagaggtgcaaagcggcgtgagaaaccaacgggtcgggaataataattcgtggtttcttcagaatgatttcacacaggggtttcagaattcggttgacacgtgtgggtttaaatacccggttcagccggtcgggttcgggttcagaaattgaaccggctgatggattaataatagtaatgtttaaatcgggtttatttggtgtaaataggtggggattctttgggcttaactcgtgggggttttagattcctttttagaaaagggaagaagaaggtgcaaattttggtcctcattttcggctaaagatggagggtatactacaaacgttcaatgaatcaatccacgagataaagc

SEQ ID NO: 29696 - DNA, 1940 bp, Glycine max
  Clone ID: UC-GMROMINSOY049F09_FLI
gagttaggttctgcacgctctgcttccagcgagtgttctttcttcgtttcaacaccttaatttgcacacgctgcttcttcaggttttaccaaaatgaaattccaattctgattggagaataagtgaataacacctaaagaactgcttccaagttttgtccttcttgaaatccaatatattctgtccaacttgatgcccagggattctttatatatatatatatatatatatatatatatatatatatatactttgctatcgttttgtctgcaattatttttttcaggaccaaaagctttttcaaaaaagtagatcaagataaactattttaatcaatcttggcataaactttcgagtttttctttcaatttgttgtagagatgcgtgctttaatttattccttttgcaacatgatctcgattctggagctatctaccattcaaaagctccaagagaagttgtatttttttaaggcttttgtgctttgtaataaacattgtgttgtttttttgtttcctgtagcttgagaaatggcacaagaaacctttctattcacatctgaatctgtaaacgagggtcaccccgacaagctgtgcgaccagatctctgatgcagtgctcgatgcgtgccttgaacaggaccctgacagcaaggttgcctgtgagacatgcaccaagaccaacatggtcatggtctttggagagatcacaaccaaggccaacgtagactatgagaagattgtccgtgacacatgccgcgaaattggattcatctctgatgatgttggtcttgatgctgacaaatgcaaggtgttggtcaacattgagcagcagagccctgatatcgcccagggtgtgcacggtcacttcaccaagcgcccagaggaggttggtgctggtgaccagggtcacatgtttggctatgccactgatgaaacccctgagtacatgcccctcagccatgtccttgcaaccaaactcggtgctcgcctcaccgaggttaggaaaaatggtacctgtgcttggctgaggccagatggcaagacacaagtaactgttgagtactacaatgacaatggtgccatggttccagttcgtgtccacactgtcctaatttccacccaacatgatgagactgtgagcaatgaccaaattgctgctgaccttaaagagcatgttatcaagcctgtcattcctgagaagtacctggatgagaagaccatcttccaccttaacccttctggccgttttgtcattggtggccctcatggtgatgctggtctcactggaagaaagatcatcattgatacctatggtgggtggggtgctcatggtggaggtgccttttcagggaaggaccctaccaaggttgacagaagtggtgcctatatcgtgaggcaggctgcaaagagtgttgtggcaaatggccttgccagaaggtgcattgtccaagtttcctatgccattggtgtccctgagcccttgtcagtgtttgtggacacttatggaactgggaagattcctgacaaggagattcttcaaattgtgaaggagaatttcgacttcagacctggaatgatcaccattaacttggaccttaagaggggtggccataggttcctcaagacagctgcttatggacactttggaagggatgaccctgacttcacctgggaagttgtgaagccactcaagtctgagaagcctcaagcttaagattgttgtgaagttaatcactcccttcaatggatgtcttgctaggtgtggatgaataatttgcgtgttccatgactactactacttcattcataggtctaatgtcatctcatcaatacttaaactgtttttttttttccttttctccttttactcacaatttattttttggttatgcaatgttaccgttttgatgcaatggaaattttatcagaattttgtacc

SEQ ID NO: 29697 - DNA, 994 bp, Glycine max
  Clone ID: uC-gmrominsoy063e09_FLI
tttaccttcttaacgcaccaagcgaagcgaaaagcgctttctaacttaagtgatggcgaacgcagctgaagtttcagccttgaaccgcatcaaactgcatcttttgggtgaactctctccactggccactcccctaaactattttgatgaatcaaaccctagcccctctgaatcttccaattcccaatcttcttctgtttctcttaaccactacttcactgacctcttcgaattcgactccaaaccccaaataatcgacctccaaactcccaaaacactaacttcagctcagaagaaacctcaattgaatcggaaaccgtcgctgctaatcgctgttccaaagaagaccgagtggatccagttcgggagcccggatccgaacccggtgatggctgcgccggagaacctgccgcagaagaatcactacagaggtgtccggcagcggccctggggcaaattcgccgccgagatccgcgacccgaacaagcgcggctctagggtttggctcggaaccttcgacaccgccgtcgaagccgccaaggcctacgaccgagccgccttcagactccgcggctccaaggccatcctcaacttccccctcgaagttagcgccgtggcggagaccgtctccgtcgccgccgccgaaggcaacgtcgagagaaagcgccgccgcgaggaagaggaggtggtggtggaggaagtaaagccggtggtgaagaaggaaaagataacggaacaggatgtgagttgttttagggagatgccgttaacgccgtctatgtggaccgggttctgggacagtgacgtcaaggacattttcaacgttccgccgttgtcgccgttatctccttttggattttcaccgctcgtggcggtgtgaaatttctaatttagcactgcgttttttcgtgtttaagttacagcgtcctgtatggggatgagtacagtgtacatttgacgaatttgttaattcaacaatcttttattcactttt

SEQ ID NO: 29698 - DNA, 2007 bp, Glycine max
  Clone ID: uC-gmrominsoy063g09_FLI
ggtgggatgcttattagtcataaattgacactacttaattgttatttatatgtaatatttaatggtggatgaacaggggatgtttctaccattgattgtgccaccaacaatttatcaagcaggtctttggtcaacttggttgactgtgctttgttctttgaagatgtttcaagctttggctagagatcgtttggaacggctgaatgcatctccgtctgctacaccctggacatatcttcgagtatattcagcattgttatttgttttcatggttgatgttctctggataaggttttgtctgacaatatatcaagcacatgggtcctctatgtatctgttattattctttgagcctttcagtatttgttttgagaccctacaggctattttggtacatggatttcagttgcttgacatatggttgcatcattcagcttgcaatagcagtgatttccgaacacctaaactgcttgacatgttaactgcaggttcattgttggaattgaagggaattctcattcggaacttgggatttttattagacatggcaacattttttatggcacttggccattacttgtatatatggcggcttcatggcatggctttccatctaatagatgcattgctatttctaaatatacgtgcattgcttagtgcaataataaatcgcataaaaggctttatcaggctaaggatagctctaggaacacttcatgcagctcttcctgatgcaacaactgaggagctaagagcatatgatgatgaatgtgctatttgtagagaaccaatggccaaggctaaaaggctaaactgcaatcatctcttccatcttgcatgtttgagatcttggtagggttgcttttatccttttctatttgggttaattttatggagatactattggttgctttactgattccaggttggatcaaggcctggctgagatgtatacttgtccaacatgccgaaagccactttttgcgggtgtgcctggaaatgaaacaaactctgatgcggggacgatatctagtgatgagcaacttgcacggcaaataagtgctggattggatcggccaaactctgctaggcataccatgcctacaggattctatccaaatcagacactaaacactcctgaaggtgttccttggaggggtgcagggctggactcaggttggttgcattcttggccaaatcaaggtgttgatggggccggtccatctactgctatcagaacagttggattaggaagagttcaaatgatgatgcggcatcttgcatctgttggagaaacctatgctcagactaccttagaagataccgcgtggaacctttggcccattaatccctctcaggcttctgcaagtggttcaaccattcctccccctggtggaagattgcctgaaagaactggtagtttacatttaaggactgcttcacagtcttctaatgataatgttgcaaatatacttgccatggctgagactgttcgggaggttctacctcatattccagatgacatgatattccaggacttgcaaaggacaaattcagtcacggttactgtgaataatctcctccaaatgtgatgaatcaaggtattattttactcctcaaggaatatgaagaaggacatagagttactactacaattgtccttggaaaggcataggctttcattttatgtatatagagtcagcacattcaatctgttgtactcaagaaagatagcagaaaatataggcattttctttctttctttgtcttctccttgaatctgtagtaaaataaatgtggggtgtgttcccaagttgggtaagttcctatctgtcatggttccatttcaattgtaattttgaatttgctgctacctccaaaatatgatgtaattttctttccactccccactccattttgtggggttggcagagagagtgaggggaatatcaattatcttcaagtgactcaatctgagtcatgcaacatctaattcaaatgtgatct

SEQ ID NO: 29699 - DNA, 1036 bp, Glycine max
  Clone ID: UC-GMROMINSOY065E09_FLI
tcttatagtgcctcctcctctttgacttcatccctatcttccgaattttcctagttttgaaaaatcctacacacgcttttgcttccacctcctttcctcaccttaaattaaattattgttcaacaatcaatatcaatataattcaattccttcaaattccagataccaaaaacatatattctttctctttgttttcttgtctgtggtattgtctctgagttgttaattttgttttctttcctttctcatggggcagcaatcgttgatttacagcttcgtggcgcgcggcacgatgatcctggcggagcacactgatttcagtggaaactttgcggaggtggctttgcagtgcctgcagaggctcccagcctccgacaacaaattcacctacaacgccgatggccacaccttcaactacctcacctataatggattcacttactgtgttgtggcagtagagtctgttggtcgccaacttgcaatggcctatcttgaacgcatcatggaggatttttccaagagatatggtggaggaaaagctacaacagccactgctaaaagcttaaacaaagaatttggatccaagttgaaggaacatatgcagtattgtgtggaacacccagaagaggttagcaaacttgcaaaagtgaaagctcaggtttcagaagtccaacaagttatgagggcaaacattgatcaggttcttgatcgtcaagtgaagattgacgttttagtgggtcaaactgaggaccttcgcaatcaggcgggggttttcagggagcggggagaccagataaggagaaagatgtggtatcaaaacatgaagataaagttaatagtacttgccatcgtgattgccatcattttaataattgtcttattggtcacctagaattgttacaactcgaccccttttttgtaatttaataaatatagttgtataatataaacattataaatttgtttatttgattgacatcacaacactacaaagaaaaatattttctatggttaatttttacattttatgttggtt

SEQ ID NO: 29700 - DNA, 1563 bp, Glycine max
  Clone ID: uC-gmrominsoy090a03_FLI
gttggtattatcagagctttgtgaaacataaagttaaagcagggcatattgcagagggagcaaaccgaatatttcaaaacttgttctactttttattatcactgttgcatttatttcagatatttagtatttgcctacaagtttgttctttagtttaaacaccgacaagacgactctttatggcggctataaccaatttgaacttttcttccttgtgtaaaaaaaggttttgtgtgcgtttgtgcgtgttggagttggctttttgaagtgggtgcatgctgaagttatatgtgtatgtgaaagatgaagaacaatagagataaagaaaagggtaacgacgttgaccagagttacagacagcatcacacgttgtcaatgccaatgatgttttctggtttgaacagagagaaggagatgtcagccatgatctctgctttgacacatgttgtttgtggagaagatgagcatcatggtgctgattactctcttcttaatcacaatattaataatactaatagtgcagttgttggtgatgatgattttactgtaacatcaaatatggcttctggttctatgccaccttcttctacttgttcatctcaaggtggcaactctgttctcaagagaagacgggaatatgataatacaaatgatttctcacgtggaggttcattccctgctatttcaacaattgctgaaagttcaagcacggtaacaagaagaacggcgaatacagtatacgattacgaatacagaacagagaacgtgaaagtagtggaggaagaaccgaggagaaaatacagaggagtgagacagaggccatggggaaaatgggctgcggaaataagagaccctttcaaagctactagggtgtggttaggaacatttgaaaccgctgaggacgcagccagagcctacgatcaagcttcactgcgtttcagaggcaacaaagccaaactcaacttccctgaaaacgttagactcagacaacaacaagaacctccgttgaacttgaaccctccaccaccacctaatcatggggctattttgtcaattccttcaaccactgttcacactgaggctcttcagggttcacttggttcaagcaatttttatgagcattcttattcgcatcttcatgagtttcccgtgagtctctacgatcagattgcagagtcaacatctactactatggcttctcatcatcttcaatttttgccgcctgcttcttcctcaactatgactatgacatctccgcaggcaccaccttcgatttatcctacgcatccagcggcatggtcttctggttatagttataatagctcttcttctgcttcggggtgatgtaaattgcgttttatttcaagtctctctcgtttttgccccttgtattgtatcattgttattctcctctgttttttgcatttgcaccacgaccatttccatccaggagtggttttttgtgaccatgttattatgatcaagcaaatcatataattcacagttaacagtttagtatctgtgtataatagagttttatttatcctcccatcacatttctcc

SEQ ID NO: 29701 - DNA, 1885 bp, Glycine max
  Clone ID: UC-GMROMINSOY094F04_FLI
ttggttcaaagcaagcttttgaagtgtctttagcagatgtctctcaaacgcagcttcaagggaagaatgatgtgatcttggagtttcatgtggatgacacaactggagcaaatgagaaagattcactaatggagataagtttccatataccaaattccaacacccagtttgttggtgatgaaaatcgtccccctgctcaggttttccgtgacaaaattatgtctatggctgatgttggcgctggaggtgaagatgctattgttacatttgagggtattgcgatccttacaccaagaggacgatacagtgttgagttacacatgtcattcttgcggcttcaaggacaggctaatgatttcaaaatccaatatagcagtgtggttcgcctatttttacttcctaagtctaatcaaccacataccttcgtcattattagtcttgatccccctattcgaaagggacaaacattgtaccctcatattgtgatgcagtttgaaactgattatgttgttgaaagtgaattggcaataaatgaagatctttataacacaaagtacaaggacaagttggatctgtcttataaggggcttattcatgaagtgttcaccacaatattacgtggtttgtctggtgccaaagtgaccaagcccggaaaatttaggagttgtcaagatggctatgcagtgaaatcatctttgaaagctgaagatggaattctgtatccccttgagaagagcttcttctttctacctaaacctcccactcttattcttcatgaagagattgactatgtggaatttgagcgacatgctgctggtgggtccaatatgcattattttgaccttcttatcagactaaaatctgaacaagagcatctcttccgtaatattcagagaaatgagtaccacaatttgtatgaatttatcagttcaaagggcttgaaaattttgaacttaggagatgcacaacctactgttggtataaagaaggttcttgagaatgatgatgatgatgctgttgatccacatcttgaacgcatcaaaaatgaagctggtggagatgaaagtgatgaggaggattccgattttgttgctgacaaggatgatgaaggttctcctactgatgattctggggcagacgattctgatgccactgatagtggtgatgagaaagagaagcctgccaaaaaggaatcaaagaaggatctgccttctaaggcatctacttctaaaaagaaatcaaaagatgatgaagatggaaagaagagaaaacagaagaagagaaaggacccaaatgcacccaagagggcaatgtctggtttcatgttcttttctaaattggaaagagagaatctaaagaaaactaatcctggaatttcatttacggatgtgtcaagagtacttggagagaaatggaaaaagttgtcagtggaagagaaggaaccatacgaggcaaaggcacgtgaagataaaaaacgttacaaggatgagattagtggctacaagaatccgcaacccatgaatattgattcaggaaatgaatccgacagtgcctaagctccgtatatttcttactggagtggtgatggcatctactctcatgctccataagttggctcatttatgctcttggaaatggcttgataacttgtgaacatgctcaagagttttgtgctctgttggtttgcatggctatagggaaggcagggacggtagagcttgatgtgttgagtaggttcctatgcttaattgaattagtggtctttgtgaattgtgacccaattttcgctaaatgacagtgcctctttttagagtttatgaccggcaggtgtaggatctgtaacaatttttttgcttcaactctttgcacgaataggatttaaaat

SEQ ID NO: 29702 - DNA, 1772 bp, Glycine max; identical to SEQ ID NO: 29636
  Clone ID: uC-gmrominsoy098d02_FLI

SEQ ID NO: 29703 - DNA, 1111 bp, Glycine max
  Clone ID: uC-gmrominsoy099b07_FLI
tttcagttctcacaaattaaaaaataaaaatattatatatacatatatatatatatattctcttcgagtccgtcgaaaaagaaaacaatggcgaaacccagcagcgaaaagccagaggagcatagcgattccaagtactacaaaggggtccgaaagagaaaatggggcaaatgggtatccgaaataagactacccaacagccgtcagaggatttggttgggatcctacgacacccccgagaaggccgcgcgtgccttcgacgcggcaatgttctgcttacgtggccgcaacgccaagtttaatttccccgacaacccacccgacatcgccggcggaacgtccatgacgccgtcgcagattcagatcgccgccgcacaattcgccaacgcggggccccacgagggacattcgggtcgacccgaacatcctcccatggaatctccatcgccttctgtttcggaagggaccatccaaacggacagtgacgtccccactcttaacggttcagtaacggatttgttcacgcccgttgggtcgagtggttacgcatccgattacgggattttcccgggctttgatgatttcagtggcgatttttatgtgccggaaatgccgaacgttaattatggagaagaaaacggggaagggttcatagttgatgaatctttcttgtggaatttttgaggggcaatcaaatccagtattcaccaccggccaaatgggttatggttcaggactacgagagaggcgtaaccaagtttaagaataaagtttttttatttatacatcaaatagtttattaaaattattattattttatttaaaatttatttttaaatataattttataataattttttttaggtatattaatactaaaaaaataaaatttaaaactattttttcagctaaagtccttacatggattgtttgatccttaagtcgatcctgtcattgttatggttgcagatagttttattgattctggaaccgtggtaatgatccgggtttgaattcgttaatttttggacgaccaaacctatatgattaatgagtttctatgatattgatatcgatgtaaaaaaaaaaagttgtgattcattcaataatg

SEQ ID NO: 29704 - DNA, 2030 bp, Glycine max; identical to SEQ ID NO: 29638
  Clone ID: uC-gmrominsoy099c12_FLI

SEQ ID NO: 29705 - DNA, 1444 bp, Glycine max
  Clone ID: uC-gmrominsoy104a03_FLI
atttggtatacgtttcgccacaaatcccgcatttaactctctccctttctctttctctctaaaatctttgaaaatggtatccaaaaacccgaacccgcccgagggattctacttggatcccagtggtggcatgcctcttcctgggatgcctcccttcgcctccgtctccgccgcaaccgctgcgaactcgccggaggacgccgccaagaagatccgcaagccctacaccatcaccaagtcgcgggagaactggaccgaacccgaacacgacaagttcctcgaagcaattcaactgtttgatcgtgattggaaaaagattgaagcatttgttggatcaaagagtgttatacagatacgtagccatgcacagaaatactttctaaaagttcagaagagtgggacaagtgaacatcttccaccaccccggcctaaaagaaaagctgcccatccatatcctcaaaaagcttccaaaaatgctcctgtactctcacaagtatccggacgttttcagtcttcatctgctttgcttgaacctggatatatcttgaagaatgatgccccaccaatgcttaaaactcctattatgaacactgttgcgtcgtcctggtcgaacaacaccttgcaaactgccaatttatctcctgtgacaaaagtgaataatccttgcagtagcggtgaaagcactcctaaagtgtggccagttggtgaatctaatggtcaagggaataaaatccatccattgagagttcttccagattttactcaggtatatggcttcattggcagtgtatttgacccaaatgcaactgagcatctgcagaaactaaaaaagatggaccgcatagatgttgagacggtgctactgttaatgagaaacctgtccatcaatttaactagcccagattttgaggatcatagaaagctgctttcatcatatgaagttgaaccagagagagatgataactatcaacgcggatagacccatgcacgatgagcagttgaagagtgctaatgggatggaggcagaaaatggcttcattttccaccgattggatgcagtcagggtgctattattttccatgatgtgataaagatactgatggtcatggcaaggcaacaaactgaagacgtttgagtcacagctaatttttattctgctctagatttttattgctgttgctcgtcatcttagctatgcaaatcataattgtcatcattcattattatgtcatgtatatatgaatcagcctattaaaaagaaaataataatctgagattgtatagttattttcctagttctttgtaggtctgcacagaacctcataattgtgtactaaattcagcaaacacaaatatttgaacggaatatattctagatttgtgtaggtctgtacagcacctagatttgtgtgttaaattcaaccaagcatcaaatagttgaagc

SEQ ID NO: 29706 - DNA, 981 bp, Glycine max
  Clone ID: uC-gmrominsoy104e07_FLI
tctgcaattacgatggcgcccagggacaagactagtgccgttaagcctagcggtaacgccggggtgaaggacctgcattttcgtggagtcaggaagagaccgtgggggaggttcgccgccgagatcagagatcccgccaagaagacccgcgtctggctcggaaccttcgacaccgcggaggaggcggcccgtgcctacgacgccgccgcgcgggagtttcgcggccctaaggcgaagacaaacttccctctcccttcggaaaattttaagaacgcgagccctagccagagcagcacggtggagtcctccagccgcgaccgcgacgtcgccgccgattcctctccgctcgacctcaacctcgcccccgtcgccgtctcctccgctcgattccccttccggaaccagttcccggttttccccggcgcggtgccggcggcgaaccaggttatgtacttcgacgccgtcctacgcgccggcatggccggtccacgtggcttcgcgtttggctacaatcctcatcccgtcgcggcgagtgagtaccacgcgacgacgagcgactcggactcgtcctccgttatcgatctgaatcataacgaaggcgttgttaaggggaacggttctagaatgttcgatctcgaccttaaccatcctcctccacatgagatcgcttgatccagaatctgactcatgccttgagtttttctttttctaattttgttttttaaagtagagaaagtagcagcgttcgataaggaaggaagggaagggaaggtaaagaaatactatgtgaatacgtagtcggtatgattgtctctatttttttgcgacagaggaaccaccagtttcatgctgttgtttcttaaatcacgaagcgctcatccggtttttctttcgttttgattgattattttactacggtgtaatgttttttggttgcagccataatttggttcaatgaaattaacacggaaagtttgaatt

SEQ ID NO: 29707 - DNA, 1019 bp, Glycine max
  Clone ID: UC-GMROMINSOY104G05_FLI
ccctttcattgttttctgtgtgttttctatggcggttttaccaagtagctcctcaagcttggaattgaccatatctgtacctggttttgcttcttcaccaacccttcttccctcatcatctgtgaaagaattggacataaatcaagtacctcttgaagaagattggatggcatcaaacatggaagatgaagaagaaagcagcaatggagaacctcctcgaaagaaactccgtctcacaaaggaacaatctcttctccttgaagaaagctttagacaaaaccacacgttgaacccaaagcagaaagagtctttggcaatgcaactgaagctgcgaccaaggcaagtggaggtgtggtttcagaaccgtagggccaggtatcctaataataataatgaataaagtggagtaggtgtttattatgcaggagcaagctgaagcagacagagatggagtgcgagtacctcaagaggtggttcggttccctcacagagcagaaccggaggctccagagggaagtggaggagctgcgagccattaaggtgggcccacccaccgtgatctcccctcactcctgcgaaccgctcccggcctccacactttccatgtgtccccgctgcgagcgtgtcacctccaccgccgacaaaccgccctccgccgcggccactttgtccgctaaagtgccgccaactcaatcccgccaaccctccgcggcctgttgaccctataactatagtccatcgcctactctgcacgccacctctactacctcatcatctaattaatcagaaacagggcacaaacttaactaaactttacaaaactaaaaagttagtgtgaatgaagatataatatgtgttagaaaaaataatgtttttttttttttttttactaaaagggcgttttcggatagggaaacttttgtagttagtagtagtactttcaatggtcaatgcgtatctgattattgggctttcatattgactttctcctttttcaaatatggatagaacttttattt

SEQ ID NO: 29708 - DNA, 357 bp, Glycine max
  Clone ID: uC-gmrominsoy109d01_FLI
tcactcttctgtggccggtgtgaatgcccgcaagcgtgacaagcccctgccccctatcgttatcgatgaccctagcgacatcgtcgccatgaagcgtgctcgtaacactcttgcagcacgaaagtctcgtgagcgaaaggctgctaagttggaagaacttgaggataagattgctaagctggaagctgagcgcgatcactggaagaggatcgctcttgcgcaaaccggcatgcaataatggattaaaagtggaatttctttcctttgccaacacgggatttcgttggtttgttactgtgttttaatcaggtttcattgattcttatagtcaatcagtcaattaaattgcttctcttg

SEQ ID NO: 29709 - DNA, 1146 bp, Glycine max
  Clone ID: uC-gmrominsoy111a03_FLI
cttcaactgaactgcctacttgtcctgtttgccttgagcgattagatcaggacaccggtggaattcttacaactatatgcaaccattctttccattgttcctgtatttctaaatgggcagattcttcttgtcctgtatgccgctattgccagcagcaagctgaaaaatctatatgttttgtttgtcaaaccactgagaacctatggatatgtgttatatgtgggtatgttggctgtggaagatacaagggagggcatgctataatacactggaaagagacacagcattgctattccctagaagtggaaacaaaacgagtttgggattatgtgggagacaactatgttcatagacttattcagtccaaaactgatgggaagttgattgagctgaacactcagtgtgcgcatgcagacaatggatgtggaagttgcagctgtgaagataatgccatgaatgaggctatacttaatagtaaagttgaagctattgtcaatgagtacaatgaattgcttgctactcaacttgaaaaccaaaaattatattttgaatccttattacaagaagtaaaagaagaatctgagagaaaaatttccaaagctgttcagaaggctatcagtcttaaacagcagaagattcagtccaagattgacagatgtaagaaagagaagaaatttctggatgatcttaatgagaatcttgtgaaaaatgaggacatttggaaaactaagatacttgcgattgaagagagggagaaaaaaaccacgagactgatgggtgatagagtagcggacctggaaatgcagcttggtgatctcatggtttgtcttgagggtgggaggacggtagaacagctggcagcttcagatgagattaaagaagggattatcttggacaaatcaatagaatcctcgacaactagtggctctgacctggtgggaagagacgcataacagaagaatggttccttttaatgacagaagaatgattccttttaatggactacattgcacggactgacctataccatgtttataatcacagatttatagaaactacactcgtggatccacagttgacatgttttcactctaattttttcccatataaaactcccagtgtatgtatctgtttagatttgtaaat

SEQ ID NO: 29710 - DNA, 1381 bp, Glycine max
  Clone ID: uC-gmrominsoy111a12_FLI
tatcagtctctggtttggtggaattgttgttttcacaatgaagacagtcctattcctccttctggtgtcagcgttaatccccatcgccgtcgcgcagcccaatgacttctccgacgcaaacctcaacgagttcaactcctccatagccataatcataatcatattagtaatcgcgtttttcctcatggcctttttctccatctacgtgcgccactgcgctgattccccttccaacaccgtcaggcctctcaccaccgcacgctccaggagggccgcgcgtggccttgaccccgctctgattcaaacattccctatcctcgaatactccgttgttaagatccacaaaatcggaaaagaagctttggaatgcgctgtgtgtttgtgcgagttcgaggacaccgaaacgctgcgtttgctccccaagtgcgaccacgttttccaccccgagtgcatcgacgagtggttgagctcccacaccacgtgccccgtgtgccgcgccaacctccttcccaccgagtccgaggatgctattgctaacgccaacgccaacggtgttgttccagttccggaaacgttaacgcgagacatcgaatcccaaaacgacgccgtgcaagccgcgccagagcagcagaacgcggaggctgacccagttttacccgaaccggaagttgtttccctggacaaaacgctaaaccggaaccgcacgcgagggtcgcggtcgaaccggccgcggaggtttcccaggtcacactcgaccgggcactcgctggtccaaccgggagaaaacactgaccggttcactttaaagttgcctttggaggtgaggaagcaattaataaaccgccaattacaacgtgcgagtagcttgatcgtgttaccgagggaaggtagttcgagacagggttaccgaaccgggggagaagggagtagtagagccaaaatctcgaggcggctggaccggagtttgaaatcggaccggtggattttctcaatggctgcgcccttttttgcaagggcgttgtctattagatcgcctagggttcgaaacaatgatgttgaaggagcggcgtcctcgtcgtctcccaccgcgcctatcatgccgccgacggccgttgactcggcaaggcctccggtttaaccggagtttcgccaacctccacataccttgtcatttttttatttattttttgctttatttgcgggacacgattttgttttgggtgaagaatttgtaaactgtgtataattaataaggtatcatgtttttttttgtaggccggttttagaagaactgggtcatgatttcatattctctttgaggttgttaagctagttagttgacctcggattttaacatacagcatgtgaagaaaaaaaatgc

SEQ ID NO: 29711 - DNA, 1224 bp, Glycine max
  Clone ID: UC-GMROMINSOY112A08_FLI
atatcttccaaggagttacccttccagatgctccaagatttggaaaggtgtttggggggcagatgattggacaggcactggctgcagcttcaaaatctgttgactgtcttaaggttgttcatagtttgcatgcctattttattcttgcgggggatttaaacaatggcgaagactttttggtcgtaagcactgaattttgcccaaaagataaggcaccaatattatatggacatcactaaagccaggagctccttcatgtaatttgatttcagcaaagaattatctaaaagagccttgttataataagctatgggtctgaactcctgcattgcaatagctcctatgcccaactcgaaagcatcacattcaacaatgaatggttttgagaaattaggtgtcactaaacagtgccaattacatatcaaattcaccgtctccgtgatggaaagagcttcgcttcaaggaaagtggatggaattcaaaagggaaatgtcatattcactctgatggcttcatttcaaaaagaagaatcagggatggtccaccaagaggtagctataccatctgtccctgctccagataagcttctgccgatggaagagctacgggagagacgtcttactgaccctcgtttaccaataacctatcggaacaaagtagctacatctcaattcatcccatggcccatagagatacgattatgtgaatatgaaactgcaacaaatatgacaaaatctcctcccagtttgagatactggtttagagccaagggaaaactttcagatgatcaagccttgcataggtgtgtggtggcatatgcttcagatctaatatttcttcaagtaagtttgaatccccaccgtgagaagggtttcaggacacgttctgttagtctggaccactctatgtggtttcaccgatccgtaaaagctgatgactgggtgctatttgcgatctttactcctagtgcccatagtgcacgtgtctttgtcaccggccaaatgttcaatcagaagggagagcttcttgtatcattggttcaagaaggactagccaggaaaattaatcccggaaattcagccattaaatctatgttatgaactgctgaaaaatgcacagattagcatgtatccattttatagttttattttaaaaaaattccatgtatccatcaccataacatcttagtatctaaattatatatgtaaatttttgtattgctct

SEQ ID NO: 29712 - DNA, 1341 bp, Glycine max; identical to SEQ ID NO: 29673
  Clone ID: uC-gmrominsoy115e11_FLI

SEQ ID NO: 29713 - DNA, 714 bp, Glycine max
  Clone ID: UC-GMROMINSOY122A06_FLI
gcacttcaacctggtgaagctattgctgtgaactttgccatgatgttgcaccatgttccagatgaatgtgtggatagtcgaaaccatcgtgaccggttggtgagattggcaaagtgcttgtctcctaagattgtgacacttgttgagcaagaatcacataccaacaacctcccattcttcccccgtttcgttgagacaatgaactactacttggctatttttgaatcaattgatgttgctctgccgagggagcacaaagaaaggattaatgtggagcagcattgtttggctcgagaagtcgtcaacttaatagcatgtgaaggggcagaaagagtggaacgccatgagcttctgaagaagtggagatcacgtttcactatggccggattcacaccatatccattgaactcctttgttacttgttcaataaaaaatcttcagcaaagctaccaaggacattacactctagaagagagagatggggctctatgtcttggttggatgaatcaagttcttattacctcttgtgcttggaggtgatgattcaatgacaactggttcatttttgttatttcagacttttagttagtttatgtatcatcctaatcttctttcgcggaactcatagtcaagttactctataatttgttaaaaaaactcacttgatttatgttaataatgccagtaccagcaagctcgatctcatcaaagtag

SEQ ID NO: 29714 - DNA, 1909 bp, Glycine max
  Clone ID: uC-gmrominsoy124b05_FLI
cctttctttcgctcttctttcctttggtaattgaattcagcagcatgaacaacatcaacaacaacaggtctcaggatcaacgctcaagacctgccaaggcagccactatccatggctgcgccctctccggcgacctcgttggactccagagactacttcgagacaacccttctcttctcaacgagagaaaccctgttatggcacagacaccacttcatgtctctgctggtcacaataggactgagatagttaaatttcttcttgattggcaaggggcagataaggttgagatggaggccaagaatatgtatggagaaactccattgcacatggcagctaagaatgggtgcaataaagccgcacaattgcttcttgctcgtggtgctattgttgaagccagagcaaataacggtatgacacctttacatcttgctgtttggtactcactacgagcagaagagttcttaactgtgaaaacactgcttgagtacaatgctgattgcagtgctaaggatgatgagggaatgactcctttaaatcatctatcccaaggccctggaactgagaaacttagggaactattactttggcatcttgaagagcaaaggaagcagcgagccattgaggcatgcagtgaaaccaaagctaaaatggatgagcttgagaagcaactatcaaatattgtgggtcttaatgatctaaaagtacaactacgcaagtgggcaaagggcatgcttttggatgagaaacgtagatctcttggtctgcatgttggaaggagaagaccacctcatatggcctttcttggcaaccctggaacaggtaaaactatggtagcacggattcttggaaaattactccatacggtgggaattctacctactgataaagtgacagaagtacagcggaccgatttagtcggtgagtttgttggtcacactggtccaaaaaccaggaggaagatcaaggaagcagaggggggaattctttttgttgatgaagcttatagattgataccaatgcaaaagtccgatgataaggactacgggttggaagccttagaggagattatgtctgtcatggacagtggaaagattgtcgtaatatttgctggctacagcaagccaatgaagcgagtaatcacttctaacgaaggtttctgtagacgtgtgaccaagttttttcaatttaatgatttcaactcagaagaactagcacaaatccttcacattaagatgaataatttagcagaagatagtttgctatatggatttaagttgcataccgattgcagtataaaatccttagcagcattgatagagagggaaacaacagaaaagcagcgccaagagacaaatggaggtttggtagataccatgttggtcaatgctagagaaaatttggacctaaggctaagctttgactgtatggatacagaagaacttcttaccatcacattggtagatttagaagcaggccttcagttattaacacagtaatcattctttggcaatctagtagatattttggagacaagattcatttcaacttacctcaattttcaccattggatacacaggttttacatctgcacaatgagcatgtcatgaataagtttgctacaataggtcgattcttttgggaaaatttttccgtgtattttgtaatcgataatgttatatataggctttattcatgcactttttttttatctgaataatgatttgtagacacctaatgcaaatctataccttgagagagagaaatagaagagagataatttgatgagtgacatgatgttataaagaagagagagagagagagagagggagggagaaatgaggtgtcaaatgaaatgagtgtttataatgtttaagtagttatatatatcattgtttatctgcctttc

SEQ ID NO: 29715 - DNA, 948 bp, Glycine max
  Clone ID: uC-gmrominsoy125a08_FLI
caaaacatcaaaaacacccttcaataacttctttctcttctctattggatttcaatctctccctctcactctgattttttttttctttttcaattttcatggagggtcatcatctccatcaccggcaacaacaattacaacaacatcaccaccctcatcacaacatcacaactagtaacgtggatgccacggataggttcccccaatggagcatccaagagaccaaagagttcctcgtgatccgtgccgagctggatcagactttcatggagacaaagaggaacaaacagctttgggaagtcatctccaaccggatgaaggaaaagggtttccatagaagtgcagaacagtgcaagtgcaagtggaaaaacctcgttacccgctacaagggatgtgaaacgatggagccggaagcgatgaggcagcaattcccgttctacaacgagcttcaagcgattttcgcggcgagaatgcagagaatgttgtgggcggaagcagaaggagggtccaataataagaagaaggggatgcacctttcttccgacgacgaggaagaaggcaatgaagagatgatgagcgagggggatcacaagggtaacatcatcatcagcaagaagaacaagaagaagggaaagatggtaattggcgtcggagggagtggtaacaacaacaataatagtagtagtagtagtaacaacttggagagggaagaacaaagaaggattagggaagaagttagggctgataagagagatgctctaatcactgctcttcttaacaagctcagaagagaagagatgtagtagtttcttttggctggatagatagctagcttttatgtgtctttcttcttctcatgaagcaaagcttaatttaagaggtttgttctaacttctaagaactctcaatttatataccttggtcaatattaatatatatacatacttt

SEQ ID NO: 29716 - DNA, 1167 bp, Glycine max
  Clone ID: UC-GMROMINSOY127C11_FLI
atatattcctccacaatcattgcaaattccaatttgtggtatcaacttttgtccattttattacattttgcttatgatatcctggcaatagtatcctgaatgtattgccaattgcaattatatttccctgttcttgttgtttaattatttaattattgtatagtatgggctaaactagtgcttgtattttgctaggttggttaccttcttggtttaggtgatcgccatccgagcaatcttatgttacaccggtttagtgggaagattttacacatagattttggagactgttttgaagcatcaatgaaccgtgagaagttcccggagaaggcctttgtacatgatcctctcataaattggcgtctttttaacttcaatgaagttccacaaatgtctatgcttaccagcaatcatgtacctcctgttgtaaattctgaggaatctgccccaaatagagagcttccccaccctcagcgtggtgcccgtgaaagagaacttctacaggctgttaatcaacttggtgatgctaatgaggttctgaatgaacgtgctgtggttgtcatggctcgtatgagtaataagcttacaggacgggatttttcaacttgttcttcagtatcaaacaactcccttcagcatgctgtggaccatagcagcttaatttctggagacactcgtgaagttgatcatgctttatctgttaagttgcaagttcaaaagttaataatccaagcctcctcacatgaaaatttgtgccaaaattacgtagggtggtgccctttctggtaaatctcaaaggagcagtaaattttgtatatagtctgtacatagtgaaaacctgccatggatccaagtccattttgcccccctcttccccctttcacctattagcatctttaatttgtgtatatgtacagtaatttgtctcctgacactgcaatgaaaaaaatgaagcatagcacatacttggtccttgtagttcagaccacattttaactgggtctttgtaaatatcacctttccattagggagtgtgtgttgtaatatatgttcaattaatatccctacaagatggaaatggaactagatcatagttgtgagaaggcattttttgacctgatgtttgatatctcagatgagacaatagttattgtggattaaaatacg

SEQ ID NO: 29717 - DNA, 1350 bp, Glycine max
  Clone ID: uC-gmrominsoy139h02_FLI
ctcaggttcctcctatatatatatatatatacatacataatatccttctccctcaaaccaaaccatacctattctcaagtttctctctgtttcttcctacttcatgctatagcacttacaatactcaacaataacctaaccaaaccaaaccaaaccaaaacccttatctgcactcacttcacacaaaccaaagttaattaattaccaacacaaaatggatggaggctgtgtcacagacgaaaccaccacatccagcgactctctttccgttccgccgcccagccgcgtcggcagcgttgcaagcgccgtcgtcgaccccgacggttgttgcgtttccggcgaggccgaatcccggaaactcccttcgtcgaaatacaaaggcgtggtgccgcaaccgaacggtcgctggggagctcagatttacgagaagcaccagcgcgtgtggctcggcactttcaacgaggaagacgaagccgccagagcctacgacatcgccgcgctgcgcttccgcggccccgacgccgtcaccaacttcaagcctcccgccgcctccgacgacgccgagtccgagttcctcaactcgcattccaagttcgagatcgtcgacatgctccgcaagcacacctacgacgacgagctccagcagagcacgcgcggtggtaggcgccgcctcgacgctgacaccgcgtcgagcggtgtgttcgacgcgaaagcgcgtgagcagctgttcgagaaaacggttacgccgagcgacgtcgggaagctgaatcgattagtgataccgaagcagcacgcggagaagcactttccgttaagcggatccggcgacgaaagctcgccgtgcgtggcgggggcttcggcggcgaagggaatgttgttgaactttgaggacgttggagggaaagtgtggcggtttcgttactcttattggaacagtagccagagctacgtgcttaccaaaggatggagccggttcgttaaggagaagaatcttcgagccggtgacgcggttcagttcttcaagtcgaccggaccggaccggcagctatatatagactgcaaggcgaggagtggtgaggttaacaataatgctggcggtttgtttgttccgattggaccggtcgttgagccggttcagatggttcggcttttcggggtcaaccttttgaaactacccgtacccggttcggatggtgtagggaagagaaaagagatggaactgtttgcatttgaatgttgcaagaagttaaaagtaattggagctttgtaacattacatagtttttgagtttcttttgtgaattttgtaactgttgaattcatgaggtagagatggtgatggtgttgttgc

SEQ ID NO: 29718 - DNA, 1043 bp, Glycine max
  Clone ID: uC-gmrominsoy145h06_FLI
atggaattcaaaccacccaagttctataaagaggagcttaattgccttaagttatggagatctgtacacagattgggcggctatgacaaggttacctcatgtaaattctggcggcaagtgggagagtctttcaaacctccaaagacatgcacaacagtttcatggacttttcgggttttttatgagaaggtgattctagattaataaggcacttcttgactacgaaagcatacaacaaaaggtggtgagctgaatgtgcctattactcctcttgcagagccaataaatattgaaaatcagtctgtccagggttcagcatcatcaggtagggcacggagagatgctgcagcaagggctatgcagggttggcactcacaacgtctccttagcaatggtgaatttagtgatcctattattaagatttacttaaacgcaagaaatcatcggacaccgttaatgttgtcaaagtggcacacagtcaaccatctagaccacagttaagacacatatcggacacatctgtggttgacattggacctcctgctgattgggtaaaaatcaatgtgcaaaaaactaaagattgttttgaggtctatgctttagttcctggccttctgcgcgaagaggtgcgtgttcaatcagacccagctggacgcttggtcataagtggtgagcccgagcattctgacaatccatggggggtgacacctttcaagaaggttgtcagcttgccttcaagaattgatactcagcagacgtcggctgtggtgaccttgcatggacaattgtttgttcgagttccatttgagagcaatcaaaatagagaaggctgatagattcatgccgaactaatttaccaaggtttataggatagttgacccctaagccaaattcatgccgtgttctattatctctgaattatgtcaataattttttatttaaaattttcatttgatgttctgtcaaaagttttacaatttcaagcattgtttaaaatcacaccttagtaatagtatagtggcagcgttggttgctattctatt

SEQ ID NO: 29719 - DNA, 830 bp, Glycine max
  Clone ID: UC-GMROMINSOY169A04_FLI
tccttcatgtcctccgccatcaccggcgacgccagtgtctcttacggcaaactaggatcctccctcttcctcactcctccgccagtctcagccggaaaacctcctctctcctccgctccgatcaagaagaggtgtcacgaccaccgcgaacactccgacgagatctccgggaaactctccggctccagcaagtgccactgcactaagagaaggaagaatcgagtgaagaaaacggtaagagttccggtgatcagttcgaagatcgccgatattccgccggacgagtactcgtggaggaagtacgggcagaagccgatcaagggatcgccgtacccgagggggtattacaagtgcagtagcgttagagggtgtccggcgaggaaacacgtggagcgtgctccggacgatccgacgatgttgattgtgacatatgaaggggagcaccggcactcgatgcaggagaacatttccgggggagtgggtttgggattcgagtcaacgtgagggtggttgcaatgtaaatctgacattattaaaagaaaagattatattacaggggaatcttaatcttctcccaccaaagtcttcttattcaactttttgaaagtagtttggagccaagtgtgaattagaagggtagtttgtttagtgggaatggtaaaaggtcccaatccaagttgatgcctcggaatgggaaaaatggaatgacgtttaaactccattctcttcccttctttgcgatccacttaattgcgcacacaagcgtttcatttcgtcaagttaatatcttgcaaatcaaattttaaaactagtttcagttcttttttggt

SEQ ID NO: 29720 - DNA, 1118 bp, Glycine max
  Clone ID: UC-GMROMINSOY171C07_FLI
gtttacttgcaaccaagccctcattgaagctgtggaaaggtctgacagaattcatgttatcgatttcgatattgggtttggagtgcagtggtcatcttttatgcaagagattgccttgagaagtagtggtgcaccttcactcaaagtcactgccattgtgtcaccctccacttgtgatgaggttgagctcaatttcactagagagaatttgattcaatacgcgaaagacatcaatgtgtcatttgaattcaatgttttgagcattgaatccttgaactctccttcctgtccactgcttggtaaattctttgataatgaggcaattgtggtgaatatgccagtctcaagtttcacaaactatccatcattgttcccttccgttcttcactttgtgaagcaactcaggccaaaagttgtggtcactttggacagaatttgtgatcaaatggatgtaccacttcctaccaacgtagtccatgttctccaatgttattcggccctgcttgaatcgttggatgcggtgaatgtgaatcttgatgtcctccaaaagattgagaggcatttcatccagccagctatcaagaaaattatacttggccaccaccattttcaagaaaaattacccccatggaggaacctctttatgcaatctggattctctccattcacatttagcaacttcacagaagctcaagctgagtgtctagttcagagggcacctgtgaggggatttcatgtggagagaaagccttcatcacttgttctatgctggcagaagaaagaactcatctcagtttctacttggagatgctgaggactgaggagcagcagcagaagctaattaccttatatttttaaaggtgcatggtaacttacattgcagtttatgtaattgtttgtgtaatttaggcttattgatgagatccacacccaaatgttttcttaactgcatgggttggaatctaccattctgtagttctaatatttactagtatgtcactttgaacatgggtagtaattatgcctttccccattcccatcatctaaagatgggtaactgtttctttgttatcttgaacacaaagcaaattgcttagtaagaaacgaacaatttagct

SEQ ID NO: 29721 - DNA, 1011 bp, Glycine max
  Clone ID: UC-GMROMINSOY172D07_FLI
aaatagaggaacgaattttattttattttcaaaatatttgattgaaatttaaattgaaaagacgggagaataaaatctatcaagatgaggttttgagttgattaattcttgttgataattatcttctcatgttactatgttagcctctagtgttggagaagctgataactcttttctatgtaatttaggggatgttccttctatgggaacaagttgtgggatggccaccaatccgttctttcagaaagaactcaatggccactcagccacaaaagaatgatgataatgcagaagccaagtcggtatgcctttatgtgaaggtcagcatggatggtgctccatacttgaggaaagttgacctcaaaaactttggcacttacatggaactgtcttcagcactggaaaagatgtttagttgttttacaatcagtcaatgtggttcccatggagtttgtggtcgagataagttgactgaaaatagattgatggatctcctccatggttcagaatatgtgctcacctatgaagacaaggatggtgattggatgcttgttggtgatgttccatgggagatgttcaccgactcttgcaagaggttgaggataatgaagagttctgaagcaattggactagcaccaagagccatggaaaaatgcaaaagtcgcaactagcaagatggtgttgatacagaaagatgaattattattattacctttaaacacgtacatcatacaagagtccagaggcaagtgcagggcacaagctggggcttttcttgcttgaatatgtatgatataatcctacatatgggatccaagtatcctagactttttagtaggcaagatatgtttgttgtagacatttaaggtttcttaggcttgtttcccctcacttctcttcaatcactgtcactgtggacttcataagactgaagctacgtcgttactatgtaaattttgtaacttaagtctcatatatagattagtttgagatggttaattagagaatatt

SEQ ID NO: 29722 - DNA, 1698 bp, Glycine max
  Clone ID: UC-GMROMINSOY176C09_FLI
gctttgttgctcttcttcgatacaatggctaggagctggcttattgacattggaggatttgcaaagaaagtgaaaagcactactctatcttcagctgatcaaatcaaagattgtggggcatatcgtgaatgtccaaactgttcttatcatattgataacagtgatgtttctactgagtggcctggctttcctcttggtgtaaagtttgatccttctgatgtagaactcttagaacatttagcagcaaaatgtggcattggaaacactcagcaacacatgtttatcaatgagttcatcccaacactggaaggagaccaaggaatttgctacacacatccggaaaatcttccaggtgctaagaaagatgggagttatgtccatttctttcacagaacaaccaatgcatatgctactggtcaacgaaagcgtcgaaagattcatcatcaacagggtttgactgaagagcatgtgcgctggcataagactggcaagacgaaagctataatagaagatggagcacataagggctttaagaagatcatggttctctacgtaagatccagtgagaatgggtccaggtcttataaatccaactgggtaatgcatcagtaccatctagggactgtagaagaagaaaaggaaggtgaatatgtggtttcaaaaattttctgtcaacagcaaaagcagactgagaaaaatgagggcaatccaatggctgaagatcctgacaatataatatcacgaacaggtcctagaactccgaaaccaaatccccccaatccacctcgtgcgggaaaatctgttgattgtgatgataacattgatgaaactgtacttctgtcttctgccctggataccaagacaatccctggagaatcacatgctccacaatcagatattcaggatcaagactttactggcaatgctgcatggctagctggcgaatcgcaggctgaggaaagcaccaaatatgatggctgtgacgacatcttattgtgcaaggagatcttagattcttctgctatattaaatgaccctggattggactccaccaatcttgaagacattgcaggctatgctacccaaagggctagaaatgataatgaatcttgcggaatttctgttctggattcactggaattggatactcctgattttgatctttctagtttgtatttttgttctcaagacagtatccttgattggatggacaggttatgaggtgctctatgtatgatgccctttttggtaccaaatccagaagttgttccattcaattgccggggtagtgcatcctttttctccctttcatgcttcaattgctgtggtttttcttcttctggatgcagcaaatatagtgcatgaagttttggtcgtcatcatctgatgtttcatgctagtaagcggaaataatactactttctttggttcctcaactcttgcaacttttgtcatattatgaagttaagctcttatctagctagagctggagttttgccttcttcattggaggttatttgtgtgagaaattgtttttggaggctatttgtttcttcatggccaatttaaacttgtgctttggctcattatgtcagccgtgaaagtgaatactactttggtgatgaaatccgaaatggtgtagttgactttatgtactagatttcaagatggtgagtgttctatgtgaatattgataac

SEQ ID NO: 29723 - DNA, 1922 bp, Glycine max
  Clone ID: uC-gmrominsoy179b12_FLI
agcttagaagcaaatgctggcatggtatcgcagattcgtgtagcaagaccacctgctgaaggacggggaaggaatcaattgcttccacgttattggcctaggattactgatcaagagttgcaacaaatatcaggagattcaaattctacaatcgtgccactctttgaaaagatgcttagtgcaagtgatgctggtcgaattggtcgcttggttttaccaaaagcatgtgctgaagcatatttccctccaatctctcaaccagagggccttcctttacgaatccaagatgtgaaaggaaaagaatggatgtttcaatttagattttggccaaataataacagcaggatgtatgttttagaaggtgtaaccccctgcattcagtctatgcaattgcaagctggagatactgtaacatttagccgtatggaccctgaggggaaacttataatggggtttagaaaggcaacaaattctactgcagtacagttacaaaagggatgttcagaaacccacctaaatgcgctgtctaaaaaatggaactcagctggtggtgacatgagttggcataacattgacatgcctgaaagcagaaaaagagatgagttgccgttgccacctgtgatggttcctgagaagaaaagaactcggaatattgggtcaaaaagtaagaggttgcttattgatagccaggatgcactggagctgaaacttacttgggaagaggctcaagatttgctccgtccacctcctactgttaagccaagcattgtcatgatcgaggatcatgtatttgaagaatatgaagaacctcctgtctttggaaagaggagtatattcgtagttcgatcaactggggtaaacgagcagtggacgcagtgtgatagttgctcaaaatggcggaagttgcctgttgatgtacttactcccccaaagtggacatgtgtggagaacttatgggatcagagcaggtgttcatgtgctgctcccaatgaattgaacccaagggaactggataatcttctgaggctgaataaagaattcaagaaacaaagactggcagcaagccagagactggccctggaacatgaatcttcaggactggatgctttggcaaatgcagcaatactgggtgatgatgcaagtgactctggcaggacatcagttgttagcaccacaaaacatcctcggcatagacctgggtgctcttgcattgtctgtatccagccaccaagtgggaagggcaaacacaaacccacatgcacctgcaatgtgtgcatgacagttaaacgtcggtttaaaaccctgatgatgcgaaagaagaagcggcaatccgaacgtgaagcagagattgctcagagaaatcagttatcatggcggaccaaagatgaatcagaagtagatagcaccttacgacatttaactccagttgacagattggagaatgaggtacgggtgcaaaatgaattggattcaaggagtcaaaaccatgcggtggctgaagctgccaagggacaattagatttgaattgtcaacctgatcgagaagatgtgcaagcttggccgaacaatttgagcatgacgagtcttcttgaagaagcaaatctcccgctggaaacctacctaaagcgaaatggccttagtagcttgatatcagagcagcaaacaaattcagcttcaaatgtgcaagcacagacaaccaatgatagtgagggaaaacacaatgaggattgtggaaccgctttggttattcatgagagggaaagcagtcctgaagagaacagtgggcaagacagagagcaaaacaattcactctcatgaaatcttgccagttatattataatttttttttccttttttttaactcaaaaatcattttacaagaatccttgcataaattataaaattataggaggttcatttgt

SEQ ID NO: 29724 - DNA, 1355 bp, Glycine max
  Clone ID: uC-gmrominsoy185h07_FLI
atgcttgcatttgagcactctactaaaatctctaggacatgggtgatactccaaagcgttcaaacctttcacgaagaatagcatccttggtcaggttccgcgagaaacgcaaggaaagatgttttgacaagaaaattaggtattccgtcagaaaagaggtagcacagaggatgcatcggaagaatgggcagtttgcttccttgaaggaaagcccaggttcatctaattgggattctgcacagagttctggtcaagttggcacttctcattctgaatctgtacgtagatgtcaccattgtggtgtcggtgaaaataatactcctgcaatgcgtcgggggccagctggaccaaggactttatgtaatgcttgcggccttatgtgggctaacaagggcacactcagagatctcagtaagggtggaaggaatctttctgttgagcaaagtgatctggacactcctattgatgtcaagcctacttctgttcttgaaggggaattgcctggcatccatgatgagcaaggtagttctgaagatccttccaagtccaatgcagcggatggttctagtaatcatgctgtaaaccccagtgatgaggaattgcctgaaactgcagaacactttacgaacgttctgccactgggaattggtcattcttcaacaaatgacagtgaacaggaacctctggttgagctttctaatccttcagatacagatattgacattccaggaaactttgattagaaggtactaagtgattcattaagttgaggggttttataaaatggtccctctgtagtatattgtcggtgtactaatcagatgcagatctagaagcagtgatacatacccgagacaattaggaaattcggggttatgactgatagtagccctcggaaatggaaatgattactgattagcaagtgtcaagaagcactgctgttccggtctaacattaaatagtagtctgcaatattgatgctggtataagtgccaagacattgtttgtgtatatgttatcagatgatcttccttcagtgtttatatcataaaatattcattagtacggggcctgtgttgtaagaatgctgtctgcttgtccctgactgtaataatttcattgagatcaaagctgtgctaccctgattttagagatgaattttaggtgatatgctatgccactcaaggatgggttgctaatttgaatatcaacgtagcggtgtgctaatctcgacctctgatgaagtttaggcttgtgctgctgtgctctggtgagaacatttggaatatgttaattagtacagatagacttgttccaaatgtacatatacttacaaataaatattagttgtcgtc

SEQ ID NO: 29725 - DNA, 1551 bp, Glycine max
  Clone ID: uC-gmrominsoy195d07_FLI
tgagaatcaagatgaagagcctgatgcaatggttgaagaacctcattctggtgatgaagctacaaacagtaatgattcagactggagcatggattgctctgcaggtgcagttgttagagttaaaacactgcatatcagttctcctatcctggctgctaagagtcctttcttctataagcttttctcaaatgggatgaaggagtctgatcaaagacatgtcaccctcagaattaatgcctctgaagaggttgctctcatggagctactgaattttatgtacagtaataccttgaccactactacggcacctgcattgctggatgtgttgatggctgctgataaatttgaagttgcttcatgcatgagatattgtagccgattattgcggaatatgcctatgacacctgactctgcattgctttatctggagcttccttctagtgtcttaatggctgatgcagtccaaccattgactgatgctgcaaaacagtatcttgctggtcgatacaaggatataaccaagttccaggaagaagttatggccttgcccctagctggagtagaggcaatattgtctagtgatgatctccaggtcgcatcagaagatgctgtatatgattttgtgttgaagtggtctcgacagcagtaccctaaactggaagataggcgagaagtcctgggtgcccggcttgcacgactaattcgcttcccttacatgacctgccgaaagcttaagaaggtcttgacctgttccgactttgaccatgacattgcatccaagcttgtactcgagggcctatttttcaaggccgaggctccgcaccgccaacggtcgctggcagcagaagactccgcttcttcaaaccgtcgttttgtggagagggcatacaagtaccgccccgtgaaggtggtagaattcgaacttccccggcagcagtgtgtggtgtacttggatctaaagcgggaggagtgtaacaacctgttcccgtccggccgggtttattctcaggcattccatttgggtggacaaggttttttcctatcagcacattgcaacatggaccaacaaagctctttccattgctttgggctgtttttgggaatgcaggaaaagggctcagtgagcttcgccgtcgactatgagtttgctgcgaggtctaggccgacggaggaatttgttagcaagtacaaaggcaactacgtgttcacagggggaaaggccgtcggctatagaaacttgtttgctattccatggacttcgttcatggccgaggatagtctttactttatcaatggtgtcctccaccttagggctgagctcacaatcaaacactgaccccaatttctagtggtaaactcacattctattccagttggtagccttgacctttttttagatctcgaattctcattttctgttaacacaagtaaatgagtaatctatcaaaagcttaaatatacaggcatgtgcactaaagtggctagtgttgcttgtgattgagaagatataactaggaccgttatatgttatctagtattctaggttaagtg

SEQ ID NO: 29726 - DNA, 1355 bp, Glycine max
  Clone ID: uC-gmrominsoy196a10_FLI
tgttgatactatggttcctcaaagtcagccccttgttattcatgttcctgctttaccaaggaatgcacagtcattcaggtggagtggtggttccagttcaacaaacaaccattcctcaaactcagttatgtgtgcagatagaaataatctaccaaatgaggaagcaagctcaagaagtatgcctagaaacattatagaatacccaatgtttgtgcctgcaaccaacttaagaaacgttgttcggaatccagctagaacttcaaataatgcaaatttaagtattccaggaaatgttggttcttcatcgcggacaggctcaaatccagctgtcaatccaccacctgcctcggcgtgggtttctcgccctaatcctcagcagtatccgcgcagattatctgaatatgttcgtcggtccttgttttctcctggtttggaagctgctggaagttcaagcaatagttatactcccttccgtggtcctcctacttcatctgaatcaaggggactgtcatctggggtaaacccgttcgagaggcaaggtgatagtgaatttggaattccatattcgttacaatctttggttgttgctggtgaaggaagtagtagacttgtatctgagctgcgcaatgtgttgggcctcatgcgtaggggtgggaacctgcgatttgaggatgttatgatccttgacccttcagtgttctctggaattgctgatattcatgatcgacacagggatatgcgacttgatgtggataacatgtcctatgaggagctattggctctggaagaacgcattggaaatgtgagcactggattaagtgaggagattgtatcgaaacttttgaaaaagaagaagtattcagctgaaccagattctcagcatgaggcagaaccatgctgtgtttgtcaggaggagtataaagatggggatgatttaggatcactggattgtgggcatgattaccatagagattgtattaaacagtggctaatgcataagaatttgtgtcccatttgtaagacaacgggcttggcaacctgagacttgtatcaaaaatattttcatattttctcttagaagatgaacattgaggtcaaggaaagtggcacaatttaatcagaaaattctgctgaattgtagctgaagtctctggtgctttgctgcttactaaatggcccatcttcttaagccttagccaaatttcttattatcaaattttttgtttacttgtagaagccaatgatctccggttaaagtgacacatgagatgattggtgtggtggataaaggaacatttcttaactgtagttgacaaggcttgttttacatttatgaaattttttatacattgctc

SEQ ID NO: 29727 - DNA, 954 bp, Glycine max
  Clone ID: uC-gmrominsoy216b02_FLI
caatgcagaagtacattgatattgtgaccgagatctatcctacttggcttgatggttcatctttgaggaataaaagcggcgacagtggtggacatggttcagaggctaagggaccaatgggccccgtattcagcacttttgtttatgaagaggaatatggcagtgactcacaaatggaagccattcatggatttgccagggaaggagatatggctaatctgctcaagtgtattgaaaatggtgtttcaatgaatttaaagggacaatgatggacaaactcccttgcattacgctgttacatgtgagagggaagccatagctgagtatttagtgaagcataatgcagacatatattcaaaagataatgatgggagttcaccacgtgacatctgtgagtcaaactggccatgcatgcagcatgtgggggaagaagtaaattgattgattgattgtttgcttgttgcagcttctggccaatacaaccttttagccaaatcccaagaggatgttcgtgtctatataacttgattttttttgtccttactcatgatggtgtatacacccttttcagtctagtgtacgcctatgcaccgcttaggtaatggttagttaattaggttgtattctgttctattattgtttcctctgctcagctctttaaatctggctctcatttcttatatatttcatggataaagatatacacggaaactagaaatagtaacagggaaagggaatcttaaacgatattctttcctcggaaaaccttctacccttctattgaaggcgatatagattttacagggttattttaggtcttcaaatggtgttaagattatccgcagtgaaatctttgattgataatgatgtcgtgattatgttgaatctgatgttttaattaataatgtaatttaaatttgtgtcaaatattataaatcatatttttttcatatt

SEQ ID NO: 29728 - DNA, 458 bp, Glycine max
  Clone ID: UC-GMROMINSOY220C01_FLI
gtggagggccaggaaccattaagaagcttactcttgctgaaggtttaggttatgtgaagcaccacgtagatgcaattgacacagaaaactatgtgtacaactatagtgtgattgaaggcagtgcattgtcggagccattggagaagatatgttatgagtacaaactggtggcaaccccagatggaggatccattgtgaagtccacaagcaaatactataccaaaggtgatgagcaactcgccgaagaatatgtgaagactggcaaggagagatctgcaggtttcaccaaggctattgaggatttcattcaggctaatcctgattacaactaattaagtcaccaattataattatgtctcagttttattaattatggtcattttgtgttttttttttcccttcttgtcgtgtgttgctttaatttccaataaaattattgtttgactttgcttcatgag

SEQ ID NO: 29729 - DNA, 1289 bp, Glycine max
  Clone ID: uC-gmrominsoy223a06_FLI
aaaaatagaaagaaagagaaataccaaaaccttggcgcatcatattctttattccctcacttggatcgttaattccgcgaacgagcttctgcccttcaaattaaccatggagaatattggtgaggagtacggctactggccggagaacgacatgcttttccaaaacgaagaccttggcagctgggcgataatggatgaggcagcgttatcagggtcagggtactatgattcaagctccccggacggtactggtgcttcttcatcggtggcatctaagaacattgtctccgagaggaatagaaggaagaagctcaacgataggctttttgctctaagagcagtggtccccaacattaccaagatggataaggcttctatcattaaggatgctattgagtacatccagcacttgcatgaccaagagaagagaatccaagctgagattttggatcttgaatctgggaataaactcaaaaacccaacctatgaatttgaccaggacctccctattctgctcaggtccaagaagaagagaacagaacagctattcgattctgtcagttcaagaaattctccaattgaaataattgacctgagggtaacatacatgggagagaagacgtttgtggtgagcttgacatgtagcaaaaggacagacacaatggtaaaactgtgtgcggtgttcgaatctttaaagctgaaagtcattacggccaatatcacttctttttcaggcacgcttctgaagacagtcttcatccaggttagtcttccattttgcccttcttaaattaataagtaaataaataaattgttaattgtttaatatttgtgtttaaagattaaattagtttttttaaaaataatactcatcggctagaattttgggggccacatactaggaaacctatggaccactttaataaaagtgggaaacccatttatgggataatgggcattttagggtcaatgatgagaattaaggaccttatggcagtgtcctattcaaatcagctgatgaggcaattaacaaggaaggaccacgtgaatcttgtgctttaaacaaagattgatgggaggaccacatgaatattgtgctttaaacaaagattgatgggaggaccacatgaatattgtgctttaaaaatagagaaaaaattatgtgagtattatatgattattttggtgatttttatgcttagaaagaaattaatttctacttatcggtagaagatattcttttgaaaataaataaataataaaagactcaatttcatgacgtaggggat

SEQ ID NO: 29730 - DNA, 970 bp, Glycine max
  Clone ID: uC-gmrominsoy223d02_FLI
aaggcaagcaaaatcataatcagttggattatgtcggtctgcaaagattctctctttcgctgcaacattttcacgtgctttttttaacataacatttaagcacatcaatcaatatcccacaacattattactactgtatcattattgtgaccttggagcagcaagccatgccctattttattaattaatttgtgcactaatcttgtgataattacacaattgcgtgcagatggtcggctatagcggcaaggttgccagggagaacagacaacgagataaaaaacgtgtggcacacccacttgaagaagaggctgccacaaaattataaacaaagccacgaccagaaaaaaacgaagcaaaaaacaaccaaagttagatgtggacgcctccaaatcaaaccaagacgccaaactagaacaacaacaagagcccgtgaataataattttccctttcatgcatcgaactcagaggacatgatgccactatctcctccacaatgttctagccacatgtcctcctcctccctcaccactagtgacaacaacggtagcattaacaataaccatgacatgtccttaaatgttaatgatgatatcgacacgccggagaataatcttgcattggacgaggatttctggtcggaagtgttgtcgtctgataattccggtgagacaacaagcggatttccgaccattgactatgatcatcagtttctaccgatgtctcctctaatgaccgaagaaggggtccttatagatgctagttcgtcgagtgtgtgcgacgacggcatggacttttggtgcaatgtttatgcgagagctgaggaatttacgcagttattggaattgtgatgttagttaatgttgctcttaattagtagaggccaagtccttcattcaacggaaaacaaaagatcatgtcattgttcttctattgtttggacttgaattaatttcctagatagaaatt

SEQ ID NO: 29731 - DNA, 1046 bp, Glycine max
  Clone ID: uC-gmrominsoy223h06_FLI
cacaaagtcaatataattatagtatatccctatgagtaggagttcggcgatgcatggaattacaagcacaaacaacaagttgaagggagttcggcgtcgaaaatggggcaaatgggtgtcggagattcgtgttccgggcacgcaagagcgtttgtggttgggaacctacgccacgccggaggctgccgcggtggctcacgacgttgccgtctactgtctaagtaggccttcttcgttggacaaacttaacttccccgaaaccttgtcttcgtacagtgttcagctcagggacatgtctccgaggtctgtgcagaaggtggcttccgatgttggcatggatgttgatgcaagaaacattgttgcgggcaaaacttcaacggtgggggcagaaactaattgcgagagtgatgagaggactagtactgcgtctgtgtgtaatgttgttggagaaggtggtgctgatcattcggatgtgttttggtgggatgatgatggtgggtcttggcatggaagtggtggagattctacggaaagggatgccttgagcatttccattgaagattatctttagctgttctaggtttcaactttagttatctttttttttttttttttgagttatgatcgatgcgcatagttagtagttacagataattactgctagtgttggtgtttaaacggtcagagatgatgatatataatttgatgtgcgctagctgccttttgaagaaactaaaaaaaggtaaaacaagaaagattgtacccccaaaatgaacttggtcaatttcacactttcacgccatttgcattttgtgcacgttgttagttttcaaattgttaattcccttgctaaacccactcaaacttgagtgcgttcaccttttattaccacgtagtaactgagagttaacgaaaatatttctttataaaaattatttaccatttagtgtctttcgtttacttgtaattattcaacttgtcaataagatgaaagttctaattttagatataataaaattcagctagtatttgtgaattactcactt

SEQ ID NO: 29732 - DNA, 1344 bp, Glycine max
  Clone ID: uC-gmrominsoy224c01_FLI
aaatacgagagataaagttaaagaaattaaatagcaccaatttcgcccacgaaaccctctctcttgtctcgtcgcttcaaactcctctgcggtttccccttcttgttcttcttcacagaaatggaggtagcagtggccaaagcgttgaaaccgagtttaaggagagagttcatcgttcagcaaatgctctgcgaggatattttcagcctgaacgccaacaccgtcgccgccggcgaagatttctccgtcgacgacctatttgacttctctaacggctctcttcacaacgaacaacaacaagaatacgacgaagggaaacaaagtttatcggcttcagaggaccgcggagaagacgattgcaactccaattccaccggcgtttcctatgattcacttttctccaccgaattagccgttccggccggtgatttggaggacctagaatgggtttcacactttgtggacgattcactcccggagctgtcacttctatacccggttcgttcggaggaagcaaaccggtttgttgaaccggaaccctcagcgaagaaaacgccttgttttccgtgggaaatgaaaataacgaccaaggcgagaaccgtacggaataggaagcccagcaacagtcgcatgtggtcgttgggtagcccgttgctctcgctgccgtcttcgccgtcttcgccgtcgtcgtgttcttcttcggtgagggagccgccggctaagaagcagaagaagcaagcccaggcccagcccgttggggcccagattcagcggcggtgcagtcactgccatgtgcagaagacgccgcagtggaggaccggcccactgggcgcgaagaccctctgcaacgcgtgcggggttcggtacaagtcgggtcggttattttcggagtatagaccggcgtgtagccccaccttctgcagcgatattcactccaatagtcaccgtaaagtgttagagattcggaagaggaaagaggtggctcaaccggataccggcttggcccaggcccagactcaaatggttcccacctgctgatatcttacttagattagggaaaatttgcagtttaggtttagggtatacaaacccggtttgaaccggttcggtttttgtatgatatttagtgggttttttagttttagttagtgctaggcagtagtcaccagtcaggtaaccaaccataatattaggaattagtagtaattaggcattgattgtttgtaaggttgtatcgtatcccattttcctagcgttgttgattttatttaatgtaatacaaatagtttaagttaactggaggaagagcggtttaattatgaagattatttaaagtttgggcat

SEQ ID NO: 29733 - DNA, 1201 bp, Glycine max
  Clone ID: uC-gmrominsoy229c02_FLI
tgcagattgaggtggctgaattatctgcgtcctgatgttcgacgtggaaacatcacgcttgaagaacaacttttgattctggagctccattctcgctggggaaaccgatggtcgaaaattgctcaatatttgcctggtagaaccgacaatgagataaagaactattggagaacccgtgtccaaaagcatgccaagcaactcaaatgcgacgtgaatagcaagcaattcaaggacaccatgcgttacatttggatgccaaggctcgtggaacgcattcaagccaccgctgccgcctccgccaccacaaccgttaccgctaccaccgcgaccaacaatgcatacacctacggaagcaaccttaataacaacaaattcgaggttcacgatcacaagggcaaaatggggttaaccgatccttcagttatgaacaatgacttagtgggttcacatgtcacgcaaagttacacccctgagaatagtagcaccggtgcgtcatcatcagactcgtttgggactcaagtctcagcaatttctgatttgactgaatattacactgtcactgttagtggtaacaataacaatactaattctgcggattattatcaaccctctcaaattagttactcggatagttgcatcacaagcccatctgggttgttccctcaagggctagattttcaatccatggatccaaacaccccgtggaacatgcaaagtggggactcctctgacagtttttggaacgttgaaagcatgttgttcttagagcagcaactcatgaatgacaacatgtgaaaacattgggaataggaaaataagacttagatacggttcttcttagtattgtgttttaattaaagttaaagttaacacaagttattgaagtgaaactttaattttaattgaataataatactgaaaacaagagttgtatttaagttttattcttttatgaattatgaattagattgacagaaggggttgtttgtgaaatatacaggtgaaagtatagaaagtagcaacattaataaatcattcatgtgtagcacacacctagatatttaggatctatgatcaacaaatatctgaaacggtggattattataaggataaagagaaggattttttttttccagcttgtagtttttttaatgattaagtttttattaattttttgtcattacttttaatcgatctctct

SEQ ID NO: 29734 - DNA, 913 bp, Glycine max
  Clone ID: uC-gmrominsoy243f12_FLI
tctctctcagaatttctatctatctcttgtttcaatttcaacaacggttactcctttttcgttttgagtttcaatcaagccatcatcatgtctaccgcatcgcaacccaaggccaagaaaacggcgtcgtccaagaagcccctctcccaccctcccttcgccgtggtactttcccaaaatactctccttcaaaatcaattctcttagtttatttcttttccaattgtatttaatttgattattctgtagatgatagcagaggcgattgcgagtctgaaagagagaaccggttcgagccaatacgcgataaccaaatacatcgaagggaagcacaaggagttgcctgcaacctacaagaagcttgtcctcgttcatctcaagaaatctgttgctgctggcaagcttgttaaggtgaaaaactcctttaagctcgcaccgactaagcctgctccggttaaggccgctgctcccaaaaagccaaccaaagctgccactaagcccgcttccaagcccaaagctgctactcctaagaaaaaggctgttgccaagcccaaggccaaagctgcggccacgactgccaagcccaagtctaagcccgctaaggtcgcggccaagaaggtcgctgctaagccagctaagaagaagacacccgtaaaggccgtgaagaagcccaagagtgtcgtgaagaaacctaagagcgtgaaatcaccagcgaagaagactaaggctaaggctaagaagtgatgatttggattggggtttggttttggtttggcgttatagttttatgcattccgggttcattcgtagtagtataggtgaatatatttttagaagagtattgatgtaaattcctttttctagaaattcaacaagtgttcttgtttgcattgaatacaatttcgttttcttt

SEQ ID NO: 29735 - DNA, 1199 bp, Glycine max
  Clone ID: uC-gmrominsoy258c06_FLI
tccacgttattttctgaagtctggtgtgtatttgcggcaaggtttggctccaacaagagaaacgagcaatcatatggtatttgatttttagggtggaagaaaaatcagagtgagagaaaaaatcgatggagatggaagtagacatcgagaagaagcaacaagacgtggtgaaagagaaagacttgttcaaagctgcagaagagggcgaggcatcaacgttcgaagctctctcttctgaaatcctctccaaagccctctctctcagaaacgaagacgctcgttcccttctccacgtcgcagcttcttccggtcactcccaggtagtgaagatagtgttgtcttgtgatgcatctgctggtgtggtgaattgtgctgatgaggaagggtgggcgccgcttcactctgcagccagcattgggagtgtggagatagtggagactctattgagcaaaggagctgatgttaatctgaaaaataatgggggtcgtgctgctctacactatgcggccagcaaaggttgggtgaagattgctgaaatgctcatctcccatgatgccaagattaatataaaggataaggttggttgcactccattgcatcgggcagctagcactgggaaatctgagctgtgtgaacttttgattgaagaaggagcagaggttgatgctgttgatagagctggtcaaactcctctaatgaatgctgtgatttgctataacaaagaggtagcccttcttctgataagacatggagcagatgtggatgtggaggacaaggaagggtacacggtgcttggtcgagccacgcatgagtttagaccaatattaattgatgctgccaaggccatgcttgagtgatcatacaattataagaaaatgagaaaattgtcaggacaggaatgtcgaaagagagcagaattgtggtagttatttcgcaatgccataatggtggttacgttcttgacaaattatgttgctcaggcaaaaagttcatctatacccttatgttcttagttgtcaaaccagtttgttttgggtatttttgtgccagctttaaattaaatcaggaagattagaatttttgttttgataatcccctaaattagcaattcagattgtataagtcaaaacattttaattctagagattttaagaactctccgttagttgattttataagaaatggttcattttactttt

SEQ ID NO: 29736 - DNA, 913 bp, Glycine max
  Clone ID: UC-GMROMINSOY261A05_FLI
caaagtaacactagaactcacaaaggacagaagaaacgcgaatgccaggagaactccaattaccacccgggttcagattccaccccactgacgatgagcttgtgaatcactacttgtgtagaaagtgtgctgcacaaaccattgctgttcccatcatcaaagaaatcgatttgtacaagtttgatccatggcagcttccagagatggctctttacggtgagaaagagtggtactttttctctcctcgagaccgaaaatacccaaacggttcgagaccgaaccgggctgccggaagcgggtactggaaggctaccggagctgacaaaccgatcggaaaaccgaaagcccttcttgaagctgggagtcaagactcgcggctgtaacggcttatcctacaccctcaattacgcagatgaaaaagggaagtttgatgagttggttgaggataagggtgttatgatactgattgatccaaaggcccttatgcatgtcattggaactaaaatggattttgtagatgacaaactaagatcggaatttattttcgtcaatccaaattccaaaggtcagtgtggttgtggtgaatctttcatgacaacaggaagtagtggatcttctaagccatgaaatagttaaaattgctatccaagccgtggatcctcacgtaatgaagtcgtcctttcatgatttaattgatagatagacatacaagtacaactaatggatttctattattctgcctgcgagaacaagggaaacgaaaactttggtgctcagaacaaaaggatactgaggactgacatggtctcgatatacagagttctctgaagctgatggtaataggcttatttcaacaatttttattgtcatttgttttgatgattcttatttctaatataaaattctttgtatc

SEQ ID NO: 29737 - DNA, 510 bp, Glycine max
  Clone ID: uC-gmrominsoy273c02_FLI
gacctcctgctctcacactccctattctccgtcaccttctccctcctctgccactccaacaaactctccgacaacctcgtctacagattcatcaacgctctcggccatcgcagcgacatcaggggcaccattcactggttccagaaagccaaaaacctaacaagaggacgatgcgcatattctgcaaggtgattagagacccgtcaaagtatcgaagaaagcgagggtttgaatgggaaccttcgattttgccgaggaagttgctcgagcctacgacgccgccgctcggactctccgaggtcccaagccaaaacaaaaatccctctctgacctttttgctacaaccccaccatcgatcctttcttctacgcgggtttccccacttaccttgaagtctgccacagcggctgccacacttcatctttcgtcaatgacgacgacactatttttaattttcttctgcttgattgttcttattttactctttgttacaaataatttgagttttgc

SEQ ID NO: 29738 - DNA, 1885 bp, Glycine max
  Clone ID: UC-GMROMINSOY285E09_FLI
gcgcgaacaaatgtgctcccatatattcccttgcaattagaggggagtggaaagaaactgaagccatgatagacgcagatagaaggttggctacttctgccatctcacagggacgggcaacactgcttcacgtagcagcagaagcaaatcagttgcacttcgtaaaggagcttgtgaaactactgagcgatgaagacttggaattacaagaccgcaaaggcaacactgctttctgtttagccgcagcatcgggaaatgtgagaattgttaaagtaatggcccgaagaaatagcaggttgccaactatcaggcgtggggatggactcaccccacttcacatggctgctttgcagggaaaaaataaaatggcatggcatctctaccatgataccgttcaaacattcaatgatgcagattgggatgcattgttcttcttttgtctcaagactgatatttacgatttagctttgaaggtgttacgagagaaaccaagggtagctttggcaaggaatgagaaccaggagacgggcttgcatgttttggcccgaaagccgtcatcttttagttgtcgatgaggtctaggacaaaggtttctatatatgctcaccaactcaggtaagagtccaactttggccctccaacttgtcaagtgtctctgggagacacttctttctctagatggcacagagatgcagactattataaaagtcataagtgaaccatctcaggtaatatttattgccacagaagttggaaattttgaggttttggcagagctggttagatcttgcccagaactcatgtgggaagttgataccaaaaatcgaagcatcattcacattgctgctttgcaccgccacatagacatatataatctaatacatgaaacaagctctatcaggaattttgtagtaacattagaggatgaggataaaaacaatttactgcactatgctgcaaaattatcaccaccgagcaaacttaacttgttgcctggacctgttcttcagatgaagttcgagttgatgtggtatgaggaggtgaagaagatcatgcaaccttgtttcatagagatgagaaattccaatggtaaaactcctcgagaattattcactgaagagcatttagagttagtgacaaaagcagagtcttggatgaaaagcatgataaattcctgtataactatttcaacggtcactgctacactagtgttggctacagcattcagcattaagcgtgaggataaccataaacccaccattactcgtgacttcatgttatatattggaattgcaatgatatcttcatccatctccagtctgattttcttgtctatccttatcacatcaccttgtgtagaggaagactttttgaagtcactgctgcggaagatatggtggggactggtgacactatatacctccatagcatacttgtcgacgacatttaccattgccttcttcacaacgtaccaagtacgggtgccaaaatcatttttttgggggcctttaataagcctattaataatggaatatcttctgtttccatatgggtcactcgtcaacataaacccacgctattggttacccagtaaatacattttttatactgggaaagctaaaggccgtgtaaattaaccatgactctactaggttaaataagtgctacatacctgctttactacaaatagaaattcgcatttgaagttttgaagaactgtactagtttgtcaagtttattatgcctatcaaatagcttgcaacgtgtaatgtagtgttggctggaaaatacaacttatattaattttcagctaacctgagagaaataaacaccaacgaaatttatgtcaatggatgataaataatcaattagtcaatttgatatc

SEQ ID NO: 29739 - DNA, 2047 bp, Glycine max
  Clone ID: UC-GMROMINSOY300G05_FLI
cacaacacaagttgcttgaaccttacacgtcaccatcgttgcgtgttgagtgttgagagatgggaaattcgttcggatgttcggcctccggcgaaaggctggtgtcggcggcgagggacggcgacttggtggaagcgaagatgcttctgaactgcaacccgtgtctcgccaagtattctactttcggtggcctcaattcccctctccattttgcagctgccaaaggccacaacgaggtccctttatttcactttttttacatctaatccaaccctttaatttatttatttttctctgttggttttctgttagattgtggcattgttgctggagaatggagctgatgtgaattccagaaattattgtggccagaccgcattgatgcaagcttgtagatatgggcattgggaggttgcacagacacttttactcttcagatgcaatgttataagagctgattatcttagtgggaggacagctcttcactttgcagctgtgcatgggcatgtaagatgtattagacttgttgtggctgactttgtaccaagtgcaccttatcaagctatacatgctggcacagctgttgacaggggtggtggatcaaatgtgaaaggcaaacatgagcatagtgcagtgccctttccaagtttgtaaataagactgctgatggaggaatcactgcccttcatatggctgcgttaaatgggtactttgattgtgtacaactgctgcttgatcttaatgcaaatgtgaatgctgtgacatataattatggcacatcaatggatttaataggggctggaagtactccattgcattatgctgcttgtggaggcaatttaaaatgttgtcagatccttgttgcacacggtgcaagtcggctggctttaaattgcaatgggtggcttcctcttgatattgctaggatgtgggggcgtcattggcttgaacaattgctggcacccagttctgatgccacaatgcctacattctctcattcaaattacttgtccttgccccttatgagtgtgctcaacatagctagagagtatggattgcaatcatctacagcctcctctgatgagattgacttttgtgctgtatgcctggagaggccatgttcagtggctgcagaaggatgtgtgggcatgagctttgtgtaagatgtgcactctatctttgctcaacaaacaatgtttcttctgaaatggttggccctcctggctctatcccttgccccctatgtagacatggagttgtctcttttgttaagttgccaggttcccaagcaaaagaaaataaactacatgtgtctcttggcctgtgtaccccatgcatgctacatccacgtgacctagacaagccatccctttctcatacaccagaggttggaagaaatcgtgtagcttctgttccttcggagatactctgccccgtcacttgtagtccatttccatctatggcaattcccttatgtacctgcaatgatggtccatgtccatcatttgaacccagagaagtagaaacacaggatggattacctcatcactctcaagcatcaacagtggatcaggataaaattgaagggccaagactagataaaacaacctgctctagcatgttttggggtagaagaagttgcagcagggagcaccaatgcaattcagaaataaatgcttgactcgcaccatgcttgtacgacacatacaagtgtcgtggatactgggtacactatagatcaacaggatcagtccacaattttcttattaaccagcctcaaatagtgaaactcgggatctctctagaagagaaaaaactgctctgcagatcctcttggctgctcaggttgtatggtaggtgatagacacaattctggcgtttcagcaacacaaccaccctctggatatgtcctttttctgatatttagggagcgtgtgtgaaattagtttcagtttcgtgagatttttattgtgatttattgtaattggatttcattttatccaggaaagtgtcttctttaaggggaaaagaatatcgtatgcttttt

SEQ ID NO: 29740 - DNA, 2707 bp, Glycine max
  Clone ID: uC-gmrominsoy308c01_FLI
aacgacgatcgagtccgaggcggaatgtgattgggaaacaaaaaaggcgatcgcagaagaataatcaatcaaacccttgaagacttgaagccatgagatgaatcacttatctcttgacactgaagattctcttgcaagcttgctgctggagcttgcagccaacaacgatgtttcgggtttcaaaagattaatcgagtgtgaaccttcctccatagacgaggttgggttgtggtatggccgccacaaagagtcaaagaagatggtcaacgagcaaagaactcctttgatggttgctgccacctacggtagcattgatgtcatgacgttgattctttctctatcagaagctgatgtgaaccgatcatctggccttgacaaaagcactgcacttcactgtgcagcttcaggtgggtctgaaaacgccgtcgatgctgtgaaactgcttctggaagcaggcgctgatcggaattctgttgatgccaatggtcgccgacccggggatgttattgtttctccaccgaagcttgattatgtgaagaagagtctggaagagcttcttggaagcgatgattggagtctccttagggtgatgaggagcacatgcaatgggtgttcagcggaagatttgaagatgaagacaaatgaagtgagtgagaagaaagagtaccctgttgatctgtcccttccggacataaagaacagcatatactcaagcgatgagtttcgaatgtactcgttcaaggttcgaccttgttcgagggcttattcacacgattggactgaatgcccctttgttcatccaggggaaaatgcccgaagaagggacccgagaaagttccattatagttgtgtaccttgtcctgaatttcgaaagggtgcttgcaggagaggggatatgtgtgagtatgctcatggggtttttgagtgctggctgcaccctgcacaatatagaacccggctttgcaaggatgggactaattgtgcaagaagagtttgcttctttgcccacaccaatgaagagcttagaccgctctatgtttcaaccggttctgctgttccttctccccgttccagtgcctcctctgctatggattttgttgcagccatctctccttcctctatgtcggtcatgtctccctcgccgttcactccgcccatgtcgccttccagtgcttcaattgcttggcctcagcctaacatcccagcattgcatcttccaggaagtaattttcattccagtagattgagatcttcactcaatgctagagatttttctgtggatgattttgatttgttattacctgattatgatcatcatcatcatcagcagcagcagcaacagttccttaatgagttatcatgcctatctccacatgctatgaattgtaataccatgaaccgctctggtcgaatgaaacccttgactccttcaaatcttgatgatctgttttcagctgagagttcttctcctagatatgctgatccagcattggcttcagctgtattttctccaactcacaaatcagctgtcttcaatcaatttcagcaccagcaaagcatgttggcacccctgaatactaattttgcctctaaaaattttgagcatcctttattgcaggcctcgttgggaatgtctccacgaaatgtggaacctatttctccaatgggttctaggatttctatgctagctcagcgcgagaagcaacaatttcgcagcttaagcttccgagaactcggctccaactctgctgctgcctctgccgattcttggtcaaaatggggatcacctaatgttaaattggattggccagttggtgctggtgaagttggtaagctaagaaggtcatcatcatttgagcttgggaacaatggtgaggagcctgatttatcttgggtgcagtcacttgttaaggaatcaccagctgaagttaaagataaattggcaaccactgtctcatatgttgcagcagcagctgctggatcctccagtgagggatcaaacattagcacgcaaatggagtctgttgttgatcatgctgtactgggagcatggcttgaacagatgcagcttgatcatcttgtggctcagcaaaactgaaatgagtttctgctgaccctgaggtagttaacaacagaaatgtttcagtaaataataataatatatattcgtttatgaattttgttgatggaagaaggttacagtaactaagaaaggaagcagtactaagaaaaagaaccacatcactgagcaaaattcattttgaggtttagtgttgcaaaagtaacttagaagggtcaggaaaccactgggtggcgttcacagaattaatgccagtgaagggttttttggctgcctatctcttcaaattttaggtccacattcctgtcaatttttccttccttgaggagcaaatgttgtatcacaatgaagtcctattcctaagtttgatctatcttttgattttgtttctttatattttggggtagaaaccaaagttacagaagggtcattggagtaattccttgtgtctctattttgttccaattttggggatgaaaacacaggttgctggatagtatatggtatttcttttgtaatctggaatcaataattgtcgatgccagggagtgggtaaattaggaatatttgaacattgatcctttgggcatgtaacattcaattgaagtttattgctatattgttttt

SEQ ID NO: 29741 - DNA, 1299 bp, Glycine max
  Clone ID: uC-gmrominsoy308h08_FLI
atttagacccggaagctgaagttgtcgccttgtctccaaagactctcttggcaactaataggttcatttgtgagatctgcaacaaaggatttcaaagagaccagaatctccaacttcacagaagaggacacaatttaccatggaagctgaagcagagatcaagcaaagacattataaggaagaaggtgtatgtgtgcccagaacctagttgcgtgcaccacgagccttcaagggccctgggggacctcactggcatcaagaagcacttctgcagaaaacacggcgagaagaagtggaaatgtgacaagtgctccaagaagtatgctgttcaatcagactggaaagctcactccaagacctgtggcactagagagtacagatgtgactgtggaaccctcttctcaaggagggacagtttcataacacacagagccttctgcgatgcattagcagaggagagtgcaagatcagtgacaggcatagtagccaactcaacaactcaaccaactgaagcagcaggagtagtgatctcttcatcctctcttcatcaagacatgatccatgctagtaataataatttcccattgaagaaagagcaacaaggttgcataccccattggcttgggcaaccatcaccctcttctgcttcatcatcattcttgttctctcatcaagatcatcatctccatgaaaaccctaaccctagaggtggtcccactcttcttcctcctccttaccaccaaacagctcctcacatgtcagccacagcattgctgcagaaagcagcccaaatgggtgcaacgatgagcaaaaccggctccatgattaggacccaccaacagcaggctcacgtgtctgccaatgctgctttgaatttgtcctcacgtgaccaccagatgaaccccactccccatgacttgctacctttcgggaataataaagctgttgataacggtgttggtgtttctccttcactccttcatcatgttatcaattctttctcttcttccccctttgaagggacttttgaggacacttttggtggtggcgatgccatgaccgccgatgaaggtggcggtggcggtgccggaggaaacaataacgaaggcttgacaagagatttcttgggtcttagacatctctctcacactgatatcctcaacattgctggcgtgggaaactgcatgaactcctcccaacacaaccaaacccgaaacccttggcaaggttaactccatatgtcttatacatatttggattctttttctttaatatattaatatacatttattttagctt

SEQ ID NO: 29742 - DNA, 1095 bp, Glycine max
  Clone ID: uC-gmrominsoy309h05_FLI
atgagggggaaataataatttggagtgggggaaatgttcatgccttttgattggggttacaagcggtttttcaagagaacagctctagagacatcagactaccttaaagatgattgtctgtctgtgaattgtagtgttggtgttgtgaggtcacgcacggaaggtccgaaaatctataccatagcaataccgccttctagcattggtcagaaatttggacatctgctggaaagtggtaaaggcagtgatgtaaattttgaagttaatgatgatatttttgctgcacataaattggtactagcagctcgttcacctgttttcagagcacagctttttggtcctatgaaagatcagaatacccagtgtattaaagttgaagacatggaagctccagttttcaaggcattgcttcattttatatactgggactcgctaccagacatgcaagagcttactgggttggactcaaaatgggcatcaaccttaatggctcagcatcttctagcagcagctgatcgtcatggcttagagaggcttaggctgatgtgtgaagcgagtctctgtgaagatgttgctattaatactgtggctacaactctagccttggcagagcagcaccattgtttccagcttaaagctgtctgtctcaagtttattgctacctctcaaaatcttagagctgtgatgcaaactgacggatttgagtacttgaaggaaagctgcccatctgttctgactgagctattggagtacgttgccagatttactgagcattcagacatcatgtgcaatcataggaatgatgccctacttgatggcagtgatataaatgggaggcgggtgaagcaaaggctctagtatgtgaagaacactgcacagcattctgtacaaccctcttctactctccgttttaaaagatagcgagagcttagttagagggagaatatatatataatcttttataggatcagaggcaattcttaattttcttggcttattcatgtgtaagagatgtaaatgtaatttgtgttgttgctgttactgttctgtttaacgtgtaggtttccgcaatatcttcagtattactttttactg

SEQ ID NO: 29743 - DNA, 1169 bp, Glycine max
  Clone ID: uC-gmrominsoy310d10_FLI
ctctctctctctcctccataaccaaaatatcaaacacccttcaaccccttctcttctctgttggatttcaatctctccctctcactctgatttttcctttttcaattttccatggagggtcatcatctccatcaccatcaccggcaacaacaacaacaacaacatcatcatcaacaacaacatcaacaacaacagcatcatcaccaccctcatcacaacatcacaactagtaacgtggatgccacggataggttcccccaatggagcatccaggagacaaaagagttcctcatgatccgtgccgagctggatcagactttcatggatacaaagaggaacaaacagctttgggaagtcatctccacccggatgaaggaaaagggtttccataaaagtgcagaacagtgcaagtgcaagtggaaaaacctcgttacccgctataagatttaaagggatgtgaaacgatggagccagaagcgacgaggcagcaattcccgttttacaacgagcttcaagcgattttcgcggcgagaatgcagagaatgttgtgggcggaagcagaaggagggtccaacaagaagaaggtgcacctttcctccgaggacgaggaagagggcaatgaagagacaagcgagggggatcacaagggtaacatcaccagcaagaaaaagaagaagggcaagatggtaattggtggaggagggagtggtaacaacaacttggagagtttgaaggagatcatggatgagttcatgaggcagcagatgcaaatggaggcacagtggatggaagcctttgaggcaagagagaatgagaggaggctgaaggagatggagtggaggcaaaccatggaggctttggagaatgagaggttaatgatggaccaaagatggagggagagggaagaacaaagaaggattagagaagaagttagggctgataagagagatgctctaatcactgctcttctaaacaagctcagaagagaagagatgtagttgctagtttgtttggctagatagattcatagctacctagctagcttgcttttatgtgtctttcttcttctcatgaagcaaagcttgatttaagaggtttgttctaacttcaaagaactcccccaatttatatatcttggtcaatattaatatatatatacatacatacat

SEQ ID NO: 29744 - DNA, 2164 bp, Glycine max
  Clone ID: uC-gmrominsoy313f09_FLI
ttaggcttgttcctttgaccagaaacgagggtgattttgaggatgatgctgttggaggcatcaatggatctgaaaataaagataaatccccttcttttgccaaaaccttgacacagtctgatgccaacaatggtgggggcttttctgttcccagatattgtgctgagacaatttttcctcggttggactattccgcggaccctcccgttcagaacatccttgccaaggatgttcatggtgagacatggaaatttaggcacatttataggggcacgccgcgccggcacttgttaactaccgggtggagtagctttgtgaatcacaagaagcttgtggcgggggattcaattgtgtttttgagggcagaaaaggatgatctgcgtgttggaattcggcgggctaagagggggattggaattggtggaggacctgaggctcctgcagggtggaattcaggtggggggattcgtcctatgccttatggagggttttcagcttttttgagagaggaagatagccagctcttgagaaatgggttgagtccaaatgcaaaggggaaagtgaggcctgaagcagttattgaggctgcaactcttgctgccaatatgcagccatttgaggttgtttactatccccgggcaagtgccccagagttttgtgtgaaggccaatttagttagagccgcattgcaggttaggtggtgtcctggaatgaggttcaagatgccctttgaaacagaggactcctcgcggataagctggtttatgggaaccatctcttctgttaactttgctgatccaagatggcccaactctccttggagacttctccaggttacatgggatgaaccagagttacttcaaaatgtaaaaagggtgagcccgtggctggttgaaattgtatcaaacatgcctaccattcatctttcccattactcaacacaacaaaagaagccaagattccctcaacacccggatttttcttttgatggtcagatttcattgccagcatttcccagcaactttctaggtccaagcaatccgtttggttgtctagctgaaagtactcctgctggcatacagggagccaggcatgctaattatggtatatccctatcaaatctccacttcaataaactgcagtcaggcctatttcaagctggtttccctccacttgatcacactgcttccccagtattgagagtctcctccaacaatgcagcaacaatgcaaaaggtcggcacgggtgacaacgtctcttgcttactgtccatgtcaactgctactcaaccttcaaagaaagtggatgatgtgaaggcaccccaattggtgctttttggccaaacaattctcaccgaacagcaaatttctttgaacacctctgctaagacagatcctactcgaaataattcatttgatggaaatgctgataaaatgtgcaagttttcagatggttttggttatgctcttcacccacaaggctcttctcttgagaggttacagtggtacaaggatcaacaaaaagaaaccatggctagtttggagacaggtcactgtaaagtttttatggaatctgaagacattggtcggactatggatctcacaatgcttggatcttatgatgaattgtatagaaagctggcagacatgtttggcatagaaaaatctgtggtgctaagtcacatgctttaccgtgatacaactggggcagtcaagcacattggagatgaagcattcagcgaatttaccaaaactgcaaggaggttgaccattctaatggattccaacagcgatggtagaggaatctagaggaagaaataaacaattatcatttcaattgtacagctggttgatcaatttctctggagagtctcatctaatttatggatattaatgtttttctcgaagggcctatttggatttgttttttttcttttagtgatgatagctcgtggttttccttctctttttggatcataacatggtttacttgaggcttttgtttaataattctgatgtgaaaaaaggtgggggagagaagagaaagggtagtgatcatatatccctatgaatacgattggttcataggagtttcctgtatacaatggtttttaagtgtaaaaaaagctacctaggcttaatggttattgagacagtagttacct

SEQ ID NO: 29745 - DNA, 1706 bp, Glycine max
  Clone ID: UC-GMROMINSOY314F04_FLI
caaagtaacactagaactcacaaaggacagaagaaacgcgaatgccaggagaactccaattaccacccgggttcagattccaccccactgacgatgagcttgtgaatcactacttgtgtagaaagtgtgctgcacaaaccattgctgttcccatcatcaaagaaatcgatttgtacaagtttgatccatggcagcttccaggtacctttttttcttttctcactctagtctctgtattcttttgccttttttaatttcattagggtcttaattctactacattttttttctctccaccttaaagtcctattatttatgtttttatgtacagagatggctctttacggtgagaaagagtggtactttttctctcctcgagaccgaaaatacccaaacggttcgagaccgaaccgggctgccggaagcgggtactggaaggctaccggagctgacaaaccgatcggaaaaccgaaagcccttggaatcaagaaggccctcgtgttctacgcgggcaaagccccaaagggagtgaagaccaattggatcatgcacgaatatcgcttagccaacgtcgacagatccgcctcaaaaaaaaaacaccaccaccaacaacttgagggtatgtcccgataacaatcttattaataataattataagattcttgctaatcaatatcgttaggtgttagttgaggaataaaaagaatatttaatgtgagatagcgttaaaaagtcattaatacataattttatgtattttaataaatacataaacaaaattctttttttaattttttaactaagattaagaacagggattaataatgtttcaaagtttggttaggtagaaataatatgtgatttggacaatttttttaactgttgtgcttattggaatggcagcttgatgattgggttttgtgccgaatttacaacaagaaagggaagattgagaagtacaatggtgttgcggtggtggatcagaaagtggccaagttatcagaagaggaggttcagttccagcacgagaccaagcctcagatcaagatgtacggccacgatgatttcaggaacgaccaattgtacatggacacgtcggattcggggcccaggttgcacacggactccagctgctccgagcacgtggtttcgcccgatggcacgtgcgagaaggaggtgcagagcgagcccaagtggaatgatcttgagttgggccccgacccagccttgggcttcgattttaatttcatggacctgacctcagatgacgcttttgcccctcaggttcaataccaaatcaaccatctctcaccgtggcaagaaatgttcacgtacctaccaaagacattttgatttttttagggtcaatgggaccccaagaaggaaatacgggtctcacatttatttttaaaattcgttaaaaaaaaaaacaacaaaaaaatcacattcaagcgtacctactatactactgtacctaactactactcatgccggctttggtctgcacgtgtggtgactattatctgttcttgggattgttgaatttgactgccattgatcactaggaaaaaatgagatcataggtacctaaaaataagaaaaatgatctcaactgggtgaagaatgaagatccattagctatgttaggaattgtgtcgacatgtaaggactaaggacccctagtagaaaattcttgtttcattgct

SEQ ID NO: 29746 - DNA, 2722 bp, Glycine max
  Clone ID: uC-gmrominsoy315f07_FLI
ccgtgcggtgtacagaattagaattagaaagagaaagagaaagagggggggtcgtgtcggcttgaaaccaaacacgaccttatcggcgatccaatttcgatctgtgcaaatcgtaaaccctacctacttgcttctgcaattctggtggactggatccattttcatctcaattctcagtaagttggggcacatcacacaataactttgacatggcttccgctgcgccaggtgcaaccaatgatgctttatacaaggaattgtggcatgcctgtgctggaccccttgtcactcttccgcgtgaaggggagagagtttattacttccctcaaggtcatatggaacaggtacaacttgcctgggcatgttctcttaatttctgactttaattgaacttgaggcatccatgaatcagggattggagcagcaaatgccttcctttaatctgccttctaaaattttatgtaaagtggtcaatgttcatcttcgagctgaacctgaaacagatgaagtatatgcacaaataactttgcttcctgaagcagatcaaagtgaggtgacaagccctgatgatcccctgcctgaatctccaaggtgtacagtccattcattttgcaagacactcactgcttctgacactagcactcatggaggtttctctgttcttcgaagacatgcagatgattgtttgccaccactggatatgactcagcagcccccatggcaagaattagttgcaactgatctgcatgggaatgaatggcattttagacatatttttcgagggcaacccaggcgccacttactgaccactgggtggagtgtctttgtcagttccaaaaaattagtggctggtgatgcatttatattcttaaggggtgaaaatggagagctgcgagttggagttaggaggctcatgagacagcaaagcaacatgccatcttctgttatatccagtcacagtatgcatctgggtgttctggctactgcatctcacgccattgccacaggaacattgttttctgtattttacaagcccagaactagccggtctgagtttattgtgagtgtcaacaaataccttgaagctcgaagtcataaactttctgttgggatgagattcaaaatgagatttgagggtgatgaagttcctgaaagaaggttcagtggaacgattgtgggtgttggagataacaaatcgtcagtctgggctgattctgagtggcgatcattaaaggttcaatgggatgaaccatcgtctattttgcgtcctgatagagtttctccatgggaattggagccacttgtgtctacccctcctacaaacccccagccatcccaaagaaacaagagatcgcggcctcccattctaccttcaacaatgcctgattcttctctgcaaggtgtatggaaatcaccagttgaatctgcaccattctcttattgtgaccatcaacatgggcgagatgtctatccatcaaccaatttcaattccactgcaactggttttcttggttttggtgggaactgctatgcttccaacaagtcaatatattggtccagtaggatggaaaactccacagaatctttttctcctgtagcacttaaagaatttggagagaagagacaagggactgcaaatggctgtagactctttaggattcagttacatgacaattctaattctaatgaagaaagtctaccaatggtcactttgtcaggaaggatgggtgatgatggcccccttccatctttggatgctgagtctgaccagcattctgaaccatcaaatgttaatcgatctgatatcccttcggtaagctgtgatgctgaaaaatcatgcctgcggtctccccaggagtcacagagcaggcaaataagaagttgcacaaaggtccacatgcaaggtatggctgttggaagggctgtggatttaacacggtttgatggatatgaggatctgctaaggaaattggaagagatgtttgacatcactggtgagctctgcggatcgacaaaaaaatggcaggttgtgtacactgataatgaagatgatatgatgatggttggggatgatccatggcttgaattttgtagcattgtgaggaaaattttcatctacactgcagaggaggtgaggaagctttcacccaaaataggacttccaatcagtgaagaagttaaacccagcaaaatggactctgaagcagtagccaatcctgaggatcagtcatctattgtggggcctggttgctaatgtcttaggtcttccaacatttcagttgttatatatatatacaatagatattggcatgaaaataggaagtagaacgtgagagaaacgagtatgtacctggcaagcccttcatcatggcctataaggagcatatggttagtgtattctgcatctatacaggagcagcataacagcaccaaagcagagggcttggggtattgtggcttttctctttctttcatagctctgtaatcaccgagtttcgatgccttgcttgttcagttttgtattggttgcgagcgtgcagaaatgtcttgtttttttttttttggttgcgagcagcataacagcaccgaagtatcttactatgtatgcatttggattttttttttggttcttttgtaattcacttgttatgatgcatcatctcatttatgtatatataactttctattatatacatactatttaatgtatgtatatcgagcc

SEQ ID NO: 29747 - DNA, 934 bp, Glycine max
  Clone ID: uC-gmrominsoy316d05_FLI
cctgtatatataaacactcttcctctcctccaaattaaaacacttatcatggatgttaagaaaggtgggtctgtagtacaagcacaagtgaagttgcagaagcataacgaaaaggagatgggcatgagaaaaggtccatgggcggttgaggaggacaccattctggtcaattacatcgccacacacggtgaaggccactggaattccgtggcacgatgtgcaggtctaaggaggagtgggaagagttgcagattaaggtggctaaactacttgcgcccagacgtgcggcgtggaaatatcacactccaagaacaaatattaattctcgaccttcactctcgctggggcaacaggtggtcaaagattgctcaacagctaccaggaagaacagacaacgaaataaagaactattggaggaccagagtgataaaacaagcgaagcagctaaagtgcgatgtgaatagcaaacagttcagagacacgttgcgttacgtttggatgccgcgcttgctggagcggcttcagcccacatcacaagcactggagccaaaccaaagtggacttgtgttacacgcttcatcatcactgcttccttcgaattccgaccatagtattgaaagggggtcggatctgtggccaggtttcaataaccaaatgttgttggaacaggggagtggcggtgacttgttggaaagtttgtgggatgacgacaatatgtgctttttgcaacagctttcttatgacctccaaatgaaataaaatacaattcccttccgtcacgcattctgcaatgcacagtgctgaaagttgagcatgcgttcaatgaatattgttttcctcactttcatgtacatattaaatcttagagactaaactagtcacgtgcctaaaagttgataccagttgaaataatatggtttattaatcttaattg

SEQ ID NO: 29748 - DNA, 2072 bp, Glycine max
  Clone ID: UC-GMRONOIR0001H10_FLI
agaacaagcaatggcctatgcccgtgctttagtagcaggatattacccagaatctgtggatgatcttatatgttttgctgatgcatttggagcttcacgtttgagggaagcatgcattaatttcttagagctgtgcaaacaaaagaatgaagacaagctatggatagatgagatagcagccatgcaggcggctgctcagcctgaactgccatacttgaggacatctggaatcatacttgctggagaagatgatacaagcagtaaattaaatggcatagttgatgcctcaatttctgagtcaacaccaagtcatgcaagtttggacataggccatgattatagcttgccaacatcgggtcaaacaccatcaacagatggaagagctcaaataccaatgtcctggccaaaccatcttccacagtacatgcacaactttcagggtcaccacccatttcaacaaatgtccccataccaagggtacctttatcctggtatgcaggttccttcttcatattatccggggaatatgcaatggccttcaaatatggaagaccctcatattgttcatgaccgagacaaggattatcataaatcatcgtataagaagaagaaaaagaaacattctcaaacactgcagcaatctgaagaagatagctctacagcatcctctgactctagttatgagagtgattcagataaccattcaaggaaaggtaaaaagcactcttcaacagaacatcaccacaaaaagaagcatggaaagaagtcctcaaggaaagtggttatacgcaatataaactacataacttctaacggagatggcgaaaagggtagtgtcactgagggaagtttgtccaatgaggaagaatttatcaatggagattccctgaaacagcaggtagaggaagttgtaggatcatttgaaagaagaaacaagtcaagctcccgtcaccgtaagaaacagcatattgcaaagcactctggcaagctaaatggttcaaatgatgctgattccaatggcatgaaaggcaataacaactgggatgctttccagaatcttcttttgagagatgatgattctactcctgatactgaagaacagcctatgaagttccaggaggaatatattggcagtcagaattttgagaatggaaggtcaaatgaatttaaccacgaaccagactttagtaaaactcgagcagtttcaaatgattcctttgttgtgactgagaggggattcgatggtgaggttcaaaaccgtgttgataactttaaggatggaaaggatgctccttcattaatgaagaaaaacattaacacagatgaggcgatgttgttttctcagagaaatgacaaatcaggtagctattctatgtcaaatctgtcgggcaatggcccagaatcttccctcactaaatgccagacagaagaggattggttcattatcaaccagtctggtaaaccaggaaatgtggatcaaaaccgagatttcagcatgtttgatggcatttccgtttcatcatcagctactgattcgtttcatgtagagaaaaacagaaaagacattgtgactgatgactctttcatgattcaagctcgatcatcagaagatcaattcaattctcagtcagcagctgatcttagtttggtttcagacattgttggggctactgaattcatgaatagcacacaagaaggttcacacaataagaatgaaaccttaaattcccatgagcctgatgatctcttcatggttcttgaccgtgattctactttagagcaaagtctggcaccctggagcatggaaatggattatgataataacatttcttcaaatgaagctaatagaaagctatctgaagttgaaacagataaaaatcattcatctaatcttgagggtaccgatacaaaaactcctggagtgaaaaatgggaaagtttccagtaaagaggcaaagcctaaggctctaaatgcatctcttgggaaaagcaaatctaatatcacgtcaagaagcaaagcatcccctggaagcaaaactagagttactaagagcaaatctgagaaggaagagg

SEQ ID NO: 29749 - DNA, 435 bp, Glycine max
  Clone ID: UC-GMRONOIR002H09_FLI
cagcgtttagcacgggccagaagtacatctatactggatcacacaacgcatgtgtttatatatatgatttggtaagtggagctcaagtcgcaacgctgaagcaccataaatcacctgtaagagattgtagctggcaccccttccacactacacttgttagctcttcttgggatggagatgttgtgaaatgggaatttgctgggagtggtgatacaccaggctcttcaactaagaagagggtatggacaagacatttttatgaacattacctatgatatgtcagtcaaaaaatcagttatgaaaatgatcttgggagatccataccctgttgttaatgaagttgtataggatgttttgacataataaggcatgacatgaactgccacaaaatcttggtacataaataaccatgtaaattgagattggaattgattc

SEQ ID NO: 29750 - DNA, 2353 bp, Glycine max
  Clone ID: UC-GMRONOIR006G05_FLI
cttaatgcaggaactgctggtatttggagaatagctgctatcaacgaagctggtgggtggaaagacagaacaacagtggaagatatggaccttgctgttcgtgctagtcttaggggatggaaatttttgtaccttggtgacctccaggttaatcaatgttccatctacttacctattagtacttccaaagttaacaattaacggagaatatgaatgacatatgattatgaattatcatttcaattttcttatactaagtaatggtgccttttttttaaatggtaactttatataggccaaaagtgagcttcccagtactttgagagccttcagattccagcagcacagatggtcatgtggtcctgctaatttgttccgcaaaatggtgatggagattgtgaggaacaaggtaagtactcattgcagttaagtaatatatatatatatataaagggacaatgttgtttaagtaattccatgtctgttctgatgttttcttttgtttacatttattttctgcagaaagttaggttttggaagaaagtgtatgttatatacagctttttctttgttcgcaaaatcatcgcccacatggtcaccttcttcttctactgtgttgtgattccccttacaatcttggtcccagaggttcatgttccaatctggggagctgtttatattccttctgtcatcaccattctcaattcagttggaacaccaaggtccattcaccttctgttctattggatcctctttgagaatgtgatgtctttgcaccgtaccaaggcaacatttataggtctcttagagtatgggagggctaatgaatgggttgtgactgaaaaacttggtgactctgtcaataataataagaataaatcaggagatgctgccaagaagaataatgccatcaaggccacccccaaaaagactcgatccaaatttgttgaaaggtcagttcttaatttatttattttatttttatttgtatttttcgaaagcaaataattgtgtttgcatttggcattaattatagtttcttctctacatctcgattgtgaatttgtgattgtcaatcatgcacaaactggtattatggagatgggttctagactgtgtggtcaataatttaatgattgcaacaaggaaataattttgataggttcctacttattagtgagtaatttttagttattcttcgttgtaaacagttaagattctctatgagtaggtgagcatttctttgatttttttttaattccatttccaaatcaacggcatgccaccctaatcaaaacgtttctgtcacatgcacatgaatatgacataagattttagaaaaccacatgcccatgtcaagatttcagaaaacccacatcaaaataattttagtatgaactcaaaacatgtaatcaaagaggagttatgtcccacttttctactccattattaactctcactttattaaacataggccacgttaaaagagaattcaaatgtacttactgtattagccaaatcacactttacattattgacaagtaccatatgcactttaagaggtcttaaattttctcatattaggcctctaattgcaacaaatattcatttttcatcatctttttttcttcttctgtctaattatgatttctttttcttgtttgaacatgataacagacttaatttactggagttgggatttgctgccttcctcttcgtatgtggatgctatgattatgttcatgggaaacacaactacttcatctacctcttccttcagaccttaacattctcaattgtaggatttggctacgttggcaccatcgtgtaaacctcgttgagccaaatttctcaagttacttaagtttcatcaatgttgtgtccatatttttctagtttctcctaaaaaaaaatacatcaaaagaggctgatttcttcaagcaacaaactctgtaccaaatcatctacagctagtttagctcaaataattttcaattcggaaagaaaaaaaaagtcctttccaaaatttcattgtcatccatcatcaagaagatacaaatcatcacaggcaaagtgctgttattactagaattgcattacacaggcttaagggcagctatgaagatgtaccaaaaacaaaaagtggttaaattagagccttagacatgaagtagagacagtgtgattttgtttgcatagattgttttgtgagattttatagttatatatttcgtgagtcctttatttgtttaggtttgcttagtctgagccaaaataatttggtggataaaaatgcgcttctaattcatgttatttgtcattttttcaccaaggaatgaattttatttaccat

SEQ ID NO: 29751 - DNA, 924 bp, Glycine max
  Clone ID: UC-GMRONOIR006H08_FLI
gcttccttaagctccgtagtgctgctccttgcagctctaattctatcccctcaagttcttgcaaactatgagaatcccccagtgtacaagcctcccactgagaaaccaccagtttataagcccccagttgagaagcctcctgtttacaaacctccagttgaaaaccccccaatttataagcctccagtagagaagccaccagtgtacaagcccccagttgagaaacccccagtgtacaagcccccagttgaaaaaccaccagtgtacaagcccccagttgagaaaccaccagtgtacaagcccccagttgaaaaacccccagtttacaagcccccagttgaaaaacccccagtgtacaagcccccagttgaaaaaccaccagtgtacaagcccccagttgagaagcccccagtttacaagcccccagttgagaagccaccagtttacaagcccccagttgagaagccaccagtatacaagccaccagttgagaagcctccagtgtacaagccaccagtagagaagcctccagtttacaagccaccagtagagaaacctccagtttacaagcccccagtggagaaacctcctatttacaagccacctgttgagaagcctccggtctacaagccaccatatggaaagccaccatacccaaagtaccctccaactgatgacacccatttctgaaggatgtcaagaggtgtattgagtatatgctaaataagaggtgctcaaaatgtagttatagattacaaattattgcaagggttgctcttagcttcttcatttcaagcttttgtttacactttgcagtgctatggcaaagataagagtatcatggatggaaaaagggggggaaaaaatgttgctttgtactccaaattatgaataatagaactttatattatttatcagattatt

SEQ ID NO: 29752 - DNA, 1668 bp, Glycine max
  Clone ID: UC-GMRONOIR007A04_FLI
agaggatgagagaaaaagctgctactctgcaccatgtacgaatggagcagggcactgtaacatctcttcttgaacaggataatggaactattataggggttcagtacaaaactaaagatggccaaaaacttaaagcatatgctcccttcacaattgtttgtgatggctgtttctcaaatctacgtcggtctctctgctaccccaaggttgaactgttctaaataagttgagttgcaaaaatatcatttttcttttttaatgatatcaattcaaagacagtttgccgaaactgcaaaatctatagaattttgtcagttgtgtaccagtttgcttgacttgcctgatatattattgaacacttgccaggtagaagtaccctcctgtttcgtgggtttagttctggagaattgtcaactcccacttgaaaattacgggcatgttattttggctgatccttcccctatcttattttatcgcatcagcagcactgaagttcggtgcttagttgatatacctggtcaaaaagtttctcctgttggtaaaggtggaatggccaactaccttagggctatggtggcttcccagattccacccgagcttcgtgatgctttcatatctgcaattgatcgaggaaatatcagaaccatgcctaacagtagcatggcagcagatccatatcctactcctggagctctgttaatgggtgatgttttcaacatgcgtcatcctttgactggtggaggaatgacagtggcactgtctgatattgttgtgctgcggaatcttctaaagccaatttgtgacctgaatgatgcaacctcattatgcagacatcttgaatccttttacatcttacgcaagcctatggcatccaccataaatactttggcaggtgccctatataaggtcttttcgacttcacccaatgaagctagaaaggaactgcgccaagcatgttttgactacttgagccttggacattttttttcaagtggacccatcgctctactctctggtctaaaccctagcccgctgaatttaattctccatttttttgctgttgcattatatggggttggccgtttgctcttaccatttccttcatttgaacgtacttggattggagctaaaatagttttgtgtgcatttggcataatatttcccatcatcaagggtgaaggagtaaggcaaatgtttttccccacatccataccggcattttatagagctcctcctgataggtggtgcattgaggagtaagggaaccattgttctgcctgcaatgcattttcaattaatttgtcttgaaattaaagcggatttcgatggacgcaaaggacatttgttatgccacttggaagggattattgatgaggggtttctataggttttaggaggtaattggtcaaccccttttactttcattgtaccaaaagaaaaaagtaaatagacattgtcaacctgaaaattgtgtgcttatatatgtagtatattcctgtcttgtttttatttcccttcagcacacatcattgtaccaaaagaggggggatactttggttcagaatggatgtacagaacagaaaattatatgttagcatcattgtatattattactcataagtactttatttttttctttaacaagtattttattactcgtccttgtat

SEQ ID NO: 29753 - DNA, 600 bp, Glycine max
  Clone ID: uC-gmronoir007f09_FLI
ccttgatcatcaatcatttctttctggaatagctgatgttcgtgatcggcacagggatatgcgacttgatgttgataacatgtcttatgaggagttgttggctctggaagagcgcattggaaatgtgagtactggattgagtgaggaaactgtattgaaacacttgaaacagagaaagcactcggctgaaaaagggcctcagattgatgcagaaccctgttgtgtttgtcaggaggattatggtgatgaggatgatattggaacgcttgattgtggccatgatttccatagcagctgtatcaaacagtggttaatgcataagaatctttgtcccatttgtaagacaacgggtttggcaacatgatgtatgtgacgaatctgtcctcaggcaaataccatgaccatgaaggaaaaaaaattggcgcaatttacccaggaaattctggtgtttgttgccttgttataccttgttttctatctgtagcctagtaaattgtcgtacctgactgacaaaggtttcccctacccttctctcccgaattattaactcaagtttacaaggtttggtttacgtttatgaaatttttttatattgctcgg

SEQ ID NO: 29754 - DNA, 1805 bp, Glycine max
  Clone ID: UC-GMRONOIR007G02_FLI
ctttttggtcaaccatccagatcactatctcactcagcaggttgtttacaatgcaaagaaactttctagtcttgtttcaaagaagaagaaaaggcagaattggcttgactactatgaacttaaatattctagaaatcaatccacaaggccatctaaaaagactggttttcttggcctttgtggtaatagagtcgatgcaattgatttttatactgatgaaatcaagagactatcagaagaaatagaattggagaaacataaggtgatgaagaattctaaatatacaatgccagctgcttttgtttccttccgaactcgttggggtgcagctgtttgtgcacagactcaacaatctagaaatccaaccgtatggttgactgaatgggctccagaacctcgtgatgtgtattgggataacatggcaataccatatgtttcactaacaataaggaagcttataattgctgtagctttcttctttttgacattctttttcatgattcccatagcattcgtacagtcactggctaacattgaaggcattgaaaaagcagcacctttcctaaaatcttttattgaaatgcaattcataaaatcctttatacaaggtttccttcctgggattgctttgaagatatttctcatatttctgccagcaatattgatgataatgtccaagttcgaagggtttataagcacgtctgctctagaaaggagagcagccacaagatattacatcttccagttcattaatgtatttcttgggagcataattactgggactgcattccaacagctagataaatttatccatcagtcagcaaatgaaattccaaaaacaattggtgtctcaattccaatgaaggcaactttcttcataacttacataatggtggatgggtgggctggatgtgctggtgagattttaaggttgaagccattgatattttatcacttgaaaaacttcttcttagtgaagactgaaaaggaccgtgaagaagcaatggatccagggacatttggtttcaatacaggcgaacctcaaatacaactgtatttcttacttggccttgtgtatgctgtagtcacaccatttctacttccatacatcatagtgttctttggcttggcatatgtcgtctaccgtcatcagattattaatgtctacaaccaagagtatgagagtgctgcagcattctggcctgatgtccatggacgtattatatttgcgttagtgatctcacagctgctgttaatggggttattgagtacaaaagaagctgctaactcaactccattgctcattactctcccaattctgacaatatcattccatctgtattgcaagggacgatatgaacctgctttcgttaagcatccattacaggaagcaatgatgaaggacacattggagcgcgcaagagagccaaacttcaatttgaaagagttccttcagaatgcatatatccatccggtgtttaagggtgatgatgacagtgacagtgatgtaatgagcgaaaactgggaggagcaagaacctgtacttgtacaaacaaagcgccagtcccggaaaaacacaccattgcctagcaaacatagcggttcattatcatcttgaatgccacttcttatgagcataaaactagagcaatagatagtttgaagttcactattggtggcactgctgcatgatatacccaaactctactctcttttttttctgtatataaatcagaatctagataatctttcaatgaagtatataacagaagtatgcaggtcaaattttgacagtctgatccgtg

SEQ ID NO: 29755 - DNA, 1202 bp, Glycine max
  Clone ID: uC-gmronoir008e01_FLI
ggcagaagcgagatctcctagaaagcgagtttctcttttctctctctctttcaattttcacatagtcagcgaaaacaaacaaactattggagatttggagcacgaaacacaacacaagcagcagccacctcgtttcattgttttgaattcaactgagaaaaacgacaacgaggatgtttcaggagagcagcgtgacgcggtggccgactcagtggactcgctaccacgacaagctattcgagcgggcccttctggtcgtgccggaggatctgccggaccggtgggagaagatcgccgaccaggttcccggcaagtcggcggtggaggtaagggaacactacgaggccctcgtccacgacgtcttcgagatcgactccggccgagtcgaggtcccgagttacgtcgatgactcggtggcgatgccgcccagtggcggtgctggaatttctacgtgggacaacgctaatcagatctcattcggttccaagcttaaacaacaaggcgagaacgaaaggaagaagggcacgccttggactgaagaggaacacaggctgtttctcattgggcttagtaagtttgggaagggagattggagaagcatttcaagaaatgttgttgtgacaagaacaccaactcaagtagctagccatgcccagaaatactttcttcgccagaattcggtgaagaaagagaggaagagatcaagcattcatgacataacgactgtggacagtaactcagcgcctatgcccattgatcagacttgggttcctcctccgggtggttcactgcagcagtcacagcaatacccatcaagcaacatgcatgatcaaatgggtacgtttgggtattcaaactatggctttgacatgtaaagaatgctagaagcagtgtgttctgtatatagtgctgtagctttgattcataaggttcccctctttgtaaagttttatggttttgctagctgacaagggtgattgggagtattgctagttattgaatttttatcagtgtaggtttcgtttgaatacctttgtgaatcctataaatgaaccatgaggatgaaagggtagtgaatactaatagtgaacctttaggaatgaattcaacaggaatggaaattctttgtatgtgtccaattcaattactgctttgcaattcggatttaagtattgaaatgaaaccataaataaaccttggcc

SEQ ID NO: 29756 - DNA, 2421 bp, Glycine max
  Clone ID: UC-GMRONOIR009A05_FLI
cttgttcaatgttttgattaggcagaataaggtagttgatgctgttgttttgtttagggagcttatcagattgcggtataagcccgtgacctacacagtcaatattttaatccgagggttgtgcagggtcggagaaattgacgaggcttttaagcttctcaaggatttaaggagttttggttgtttgccggatgtaattacatataatactctcattcatggtttgtgtctgattaatgaggtggatagagctagaagtttgctaagggaagtttgcttgaatggggagtttgcacctgatgttgttagttacaccatgattatttcgggctattgtaagttgagaaagatggaggaggggagtttactttttgatgaaatgattaattctggaactgcacctaatacgttcacgtttaatgctcttattgatggctttggtaagttgggtgacatggcttctgcactagccttgtactcgaaaatgcttgttcaaggttgtctgcctgatgttgctactttcacttctctaattaatgggcattttcgagttaggcaggtgcaccaagcaatggatatgtggcataaaatgaatgaaaaaaatattggcgctagtttatatacatactctgttcttgtcagtggtctttgcaataataacagactacataaagctcgtgacattttgagactgttgaatgagagcgacattgttccacaaccatttatctataatcctgtcattgatggatattgcaaatctggcaatgttgatgaggctaataaaattgtagcagaaatggaggtgaataggtgcaagcctgataagttgacatttaccattcttattattggacattgtatgaaagggagaatgcctgaagcaattggtttctttgataagatgttggctgttggttgtgcaccagatgaaatcactgtaaataatttaagatcctgtcttttgaaggctggaatgcctggtgaagctgcccgcgttaaggaagttcttgctcagaacctgacattgggtactacatcatcaaagaaatcttatcatgaaaccacatatgtaagtatacctgttgctgtttagtgaagtgctatggcaaagtgcaaaccagtggattgacacggcattccaccattatgcctcgagtacttggtgcaggtgtttccagcttgtggatcaatggcatgctatcatcggacagggtgtctcttgtttctggagattatcagtatttacatttgcattgccattccctccaagtttctgctgattatttttggacctgacattaggtatactctatttaattttgttgagttgatttttcacttttcatggtctcatggctggtctcaagtccaggtagaggaggagggttggatggttgtgacataaaacttgtcaaaatcccaaacatggatttttcatttttcctatagatttgaaaattagtttctaacatgaaataggttttatttagtctctttgtttgtaaaatgtagtgctagtaattgatattcttgttcatatgatagtgcatttgcttcagagtatactgaattctctttgtaagaaattgaataaaatgtgaaacatttgaaaaggggtcttaaggaaattcttttgttcttaggctcggtaacttacaagatagaaggtggttgtatcgtaaaattgttcaagattattgtcattcatgattgtgtagaaagatttaaagacttgggccaaaatgcaaagaaccctctataaccacagttcgattgcagaaaatctcctgtggttcaaaacacaacagcacaactccttgatcttaagtaaaccgtgtattgactccatacaggtggttttatgcacttgcagtggttaaattcactctactctgcaagacttggtaagccttacttgagttgctgagtttttttaaccatatgggagtttttggcaacatatagttggtacacttttacatttgacaaggtatttaatcatggggcttctcaacaagatgcttttattgagatatcacaactggtacaaagtgcgcttcatgggtacaaggatacccctcaaccgatgagaagttgtttactcacaaaattagacttcaatttgatgaactgagttatttgaagacaaactggctccatggcaattggaaccaaagtgtggccctctatcaaagcctagcaagcttaactgcggagctagcattggggtggtttctttgatgctctgcttttagtaggttaataatcctattggatcatggttcagagtaatttctagaagggtatcgttatttgcagtttgacgcccctttttctctatttgatgcactccttataagaataagatgtcctagatacactccttttataagttatttaacgaatatcttattcttc

SEQ ID NO: 29757 - DNA, 1455 bp, Glycine max
  Clone ID: UC-GMRONOIR009D06_FLI
tcagcgattggagtttcttggagatgctgtcttggattatttgattacttcatatgtattctcagcttatcccaaactaaagcctggtcaattgacagatttgagatcattgtctgttaacaacaaggcatttgcttgtctagcggtagatcgcagttttgataaatttcttttatgtgattcaagtggcctgtctgaggcaataaaaaagtatgttgactacattagaagacctgtatcagataacagcattaaagaagggccaaaatgtcccaaggcactgggtgacttagtggaatcttgtgttggtgccatccttcttgattcagggttcaatttgaacaaagtttggaagattatgacttcgttcttggactcaatcatgaaattctcatcaagcttgcagctcagtcctgttagggatttgcgagaactttgccaatctcataatatggagttggagtttctgccagtgccctcaaaattgactaaaaggttttcagttgaagctaaagtgagtgggaatggtgtatgtgaaacagcttcagcaactggtcaaaataaaaaagaggcttgcagaattgcttcactgctacttttttcaaagttcaaggctcaaggctggaaagcaaagtcaaaaactttggaagaagttctggaatcaacttctaaaatggaaccaaaacttattggctatgatgagactcccattgatgtaacagataccaataaacacatagtggttaatgcagacccatacaacaagtctaacccagaaattcgccctatgcaagagacagatgaaatatgctctccatgtgtgaaacctttcggccaacggcttcaatcttctgctaagggaaagcttagtcaaatatttgaaaatcgtgattgcagcagtgacttgtcagggacaggaacggcaagatcacgattgtatgaattatgtgcttcttattgttggaaacctccttcatttgaatgctgcaaggcagagggacctgaccacctgaaacaattcacttgcaaggtgaccttagagatagaagaggcccagaatttgattttagagtttgttggggaacctctttcaaagaagaaagatgcagcagagagtgcggcagagggtgcattttggtatctacaacatgaaggttacttgcctagtagtggtaattgacatattgtagaacaattatcatgccacataaatcccaaggcaatttggtgtaggcaatgtcttgattattgagggtgtcgaatgtgttgttataggtaatcatataatctagaaggcaataatagtacaggtttagtaactcagggccagggagggttccctaatggtaaatctattgtaaaggtattattcatgtatgtattattgtagtgtcaaagttacatctaacattgtatgtaaaccatccctcgattataacagtgaattttctattt

SEQ ID NO: 29758 - DNA, 917 bp, Glycine max
  Clone ID: UC-GMRONOIR009F06_FLI
ggcttccttaagctccttagtgctgctccttgcactctaattctatcccctcaagttcttgcaaactatgagaatcccccagtgtacaagcctcccacttgagaaaccaccagtttataagcccccagttgagaagcctcctgtttacaaacctccagttgaaaaccccccaatttataagcctccagtagagaagccaccagtgtacaagcccccagttgagaaacccccagtgtacaagcccccagttgaaaaaccaccagtgtacaagcccccagttgagaaaccaccagtgtacaagcccccagttgaaaaacccccagtttacaagcccccagttgaaaaacccccagtgtacaagcccccagttgaaaaaccaccagtgtacaagcccccagttgagaagcccccagtttacaagcccccagttgagaagccaccagtttacaagcccccagttgagaagccaccagtatacaagccaccagttgagaagcctccagtgtacaagccaccagtagagaagcctccagtttacaagccaccagtagagaaacctccagtttacaagcccccagtggagaaacctcctatttacaagccacctgttgagaagcctccggtctacaagccaccatatggaaagccaccatacccaaagtaccctccaactgatgacacccatttctgaaggatgtcaagaggtgtattgagtatatgctaaataagaggtgctcaaaatgtagttatagattacaaattattgcaagggttgctcttagcttcttcatttcaagcttttgtttacactttgcagtgctatggcaaagataagagtatcatggatggaaaaagggggggaaaaaatgttgctttgtactccaaattatgaataatagaactttatattatttatc

SEQ ID NO: 29759 - DNA, 1916 bp, Glycine max
  Clone ID: UC-GMRONOIR010A05_FLI
ggggtcaatgaaacaacaaagcaagaaagctcgtggcaaagaaaaagctagccccaaaaaaaagccttaaagaaagctgattacataaagcaataccttttctctctctctctttttctatctttctttctttctttcttccttcagttgtgccactatcattcctcctcatcatcatctttccatacgagtaaagctgaaaaacccgctattccaacctctcaccacttgtactagttttgagaatttgatcgtgtgctaacatatagtcctcaaattaaagcacaaatatttttccacccatgttagacaacaacaattgcagtgcttctaattctggtgcaccatcttcttctgatgccgcctttgcattatctgaaaatggggtggctaacaacaaaaggaaaagaagacccgcaggcacacccgatccagatgctgaggttgtgtctctctcaccaaccaccttgctggaatctgacagatacgtgtgtgagatctgcaaccaagggttccagagggaccagaatcttcaaatgcacaggaggaggcacaaggtgccatggaagctgctaaagagggaaacagcacaaggggggcatcagaagaagagggtgtttgtgtgccctgagccaacttgtttgcaccatgacccttgccatgcccttggggaccttgtgggaatcaagaagcacttcagaaggaagcacagcaatcacaagcagtgggtctgtgacaagtgttccaaagggtatgctgttcaatctgattacaaggctcacatcaaaacctgtggcaccaggggccattcctgtgactgtggccgtgtcttttccagggtggagagtttcatagaacaccaagatgcatgcactgtccggcagcaccggccagagttacaagcacttcaaccagcatgctcttcaagaacagcttcaagcgcaagtccctctagtgaggcaaattttagcatagccccaccattgcaaggacttccagtactgccaaaaccagctgaacaacaacaacaaccagcaacaacaacagtcttattaacttcagagatacacggtaacaagtccactacctcgcataacttagaacttcagctcttaccctcctcaacaaactctcaagcaaaacgaaatacaaaggaaaactatggcttgaaactttcaataggctcatgtagtaacgacaaagggaatagtagtgaaccaccagagagagcatgttcagaagcacataggagcccacctgaaaggaataataataataataataacaatgtgagtgactattccacgttggaagtggcaaggttgcaggagtttgcaggagaggaactcaagttggccattgcagaaaaggcttatgcagaagaggctagaagagaggccaaacgtcaaattgagatagctgaacttgagtttgagaatgccaaaaggataaggaaacaagcacaagctgaactttcaagggctgaagagctgagaaagcaagccatcaagaagataggttccactgttatggaaatagcatgtcatacttgcaagcaacagtttcagtcttcaactgttggggtgccatcatcagaagaaacctccattgtgatgagttacatgtcctcagccaccacagaaggagaagcagaatgaatgacatatactgtgatcagaacacaatattgtgctaggaaaagaaagaaaagacaagctttattctgcctaagggaaagatatgatatgatgtgatgatgatattgcaggagtttacatgaagttatattgttcttttttcttattcatttttttctttaatgttttcttctctcttagactaggtgaaatttgttttattttaaagaaagttcatattctttattataatatttttatcgagatgcagtgtttatg

SEQ ID NO: 29760 - DNA, 576 bp, Glycine max
  Clone ID: UC-GMRONOIR010B08_FLI
caatggcgcacaactgaaggctgtctgtgttgaggctggcatgttggctctacgccgtgatgcaactgaggtgaaccacgaggattttaatgaaggtattattcaagtccaagcaaagaagaaagcaagtctgaactattatgcataggctggattgtggaacaagctatttttcagtttacaaagatccattgagatatttcaagccaatggagaacctaagcggatgcttgacatttattatctttttcttattttttggcaatctttaatcgtgtgataaccttcagcttgccagagtcatgatatatttttttttatatataaaaaacacaatctgatcgtcaactttgtagtagcaatagaaatttgatcggcttgctatatttaaaatcttgttgatcaggctgcgaatctctatgataaacaaacaagacgtgttaaggctgtgatcagaattttattttaacctgtggactatttactttttatacatgtatcgattcaagttgttctcaagagcgcagctatgtagattgcgactatactatattataaatttatgacttaattatg

SEQ ID NO: 29761 - DNA, 1434 bp, Glycine max
  Clone ID: UC-GMRONOIR013C01_FLI
cgaccatgaaaaggtgttacaaacttctcagacacatctgaaagatattcaagcaaaatctcatagtggttctgctagaagttgcactaaagttcacaagaaggggattgcgctcggtaggtcagtggacctcacaaaattcagtgattatggggaattaattgctgaattagatcaactattcgaatttggaggtttattaacttctccacaaaaggattggcttattgtctacactgataatgagggagatatgatgcttgttggtgatgatccgtggcagtaaggatatctaacaatgacatatgtgattattctgtaatggtaaaaaaaaatcttgacaatgacaattcgtttgcataattctatttttaaatcagggaatttgttgcaatggttcgcaaaatttatatctaccccaaagaggagattcagaaaatgagcccgggtaccttgagttcaaagaatgaagagaatcaatctgctagtgaaggtgccacagacacacaagaaatcaagtgtcagctcaataattcagcttcagatacctgataatttgtagatttgatttccatagcttccagattccggactggagtggaaagtaggtgactgtcataaagccatccagttggagaatatgacctgatgaagaaaattctaattctgaatctgactgctttatcaagtgactgcttgtgtttggaatctgaatatggatggcatgaatgagtatccatccaattttggaccgtgtcgtggaattagtagtagtagtagtagtatatatatatgccttccctgttatacactcctaatatagtagtatgttattgtgccttgtgcaaggtgatagggggtgtatcggccttgcatttttcaacaatcctaccttgtacatagttttactcgcatccttagtacccaaactcgttaatgtaattaagtgtcatatacaagggcggtttatctgattttaaatatgattgtctcttattttagtggggtaatttgtgccagtatgcctaatcattgtggatattaaaatattagtatgcgtttgggtagtagatgtattattaaattttgcctccaagtcttggcatgtgccttgcagccttggtgtttgcgaatgagtccattaccgccatatcttgtcccagggttttcgaaccagcggcgtagttgaagtcatgtaacgagtgaagaaagtggacacttggggtctctggaaaaccgatggtttgaaaattccttggtgaaatgtatttgtggtttatcgttgcgatgacactgctagttgtggtgtagtcatctctctctgggatatgtgtagcgtggttacgtgatagaacttcattctttgaaagcaccatcgttgaatgtccaataatggtttttgaaaaataaataaattgattgtacttttctgct

SEQ ID NO: 29762 - DNA, 1460 bp, Glycine max
  Clone ID: UC-GMRONOIR014F05_FLI
tgaaaatggtgtccgaaggcattctcctgggcattggtaaccctctcctcgacatctccgccgtcgtcgaccaagacttctttaaaaagtaccatctgactcactcactctcttttccatgccgttttgctccactctcctcgtcgtttcgtttaaccttgcacaccgttccataggtttactggatggatcaacgacgtcgtaaatcgctttgttcgcttctgaatgatttttttacttgtttttgtgtttgatagatatgatatcacctcaaacaatgcgattcttgcggaggacaagcacacgcctatgtttgaagaattggttgagaaatataatgtggagtacattgctggaggtgccactcagaattcaatcaaggttgctcaatggatgctccaagttcctggtgcaacaagttacatgggtggcataggaaaggataagtttggggaagagatgaagaagaactcaaggcttgctggtgtaaatgttcactattatgaagatgaaactacacctactggaacttgtgctgtttgtatagttggtgatgataggtctcttgtggcgaacttagcagctgcaaattgctacaaatctgatcatttgaagagaccagaaaattgggcactagttgaaaaggccaagtatatttatattgctgggtttttcctcactgtatcaccagattccatccagctagttgctgagcatgctgctgcaaataacaagatcttctcaatgaacctttctgccccttttatctgcgagtttttcagggatgtacaggagaaagctctaccgtaaggattcatcttaaaacgaatgaaattttacatattggttcttaaggatgcacattatgtgatttaggtatacggactttgttttcggatatgagactgaagcaagaacattttctaaagttcatggctgggagaccgataatgttgaggagatagctctaaagatttcccagtggccaaaggcatcaggaacacacaaaaggataactgtcatcacacagggtgtggatcctgtttgtgttgctgaggatgggaaggtgaaaaagttccctgtgcaacttttgcctaaagagaaactagttgatgcaaatggaacaggagatgcatttgtcggaggatttctttctcaattggttcaggagaagcccattgaagagtgcgtgagagctggctgttatgcagcaaacgttatcatccaaaggtctggctgtacgtacccagagaagcctgattttcattgagtgtttctctcggttctgtttccattatgaagttttgattgttaggaaatcttttgttgtattttgatagttgcagtataacagctgcatttggatttttcaatcccgactggggaaaacgaggaaagagtttcagtgaaaggaaacaaatgattgatctgttatattctagtactattattagaggctt

SEQ ID NO: 29763 - DNA, 3251 bp, Glycine max
  Clone ID: uC-gmronoir015a12_FLI
gccgtccgttctccgcccgccactctctccggctctgacctccaccaccaatcccagcagaatgtgccctcctccgtcccctcctcgtcgtttgcttgtgcacagtgtgccaaacactttcccagccaatccgccctcttccaacaccaattgatcgctcacatcggcggcaccgatgcgccccagcagcagcaacagtcgaccgccagcaacgacactcagtcgactgttaacgcattggcaatgttagcagctgcgggaattaacgggggaagtgggacgacgcaacagcaacagcagcaattatttggacagttgctcggctccaaccctttctcacaaggcacaacgccttcgctgatgttcaacaattcgtccgcttttggcggaattaatccgacagagtttgacggtgccgcaatgttggcgaaactgagcgcagagttcgccgcggttgcccaggcacaacacggtcaaagcggcgctatttcagccacaacggtacaatcgacgggagggccgtcgacgcagcaaaacggagcaatgggcaggggacatacgccggcgccgtccaacaaaccgccgcctcagaaacgacaatattcctccaccagcaaaaacttttgcgacttgtgcaacaaagaggtgtgcaacaagtacttcctgaggacgcacatgctgaaaatgcacaacataatcatagacgagaacaaacagctgatagcgaacattgacacggtggacaaagaacggaagggcgaggtgaagttcaggtgtgacatttgccataccagcatgaacacgcgagaggagctgaagttgcacaagagggagtcgcatggaatgcacgcgggtggcggcgggtcgcagtcggccccactcggcggagcccgcggagtgccaaaagcgacgtcgtcgtccgcctcgcaaccgacggcagtgtccatggataccgcagagacaaaccagcaacaacagcagaaaagggtcgctctgccgtcgttcgcgccggcggcttcgaatttcaatgccattgaacaccaaacgcagcagcaacagcaacaatcgacgcagcggagaacgacgagcgaagggacggaggcaaatgatgagaataatcagcccctgggggtacactcgccgcagcagcagcagacgagggaagcggcgggggcccagcagccgtcgctggcgggggccaacccaatgaaacagctgctctctatcatcggaggggacgaggcgctgccgccgtcgctcgtcgggggcgcgcgtctgctcagaacgacgggggaaaggaacgacttcaaaaaggacactgaagaagaacatttgggccacagaatcgccgacgccaataataacgcgacaaactgtcgattttgcggtctttgtctggaggaagaaggccaactgcaactgcaccaactgatggaacaccccaacgagtacatggcggaactgcagccaacgatggacttaccgcactcggcgagtaccgaggacaaactgatcaatcaggtggccctgcaaatggcagaggctaacagtcacaaccaccaccatcatcatcatcaacacacatcagcaccaacggcaatttccgcaactacggaagacttcggtcgcgtcctccggcgcttcgtcctcttcggccgcctctttcggcgaagtcggcacggcccatccgcctcagcaacagaaaacgaagaaaggcactctgtcgcgaggcgaaaatgccgacggagacgacgaaaacggaggaggagggggaaggcaccaatgcccacagtgcaaaagaatttacaaaagtgcgcaaagattggaggggcaccagcgcatggtgcaccacaattttgtcgccaaaatgtcaccggcgaagcgatcgatcatttcgccgaaaaagattgccaaactgatgagttcgttttcatgtcacaaatgcaggcgacggttcgcaagtcgcggagaatgcgacgaacacgtcctttcgcacatccgctcggggagattgaagcaagaggaagcggaagacgaacaaccgcaggaagaggaggaggaaggaggggagagagcaccgcaagtgaagaggccgaagatggaggaggagggcgaagaggacgaagtggcggaacaacaccatcgggaagacggagtcagagaagtgggggaaaagacgaacatcgccggaggagtggaggaagaagtaagacagcagcgtgcacagagacgaacaaagggcggcacggggggaggcgaaaagcacagccatacgagcggttcgactagccccgtgtcggttcaggccggaagttctggcggtgtactgcccgagggctttgcccaccctttgttggaccacacgaagcctttcgtcctccaatccttcactctgcggcccgtttctcctcattcgaactgtcaacttcccgatgaactcgtcgcttatttgcctgtccgttccacgcttggccaacccatccgagtgaccttcgagctcaatccgactcctcacgtggaccagcaggtgcaacacctttgatgcagccgaggaaccgaccgccatttgcctctcaattcttcgtttccattggcatcgtcgggcagtgccataaaaatacggatgccgttgtgtttgatagtccttaaattggccgtctgttttatcagtctcctttcccccatttattatggtaattgttgttgttgttttgctctgttgggacttcgttccgttcatttttgccccttttattcatttgttcattcttttgactctcttctgatgagtttcattctctcgctttcttcgacagttctttcatgctctgatttgtttcaattccaccttttttatcctttggtttcctttgcctcttaaaattattttttattattatacataaatattattatatttttctccatatccttccatcgattcctccccctccccctaatattgcacattcgtcgcgcaatctcaaggtggtcaccgaccgtctttttgacggttctttgccgcccttcccctcggatttctttcattaaatttcgtcaatttgccatttccctcccccaattttctccatgcgtattatttccatttttttcgttgttcgttctcatttaatcaatttgtgaggccgatttacccgcacttttcattcacaatttaaagttgaaagaatatttttgttcattctctgttcaaaatttaattcaaatgttgcattaaggacaataaactg

SEQ ID NO: 29764 - DNA, 1619 bp, Glycine max
  Clone ID: UC-GMRONOIR016H01_FLI
cgttctctctctctctctctctctgttgcaaaatccgttcccctatctttctgcgtttcgagttgttgctaaagagtgatggactcaccgcccagtaatcaccacgccgtcgacggagacgccaacgacctcgttagacccttttcccaccgcgacgacgacggcaaaccccaacccctcaccggcgacggcgccagtcccgggtcggtaactaacttcgtataaaacattcaactttatcttcttttttttctttttcttaattgtattctcgaaatttcttagatttggttctgtctaattacacggacccgttgactgcagaaagatattcatagggggtttagcgagagaaacgacgattgcgcaattcatcaagcactttggtaaatacggtgagataacggattccgttatcatgaaggaccggaagaccgggcagcctcgcggtttcggcttcataacttacgccgatccctctgtggttgatacagtgattgaggacactcacattatcaatggcaagcaggtggagattaagcggacgataccaaggggggctgttggctcgaactcaaaggacttccgaacgaagaagatttttgtgggtggaattccttctactgtgaccgaagatgaatttagggacttctttacacgctatggagaagtcaaagatcaccaaataatgcgggaccactctactaatcgttcacgtggatttggctttatcacatatgactccgaagaagctgttgatgatctcttatctgtggggaacaaaattgagtttgctggagctcaggtggaaatcaagaaggcagaacccaagaagccaaatccaccagctccgtcatccaagcgctataatgactcccggtcttcatatggtggtggatatggagatgcttatgacggatttggtggtaattttggtatgggtggctataggtcaggtggtgcctatggtggtaggggaagtgcttatggtggctttggaagtgaatttggtggttatggaggatatgctggtgccatggggccatatagaggtgatccttcacttgggtatgctggtcgatatggtggaggctatggcagaggctatgatcttggtgggtatggtggacctagtgagggttatggggcatatggtggtggtgggggtggtggttcttctggtagcgcctacggaagcagcagctatgatgccagcttagggggcggatatggggccgctgctggaggctccttttatgggactagagggggatacggtggtgcaggaactggtcgatatcatccttatggaagatagaagtgcgtcatcgaagaccgtttgtagtttgttgtgtttggttattcagttcttcaggctacatatttcattttctaaaaaaaattgtcaatgatattgttaagtcccattagagttattagcagcaccctctcgccagctatagaagaccgaacaattttttagctcggcccactgttgaagtctgattatgggattgaagtatgagctgcaaattgtgcagatggttgtattcttagttttgttaatggctacatttgtcactactgctctttatgtttatttaattttgatacacttc

SEQ ID NO: 29765 - DNA, 1856 bp, Glycine max
  Clone ID: UC-GMRONOIR017C12_FLI
catgcatctagaggtatatgaataagtctcactgtctttcttggtctgctgtcggtgtttgtgacatcgaaatttcgttcaccagttttgggttgaattttgcatacccctcgagtatttttcagtttcccagaaaaattattggtgtggctagtcaaagttctagagacttggacaattttggttgctattgtgtgcatcttggtctttgttctgaaggagattgttatgggagggaagagctcaaaagggagtggtaggaggtatgattttggtgcttcttcatcttcacgggataataactatggtggataccatccacaatcaccatacccttcttatcaaacacctcagcacccgcgtgcatcagctccattttatgactatgcacagccaaaaaggaagttggataagaagtattccaggatagctgataattaccgttctttggatgaggttacagctgcacttgcaaatgctgggctggaatcttctaatctcattgttggcattgatttcaccaagagcaatgagtggacagggaagaggtcattcaatcgaaaaagtttacatgacattagaagtggtcaaaacccttatgaacaagcaatttctattatcgggaaaactttatctgctttcgatgaagataacttgattccttgttttggatttggagatgcatctacacacgatcaagatgtatttagtttctattcagaagagaggttctgcaatgggtttgaggaagttctgacacgatacagacaaattattccttccctaaaactcgcaggacccacttcgtttgcccctattattgaaatggctatgactattgttgagcaaagtggtggccaatatcatgtcttgctaataattgcagatggacaggtgactagaagcgttgatacacaaaatggcaacttaagtccgcaagagcagaacacaatagatgcaatagtaaaagccagtgagtatccactgtcaatagttttggtgggagttggagatggaccatgggaaatgatgagggaatttgatgataacatcccttctcgggcatttgacaattttcagtttgtgaattttactgaaataatgacaaggaatgtagattcaaccagaaaagagacagattttgccctttcagctttgatggagataccttctcaatacaaggcaaccctagagcttggcatattgggttcacggagggggcattcaccagatagggttgctctacccccacctctttatagtagaacctcttccagcatcagcacaaaatctacacggtctaacagttttcagcagaggacacctacacatactagctatgatagcagtgttcacacagagacatcatcaagttctttatatgataataaggtttgccccatttgtcttaccaatgcaaaggatatggcctttggttgtgggcatcagacttgttgcgagtgtggagaggacctccaattctgtcccatttgccggagcacaatccatactagaataaggctttactagttagctttgatgcagaagtcctgtcaatgaatttcgtcatttccagaataaggggctgcaaaaggatgtgcagagttggtctggctcttttcacagatggtttcttgtccataaaaactgcatttgcaatttccaggcgaaacttgtattcccagttacacttaggaagagctctttacagaaagaattggccttccccgttgtatatatgtagttcatgtgtctcggaaggcgtcatgtttttaaatgaactgcttgcattaaaattatttgtattgttctaaagagcatttatcattttgatcgaatctagattgtctttctac

SEQ ID NO: 29766 - DNA, 1622 bp, Glycine max
  Clone ID: UC-GMRONOIR018B10_FLI
cgcaaactttcttccaaacgaacgtgtcacaaaattctcgccttctccgaatatggcatcgcgcgtcagcattggcaaccttacctcctccgcgccgtatattaattcccctcactttcgctcaccacttaagatttccaacaacccctctctgcaaaacgcttcgcataaggtacttatgcgcgataagactgtactggtaaccggcggagccggttacatcggcagccacaccgttcttcagctcttgctcggaggtttcagagccgtcgtcctcgacaacctcgaaaattcctccgaggttgccatccacagagtcagggagctcgccggcgaatttgggaacaacctctcctttcacaaggtggacctacgggacagagctgctctagaccaaatattttcttccacacaattcgatgctgtcatacattttgctggactgaaagcagtaggagaaagtgtgcaaaaacctttactatactataacaacaacttgactgggacaatcactctattggaagtcatggctgcccatggatgcaagaagctcgtgttttcatcttcagcaactgtatatggttggccaaaggaggttccatgcacagaagagttccctctgtcagcaatgaacccatatggacgaactaagcttatcattgaagaaatttgccgtgatgtccactgtgcagagccagattgtaaaataattttgttaagatacttcaacccagttggtgcacaccccagtggttatattggggaggatcctcgtggaattccaaacaatctcatgccatttgttcagcaagtagcagttggccgacggcctgcactgacagtttttggaaatgattataatacaagtgatggcactggggttcgggattacattcatgttgttgatttagcagatgggcacattgctgcattgcttaaactagatgaacctaatataggttgtgaggtttataacctgggaacaggaaagggaacatcagttttggagatggttagagcttttgaaatggcatctggaaagaaaattccacttgtgatggctggccgtagacctggtgatgctgaaattgtttatgcatcaacaaagaaagcggaaagagagcttaaatggaaggcaaaatatggcattgatgagatgtgccgtgatcaatggaattgggctagcaaaaacccttatggctatggagatcagggctccaccgattaaccacttagttttctctttgggttcttttctgaactcacccacaccgtagtccgtaggtcttgtgaatttagttttcccaaaagcttttctttctttagtgatcttaaggtgacaaagtacttgtattattactattcatagttacatagtaaataagtagtggtttactatactgtaatttaaaggttctctaggttccttcttacaggttattgattattagattcggattctctcatgtggaggattctctcatgttccacatgagcagcatcctgttttgtaaatctaaatcacatgtttgtttaaagtgtgactaacaggtatccttacctcattattgagattaatttattttgaatgttacctttagtaataaatagcatttttcatg

SEQ ID NO: 29767 - DNA, 931 bp, Glycine max
  Clone ID: UC-GMRONOIR025A11_FLI
gggaaaattggcttttatggctggtagaatttccatttgagatacgagctttggaagttttatttgaggcaatttgtagtttccttgatgcacgaacgagagagctagagacttctgcttatccagctttggacgaactgacctctaagatcagtagtcgtaatttggatagagtgcggaaattgaaatgtgcaatgaccaggttgacaattcgagttcaaaagattagggatgaactagaaaacctacttgatgacgacgacgacatggctgatctttacttatcaagaaaattggctgcttcatcctctccaactagtagctctgatgctccatactggctttatgggtctccaaatacaggttcaaaacgacacaaatcaagcagagcaagtggaacaacagttcaaagggagaatgatgttgaggagctcgaaatgttacttgaggcctatttcatgcaaattgacggcacattaaataaattggccacattgcgagaatatatcgatgacacagaagattacatcaacatacagcttgacaatcaccgaaatcaactgattcagctagagctcttcattagtgccgggactgtctgtatgtccttatattcattggtggctgctatatttggtatgaacataccatatacatggaaagcaccaggccatgaacatgtgtttaaatgggtggtgatctttggcggaatggtttgtgcatccttgtttttatccatagtatcgtatgcccgacgcaaaggccttgttgggtcttgaaaaatgaaaagaataaagcatgcatgtcgggagacatcaggttaagtcaaaagtaggcaatttcgacacattgcctcaaaacaatactatagtaatttgcttttatcttttttctatatggagagtcaaatatagtaccagaactttataac

SEQ ID NO: 29768 - DNA, 1091 bp, Glycine max
  Clone ID: UC-GMRONOIR028A09_FLI
caaaaaacggagacaaaaaaccaacaacaaaaatgggcaacgatggccatggaggtggggggcgcaacacaaccacaagcagttcaacaatgtggcgatggtccgcctatggattatacgggcagactgtcaaatacacgtttctcatcacaaacgtgttgtccgtggttttctccctgatcacattttcctatggcgcttggctttatcacaaccggtcccaatactatgagctgttggcaccaagtttgtacgtggatgtttgcctgatcatgatggtgatctcatcattggtcgtggctaacagtgtgattgctgtatattctgtgctaaaagagctccgatgcctgatttattcgttttctaccgcatctgtgattctttgtttttcgttgctcattggtggaatcatgggacttgtttttcgccaaaaattagtccaaacacctctgcacttgaagatgaacacatcgttgaaggagttgtacggcttgtccgacatgaccgcaattacattggcctgggacagttgcagcgcgagttccgatgctgtggcgtcaacggcactgaagacttcaccatttggcgcacctccaaatggcacatgcaccaccgggagccaaagcccgcattcccccagtcatgttgtgtgccggaacggttggctgagtgtgtggagcgcagcattaccatggacaaggagatgagcaatggcattcggccatcaatggagcaattagcagccgaagcagcgccaacctcggcagaagcggaagcatctgttgttggcggtggtgaacatgttgcgcaaaatcaacaacaattaccagccgattcatcatcatcatcgtcaacaattttcatgacaaatttcaccggatcagaggcggcggctttctacacaaacacttgttacatgccgttcagaacagatttgctctcggtagttcatgttgcggcttggctgtcaatttcttgcagtttctatctgttggtgccagccttctttgcaactttctttgctaaactggtcaaaaaatgatccttgctttaccattccaattcttaaattgtgtataaattttatttgt

SEQ ID NO: 29769 - DNA, 1205 bp, Glycine max
  Clone ID: UC-GMRONOIR028D04_FLI
agagggcatggatttctttagccactcttaaagaaactgaacatactttgatgctcatgtgtgagcttgcaaaacattggaattcatggattaaggccataagaaatgtggatagaaagcttagagagaagtgtatccatcttttagccttcattagcaggggatctcaacgccttggtgaattgtcaagcagaaatgcccctcttttatgcccacctactgtgaaagaggattttgaaatttgcttaaaaccttcttatgtcaatagcagaaatgggtggtttgctctttcaccacttggatgtgtgccaaaaccaaagatctcttctttctcaactgcattatctacctatggtcaagcaactgagagtactgatcctgctccaaaaacaggcttctctgatactgttgccttgcaggtatatagaatagcatttctccttttaaagtttctctgtttacaaactgagtgtgctgctaaaagggctgaggaggttgggtttgttgatcttgcacattttcccgagcttccaatgccagaaatcttgcatggactacagggtcaagctattttcattactacagagctctgtgaagccaacaaactgaaggtctcccaagaaacacaggatgtttgcaacttattgttgcaaatttgtggcataagacctgtaagaggatttttcaaaggaagccaaatctttatttaatgcattggagggtcatgcttttctaaaagcatctcgcaactccctaaaacagatgatatcgtgtgtctatcctggattgctgcaaggagagaatttcttataagatttgatgtagacaaaagagcacattattaattgtacagaatttcacagtgccaatttgtcagtcttctttcactatgtagctaggagaaaaggttgtcgccactcatcaacttggggataatacataggtagtgtgttgcatgattgtcggtagttaatgaattctttttgtatggccatgcaccgtgccacggtgagtcggtgatggtgattgtgcccaatgctgtcttggttccgcttgatcaggacctattctaaaggtagacaagtttgacacaattgtgcaagggatgtcaaatacttgattttaaccatagttcgaaatttgtggcaaatggactatcatgtaagtgaaatcgtagtttacttatcatatttttattttgggtg

SEQ ID NO: 29770 - DNA, 1660 bp, Glycine max
  Clone ID: UC-GMRONOIR029E03_FLI
tttgagttgtatttagcattctttcctttttactttttgccaaaaaatggctgaaactgaaccaattgtaccgccatttgtagtcccaagacgtgacgatgacctgttgcagtgttcgaacacaatttactacgtcaaagagttgatccaggacgaggaggagatacgggaagcagtgaacgcgttcggtgacggcgtacgccaaggcgatttcgagcgcattgtcgagcattttgaccatttctttgcgcttgtgcgcagtccgagttcttcggcgcccaacgacgtcgccaccgctgccgccccattcgacgcgcaactccgtacagaactcgccgaactgctcatcgacagcctcgagaatttgcgcctcactctccaaatgcatatttgcgacataaatgccgtcgccacggccgccgctgcttcggctaacacaacggcgacgatggtgggccaggaggaggcagttaccgccgacactgacggacacccgcgacaaaatgcggacgaacggcgcaacggacggaccacggcgttgaacagccgatacagcaactgtttgctgatgcacgtgtacctgttatccagcctgaccaaccattttgaacagcacttgaacaaacgaactcgttcggctgtcgccaccgcaacgcccggtggaacgcgaggcaaacgcaaagttatgcgctttgacaattccgaggatgacccaatcgtgcagttttgggatgtgcaggacaggcggtataagctgatcaaggcactgtacaatttaatctcgatgagtgttaccgcggaggacaacgatgcggccgttggcgacgaaccccctcggactcagtcgtccgccctccggtacctttggacaaatcggcaaattgcattctctcaattgtgtgtaaatttctggaaaacccggaagtgtgtaaagctggcggtcgtaccaacatgttcaacgtgttcacgctgctccgtctcatttgcatctgttgggacatgaacaaagcggttgccattgcgctgattgacctggcgccccgtctcgactactttcagtccgcccagcaggcgaccaccttccccttcgtggaagcgatcaaaagtgtgcagaccgacaacgagatggagccgttgctgcgtgagatgatagcctacggctctaagctcgacaccgccgcagcggagagcagcagcagcaccagcggaggtgcggggactagtgttggtggtggtggtggtggtggcacgggcggtcgtgcggcaaccgaaacggcgacccgtgccttcgcgctgttcatcagtgcgacggtcgagttgaacccacggctgatgcaacggaatttggcatttattatgccattcttgaaaagcgatcccccaatgttgcgcaactccgtcttgtttgtgttcactgagattctcctccattgcttcgactgtcagcagttggaccaaacgatgagtgatcagcgggacatgctttttgcccttttgctggatcacatggtggacaagtcggcactggtgcgtgcccgtgtgttgcatttgtgggccaagttggcgtcgaagaagggcgccattccgcccgtccaattccgtctcggattgctctgggaggcacgcggacgcctcaatgacgactcggagagcgtccgca

SEQ ID NO: 29771 - DNA, 1200 bp, Glycine max
  Clone ID: UC-GMRONOIR030A04_FLI
gttcgcacagttggaaatattgtgacgggagatgatatgcagactcagactatcatcaatcatggtgcgctcccatgcctcttgagcctgttgacacacaatcataaaaaaagtatcaagaaagaagcatgctggaccatatcaaacattacggctggaaacagagatcagatacaggctgttattgaagctggtctgattgccccccttgtcaatcttcttcaaaatgctgaatttgacataaaaaaagaagctgcttgggcaatctcaaatgctacatctggcggtacccatgagcagatcaagtatttggtgagccagggttgcatcaagcctctctgtgatctgcttgtttgccccgacccaagaattgtcactgtctgtttagaaggtcttgagaatattctgaaggttggggaagctgagaagagcttgggtaatactggagatgtcaacttgtatgctcagatgatagacgaagcagagggattagagaaaattgaaaacctgcagagtcatgacaacaatgaaatatatgaaaaggctgttaaaattcttgagacatactggttggaagacgatgatgagacactacctgcaggcgatggtgctcaacccggttttaattttggaaacaatgatcttccggttccatctggtggattcaactttagttgaagactgttgtgtgggaacctggttggatggagcagggttgatgctagggtgactgtcagagtcgagtctgggtggggtggggtgggggagttgggggttgggtggggtgagtttggtccttgcacctcatggtgtctgtctggtttaagtctggtcttgtgtctggttaatggggtgcagggatgggtcagtttaactaccatgtccaaataagaagggtggtggtgggttcaacagcagcataacgaccttgttagaagtttatgttgtgttatatatatatatatatatatatatgctgggcataactatggggaggttctatattgcagtagcagggaccatattatgtggcagtggatgggatttcttgaatgcggcttttgagtcctattttttattgagtcatagttgtattggtaatttataccgagtcagtatttgatttgagttgaatacagtattcagaaaccaatttcatggtgtattcaaatgaaagaattagctattttttgtgcgtgc

SEQ ID NO: 29772 - DNA, 2805 bp, Glycine max
  Clone ID: UC-GMRONOIR030A10_FLI
cttcttttgggaaaagattaacaataaaagtgtggagtactgttgatagcaaagatgtttgggatcttcgacaaggggcaaaagataaaggggacagtggtgttgatgccaaagaatgtgttggacttcaacgccataacctccatcggtaaaggtggtgttattgacacagccaccggcatcttaggccaaggcgtcagcttagttggtggagtaattgatactgccacttccttcttaggccgtaatatctccatgcaattgatcagtgctactcagactgatggcagtggaaatgggaaagttggaaaagaagtctatttggaaaaacatcttccgaccttgccaacgttgggagcaaggcaggatgcgttcagtattttctttgaatgggatgctagttttggaattccaggagcattttacatcaaaaactttatgactgatgagtttttcctcgtcagtgttaaactcgaggacattccaaaccatggaaccattgaatttgtttgcaactcatgggtttacaacttcaggagttacaaaaagaatcgcattttctttgtcaatgatacatatcttccaagtgccacaccagctccactacttaagtacagaaaagaagaattggaggttttaagaggagatggaacagggaagagaaaggactttgacagaatctatgattatgatgtctataatgatttgggcaatccagatggtggtgatcctcgcccaatccttggtgggtctagcatctatccctaccctcgcagggttagaacaggaagagaaaggaccaggacagatcccaacagtgagaaaccgggcgaggtttatgttccaagagatgaaaattttggtcacttgaagtcatcggatttccttacatacggaatcaaatccttatctcacgatgtgatacctttgttcaaatctgcaatttttcaattaagggtcacatcgagtgagtttgaaagcttcgaagatgtgcgtagtctctatgagggtggaattaaattgccaacagatatactgagccaaattagccccttaccagccctcaaggaaatcttccgcactgatggtgaaaatgttcttcaatttccaccacctcatgtagccaaagttagtaagtctgggtggatgactgatgaggaatttgctagagaggtgattgccggtgtaaacccaaatgtgatccgtcgtcttcaagaattcccaccaaagagcacacttgatcccacactctatggtgatcaaaccagtaccataacaaaagaacaattggagattaacatgggaggggtcacagtagaagaggcacttagtactcagagattattcatattagattaccaagatgcattcatcccatatttgacgaggataaacagcctacctactgcaaaagcttatgccacaaggacaatcctgttcttgaaagatgatggtactttgaagccacttgctattgaattaagcaaaccacatccagatggagataatttgggtcctgagagtatagtggtgttgcctgcaactgaaggtgttgatagtacaatttggctattggccaaggctcatgttattgtgaatgactctggttatcatcagctcgtgagccattggttaaatactcatgcagtgatggaaccatttgccatagcaaccaataggcatctcagtgtgctccaccctatttataaacttctttatcctcactaccgcgacaccataaatatcaatggacttgctaggcagtccctgattaatgcagatggcattatagagaaatcatttttgcccggaaagtactccattgagatgtcttcatccgtctacaagaattgggttttcactgaccaagcattaccagctgatctcgtcaagagaggattggcaattgaagatccctctgcaccccatggccttcgccttgtgatagaggactacccttatgctgttgatggacttgaaatatgggatgctattaagacatgggttcatgaatatgtctccttgtattacccaacagatgcagcagttcaacaagatactgaactacaagcatggtggaaggaagctgtggagaagggtcatggtgacttaaaagaaaagccttggtggcctaaaatgcagacaactgaagatctcattcaatcatgctctattatcgtttggacagcttcggctctccatgctgctgttaattttggacaatatccttatgggggcttaatcctgaaccgtccaactctagccagaaggtttatcccagctgaaggaaccccagagtatgatgagatggtgaagaatcctcaaaaggcttatctgagaacaatcacacccaagtttgagacccttattgatctttcagtgatagagatattgtcaaggcatgcttctgatgagatataccttggagagagggagactccaaattggactactgataagaaggcattagaagctttcaaaaggtttggaagcaaactgactggaattgaaggaaaaatcaatgcaaggaacagtgatccaagtctgagaaaccggactgggccagttcagctgccatacactttgctccatcgttcaagtgaggaagggttgactttcaaaggaattcccaacagtatctctatctaattaaaaagagtttgtggtttccttatctatgttgtacttctgaataacatagactttatgcatgtctatgcgtaattattgcctgaacttctgcactattgtatttggatgctctcggttttcatataataaagtgtgttctcactttcactttgt

SEQ ID NO: 29773 - DNA, 3389 bp, Glycine max
  Clone ID: UC-GMRONOIR030E10_FLI
tccaaataagccctccctcgcaacaacctccacaatcgtcctccgcgacccatcaaggaggtcatcatcgccacacatcttcaggccatcaccgttcgtctggaatgactgcttcttcttcgcgtgctccgaataggacacgtaccggagatgacctgcacattggcaagtacaaactgctgaaaacaattggaaaaggcaacttcgcaaaggtcaaattggcaaagcacgtgccgaccggagtggaagtagcaatcaaaatcatcgacaaaacggcactgaatcagagcagcttgcagaagctttttcgtgaagtccggatcatgaaacaattggatcaccccaacattgtcaagctgtaccaagtaattgagagtgagacgactctgttcctggttatggaatatgcgagtggtggtgagttgtttgattatctggttgcccatggacggatgaaggaaaaggaggcccgggcaaagttccgtcaaattgtttctgccgtccaataccttcactcgaagaatgttattcatagagatttgaaggcagagaatttgttgctcgatgccgacatgaacatcaaaattgccgactttgggttcagcaacacattttcaccgggcaacaaactcgacacattctgtggcagtccgccctatgcagcgcccgaattatttcaaggcaaaaaatatgacggtcctgaagtggatgtttggagtcttggtgttatcctttacacgcttgtttccggcagtcttccgtttgatggccaaaaccttaaggaacttcgtgagcgggttctcagagggaagtacagagtccctttttacatgtcaacagactgcgagaatctcctgaagaagtttctcgttttaaacccgataaggagaggaactttggagatgataatgcgggataaatggatgaatatgggctatgaggaagacgaattaaagccttacaccgaaccgacaaaagacgttcgggatgaaaggcgcattttgaagttgcaagcatttggctacactctccagcaaatacacgagtcgttggaaagagaaaggttcgacgaaattttcggcacgtatttgctgatgaaagaggcaaaaaagcacgacgcgcaaggccaatcgttgggagggagtggaccaaatgcgacggccgaatcgccgtttaatcaatcgatgggtccgaccgtgccacaatcacatgggccaacggtgtcaaatgcgaagaacagcagacgctcttcttcaaatgccgaacaaatccaaccacaacaacatgccataacatctcacagcgtaataaaccaacagtcggctgctcccatccaacaaatttcggcaactccacaagcgattccttctcgtcaaagtcaaactgctccgggacaagtgacgttcagaacggcacaattcaccagtcgccaaccgactctcagcgttcaaccacaagcatatattcatccgatccaaagtgccaatgtgcgcaatatcaccgccacatcttcggcatcttcgggagggcgcaaaggttcggcgccagcaggacgggttcctctaccgaatctcggccttcggcatggaataaatcaaccgggagtcagttatcgttatgcaccgccagttcctggaagtggaagcagcgagaaacccaacgggggctcatcatcagcgagaggcgctcctccgccaacattttttaaccagcaacttcagacaccaatcgctccaaatccaatctctgcaaaattagtggctaaagccacacatcagatgaactccaatttgatatcaacaagttcagtgatgcaaaaaaagcatttctcacgccccacgagagccatcaataaaggaggagccgatgggcggtgacacggcaaaggatgacgacaacggcagcgacaaattctggtcgatggcaacgaagacgacgtcgcaacatggggaagcgccagcaattccaacgatgaccaaaaaaaagaacgtccattgaattgtgcgaagcaacacaaattggacacagggaagaacttggccaattggtttctccaaaaccagcgaccgatcgtacagcaccgaccgccgatttcatcagaatgggcctccatcaaagtccatcgatgccgccaatggtgatgaaggcactagcggcaaacgacaatgatttcacaatttcttcaactgcttctgatgaggcagcaacaacaacggaaggcaaactgacaaagtccgcaaccggtgcacacatttccgccgacccaacactctctcatatcgtcgacattggcgcacaaacgtcaacagccgtacaaaatgcaaattttcctcgaggatcacgaaatcgccaaacttttcacggaaagactgaacacacaaagagtgctacggacgacccagaatcggaccatgacgagggaataacgaatgcacagaacacaataccaccgaatgcccagcgcgggtctttcctttccaaactcacgaaactaacgaaaagaactggcatggacccggcgagtccggccgcacaatcactgagcggttccaacagtcagcagccccctctaaagacacacggagtaatgcgagcaggtaccatcggttcagctgcaggaacggcttttacacaaccgcagcaacaacaacaacagcatgttcaacaactttttcaacaacaacaaccaccaagcgctttctcagcgccgaacaccccaaaccaacaacagcagaacatttcccagcaacagctgacgccggcagctgcgcagttgggcacagcgaacagtccatgcccattgggcatcgaagaggtgaagccgcgttctctgcgctttacttggtcaatgaagacgacttcgtcacttgcaccggacgaaataatgaaagaaatacgaaaagtactcgacagcaatggatgcgaatatgagcaaagggagaggtatttgttactttgtgcacacggcgacccaagcaaagactcattgatacaatgggagatggaggtttgcaaattgccaagactttccctcaatggagtgaggtttaaacggatttctggctcttcgatcgggttcaagaacattgcttctaaaatcgctcaggagcttaacctctgacggttttgtgaaatcggatgctgcctccaaaccatttattgaactttgtcttcgatgttgtggattctgtttctcaaataactaattattgctaacattttcttctgcatgcttttgctctgttcgtgcttctctctctattcgtttgttttatcttttgccactatcgcttttttggtcggtcggtaaccaattttcttcagtttctcagcgacaatattcttattgttcgtgagtatttaaagataatttaactttcatttaaatg

SEQ ID NO: 29774 - DNA, 1146 bp, Glycine max
  Clone ID: UC-GMRONOIR031B08_FLI
caaaaaaaaggttccaataacgccgtggtcgcttatactctgcttctcaaagaacaccaagaaactcccaaattcgtagattgttcgatcgaaccttctcaaaaccctagttccactccgaaatcctctttcttccaaccagatctcaatctcatcatggccaataaagagttcaaggtcccgccggtggctttcccctccgccggcaaccccgccgcggcgggtccaaacctccagcagcggcgcatgcccacgccgccgttccagccgaactccggtatccccttcatgtccttcgacataggctccgccgcggcgtccacctcctcggggccgatctacaccggccccgccgtgggccccggcggctccgccaacttcgacgacgaggaacccctcctcgacgagctcgggatccaccccgaccaaatctggagcaaaatcagatccgttctgaaccctttccgcgtcaaccacactgtccacaaagattcggatctctcgggcccaattcttctctacatgtccttctgcctcttccaattactcgccgggaagatccaattcggcgtcatcttgggctggatcgtggtctcctccatcttcttatacgtcgtcttcaacatgctagccggtcgaaccggtaacctcgatctccacacctgcaccagcgtcgtcggttactgcctcttgccggtcgtcattttctctgccctctcgctcttcttaccggtcgatggggtcattcgcctctcggtcgcctcggttttcgtcttgtgggccaccagggcctccgccggactcgtcgtttcgctcgccgatggcggtgacgaacaccgtggactcattgcgtacgcatctttcttgatttacactctgttttcgttgcttgtcatattctagggtttgtcgttggttctgggatatttggattggatcgctgttcttatggttttacttcttttccttcattttgaaccttgttatttttttggtgcaattatggtatagaaaatggagttattagtttgattcaatgtttctgtctgaaaagttattccttggttacatttttgttctgatattgaaaggtttttgtaaatcttctagcaattaacgtgtttttatgtgactgtgtggtgctag

SEQ ID NO: 29775 - DNA, 2567 bp, Glycine max
  Clone ID: UC-GMRONOIR031D10_FLI
gctttgacttcttcagaacgtgatgttattgccatgtctggggtcgacactgccgtctactttgtctttctcaccactgtgttgagtatcctagttttatctggagttattctgctaccagttcttctgcctctttctgttactgaccatggtatgaagacacaaacaactagcaacggaactttcagtgaacttgacaaattatcaatggctaacatcacggcaaagagttcaaggttgtggggattttttattgcctgttattgggtttcaattgttacgtttgctctcctatggagggcttacaaacatgtgtcatggctgcgagctgaagctcttaagtctcctgatgtgaagcctgaacagtttgctatagttgtgagagacatacctcatgttcctcaaggtcagactaggaaggaacaggttgactcttactttagagacatctatcctgagacattttacagatctatgattgtaacagacaacaaagtggtgaacaagatttgggagtcattagaaaagtatacaaagaagcttgcccgtgctgaagcagtatatgcagggtcgaaaacaactgccaaaccagaaggaacaagacctacaaacaagactggcttccttggacttgttggtaaaaaggtggataccatagaatattgcaacgagaagattaatgaacttgaggccagattggaatctgagcaaaaggtcactctcagagagaagcagcaagatgctgctgtagtatttttctcaagtagggtggttgcagcatctgcatctcagagtttacatgctcaaatggttgacacttggtcagtctttgatgctccggaacccaatcaactaatatggcctaatttgaaaatcaagtattttcagagagagctgaggcaatacttggtgtatttcattgtggcactgactatattcttctacatgattccaattacatttatatctgcattaactactttggataatttggtgaaatatctcccattcataaagccaattgttaatataaaggcattgaaaacagtgttggaagcttacctccctcaactcgcactgattattttcttggctttgttgcccaagttgcttctgtttttgtctaaatttgaaggcattccaactgaaagtcatgcagttagggctgcatctggaaaatatttttattttaccgtgctgaatgttttcattggagttactattggtggaaccttgttcaaagcattcaagagaattagggagcacccgacgttggatgaaatttcatccttgctagctgaaagcctcccaggcaatgctacttttttcttgacctatgtggcccttaagtaagataacttcttaactttattctgtttagtttatttatctgtggtgatacttcatttttttcatttataagttaaggtgcataactactttatggtgatggtagaaggaaatgtagaggccatgcttcatctacaaatggtgtttcacattatatcttgttattatcttttcctagattcttttgaagcaggagttaccatgtattccaaaagcacatctgtaacaaatattttctcacatgatattgtgtgtaaactgtaaaatttataatttggactattcctaccagacatatagataggaaaagacttcaccttttctttatttttaattacttggcatgacacaaattaattgttttttctttgtcttagatttttcattggctatggccttgaactgtcccgaatagttccccttattatataccatttgaagagaaaatatctttgcaagactgaggctgagttgaaagaagcttggcgtcctggagatcttggttacggaactagagttcctggtgacatgctgattgtcacaattgtcttctgttactctgttattgctcctgtgataatcccatttggtgctctatattttggcctaggatggcttgttttgcgaaatcaggcactcaaagtctatgtaccaacatttgaaagttatggaagaatgtggccacacatacacaaccgtattctagcatctttgatattataccaaattacaatgtttgggtactttgggacgcagaaattctactatacaccacttgtgcttcctcttcccatattgtcattggtctttggttttgtctgtgcaaagaaattttaccccgcctttcaacatccagcacttgaggttgcagctaatacgcttaaggaagttcccaatatggaattgatttttggagcttacattccaccaagcttgaggtctgagaagatagatggtgaccgggttgaagatgcattgtctcaagcttcaagaacaacacctgtttgatgtaattatctgaatttcaactttttttttacgtgttagatgtagtcttgtagagatacttttagacattttattaattgttcataatacgtcttaggaactagaggtgttgagtgttgactgtcgtgaatgtgattgtgtaatgttgggtggtcttgtaatattttcatgtaatgtgatgtttgttcgacttgtgatagtcgcggatc

SEQ ID NO: 29776 - DNA, 2081 bp, Glycine max
  Clone ID: UC-GMRONOIR031D11_FLI
agttctcagatagggcacgtctctcgcggcctcttctctccctcgcgccgcccacactaaaaggttattgctctattattgtttgacgatggctgatgctcatgggactgataagaacattgaggtgtggaaaatcaagaaattgatcaaagctcttgaggctgccagaggaaatgggacaagtatgatttcccttatcatgcctccacgtgatcaaatatctcgtgtcaccaagatgcttggtgatgagtttggaactgcatcaaacatcaaaagcagggtgaatcgacagtcagttcttggtgcaatcacttctgctcagcagaggcttaagctctataacaaggttcctccaaatggtcttgttctgtatactggcacaatcgtgactgatgatgggaaggaaaagaaggtgactattgattttgagcctttcagacctattaatgcatccctttatctttgtgacaataagtttcatactgaagctttgaatgaactcctagagtctgatgacaagtttggatttattgtcatggatggcaatggtactttgtttgggaccttgagtggtaatacgagagaagtgcttcataaattcagtgtggatctcccaaagaaacatggaagaggagggcaatcagctctgcgttttgcccgtcttcggatggagaagcgtcataactatgtgaggaagacagcggagcatgctacccaattctatatcaatgctgccaccagccaacccaatgtttctggattaatattggctggttcagctgatttcaaaactgagcttagtcagtcagatatgtttgatcctcgtcttcaggcaaaaatactgaatgttgttgacgtctcctatggaggtgagaatgggtttaatcaggctattgaactatctgctgaaattctgtccaatgtgaagtttatccaggaaaagcgactgattggaaaatactttgaggaaatcagccaggatactggaaagtatgtttttggagttgatgatactctaaaagctttggagatgggagctgtcgagacacttattgtctgggaaaatctggatatgaataggtatgtcttaaaaaatagtgctactggtgaggttgtcattaagcacttcaacaaggaacaggatgccaaccaaagcaattttcgggatcctgagagcaatgctgattttgaggttcaggagaagttgtctctgctggagtggtttgcaaatgaatacaaacggtttggttgcactcttgagtttgttaccaataaatcacaagaaggttcacagttttgcagaggtttcggtgggataggtgggatcttgcgttaccagcttgatatgcgatcatttgatgatttttctgatgatggaggcgtgtatgatgattctgaatagcaatcactgaaaaacttcctaccactggtgcaggaaaggggagccaagatacctgcaccaatatgggaggtggaggtggttgcacctgctgcagctcctcctcctccatgtctgtctctggtgttgcagagagtgtttgattgtgaatcgagatgctctgcccccaaggtgctcctttctgatacgagttaccttgtccttctaacatgcacactctggcaccacaaattcctgcaaagcttctggcagcacctgctcccctgctctctactacttacacccagaaaagcaagaacaaaaacatgtttattagagaaacactatgcagaagcagtgatgtatttgttgaacctgtctgtgtatgtagctctccaaagtcttgatgaagatgctcacagtcaataggttattctgcttaaaggttaatccagatgatttgtcacatgcagtgttttctaggatgctccagcatatacctggacagcatatactggcacacgagtgctagagtctacgactaaatctttcatgtgttaaatctatctttcaaaactttggaaacttacccgtgatgaaataatgttcattttgttttcttgatatttcacacatgttgtgcttatatttgacaatatgacttctatttacattgcttaatggtatgtgatgtgttcttatg

SEQ ID NO: 29777 - DNA, 1153 bp, Glycine max
  Clone ID: UC-GMRONOIR036C09_FLI
atagatagttagaagaagggaaattaacactataattaattaaagattagaggatccatgaaagatggtggtagaaagcagggtgcaccctcaccctgtgctgcatgcaagctccttaggagaaggtgtgctcaggactgtgtttttgctccttattttcctgctgatgagcctcagaagtttgcaaatgtgcacaaagtctttggtgccagcaatgtcaacaagatgcttcagggtatgttcggtataaagaaaaaagaaagagagagagagatcaacattggagactagtgcgacgctttccttcaccataaagtgaatctttcacacattaaggacttagcagagcatcagcgaggagatgcagtgagcagcatggtgtatgaagcaaatgcaagagtgagggaccctgtgtatggctgcgtaggggccatctcatctcttcagcaacagattgatgtgttgcagacccaattggccgtggcacaggctgaagctgtgcacctcagggtgcgccaaactgcatcactctacagccccactagcccaaccaacagtggctctccatcacaagccaagcctatttttgacatggacatggtggtggaccagaacagctatggtgattcaatgtggtgatgctactagttaatttattagtaatataaaactatactagtatacctacctagatcatgaaaagatacaaaaactaaaaattaaggtggcattattttctcaagttgtgccttctatatacttttactttatagtagggtgagaaatgcacaatcaacccattctttaatacattctttttaatatattctttgttattcgttaaaatttattagaacttacaaagacttacaggattttggtaatttctaattaattttaaccaataatataaagggtgtttaaaagaatatgtttgaaagtgtgttggtggcatttctctttataggatagatgtagaactctagaaacagtggtggctacgggctgcggcggtgagactgaagagagctgtggcggaggccgttcgcccgcttaatcaatttggttttgagcattgatttctcattgacgacatgttgtgtatatattattatatatctatgtcacttgacattaagtgaagggtttggtt

SEQ ID NO: 29778 - DNA, 1428 bp, Glycine max
  Clone ID: uC-gmronoir037a08_FLI
cttttgttctagcacttcgctgtctgaggttcgttccaaagaaaaacatcgtcaatcctcacgacagctctgctctgctctgcttcttttgttttcttatttttcttctgaaaccctaaattttgtctgctctaaactttgggatctttcacacttgaaaaaaactgcttcttgtgcccgacccagcacaattctcatactatagatcttgaatcaaatataatttctgatcattttttttgtttctctttttcccccatttgatcccttctcaggttctggattctcagtgtttgcggagcgcagcgtcatcttttagggaagaatggatcatcaagggcatagccagaacccatctatgggggttgttggtagtggagctcaattagcatatggttctaacccatatcagccaggccaaataactgggccaccggggtctgttgtgacatcagttgggaccattcaatccaccggtcaacctgctggagctcagcttggacagcatcaacttgcttatcagcatattcatcagcaacaacagcaccagcttcagcaacagctccaacaattttggtcaagccagtaccaagaaattgagaaggttactgattttaagaaccacagtcttcccctggcaaggatcaagaagattatgaaggctgacgaggatgttaggatgatatcagctgaagcaccagtcatttttgcaagggcatgtgaaatgttcatattagagttaaccctgcgctcttggaatcacactgaagagaacaaaaggcgaacacttcagaaaaatgatattgctgctgctatcacaaggactgacatctttgatttcttggttgacattgtgcctcgtgaggacttgaaagatgaagtgcttgcatcaatcccaagaggaacaatgcctgttgcagggcctgctgatgcccttccatactgctacatgccgcctcagcatccgtcccaagttggagctgctggtgtcataatgggtaagcctgtgatggacccaaacatgtatgctcagcagtctcacccttacatggcaccacaaatgtggccacagccaccagaccaacgacagtcatctccagaacattagctgatgtgtcgtggaaattaagataaccaggcactggaatcagttgtgaatgtcaaactgaatggttgggaaggtcgatactacatagcgagcagaagctgtagctgatagtttacatgcaatgcagactataaacatatgtagataatgtgctagggaaaacttaaccttatctttgatttagctggaaaaaatggtatttttcattttaattcacaggtcatcagatgataatatttatttactggtgcatagcaggatttttacttgagtttaaacttgtcatgcgcccaaaatatatcccatctttttcattcatc

SEQ ID NO: 29779 - DNA, 1200 bp, Glycine max
  Clone ID: uC-gmronoir037e10_FLI
ggttctagaacttccatgagctcacctctgaatggatctgactcaacttgttcttgtgatgttccgttcctcttctttactttctccacaccccaatttctacacacacactccccccccttcctacttactccaaagccaacaatccttaataggctttgagcaaccaccgagttcccttctcgggctcaaccacctaagcccgtctcagatttctcagatccaggcccagatcgaggcccaacagagccaaaaccagaacccacactctctcaactttctcggcccgaagcccgtcccaatgaagcacgtgggcgggcctccgaagcccacgaagctgtaccggggcgtaaggcagaggcattgggggaagtgggtggcggagatcaggctcccgaagaaccgaaccaggctctggctcggaaccttcgacacggcggaggaagctgctttggcttacgacaaagccgcgtataggctccgaggcgacttcgcgaggctgaacttcccgagcctgaaaggctcgtgccccggggaggagtacaagcctgtgcattccgcggtggacgctaagctcgacgcgatttgcgccaacttggcggaaatgcagaagcaagggaagacggagaaaggtgccaggtcagcgaagaaatcgaagcaaggtccgaaccaggaggccaagcccgaacctcaagcttccgctgaaagtgagggttctgcggattcttctccgctgtctgatcttacctttgatgtaaccgagccgcaatgggaacattttaatttgcagaagtttccttcttatgagatcgattgggattctctctgaacttcgtctttgtttttatgtctagtcttgtggctaataataataataatttaggttagtcttgctaggtggctgctgcaattgagtttttgaagattgcagtgcttcttgtaggatttcgatttttttttttttagcatttggttattggctatttggtcaatatgatgtaaatctctctaccttggtcagctgggttttttttttttttattattattttcttgcttggcctgggagaatgacttctagccttctaggtgttgtctatgctttgatgttcatccaagtatgttattattattattgttgttgatgtaattcaattttatttgcatctcagaatttatgaatatatttgtatttcagctt

SEQ ID NO: 29780 - DNA, 720 bp, Glycine max
  Clone ID: UC-GMRONOIR037F11_FLI
catttccatttcttacaccgtcaacacatcgcaattctgaaagggaatggaaggagatattaagcttttggatggagatgacactcacaaaaagaaagaaagttctctggtgaagataaaagtattgtttttcgccagagcccgtgatctcactggcctgagtgagttgccactggaggtgtcatctggaagtactactcatgattgtttgaaaaagctttttgtcaagtttccaagtttggaagaaataagaggctgcatggttttggctctgaatgaggagtatacaactgagtcaaccattgttaaagacactgatgagttggccataattcctccaataagtggtggctgaatcacttaatatcactgcatggtacttctacttttgtaatctaatactgattgataagttaatatctcatgtagggtaaattttattggtggtgtgcagttctcactcaagaggttaacctttctcatcatacaattaggagatttctactaagtttttggataacggttcaatcatgaagttaattaaaaaataattttaacaaaaaggttcaaccttcgagaactcaaaactctgtaaaattaccctaccagtagattgattgtgatttgtgaacttcaataaatgattgtaatgctagatttattgtaaatgaaccccagaaattttcttgttctagggaaaatgaagaattttcatttgtc

SEQ ID NO: 29781 - DNA, 1351 bp, Glycine max
  Clone ID: UC-GMRONOIR040H10_FLI
gggcgctattgggacttaaatggcggattcagtgtcggtggacatggaagccatctctcctccacctgaggaacatataataagaactcgtcatggtcgtgtctccgttgctgtgtatggggaccaggacaagccagcgctaatcacgtatcctgatttggctttaaattatgtctcctgctttcaggggttattattttgtccagaagcctgttcactgctgctccacaatttctgtatatatcatattagtccacctgggcatgagttgggagctgctgccattgatccagatgatccaattctttctgctgatgacttggctgatcaaatagctgaagttcttaactattttggtcatagtacagtcatgtgtatgggagtaactgctggggcttacattcttaccttatttgctatgaagtatagacatcgtgttcttggtttggtactagtttctcctttatgtaaagcaccatcttggactgaatggttgtacaacaaggtcatgtcaaatttactctacttttatggcatgtgtggggtggtaaaagaaatattgctaaagcggtactttagcaaggaagttcgaggcagtgattatttgtcagagtcagatgtagttcaagcatgccaaaggtcattggatgagaggcagagtttgaatgtgtggcggttccttgaagcaattaatgggagatatgacataagtgaaggattgagaaaattacagtgtcgttcactaatttttgttggggatatgtctcctttccacgctgaggctcttcatatgacgtccaagttggatagacgactcagtgccctagtcgaggttcaagcgtgtggatcaatggtaacagaggagcaacctcatgccatgttaataccgatggagtattttctcatgggatatggcttgtacagaccatctaagctgagtgtcagcccaagaagtcccctgagtccctcttgcatttctcctgagctttactctccagagagtatgggtttgaaattgaaaccaataaagacacggatttccgtggagatatagtagtagtagtaggtgaataaagattgccgctctttttgttttgattgttgaacaagtttatatatagttctttgttttgtcaaaaatctgacgagggagggatgtcataaccttgtagatagagggagacttggaaagaaataaacagagggaaaaaaagggggaagagtttagttgaaagcagctgtagtcattctttgatttgtaatcatagactttcgtttggttggtaaagcttcgaaattgttgtttttggacaaataaaaataataaagttcttgttaccactgtaaagct

SEQ ID NO: 29782 - DNA, 1606 bp, Glycine max
  Clone ID: UC-GMRONOIR041G07_FLI
ggcagggaagttctaaactggacgaagctttagaaatcgcttctgactccccacgtgtaagcgcacttgtcgtttctgagtttataggttgctcaccatctcttagtggggcaataagggtaaacccatgggatattgatgcagtagctgaagcactaaatttggcaatcacaatgcctgatggagagaagcagcttcgacatgaaaagcactatcgatatgttagttctcatgatgtggcatactgggctcgaagcttcgagcaagatctagtgttctcgtgcaaggatcattataataaccgatgctggggctttggctttggcctgaacttcagaattttgtccctatctcctagtttcaggaggctatctatagaccacattgtccctgcatatgaaaggagcagttgcagggcaatctttttggattatgatggtacggttgtgcctcaggcttccattgttaaaccgcccagtcctgaagtcatatccgtgctaaataatatatgcagtgatgttagaaacactgtgtttattgttagtggcaggggaaaaacctcactgagtgaatggtttgatcagtgtgagaatcttggtatagcagctgagcatggttatttcataaggtggggtaaacatactagttggcaaatgagtcatgcagatacagattttgcatggaaaaagattgctgaacctgtgatgagatcttatatggaggctacagacggctcctctgtagagaccaaagagagtgccttggtatggcattaccgtgatgccgatcctgatttcggatcttggcaagccatggagctgctggatcaccttgaaaatgtacttgcaaatgagcctgtagttgtaaaaaagggacaacacattattgaagtcaagcctcagggcattactaaagggtcagttgcacaggaagttctttcttccctaaccaagaagggtaaatcgccagattttgtactgtgcattggtgatgatagatctgatgaggacatgtttgagagcatattagccaaaccttatagtactacctcatcctcagcaccacaaatctttgcatgcactgttggacaaaaaccgagcaaagctaggtactacctagatgacactgtcgatgtgatggcattacttgagggtcttggtgctacttcagggcctaaatcaagatattctacagaaaccccttttgagaaaagagaagtatgttttgagaatgatgtttaaaaagtacactttaggcaccaggataggataaaggcacaattttgatggttgtttttgaaaagatgtacaaaagcaggatttaaggaaaatagctttaaatctgacttttgattgtaaagaatgttggtagcagcagctttaggtctcagaaactgagcacaggggattagagtgattggtttttattggttggtgggggcaattggatgcatctgttggctttagctgtagcttttaaaggatactcaatatattaacagatacaaaatctaggcattcttcccgggtgagaatttattggttggttgtatatttgaactcgttgggtttatattatacatggatgtcattcagaatctcatatc

SEQ ID NO: 29783 - DNA, 2630 bp, Glycine max
  Clone ID: UC-GMRONOIR042H06_FLI
gaattctgcttgcagctgatggcgcaaattctgctccatgggactcttcatgccactatctatgaagtcgataagctcaaaattggtggaggcaactttttaaccaagatcgtacaaaacatcgaggagactgttggtattggaaaaggtgtcactaaactatatgcaaccattgatctagagaaggcacgagtggggaggaccagaattattgaaaaagagattaaaaatccaagatggtacgagtcctttcatatttattgtgcccatatggcatcaaacatcatatttacagtgaaagatgataatcctattggggcaaccttaattggaagagcatatgtgcctgttcaggagatcttgcatggtgaagaaatagatagatgggttgaaatattggatgagcataaaaatccaatacatggacattccaagatccatgtgaagttgcaatattttgatgtttcaaaagaccgcaactgggctctaggcattagaagtccaaaatttcctggagttccttatactttcttttcacaaagaagaggatgtaaggtttctctctaccaagatgctcatgtacctgacaattttgtccctaaaatacaacttagtgggggccagacttaccaagctcatagatgttgggaggatgtttttgatgcaatcactaaagcacaacacttaatatacattactggttggtctgtctatactgagattagtttggtaagggattctaggaggccaaagcctggaggagatgaaacacttggtgagcttctcaagaaaaaagcaagagaaggtgtaagggttttaatgcttgtttgggatgatagaacttcggttcctttgttaaaaaaagatgggttaatggccactcatgatcaagaaacagaggagtatttccggggcactgaagtgcattgtgttttatgccctcgcaatcctgatgatggtggaagctttgttcaggatttagaaatttccaccatgtttactcatcaccagaaaattgtagtcgtggatggtgaattgccgagtggagattctaataagagaagaattgtgagttttgtggggggtattgatctctgtgatggaagatatgacactcaattccattcacttttcagaaccctggacacagcacatcatgatgactttcatcagcctaactttggtggttcttcaataaaaaaaggtggtccaagggaaccttggcacgacatccattctcgacttgaaggccctattgcttgggatgttttgttcaactttgagcagagatggaggaagcagggaggaaaggacttacttgttccactgagagaccttgaagatgtcattattcccccatccccggtaacttacattgatgatcatgagacatggaatgttcaattatttagatccattgatggtggagctgcttttgggttcccagagactcctgaagatgctgccagagtggggcttgtcagtgggaaggataatataatagatcgtagtattcaagatgcttatgttaatgccattcgacgtgcgaaaaatttcatctatattgagaatcagtatttccttggaagcagttatgattggagtgctgatggcattaagcctgaagccatcgatgctttgcatattatcccgaaggagctttcacttaagattgttagtaagattgaagctggggaaaggttcagtgtgtatgttgtggttccaatgtggccagagggtgtcccagaaagtgcatcagttcaggcaatattggattggcagaggagaacaatggatatgatgtacaaggatgttgttcaggcgctccgggccaagggaatagtggaaaatcctcgtaactatttgacattcttctgccttggtaatagggaggtgaagaaacaaggagagtacgagcctccagaaagaccagatcctgatacagattatatcagagctcaggaggcccggcgcttcatgatttatgttcatgccaagatgatgatagttgatgatgaatacataatcgttggatctgccaacataaaccagagatcaatggatggtgccagagattctgagattgccatgggtgcttatcaaccatttcatttggctgccaggcagcctgccaggggacagatccatggtttccgcatgtcgttgtggtatgagcaccttggcttgcttcatgactctttcctccaccctgaaaatgaagaatgtattaagaaggtgaaccaaattgctgacaagtattgggatatctattcaagtgagtcacttgagcatgaccttcctggtcacctgctccgatatcctattggggtttccaacgaaggagttgtcactgagcttccaggatttgaattcttccctgacaccaaggctcgtgttcttggcgacaaagttgattaccttccaccgatccttactacttaagtttcattttataagcttgttaataaaatatagtacttatgttgttagagtgagcaacaattgtaatggttctgtagagatggtttcattctgaagattgccttccagattttaacaatctgatgatgagaaggcaatcagcttgtatgactctatctgcattatgatacatgtttatcgggtttctt

SEQ ID NO: 29784 - DNA, 1173 bp, Glycine max
  Clone ID: UC-GMRONOIR043H04_FLI
tacaaataggcaccttagtgtgcttcaccctattcataagctattgcatcctcactttcgtgacaccatgaatataaatgcactcggacgacagattctcattaatgcaggtggtgctctagagttaacagtttgtccatctaagtattctatggagttttcatctgtgctttacaaggactgggttttccctgagcaggcactgcctgaagaccttgtcaagagaggagtggctgttaaggactcaacttccccgtatggccttcgattattgattgaggattacccttttgcagttgatgggctagagatttggtttgctatcaagacatgggttaaggactactgctccttttactacaaggaggatgacactatcaagaaagatactgaacttcaatcttggtggaaggaaataagggaggtgggtcatggtgacaagaaagatgagccttggtggccaaagatgcagacatgtgaagagctgattcagacttgcactattatcatatggattgcctcagctctccatgctgcaatcaactttggacaatatccatatggaggcttcccaccgagtcgtccggctataagccggcgattcatgccagaaaaaggaactcctgaatacgatgaacttgtggcgaatcctgataaggcttatctgaaaacagttacttcacagtttctggctgttcttggcatttcacttgtagagatcttgtccaaacattctagtgatgaggtctaccttgggcagagagacactccagattggacatctgatgctgagccattgcaagcctttgagaagtttggcaaaaaacttgctgatattgaggaaaggatcttgagaatgaatagtgatgagaaattcagaaaccggtatggtccagttaagatgccatacaccttgctttatccttctagtaaaggtggactaactggcatgggggttcctaacagtatctcaatttaatttaaagggggctgtaaccagagtcttgtctttagttatcaaataataatggccttaaaggaccttggttattttgaattatgattttataatggccaacaaagacttctctttttcattttagtgtgcaaatctgttgtagattaattttccttttgctttgcctaaatgaactttttgagttattttggact

SEQ ID NO: 29785 - DNA, 1546 bp, Glycine max
  Clone ID: uC-gmronoir044b03_FLI
caacagatgttgtcacaagatgggtatgtgagttctaattctaaagttgcaagtgtttatcaacaaggacatttcctggtgaagaactccaagttcttggttcctgcacaggaccttctcaacgagttttgtagcctttgtgcaaagcaaagcgacttgggaaagccaacaaaatcgttgaagaagcagtgggaagatcaggaaaataacggtgtcggttcttcgaagaagcattctctgacctctctagagttcgtggagttgcagaagagaaagacaaagctgctttcgatgctggaagaggttgacagaaggtacaagcactaccggaatcagatgaagagtgtggtgtcatcgtttgaagcggtggcggggaatggtgctgcgacagtgtactcagctttggcgttgaaggccatgtcgagacatttcaggtgtttgaaagatgggattttgtcgcagattcaggcaacaagaaaagccatgggagagaaagacccagttgcaccaggcacaacaaggggcgaaacgccaagacttaaagtcattgaccaaacactgagacaacaaagggcgtttcagcaaatgagcatgatggaaacacatccttggagaccccaacgtggccttccagagcgtgccgtttcagttcttcgggcttggctctttgaacattttctccatccgtacccaagcgatgttgataagcatattttagcacgccaaaccggtctctcgagaggccaggtttcgaattggtttattaatgcaagggtgagactatggaagccaatggtagaagaaatgtacttggaggaagtgaaggatcctgagaacaacatagcttcctcagaaggggctactgatcaagacaatgatataaacccaaataatgttcaataccctccacctcctttatcatcaagatcagaggatcagaagccatcactggttcgaattgactccgagtgtgcgtcctccatcatcaacaaccacagtaccccagataacaaaaacgatccaaagggccaagaacagtgctttgggtcagtggagcttgatttttcatcatacacacaccactcctcgggcatggtttcttacggaagtagtgatcagaatgggaacaacaaccagagtggggtgtctttgacgctagggttacagcaacatggggtgagtctagcgttcccgccagcaacacagagttcactgtactatccaagggaccaaattgaagattgtcaaccagttcatcagtactctcttttggacggtgaaggacaaaacctgccttacaggaatttgatgggagcacagcttctgcatgacttggcaggatagattatatatattaattcttgatttgaggaattgagattaaaatggtgagtataatcaacaacaaattaagattagtctctttttttttcacttttagctagctacgtacaaaattattatatagtacacaattaatgcttaattccatacataaagctatatatacttggttaattagataaacgtacagtttaatttctac

SEQ ID NO: 29786 - DNA, 1859 bp, Glycine max
  Clone ID: UC-GMRONOIR044E11_FLI
ttaatgttttctcatataagtgaaaaatgaaacatgtttgctctatctaatcagtctcaaaatcaacaccatatatcgttgaaatgttcagaattaactacacctagcaagatacttattgttaaatcaaatcacatccctgttttcttctgttgtaatgatattagagtacagtaattgagagttagttttttacattattcttgcagagaatgggaagcatatttaagtgagaggtaaaaaagagtatgagagatgttaatcttaactatagaatcaaattaaatagtaagattaggtttaagtaaatcattgtgagggttgtatgctcaaaattgacttctcttatctctcattaaatatgttcccaaaattgataatatatatatatatatatgcaattgcgcataataataaaaaagacagttttgatgtcatgactgaatacttctttatttattatagatcttgcagcattgagagaagtaggaagctttaaagccgatgatgtttcaaatggactagttactgcatcaactggtgggttgcatagttctcatactttctcatctaggccatcttcatgcttgaaacggttgccacaaatagccgaaaatggaaatgaaagcctagaagaaaattgtgaccaaagtagaaacctagtaaatgacaatggtagctccaaatgttacatacctagcttcaccaatgaattatgggaaagttctgcattcaatgccccaaaaacagagaatgaagatgaaatcatgttttccacttcaaatattttggaatctcaggtacgtaacaaattttatattgaccattgaacttttagtttatgaatttactttcaaccaattgaaatttttcacggttgatcactgaaaattgttgttatcatcatcaggaagcagatttcagctttcaaaatctgggtttgactcaccatttgagtctacctagctcttctactaagatgtcatccatagaaaagtttcttcagattcaaggttctgttccttgtaaaattcgagccaaaagaggctttgccactcacccaagaagtattgcagagagggtaaaattctatcacatctagcaattttaaatctatagtcagttagtcaatttccatactaacaaggccatgaacttaacggttttatattttttatcctcaggtaagaagaacaagaattagtgaaagaatcaagaaactgcaagacctttttccaaaatcagaaaaggtaactttatttgaaattccatttgattgaaatttcactcactttgaaagttgatgataacttataattcttcccttggcagcaaacaagcacagcagatatgttagatttggcagttgagtatattaaggacctgcagcaaaaagttaaggtactagagaagtataaatctttccataaattctgaaaagaatatacacattaaactccaccaaagttatagtgtctaactaaatttatttctcctcatgcagatactctcagattgtaaggcaaagtgcaaatgtacaagtaatgagaagcattacactagaacttgtgcttgatttatttgcatgtagatagcaaaaggatggaagattttttagtgtgccaaagttagcaattgtaattagataaaataatgctgacatttgcctggagtgagtttaggaccaggtgaatttttttttttacttttttttttcattttttcccttaatttctttttcttcatagtttgatttaaggatcataaagacctagcatgtttagcatgagttttgtagctcttcattattacatataagaatttatgttgaaatttatatggagactgcttttgaaact

SEQ ID NO: 29787 - DNA, 813 bp, Glycine max
  Clone ID: UC-GMRONOIR044H04_FLI
ggtccatctccttttcatttggattatcgctaagtttccttcaaagcttgcaaactataaagcaatggttctgtaatctggtcaagacacttttgagacggtttcgctggggatttttattggttggtttcattacattggccatggcaggactaagctggacgctcgaaaccagtgcaaactactggttttggcatagcttttggcatgttacaatatatacatcttcattcttcttcctttgctcaaaagcaaacattgttgatgctgaagattcatcatcaccctcaagtggaaactatgcactgactcatcaggattcatttccaagaggtaattagaagaacatacatgggattggtgggtgcaaaaaggaaagagatggatcttttgtggatttaattttgcactaatgtgacacaattggtaggtaaaaagatatggctactgagtagaactagaaatcaacataagagtgaattgtgaggcctaagatgttaacagggatcaacaaagcagtctcttgtaaattcttttcctcacaaggtttgcttattttacattcattatagggtatatatattttccataaatatctttttttatgccgataggagaaagaaatcaaacaagggatacatttagtcgtaggataaagggttaaagggtctaaactttggttatgtaactataaattagaatattaatattgatatcctgggaattgtatatattatatggagaattctgtaatagatcaacatttgtggggagagagttaccccttaattgatacttacttttttaagaatt

SEQ ID NO: 29788 - DNA, 119 bp, Glycine max
  Clone ID: UC-GMRONOIR045E11_FLI
gctgtaagagtctcaaatatctggttgatgagtgtccttttgcatttgtgaactagtatgtaatattttattcacttaaataaagcgcattactatgtgcaatgagtgtgtttaaatat

SEQ ID NO: 29789 - DNA, 1479 bp, Glycine max
  Clone ID: UC-GMRONOIR046G03_FLI
gaggatttggacgtgtttatagtgggacattggaagatggggctgaaattgcagttaagatgctaacaagggataatcatcagaatggagaccgtgaatttattgcagaggttgaaatgctaagccgtctgcatcaccgtaacctagtgaaactgattggtatatgcattgaagggcgcaggcgttgcttggtgtatgagcttgttcgcaatggcagtgttgagtcccatctgcatggtgacgacaagataaagggaatgctagattgggaagcaaggatgaagattgccctaggagctgcaagaggactggcctatcttcacgaggattccaatccccgtgttattcaccgtgacttcaaagctagcaatgtgttactagaagatgactttactcccaaagtttctgattttggcttggcaagagaagcaactgaaggaagtaatcatatttcaacgcgggtgatgggaacttttgggtatgttgccccagaatatgcgatgacaggccatttactcgtcaaaagtgatgtttatagttatggtgttgtgctgcttgaacttctcacaggcagaaagccagtggatatgtctcaacctcagggacaggagaatcttgtaacttgggcgcggccaatgttgacgagtagagaaggtgtagaacagctggtggatccatctttggctggaagttacaactttgatgacatggcaaaggttgctgctatcgcttcaatgtgtgttcactcagaggttacacagagaccttttatgggtgaagttgtgcaggctctcaagttaatatacaacgatacagatgagacttgtggagattattgtagtcagaaggattcctctgctcaggaatctgattttagaggtgaccttgccccttctgatagcagttggtggaatgcgggagggctaacccctcgaataacttacgggcaagcttcttccttcatcactatggaatacagttccggtccacttgaagaaatggagaacagacccttttcaacttcaagcttgattggggatgaaatatctttaccgattaggcatgggaatagatcagggcccttaagaacagtccgaaacaagctgtccttatatagatttacaggaagtcggagtgagcatggaggaccttcttccaagcccaattggaacgatggttactgggtttaagaggtttgggccttttttttttagtgtttttgaaatgtacagtttctaaagggatcagaactaatgattgagtgactgatttagcttaggcatctcaaatttctgcagttttcatgttatggttggagagatacaggacgttgacaaattttgaaatattgattcattatacaaggaggaagtgtaacttaaacagtattgtaaatgccttgaattgtatctcgtggcgtcattcccatttccatttccatttctatcagcaaggactagccaaaatgaactttatgac

SEQ ID NO: 29790 - DNA, 995 bp, Glycine max
  Clone ID: UC-GMRONOIR048B12_FLI
cttggtcttgatccaactgttgcaaacatagtacatcaatttattgttgatgggattggttccatcttaccatctggtttgcagaaggtagctttggatggaatttttggtataggtcgtgcacaggtttcagaatttgtcctaaatgaaagtaaccctcttggatcctcaaggttggctaagctaagacatatatttgaagaaggaaaaagccttcaacttcagttccctgctgaagatcttggttttaggtacctacaaggagcacttatgccagagagtaaagatgttgaaagtcctccagaagtactaacagggcgtcggagggactacaccccttcagcacaaccaggatcaagactgcctcatatatttgtgagagtaaacccgttaagtgaggagactgtttctacacttgatcttgtgtcgggagataaagttgagttcattctcatcatagcacctgtggaggaatcttatcatctagctcgtgaagcattcaaggtggctgaggaacaagaaatttttctcaaagtttgtattttttggtctactgattctgttgaaggacttgagaaaggaagtaaagcagcattatcaccttggaagaattacctagatgttgttgaagtttggtcatcaacttcaaattggtgggatatgtgtaacatgacgaacagaggggctattttagttagacccgatgaacatattgcctggcgtacaagttcaggacttgctggggatcctagagtggaaatgcagagggttttttctgctatactgggagtacacggttcaaataaacaaatacacggatgattttgtattgattctttcaagaatatttcctggcgtgcaagtttaggacaatgatggggatcctagaggagaaatgcagagggtttttttctgctatactgggagtgcactgtcatacaaatacacagaatattttgcattgattctttcaagaatacttttccttttctttt

SEQ ID NO: 29791 - DNA, 1273 bp, Glycine max
  Clone ID: UC-GMRONOIR049A01_FLI
ttgcaatctcaccaaggcttgctggtgggtgtgattcagagggacacatccttgactctgctgagttatataattccgagactcaaacgtgggaaacactcccaagtatgaaaaaacccaggaagatgtcctctggggtatttatggatggaaagttttatgttataggggggattggggggagtgactctaagctcctcacatgtggagaggagtacaatttacagactaggacatggactgagattcctaacatgtcccccggacgtagtagtaggggtcctgagatgcctgcaacagctgaggcaccacctctggttgctgttgtaaatgatgaattgtatgctgctgattatgctgacatggaggttaagaagtatgacaaggagagaaatgtgtggtttaccattgggagactgccagaacgagcagtgtcaatgaatggctggggtcttgcattcagggcatgtggagataagcttattgtcattggtggacctaggactcatggtgagggttttattgaactcaattcatgggtgcctagtgaagggcctccacggtgggatctacttgctagaaaacgttctggcaactttgtctataattgtgctgtgatgggatgctgaagcattgaattgtcaaagttaacaacacattttgatacttcaagtccaaggagttgcacaacattgattcatccgttgacacaggattcttgctaattggtactttgcccccccttatttctttctataatatttttctttcaaaggttggggatgatggggacaagattcagatattactcaagattagctgagaaaagttttatgtggaggtgctcttcagtcctcccccccccccatgtttaaaatttcaaccagtattttgttacatttaaattggcatcttcccccatttacattgacctgagattttcaaactttggtatcatctagcaaaggaatagattaaataattgaagttccatataaacttaggttactggtgttgtttgtttaagtgcttctaagaacacacgactggatacttgattctcatgacataaatttcctagcttgaaggaaagaaataattttctgagtttatttttttcttttttccttttctcaattctgtatcgattcaattttccatttgaattcatggactttgtatcttgaactctctctggtctggaaactggtatatgacccttccatttatttcttaccgcagatataaaatgctatcataaatagaattgttt

SEQ ID NO: 29792 - DNA, 346 bp, Glycine max
  Clone ID: UC-GMRONOIR049D11_FLI
agatactgagattcactgagtttgttgaaggtttctttcgttttagtctcatctcagatacttggataatcatattgttgagatgtactgaggaaagaaaggatcaaaatatgtttcagcagaatatcctaaagctccaactccttgttgtacttctatccttctttttagattcaaggtccatagtttagtgcattgaactgttcttgccagtttttcctatcctttacatcaagaaaaattcacaagaaaacttttaatttgtggggacagacagtatctcatattcccattgtatgacatttaaattaaattaaatgtaatggtttgttagagtattccaaat

SEQ ID NO: 29793 - DNA, 2433 bp, Glycine max
  Clone ID: uC-gmronoir050e02_FLI
caacttggggtaactggaagtcatccacaacaaactccaccacctccaggaaagcaatttaatggcactatgcatttagcacctgattcatcaggtgaggctcagattcgcaatgggcggcctcgagcagattcccgaggaagaaaccagttattgccacggtactggccaaggtgtacagatctggagctacagcaaatttctatagattcaaattctgtaattactcccttgtttcagaaaactttgagtgctagtgatgctgggcgaattgggcgtttagtgctacccaagaagtgtgctgagacctacttcccaccaatttctcagcctgaaggattgcctcttaaaatccttgatgcaaaaggcaaggaatggatatttcaatttcgcttctggccaaacaataacagcagaatgtatgttttagagggtgtcactccatgcatacagtccatgcagttgcaggctggtgatactgtaacatttagccggttggagccagagggaaggttggttatgggatttagaaaggcttcaagtgtcatgccatctgatcaggacaatgagaccaagactggaaatggattttctgcacatggtgaagttgaattggcagatcctaattcatggtctaaagttgataagtcaggatacatagcaaaagaagcactggggagcaaatcattaatctctagaaaaagaaagagcaacatattgagctcaaagagtaaacgtctaagaattgaaaatgaggatttaatagagctgaagattacatggcaagaagctcaaggtctgctccgaccccctcctagccacattccaagtattgtggtgattgaaggttttgaatttgaggaatatgaggaagctccagtgcttgggaagccaacaatttttaccagtgatagtgtgggtgaaaagatccagtgggctcaatgtgaagattgtttcaagtggcgcaaattgccagcaagtgcgcttcttccatcaaaatggacgtgttctgataattcatgggatccagaaagattttcttgttcagctgcgcaagagctgacagcagagcaacttgagaatttgctacctccttgtaattcagctgttcccaagaaaatgaaggccaccaaacaggatcccgataatgctgaagctttggagggacttgacacccttgcaaatctagctatcctgggagagggtgaggcactcccagcatccgcccaggccacaactaagcatccacgccatagacctggctgctcttgcattgtttgcattcagcctcccagtggaaagggccccaagcataagcagacatgcacatgtaatgtatgcttaacagtgaagcgacgattccgtacccttatgttacggcgtgagaagaaacaatcagaaaaagaagcagagacaactcgtaaaaagcaacagcaacaacatcctctaccattaccttcatctgaaattttgcttgatgaagattccttgccctgtagtaacacaggtgatagtagcccaaaccagaacaaagagggtaatgatggttctgatgatgatcctagccgaataaaatcatctgcttcgccgttcaaaggcaaaattgacctcaatatccaaccagagcgagaagaagaattatcacctggttcggattctggcggcatgatgaagttgctccatgatgctactgagcgatatctcaaacagcagactgtgaactctggtactggagattcatcaggcagtcagtcacagctggtaggagatgcaatgagggaagataaacttagcaatggtgttgcccatggcagtagtagtcataatactgataaggaacatgcccaatctttgcctatgaatgtgtgaaaatcatattggcgctagccataattgatacgttcttgcaaagctatattgaagtggggaaagattttgctgtacattttatccacttcggcttcttgctttttcttgtttgtacataaagaggagtaggaaaaaatggtgagaaaccaatatattccggtaatataagtgggcatcatagtggtttgtgtaggaaaactatgaaatgcagctgaatgggtagtaggttgaagctgtttagtttctttgagagctcaccgtgccacctgatttcaacaacgttgaaaatgtaactatgcctaatttgttctcccaatttattcttagcctgtaagatgtttatactttctagtaactgctagttctgttcgctgtttctctttattggaaatttggaggcacactttcacccgttttcagcaagcaacctatgctgtatacaatcaatgatggcagagaaatattggctattttaaggggggaagtgcactcgtccattgttattgcactcggtacaaatctacccgtgtaattatttatagcctctgttaaaatcgtagttgc

SEQ ID NO: 29794 - DNA, 2268 bp, Glycine max
  Clone ID: uC-gmronoir052g03_FLI
aaaactctggaggttgaccggtggatattagagtagaagaagaagaagaagaatcccaaaaagagaaaccaactcaaacttgttttatccatgggttgatcatcccaaaaaagtttgctttgtttgggtaaatgacccttaaccctgtttgtgaataataatagagttaggaggttccgatgacggtcgatttggacaacgcttccaccgcttcaggtgaagcagccagtgtctcttcctccggcaatcagacaaaacccgccgctccaaagaaaaaacgaaacctcccgggcatgccagatccggaggcagaggtgatcgctctgtcgcccaagactctcttagcgacgaaccgtttcgtgtgcgagatatgcaacaaaggattccagagagaccagaatctgcagctccaccgccggggtcacaacctgccgtggaagctgcggcagaggtctagcaaggaggtcagaaagagagtgtacgtgtgccccgagcccacgtgcgtgcaccacgacccttccagagcgttgggggacttgacggggattaagaagcacttctgcagaaagcacggcgagaagaagtggaaatgcgataagtgctccaagaagtacgcggttcagtccgattggaaggcgcactctaaagtctgcggcacaagagagtataagtgcgactgcggaaccgttttctccaggagggatagcttcatcacgcatagggcgttttgcgatgctttggcggaggagaacgccagatctcacactgttgtaaaagatatttcggagaatgattccaaggttttaatcggtgattcgccacccccgcagcctgttgcagccacggtggctgctactactgctgctgctaccaccaccaccactactactattacttctactacgcaggcaaatagtgttatgtcctcttgtttgcagacgcataacctagatttgccagaaaacaatcccccacaagtcattgaggagccacaggctgctactgctactgctataagtgggagctgtggcagcagcagctcctgctcaactagcaatggtggtgctacttgtaatagtaacagtagtagtagtgtgtttgcgagtttgtttgcttcttcaacagcatctgtgaccctacaatctcaaacaccagcattcagtgacttgattagagccatggggcctccggaacaccctgcggatcaaatctcgggtccttcatccgaggcgatctctctttgcctctccaccactagtgcctcaccaatcttcgcaacaggtggccggcagtatgcgtcgtcttcaccgcacccggccatgtcagccactgcattgctgcagaaggcagcacaaatgggtgctgctgccacaaacgcctcccttcttcgcgggcttggcattgtgtcatcgtcacctttggattccacctcgtcgggacagcaaaatgtcctgcaatggggccaccaacagcagttggaacccgagagtggctcggtcgctgcagcagggctaggacttggtcttccatgtgaagatggtggttctggactaaaggaattgatgatgggaacttcctcaatgtttggtcctaaacacaccactcttgattttctaggattggggatggctgccggtggcactgctggtggaggcttatctgcacttatcacatctattgggggtggtttggatgtaactgcagcctttggcaatggagatttttctggcaaagatattggaagtagctcttgatatgatatcttttggtagtaagcaagaactgcacttatcagggcaaaagtatatgatgggggcctttctggattgtgttgccccctttaattgccagggaaagaaactgtgatttactgtgttagaaaacggaaggtggtacaagttacaatacgcttgctctggatgaagggtagttgttgaattaaggttgtttgcaacaaaagggtttgaactttggtatggttgtcgtaggttttggcgacagtgacacgtttgaagatagtatcatcttgtttcggctcctttggtctccacagttttgattaaatttaaattacggcattggatgctttggttcgtagttgttggcataattcaggaaactttgatgaggtagtagttttcttcaattgtcgatttattgtaacaaggtagttttccgcgtatgccccattgttttgtaccagtgaatggttgattgaattcttctagcaagtagtgtttttatgtaaatgtcataaagtattgtagt

SEQ ID NO: 29795 - DNA, 1532 bp, Glycine max
  Clone ID: UC-GMRONOIR053B12_FLI
ctttctctgcgtgcaagctaacctcattcatagaccatattgtacgacaaaaaccatcattatcctctccttctctctctccctccctagggattgttttgcttgctttatatatatatatatatatatatccaaacaagtcttgtggtttctattaccaacctcacttcgcaatttgcatgactcctccctccctaagatatctccattctcaaccttaatttgcactctcacgctttccctttcttctttttttcatgtcaagtactaccacttagacactcagatagatacacccacatataaaagcacgcctttgagattctaataaccttagtgtgttgtgcttagtccgattctgattgtatgaatgaatccttctagtggacaaccccagcaaatgtctagccagtcagtggagaagaagccaaagcctcatccagaacaagctctgaaatgcccaagatgtgactccaccaacacaaaattttgctactacaacaattatagtctttctcagccaagatatttctgcaagtcttgtaggagatattggacaaaaggaggaacactgaggaatgttccagtgggaggaggatgcaggaagaagagatcatcatcattaaagagggctcaagatcaaacattgacacccaatcttaatccactcactacactccctcatttgtcttatgactccaatgacttcactctagcagtagctaggtttcaaaaacaatcaagtggacaattgggttacaatgatcgtgatctttcaactttggggaaccccaccacaggctcattttgtgacattcttggcaattcaggcatgaatccctcctcagcaaacccttcatttttggatgcaattcgaactggtttccttgagacacaaaaccatcttcagaatttgtattgtatgtatggaaacggggacttgggggaggtggataatggcaattctggtgtggttggggttagtggagagatgatgctcccttacgatcaagtgataatgagcaatgcaacaactcaatcagtgagtgtaatgaagcaagaaatgtgtagtcgcagagaacaaagtgaaaggagggtgttgggggggttcccatggcagattaatgcagacactaacattggcgaacttgactcaggaagaacaattgcaagttggaacagtttcacaaattcttggcacgggtttctccaaagtcctctaatgtagaccccccgccacaagaaaaatcaaaaggcacttatttcctctaatttatgtttgactaatatgtcagtcttaattttaattaaagtactgtcaatcatcttgagtagttttgggttaatagggatttgattcacttgggtccactttctttacttgtattgttttccctccgtttttttaattagctcctcaaaaactgtcaaattttctgtactattaaattatcttcttaatgatgaatagactaatgaaatttcagatttgtagtttgccaaccaatgcagtgaaggtggagggaaatagt

SEQ ID NO: 29796 - DNA, 2877 bp, Glycine max
  Clone ID: UC-GMRONOIR053G02_FLI
aaaaaccaaaaaaagaaagaaaaaactccaccaggtcctcctctcccggtacctggtaacccgcaccatgagcgacagcgacacccgccaaaacgacatcacaaagccactcgatttggaaaacctgagagtcgtctcggccgtggggcgcggcgccaagggcgtcgtgttcctcgcgagaaccggtgaccggtcgtcggaagaatgcgtggcgctaaaggtgataccgaaggcgctgattcttcagaaggcgaaactaataaacgacgtggagtacaccagggtgtcgtttgaagagcaggtgctacgtcgtttcgatcatctgcttctgcctaggttaagaggggttttcgaaactgagaaagtcgttggtttcggtattgattactgccacggtggcacgctccattcgcttaggaagaaacagaccgagaaaatgttctccgatgacacgatcaggtattaaaatcaaggttaaattacttatttatttatagattcacggtttatattattttcttagtttttatgatttgaaagggaattaaaaaattatttttaaactataaagattaaaataaaattaaaatataaatataaagactaaaaaaattattttaaaattataaggattaaaaatataaaaatcaaacaattaaacctaaaattaatatttgctgttttaatttattatttaaatttaatttagtttttcatttttaaaattgatttaatttgatttttttaatttattttatgtttttaaatttttaaaattgatttttttaaaaaaaattatgtattttgtgatgatttaaaatcacttaatgataattaatgataattttaaattgtgtgatttcttatgatttaaaagaaaagatcaaattgaatcaatttaaaatactagatgatcaaattaaataaaaaaaattaaaatactaatttaacccctaaaatatatttttttcttttttctttttcacactgattggataccaagaaaggttgggaaagtgagaatttgagaattctgaattttatgtttgtttctgaatgggatgtgattttctctcattccttctccccattaggttagccaagaattaagcttaaatgtgtgtttagatgaaaattaatatagtggttgatttgattttatcgttttttgtttttattttttatattttttatttgaaaatagttttaatttataagttttcaagattttaaaaatatatttattttgatttataaaataaatatttatcatatatttactcctttttagttcttcagacaatgctgaaaatggtaaattattgttttcaatttttaacttgttttttaacattgaaattatttttagagaaatatttaaaaaaaattaaccaaacacatttttattcttatcttttgttttttttaaaataaaaacaaaaaaaatactctaaccaagcatgatctaagcttaagggaatgaaaattttggaagttttgtttgttttatcactttattacgtggagagtaaattaaaggacaatttctaattagaatgtgttttaggtgtataaaatgaagattattttttattgattatgtaatttaaagtatttttaattaattattagtgtaatttggggaaacagaaaagatcttccatttttttttcagtttatatgatgagtctatgttaatggttgaatttattttctcggcaaccaaacaagaccgattctgattacttgtcctattcgcactgtccaattaggctttttttgcttctctggttgttttcgaaaaaaaaataataccgaaattttgtgctttttatgttaagatctttacaatcgtcaattgacattactaaaaaaaaatgaaggaaaacaaaaatattaattttctttcatttacataacaaccaaacaaagcacaaaaacaagcgaagaatctgattcttttttgtcttgggattttttgtgtgaaggttttatgcagtggaattggttctcgcattggagtatttgcacaatttgggaatagtgtatagagatctgaagccagagaatgtgatgattcaagataacggtcacataatgttggttgattttgacctctccaaaaagctaaaccctaaatcccctcactcactgagtcaaaactcttccccgagtcccaactcgaagacaaaacaaactaggaagcaacgattaatgcgtttctacagtttctgcaactcgggaatcttgccctgcgactcggactcggagcccccactcagcagcgtcaactcagtgcgtcacaccgagtccgacttggttgaaaaatcaaactcgttcgtaggaacagaagagtatgtggcaccagaaatagtctccggaaaaggtcacggcttcagcgttgattggtggtcgtacggtgttgttttgtatgagatgttgtatggaacaacgccgtttaagggctcgaataggaaagagacattttaccgaatcttaatgaaggagccggagttaacgggggagaagacggcgttacgggatttgattgggaaattgttggagaaaaatcctgaccgtcggattcaggttaatgaaatcaagggccacaattttttcaagggggttaagtgggacacggtgttgcacattgcgaggccaccttatattcccgaaaatgaggttgagaacaaagtggggttcagcaaaagcgacgtggaagtgttcgtggacaacgtgttttttccaacgggtgatgatggaggagagaaaacaaaaacgctgttggataataataataataataataataataataataataataataataataataaagtgtggattgacgaattaagtcatgttcccattggg

SEQ ID NO: 29797 - DNA, 852 bp, Glycine max
  Clone ID: UC-GMRONOIR054H11_FLI
cttagtcatcttcttctttcatctttctccctaacggtaataacaacacaaatctcaatctttctttctttttctgttttctctgcttttattttagggttttgaaatttgtgatctcaccggtggatcgcttccggtctcgtttcaggtatcgagggaaaaatatggcggaagaacacagatgccaggcaccgcgcttctgcgccaacaattgcggtttctttggcagccctgccacgcagaatatgtgctccaagtgctaccgcgatttccagctcaaggagcagcaatcttccaacgccaagatggttctcaatcagtcgctggttccttcaccgccaccggcggtgatttctcagccgtcgtcttcttcttcggccgcggtagatccgtcatcggcggtggttgatgacgcgccacgcgaggcggaggaggttaaggcgccgcagcagaaccggtgtatgacgtgcaggcggcgcgtggggctcacagggttcaagtgtcggtgcgggatgatgctgtgcgggacccaccgttacccggagcagcacgcgtgcgagttcgacttcaaggggatggggagagagcagatcgcgaaggcgaatccggtggtgaagggcgagaagctcgacaagatctgaaacgaatgaacgaagggtgttatggtaatttcgtgtttatcaagttggtggtgatggataacggatgcgaaacgcgggtcggatcattgacccgtaaaaggcggtgggtgagtgggtgagtttggtgggtcattgttatgtggttgcgttgtcattgtaaattaaaaaatttgaaaaacatttcaattgtcattcaccttctttctgtttg

SEQ ID NO: 29798 - DNA, 809 bp, Glycine max
  Clone ID: UC-GMRONOIR055C01_FLI
cgcgaacaagcgcaggaattcacggacattaagttcagagaggcctatttggacacggtttgtctgaatatggtgcaggacccggggcactatgacgtgttggtgatgcccaacctttacggtgacattctgtccgatttgtgtgccggacttatcggtggacttggtgtcaccccgtccggaaatattggcgaaggggcggcagtgtttgaaagtgtgcacgggacggcgccggacattgcgggacaggacaaggccaaccctaccgcccttctgctgtccggcgtgatgatgctccgctacatgggcttggagtcgtacgccaacaaaatcgagaaggcttgtttcgacgcgatttcgcacggggaccacaaaacgcgcgacttgggcggcacgggcacatgttcatcattcacggcggacatttgcgcgagaataaagagcatgtgaacgggcgaagagggaaggaatcgctgatcgagactgatttgtcctgtcttatttgtttctcattctttgcccggtcgtaaacttaggcttttttgtttttttgcatctgtctctgttgctctctctctctctcttttctcatttgtctgttaagaaatcgtctgcgtaataatttgtcagtgcatacgaaacggccatttctcccatttttgaaccacaaaagacagtctctagtcgaagcaaatacaaaagcaattgtttaggcatttgaatgattgaccgagtaaaccatcgtttgttatttctttacaccattgacttttaaatgttcatctcataaacaataaattgttcaccat

SEQ ID NO: 29799 - DNA, 1657 bp, Glycine max
  Clone ID: UC-GMRONOIR056A09_FLI
cggaaattggactgatcctttctctctctctctctctctttctcctcaacgcctcttcctttcaatttaatccaacaataataattattcgcaaaaaaacgttgaacagataccatcatcatcacccacatcatcagaatttcaagctatacagagggaagcgcaattgattctttttgtgtgtttgactttgatcaatcagttggatatcgcatagaggattgtgttgccttgaggggaaactcagtttttgactcactaaaagtaagtagccaaacaatttctcggggtcctgttgaagttgattcctttgataagttagttaccaacttcactcaataaaaacccattaacaagccaaacagagcgacaaagattgcaattacaaaaggttcaattatcaaatctggtcagtggggatacggaacaccaggaagagtctgccatggctgacgccagtcctagaactgatatttctacagatgttgacactgatgataagaatccacggtttgatagaagtcagtcccttgttgctgtggtttctgactccagtgacagatcaaaggataaatcagatcagaagactctccgaaggcttgctcagaatcgtgaggcagcaagaaaaagtcggttgagaaagaaagcttatgttcaacagcttgaaagtagtcgcttaaagttaacccaactggagcaagagcttcagcgagctaggcagcagggaatcattatatcaaactcaggtgatcaagcacattcaatgagtggaaatggggctatggcatttgatgtagagtatgcaagatggctggaagagcagaatcgacaagttaatgagctaagagcagctgtaaattcccatgcaggtgatacagaacttcgcatgattatcgatggtataatggcacattatgatgagatatttaggctgaaggccgatgcagctaaggctgatgtcttccatttgttgtctggaatgtggaagacaccagcagagaggtgttttctatggcttggtggttttcggtcatctgaactcctcaagctcctggtaaatcagttggaacctctgacagagcaacagttagtgggtattaccaacttgcagcaatcttcccaacaggccgaagatgcattgtctcagggcatggaagcattgcaacagtccctttctgagacattatccactggatcacttggctcctctggttcatcaggcaatgtggcaaattacatgggtcaaatggctatggccatgggtaaactagggacacttgaggggttcattaagcaggctgacaatttgcgccagcagactttgcaacaaattcaccgcatattgacaactcggcaatcggctcgtgcactacttgcaatacatgactacttttctaggttgcgtgcccttagctctctttggcttgcccgcccaagagactgatgggtggtaaatagtgtcattaattttcatggatctggcaccagaatcatttgtcgtaggtttttcactcttgcaattttactgtgttgtagttttcatattactgatattagtgtttcagtaagttataattcagaaactgaattggtgacatgacaagggtatgtattttgtttattactactaatgtgataatattgtccattgtaacac

SEQ ID NO: 29800 - DNA, 236 bp, Glycine max
  Clone ID: uC-gmronoir056c06_FLI
ttcagaacaggatgtgtggtctgcggtgcaggaacgagcactagttcaagctttaaaagcctttccaaaggaaacaagccagagatgggagcgtgttgcaacagctgtacctgggaagactgtgaatcagtgtaagaaaaaatttgcattgatgaaggagagtttcaggaacaagaaaactgcagtctaatgttctgttgtgatattttagattatattaaatttttctcatgagt

SEQ ID NO: 29801 - DNA, 1138 bp, Glycine max
  Clone ID: UC-GMRONOIR060E06_FLI
ctgggagctctcaagtcaattgtcaatgttatcggtatgacaaagatgactccacctattaaggatttacttcccaggttgactccgattttgaagaataggcacgagaaagttcaggagaattgtattgaccttgttggtaggattgctgaccgtggagctgagtttgtaccagcaagagagtggatgaggatttgttttgagttgcttgagatgctcaaagcacacaagaagggaatccgtagagctacagttaacacttttggatatattgcaaaagccattggaccacaagatgtcttggcaaccctattgaataatctcaaggtgcaggagaggcagaaccgtgtttgcacaactgtggccattgcaattgttgcagaaacatgttcacccttcacagttttaccagcattgatgaacgagtatcgtgtgccggaacttaatgtgcaaaatggtgtgctcaagtccctctctttcctatttgagtacattggtgaaatgggaaaggattacatctatgctgtgactcctttgcttgaggatgcgcttatggacagggatttggttcacaggcagacagctgcttctgctgtgaagcacatggctctgggagtggctggtttgggttgtgaggatgcactggtacatttgttgaattatgtctggccaaacatttttgaaacttctcctcatgtgattaatgcagtgatggaagcaattgaagggatgagggtagcgttgggagccgctgttgttcttaattattgtctacaaggactgttccaccctgcacgaaaagttagggaggtatattggaagatctacaactctctctatattggagcccaggatgctcttgtagcagcataccctgccttggaggatgagcatagcaatgtttacagtaggccagagttaatgatgttcatctagtgtggattttgattacttagtttatttctatctccagtgtatttggcagtattctgtacttcctcgcatcaatgtaaagctcagttgttggaacattatttcgtgtcttgttacatagatagcaggttcctctcttgatgacatttgtttgatttgtatctcaccagatgatatgcttatagtagctaaccgttgaaggttg

SEQ ID NO: 29802 - DNA, 2485 bp, Glycine max
  Clone ID: UC-GMRONOIR063F07_FLI
ggggactttgtttcttcatacacagagagaaagtctggttttatgaaatggtttggtaagattttcaacattggatccagtagaggaaggggtggtggtcgtcatctgcagcagcctgttgaggaaaacatggtttggcctgctcctgctagatccttggatgaccgtgctagatctcggaaggaggaagaggatctagatcacgcaattgcactttctttaggcgaaaattttaagagaccaactggatatagatggcgaacaggaactgatgaagattatgcaaaggctcttcaggatcgcaggttctcatctgcacatcctccatatgcccctgtacctttttatccccggggatatggtgtgccattgcataacagaacatgtggagggtgcaaccaagagatactctatggcaattgtttaggagttggccatagttattttcatccagactgctttcggtgtcactcttgtcgttaccccattactgagcgtgagttttctttgtcagggaagcatccatatcacaagtcctgttttaaggaattgacacaccctaaatgtgaagtttgccatcaatatataccaataaatgctgctggtttgattgaatatagatgccacccctattggaaccaaaagtattgcccatctcatgaatatgataatacagctcggtgctgtagttgtgaaagattagagtcgcggggtgaaagatactatagattggaagatggaaggattttgtgttttgagtgcatggaatctgctataacagacactggtgaatgtcaacccctttatcattccatcagagactattatgaaggaatgaacatgaaaattgatcaacaagtaccaatgcttctcgttgggagagaagcacttaatgaagccattgttggggagaagaatggcttccatcactcaccagaaacaaggggcttatgcctttcagaagagcaaactgtcacaagtgtatatagatggccaagaattggaggccatcgattaataagcatgagatctcaagctcaaaggctgcctagaaaatgtgaagttacagctattcttgttctctatggtcttccaaggttactcacaggtgctatacttgcacatgagttgatgcatgcttggttacgcctcaaaggttaccaaaaccttagtcttgaagtagaggaaggtatttgtcaagttctttcttacatgtggcttgatgcagaagtcatgtcatgtgctagaaccacgccctcaacatcatcatcagcttcttcctcctcttactctaactcatcaaagaaaggtgtgaaatctcttgttgaaaataaattgggtggcgttgggtggtggcatttgggtgcggcgatggtgttgggcggaggttttggggagagacaattaaggcttttgcttggaagatgaaggataaaatgggggatatttgccattttggtagtgcaccaaataaaaatggggtgtataaagcaattgcccataggttccttttttcttcttgttagttagggcactttttgcatggagttaggcatcctgtatcctcctattatgtttgaaattattttattacccttaatgaattaacatcaccttccccaacccactcgtgaaggcttctcccttcctccttcgtctcgaaaccgtgcatcctcgttcctgtgctcctttgtcattgaaggtcagcttcttcctttctagtgtggttgaggttggtttctggtggggttggggttgggttctggtgaaggtgagtttcggtgagggtgggtttcggggtggatgaggtcacattccataatgacctttccataagcaaaaaaccctactaaaatgagttttccataagcaaaaaaaccttatggaatgacctttctgaaagctaaaaaaacttccaaaatggttgttctagaagtactttagcttaagactattccggaagcaaatttgttaatccaaaacatcctttctagaaatgtattttatatattctggaaaacgggttccagaaatcagtatcgggcttacgaaaagcccattttgaaagctacaactacaatctgaagtagcatttccaaaagttattttgcatcttttggaaaggtcattttggaaagtacgattttggtttatggaaggaccattccagaagaaaaaattgcaatccagaatagcctttttggaagtacattttgtaccttttggaatgattgttccagataacactatttttgtttacgaaaaaggttttcataagattttccttttggaataaccatttcgaaagaaaatttattcccttatagaaagcctattctggaaacaggtccacaatgagaatgtaaatacattaaaaggtacatgcaaagtggagagttggagaatgagaaggacttctacgacgtcaagttggacttgctttgtacctccgatggctgtgggaagaagagttggagaagaagag

SEQ ID NO: 29803 - DNA, 1099 bp, Glycine max
  Clone ID: UC-GMRONOIR063G08_FLI
ggaaggcttgactgcggaagacattgaagcactgacgacggaagtggccattttgaagcagatgaatcacccgaatatcatgatcttgcatgacttcttctcggaagagaagtactattacctcgtcactgaattcatggctggtggggaacttttcgaccgcatcgttgaaaagtcttactacagcgagcgagaagcaagagatttggtcaagctgcttcttgaggctatcaagtactgccacgatgccgatattgttcaccgtgacttgaagccagaaaacctgctgctgacgagcaaggacgacgatgcgtctatcaagttggcggactttgggtttgcaaagaagatcgagttcaacggcgatggtctcgtgaccgcgtgcggcaccccaggttatgtcgctcctgaaatcttggaaggacaagcgtacggtaaaggcgtcgatatttggagtattggcgtcattacgtacatcctgctttgtgggtaccctcctttccatgatgacaaccacaacgctcttttcaagaagatcaagaagggtaaattccagttcgactcgccatactgggaccacgtatctgacgaagcgaaggacttgatcgccaagatgcttgtcgtgaacccagcggaaagagctaccgttggacagcttctcgagcaccgatgggtcactggcaccgaagtcgccactgtgcagctcacgagtgccttggaagagctgcgtcgtttcaacgctcgtcgcaagttcaaggctgccgtcagcacggtccaggccacgatcgcgctcaacaagaccttcagcaagagcaagtcgactacatctgatgaaggtgcttccgcgaatggcgatgaagtgctgtccgccgatggcgatgaagtgctgtccgccgatggcgtcgcgctgcaactggagaagagtgcgtgattccaccagtcgctgcagatccgagatgcaacgcgcgtggagatggcgagagaactatgaggtagcggccatgctgacgcagggagaaagcgcttcccagctccgcatccgacggcaccatcacaacagcagcattttgtctcgcaatatattgtatttacccattct

SEQ ID NO: 29804 - DNA, 1181 bp, Glycine max
  Clone ID: UC-GMRONOIR063G10_FLI
ctaaacactcatgcggttgttgagccattcgtcatagcaacaaacaggcatctgagcgtggttcaccctatttacaaacttttgtttcctcactatcgtgacaccatgaacattaattcacttgcccgcaaatccttggtcaatgcagacggtattatagagaaaacattcttgtggggtaggtactctttggaaatgtctgctgttatttacaaggactgggttttcactgatcaagcattgcctaatgatcttgtcaagagaggagttgcggttaaggatccatctgctccccatggagttcggcttttgattgaggactatccttatgcttctgatgggctagagatatgggatgccatcaagtcctgggtgcatgaatatgtctcattctactacaagtcagatgcagcaattcaacaagatcccgagctccaagcttggtggaaagaacttgtccaagtgggtcatggtgatttgaaagataagccatggtggcaaaagatgcaaactcgtgaagagttgattgaagcctcggctaccctcgtatggatcgcttcagcccttcatgcagctgttaactttggacagtatccatatggaggtttaatcctaaacaggccaaccattagcaggagattcatgcctgagaaagggtctgctgagtatgcagctttggctaagaaccctgagaaggagtttttgaagactattactggcaagaaggagaccctcattgaccttacaattatagaaatcttgtcaaggcacacatctgatgagttctaccttggggagagagatggtggtgactattggacttctgatgctggtccactagaggccttcaagaggtttggaaagaagcttcaagagattgaacaaaagcttatacagaagaacaaggacgagacgttgagaaaccgcagtgggccggctaaaatgccttacactttgctctatccttctagtgaggagggattgactttcagaggaattcccaacagtatctccatctaggggctctatggttgttgcagtactttccctggttttcaataaaagtgaatagaaggaatatgattccttcatctacctatgtatggttaagttatgtatttggggtgattgaatgttctcgtgtttgctgttaagtgttaatgaagaaattctgtttgtat

SEQ ID NO: 29805 - DNA, 1011 bp, Glycine max
  Clone ID: UC-GMRONOIR065F10_FLI
agacatgggtctgctcaaatacttcctagggattgatgttgcccaatcctcctatggcattgtcatttcccaatggaagtatgctttggatatcttgaccgagaccggtatgcttgattgtcttcctagtaatactcctatggatcctaatgtgaagcttctctcaggtcagggggaggcattggaagacctgggaagataatgttgtttggtggacagacttaattacctcactgtcactagactagacataacttttgcagttggtgtgcttagtcaatttctgaaagacccgactgatagtcaatggaatgcaacaatccgcatacttcgatatatcaagaatgcaccgggtcatggattgctatatgaagacaaaggcaatggcaaagttgtttgttactttgatgctgattggccaggatcaccatcagacaagagctccacctctggatatagtgtctttatgggagaaaacttgatctcatggagaagcaagaagcagaaaatcgttgctagatttagtgctgaagctgagtgtcgtgtcatggcagcagctgcatccgagatcacatggctcaggcaacttctccaacagataaaatttggagacgtttagcataccaaactattatgtgacaatgaggctgctctccacattgcttcaaacccggtcttccatgagtggactaaacacagattgattgtcactttgtgtgagagaaggtactcttaggagaaatcgccactaagtttgtcagctctaaagatcaacgagcagacatgctcagaaaatttctcaagggctcttgtgttaacgacatttgtaacaagcttggttcatatgacatatgctccagcttgagggggagtgtgaaatatacatttaggatatgattaattgtataactgaaattagggatttcccgtcattataaggtttccttaacaatgtataaattctgaatataaataaaggcattgtgtatggtaaagaacacacaacacagt

SEQ ID NO: 29806 - DNA, 434 bp, Glycine max
  Clone ID: UC-GMRONOIR065H07_FLI
cctaattcttgacacaattagaggtgatcagcaacattttgttcgcagagatgagttgaaggcatcctggcagatcttcaccccacttctgcacagaattgatgaaggggaattcaagccactcccctacaaaccaggaagcagaggtcctgcagaagcagatcagttacttgaaaaagctggctatgttcaaacacacggctacatatggatccctcctaccttgtagagtgatctaatgtaataagatgaggaatttttagctgctaatgaatacacaataagcttgtgaggcttcttccctttgaagcactcccacggatgtgtatcaagcatttggaacaatataagagactaagagtgtttggcacggtttgtgtaactgatttgcctttaaatgcaaaataaatggaaaatgaagtccatttactagt

SEQ ID NO: 29807 - DNA, 1007 bp, Glycine max
  Clone ID: UC-GMRONOIR065H09_FLI
gggaagtctggaattagattggactggattagaaggctaaaaatagcccttggtgctgcgagggggctggattatctgcatgaactagcaaatcctccaatcatacacagggacatcaaatccactaacattttactggatgagcgcttgattgctaaagtatctgattttggtctctccaagcctttgggtgaaggtgcaaaaggttatattaccacacaagtcaaaggaacaatgggctacttggacccagagtattatatgactcaacagttgactgagaaaagtgatgtttatagctttggagtgctattgttggagctgataactgcaagaaggccaatagagcgagggaaatatattgtgaaagtggtaaagggtgctatcgacaagacaaaaggcttctatggtcttgaggaaattcttgatccaaccattgatctggggacagcactgagcggttttgagaagtttgtggacattgcaatgcagtgtgttgaagagtcaagttttgacaggcctacaatgaattatgtggttaaagaaattgaaaacatgttgcagttggctggttcaagcccaattttttcagcatcagcatcagtatccacttcatctagttataataatgcaaccaaaatttccctgcatccttacaacaatgaatactttgattcaagtgtggtacttccacgagcataaattgagtctgtgttggagaaattattacatggttcagtatagcgtggtttcgactaatctctatgtatcatgtaaactatgtagaagagattatatagttaggatcacatgatcacaaaccatgtaataatttctcactgtgtaggccttttcattttacacctcaaacgtaacttgtgcaaataatgtacaaaacaagagagctgcagtttgataagtctctagttagattcttgtttacttttagtttctcattttagccgggattgtgtaacatatatatattgcttttgaacatattgtag

SEQ ID NO: 29808 - DNA, 1063 bp, Glycine max
  Clone ID: UC-GMRONOIR068A03_FLI
tcaggatggaatagatgccattgaagatgttatctaccatattgaaacatatgatgtgactacaattagagcaagcacacctatgtttctcatgtctcggaagattaaatcacttggtgtcaaatgggttatctcaggagaaggatctgatgagatctttggagggtatttgtacttccacaaggcacccaacaaggaggagttccacagagaaacatgccgcaagatcaaagcacttcaccaatatgattgcttgcgagccaataaatcaacatttgcttggggtctagaagcccgtgtaccatttttggacaaggcgtttatcaatgctgcaatgagtattgaccctgagtggaagatgataaaaagagatgaaggacgaattgagaagtggattctgaggagagcctttgatgatgaagagcatccttatctgccaaagcacattttatacaggcagaaagaacaattcagtgatggagttggctatagttggattgatggccttaaggcccatgctgcaaaacatgtgactgaaaaaatgatgcttaatgctggtaacatttacccccacaacaccccaaaaaccaaggaagcatattactacagaatgatctttgagaggttcttccctcagaactcagctaggctcactgttcctggaggagcaagtgttgcatgtagcacagccaaagctgttgagtgggatgctgcttggtctaacaaccttgatccctctggtagagcagcacttggagtgcacatttcagcctatgaaaaccagaacaacaagggtgtagaaattgagaagataatacctatggatgctgctccccttggtgttgccatccagggctaatacaaagatgtgacaaagaataatttgggcgacaatgaagataactaagctaaaggtgaatgaaaaatttgcctgcagtgtaatttcatctgggcaaagcttttatagtttatagttataaggctttctaaaaagtgttgcgtattgtattatcttgaatgctgtgatttgaagtcttaataaaagtgtttcctttatcagttc

SEQ ID NO: 29809 - DNA, 2680 bp, Glycine max
  Clone ID: UC-GMROPIC015G02_FLI
caccagaaagtgacactgagagaagaaggaaaaactaaccaacaccacagcccctaatttcctttttctcacaatggcggcttcagtcgacaaccgtcaatacggcacccacataaacgccgtcgttcgcgcttgcggcccagacttcaatacccctctcccgtcggatttcgatttggactcatccagcgacgacgaagaccaaaacgacgacgcttcgtatctcaaggagttgatacaaaaagcgaacgcggaaaccgaggcgtcgctgttggacccgcgagacgagggaaccgcggaccagtggatcccgcggaacgcctccatggtgcggctcacagggaagcaccccttcaactcggaggccccactcccccgctgcgtcatgtgctgaaacgctgtgggatcctcgcccgtatgaagggcgccatgtacgtgtccttcgagggcgccgaggatctccccgggggcggtgggtccaagtatggaaccagcgtcaagagggagatggccatggatccgtcgcgtgacatcattctcgcgttcatgcaaaacggcgagccgttggcgccggatcatggatttcccgtgcgcatgattattccgggattcatcggtggaagaatggtgaaatggctcaaacgcattgtcgttactgagcatgagtgcgatagtcattatcattataaggataatagagtactcccttcccatgttgatgcagaacttgctaatgacgaaggttggtggtacaagccagaatacatcatcaacgagttgaatataaactcagtgataactacgccttgtcacgaggagatcttgcccatcaactcatggactacacagaggccttacgtaatcagaggctatgcatattccggtggtggaaggaaagtgacacgtgtggaggtaacacttgatggtggagaaacatggcacgtgtgcacattggaccatactgagaaacctaacaaatatggcaagtattggtgctggtgcttctggtctttggaggtggaggtgcttgacctacttggggccaaggagattgcggttcgagcttgggatgaaggtctcaacactcagcctgaacacctcatttggaatgttatgggcatgatgaataactgctggttcagagtgaaaacaaatgtgtgcaagccccacaagggtgagattggcatagtgtttgagcatccaacccaaccaggcaaccaacccggtggctggatggcaaaggaaaaacatttggaaaaatcacaaaagccaaaaccaaccctaaaaaagagtgtctccacaccattcatgaacacttcctcaaaaatgttctccatctccgaagtgaaaaaacattccaaccctgactctgcttggatcattgtccacggtcacgtctatgattgcacccgcttcctcaaagatcaccccggtgatactgacagcatcctcatcaatgctggcaccgactgcaccgaagagtttgacgccatccattctgacaaagcaaaaaaattgcttgaagattaccgaatcggggagctcatcaccactggctacacctcagactcatcgcccaacaactccgtgcatggcaattccgaattcactcatttggcccctattaaggaaactacaacaccaccatcacgtagtgtggctctcaacccacgcgagaaaatcccatgcaagctcgtgtcaaagacctccatttctcatgacgcgaggctattccgttttgcattaccctcagaggaccaactcttgggattatccgtggggaaacacattttcttgtgtgccaccatcgacggcaagctatgcatgcgagcctacactccaacaagtagtgtggatgaagtgggtttctttgatctactcatcaaggtgtacttcaaaggtgtgcatcccaagtttccaaatggaggactcatgtctcaacatttggactctctacccattggatccatgttggacgtgaagggcccattaggtcacatagaatacaccggaagaggcaacttcatggttcatggaaaaccaagattcgccaagaggttggccatgttggctggtggaactgggatcacgcccatttaccaagtggcgcaagcgattttgaaggacccagaggaccacaccgaaatgcatgtagtgtatgcgaatcgcacagaggatgatatattactgagggaggagttggatgagtgggcgaagatacataatgaccggttcaagctatggtacgtggtggaaatcgcaaaggaagggtggaaatacagtgtagggttcatcacagagagtatcacgagggagcaccttccaaaagcgtcgagggattccttggctttgacatgtgggccaccacccatgattcagtttgcagtgcagcctaatttggagaaaatgggatatgatatcaagaacgatttgcttgtgttttagggcatggagaagtagctagattgctagattgtgttgtgtattgtatttgtttgtgtatcgggtgttattggagtattaatgtttgtttcattctttataagggtaaaaaaagaagtgaaaaattgtatatgaaccgagattgttgggaagtaactcttcatcccttctcacgctttaatgtagacaggtaagtcaagatttttttactactttagtgtaaataaattaatgttat

SEQ ID NO: 29810 - DNA, 684 bp, Glycine max
  Clone ID: UC-GMROPIC020B03_FLI
ctgatcacaggccttcaagggaagatgaaagggacagaattgagagcctgggtggctatgtcgatttatgccgcggtgtttggaggatccagggatctctggctgtgtcaaggggaattggagatagacacctgaaacaatgggtgacagcagaacctgagaccaaagttctccgaattgaacctgaacatgacttgttaattttagcttcagatggattatgggataaggttggtaatcaggaagcagtagatattgctcgttcttttctcgtaggcaacaacaaatcacaaccattgctgcaggcttgtaaaaagcttgtagatttgtctgtttcacgaggctctttggatgatacaagtgtcatgctaatcaaattggagcactatatttaaagttaccttagtacgactaaggtttcaagattattgcagttgagatcgcattgaggtcaagattgcgttgcagtttgtgatttttgaacaaccttggtggtgcctgatgatggatagagagtagctgattcttttctgtatatataaatctgactaccttattggaattttttgtacccgcgtaggggagggatattaacaataacatttagtaattatttttttcatagaataatttatgtaataagcataaagtgaattaatttatacattatttatttagtaattc

SEQ ID NO: 29811 - DNA, 872 bp, Glycine max
  Clone ID: UC-GMROPIC020D02_FLI
aattctcccaacacaattataaaaagaagaaaaacttagagtgatagttgtaggaaagtaaaaacataagtgttctcttaattcagtgaggttctgaattgttcaacttgagatgatggcatcatttgcagggactactcagaagtgcaaagcatgtgagaagactgtgtatttggtggaattgctcactgctgacaacaagatctatcacaaatcatgtttcagatgctaccactgcaagggtacccttaagttgagtaattattgttcctttgagggtgttttatactgtaagcctcattttgatcaactctttaagaagactggcagcttggacaaaagttttgaaggtattccaagaactgcaagacttgaaagatctgccgatcaggtccaaaccaatacaaaggtttcaaatttgtttgctggaactcaggaaaaatgtgttgcttgcaagaaaacagtttacccaattgaaaaggtagctgttgatggaacatcttaccataaggcttgtttcaggtgcactcatggaggatgtgtaattagcccatcaaattatgttgcccatgaacatcgtctttattgcaggcaccatcatactcagttgttcaagcagaaaggtaacttcagccaacttgacaagcaagaaaacgatgaaggggtgacggagaacagaataactgagtaatggcaagcattcaactttcaagttacattggcaatacaagttcagttggtgactcattttcaggcatcaaattcccttgtctcaatccacattttttttttctgtttactatgtatgtgaaaagttttgtgagacaaattttgggttgataattgagaagaattagtagatagtttggctt

SEQ ID NO: 29812 - DNA, 1969 bp, Glycine max
  Clone ID: UC-GMROPIC020D03_FLI
acgccagctgcatctgcttttttttgttattccctttggttctggggtggaatctacgtataaaagttgaaatcttggtttcgtttcttggttgaggagaattgtttggggctgacttggtgttgggttggtcctgaatttttttaatgcctttttgtttgttttctagttttttttttttttaaattgcgtactagtaactctctctctctctctgggaattgggtgcttctatttgtttaatggaagattatttatgggtttagattattgggtttaacagttcatgcctagtcaccaatacgcgtttggtatacgtattgaaatctttctttcttcttttgtgcaaatttgcttggtctagcagccatatctgcatctggttttgcgcgtgtacacccagacattctcgctgatctagttgggataaagtgtctctttatattgccaagaagagtttactgtgtgggaggagtgttttatgtttgaggtcttatatacttgtgagaaaagaactttttggatttgagtagtagggtgagagagtaaggtgaaggttctttggtggggctagatatggcctctggtgaagggaggcggcgtcatcatgatcttgtgcctcttgctgcattgctcaagagagagatgaagagtgagaagatggagaagcctactgtgagggttggacatgcagctcagtccaagaaaggggaggattactttctaattaagactgattgtcaacgagtgcctgggaactcttcatcttccttttctgtatatgcggtttttgatgggcataatggaaatgctgctgccatttttactagggagcatttgttaaatcatgtgttgggtgctcttcctcgagggcttggacgagatgagtggttacaagctttaccaagggcactggttgctggctttgttaagactgacaaggaatttcagagcagaggagaaacttctggaaccacagccacattcgtaatagtggataggtggactgtgactgttgcatcagttggagattcccgttgtatactagatacccagggtggtgctgttacctccttaactgttgatcacagacttgaagagaatattgaagagagggaacgtgtaactgctagtggaggtgaagttgggagacttagcattgttggtggggctgagattggtccccttcgttgctggccaggaggtctatgcctttctaggtcaataggtgacatggatgttggggagttcatagttccaataccatatgtcaaacaagtaaagctgtcaaaagctggtgggaggcttgtaattgcctctgatggcatatgggatgctctatcatcagaaatggctgcaaaatcttgccgtggtttgcctgctgaacttgctgctatgcaggttgtcaaggaagcactaagaacgagagggttaaaggatgatacaacttgcatagtagttgacattatcccacctgataatgaattgccaccaacacctccccccccaaaacggaacaagctgagagatcttctttccttcaggaagaggtcccgtgattctgccagtaagctgtcaaaaaagctttcagctataaatatagtggaggaactgtttgaagaaggatccgcaatgcttgctgaaagattaggaaatgatgacaacttgaactcagggcaatcaacatctggcatttttgtctgtgctgtatgtcaagttgatcttgctccaagtgagggcatctctgtccacgcaggttccattttctccaccagctccaaaccctgggaaggtccttttctatgttttgattgccgtgataagaaggatgctatggaaggaaaacgtccaagtggagttaaggtgtcataggctcaaaattgatttcctgttatagtattctttatgctatctttggccatttttgtattcacaatttttataggcaaaaattaattgattgaatctc

SEQ ID NO: 29813 - DNA, 1575 bp, Glycine max
  Clone ID: UC-GMROPIC090E09_FLI
gcaaactttcttccaaacgaacgtgtcacaaaattctcgccttctccgaatatggcatcgcgcgtcagcattggcaaccttacctcctccgcgccgtatattaattcccctcactttcgctcaccacttaagatttccaacaacccctctctgcaaaacgcttcgcataaggtacttatgcgcgataagactgtactggtaaccggcggagccggttacatcggcagccacaccgttcttcagctcttgctcggaggtttcagagccgtcgtcctcgacaacctcgaaaattcctccgaggttgccatgcacagagtcagggagctcgccggcgaatttgggaacaacctctcctttcacaaggtggacctacgggacagagctgctctagaccaaatattttcttccacacaattcgatgctgtcatacattttgctggactgaaagcagtaggagaaagtgtgcaaaaacctttactatactataacaacaacttgactgggacaatcactctattggaagtcatggctgcccatggatgcaagaagctcgtgttttcatcttcagcaactgtatatggttggccaaaggaggttccatgcacagaagagttccctctgtcagcaatgaacccatatggacgaactaagcttatcattgaagaaatttgccgtgatgtccactgtgcagagccagattgtaaaataattttgttaagatacttcaacccagttggtgcacaccccagtggttatattggggaggatcctcgtggaattccaaacaatctcatgccatttgttcagcaagtagcagttggccgacggcctgcactgacagtttttggaaatgattataatacaagtgatggcactggggttcgggattacattcatgttgttgatttagcagatgggcacattgctgcattgcttaaactagatgaacctaatataggttgtgaggtttataacctgggaacaggaaagggaacatcagttttggagatggttagagcttttgaaatggcatctggaaagaaaattccacttgtgatggctggccgtagacctggtgatgctgaaattgtttatgcatcaacaaagaaagcggaaagagagcttaaatggaaggcaaaatatggcattgatgagatgtgccgtgatcaatggaattgggctagcaaaaacccttatggctatggagatcagggctccaccgattaaccacttagttttctctttgggttcttttctgaactcacccacaccgtagtccgtaggtcttgtgaatttagttttcccaaaagcttttctttctttagtgatcttaaggtgacaaagtacttgtattattactatttatagttacatagtaaataagtagtggtttactatactgtaatttaaaggttctctaggttccttcttacaggttattgattattagattcggattctctcatgttccacatgagcagcatcctgttttgtaaatttaaatcacatgtttgtttaaagtgtgactaacaggtatccttacctcattattgagattaatttattttgaatgtt

SEQ ID NO: 29814 - DNA, 1352 bp, Glycine max
  Clone ID: UC-GMROPIC120D11_FLI
ggcagcatctaaggcattgcaacgaactgatcaaatggcacagagtgtggaaattcctcgtgtgaaactcggaactcaaggccttgaggtttcaaagttgggatacggttgcatgggccttactggtgcctacaatgatcctcttcctgaagaggaaggcatatctattattaagcatgctttcagcaaaggaatcacttttttcgacacatctgatatttatgggccagaccatgctaacgaaattgtggtcggaaaggctttaaagcagctaccgagagaaaagatccaaatcgcgacgaaatttggcattacaaagatcgactcttctggaatgtttgttaagggtacaccagagtacgctcgctcatgttgtgaagccagcttgaaacgtcttggtgttgaatacattgatctctattaccagcacagagtggacttatctgtacctatagaagaaacaattggtgaacttaagaaactggtggaagagggaaaagtgaggtatattggattatctgaagctagtccagatacaataaggagagcacatgctgttcatcccatcactgctgttcaaatggagtggtccctatggactcgtgacattgaggacgagataattcctctctgcaaggagcttggcattggaattgtaccatatagccctcttggtcgaggcttttttggtggcaaaggagttctggaaactgtgtcaacagttagctccctgattacacatccacgcttccgagctgagaacttggacaagaacaaaaaattgtatggcaaaatagaaagccttgctaccaaacaacagtgcactccttcccagttggcactagcatgggtgctccaccaaggcaatgatgttgtgcctattcccggaactactaaggtgaagaacctagatcaaaacatcggtgcagtatcattgaaattaacagaaagtgacctgagagaaatttctgaggcagttcccattgatgaagtagccggtactcgacactactatggatcggctaatttttcatggaccgttgctaatacacctccaaaagatccgagggtttaaacttgaagcactcgaaatcattttcaatcggacaatgcactaagttatgaattaggctagttgctgtttttctcattgtatgcaaaatcctatatatgggtattagtagttcaatttgcgagttaaatttaataaaatccaagtcaattatggcctcttggtgattgactgatggatatttggttggttcagttttgttgtttgcagtacgagtttgcgatgtgtaacaaaaaccatgaataatgttatatagacgtgagggtttgctccttatgtt

SEQ ID NO: 29815 - DNA, 1655 bp, Oryza sativa
  Clone ID: UC-OSFLCYP117A12_FLI
gctgctgctgctgctgtcgctggcagcggcggacatgtcgatcgtgtcgtacggggagaggagcgaggaggaggcgcggcggctgtacgcggagtggaaggccgagcacggcaagagctacaacgccgtcggcgaggaggagcggcggtacgcggcgttcagggacaacctccggtacatcgacgagcacaacgccgccgccgacgccggggtccactccttccgcctcggcctcaaccgcttcgccgacctcaccaacgaggagtaccgggacacctacctcggcctcaggaacaagccgcggagggagaggaaggtcagcgacaggtacctcgccgccgacaacgaggcgctgccggagtccgttgactggaggaccaagggggccgtggctgagatcaaggactagggaggttgcggaagttgctgggctttctcagcaatagcagctgtagaaggcatcaaccagattgttactggcgacctgatatctttgtctgagcaggagctagttgactgtgacacttcatataacgagggatgcaatggaggtctgatggactatgcatttgatttcatcatcaacaatggtggaatcgacaccgaggatgactacccttacaaaggcaaggacgaacggtgtgacgtaaacaggaaaaacgcaaaggttgtcacaattgacagctacgaagatgtaacaccaaacagtgagacgagtctgcagaaggcggtagcaaaccagcccgtcagtgttgcaattgaagccggtggcagagcattccagctctactcatcgggtatcttcacgggtaaatgtggaacagcactagaccacggcgtcgctgctgttgggtacggcacagagaatggcaaggactactggatcgtgaggaactcgtggggcaagagctggggtgagtccggctacgtccgtatggagcgcaacatcaaggcgagcagtggcaagtgcggcattgccgttgagccatcctaccctctgaagaagggcgagaaccccccgaaccccggccctactccgccgtccccaaccccgcctcccaccgtctgcgacaactactacacttgccccgatagcaccacctgctgctgcatctacgagtatggcaaatactgctacgcctggggctgctgcccactcgagggcgccacctgctgcgatgatcactacagctgctgccctcacgagtaccccatctgcaatgttcagcagggaacctgcctcatggctaaggacagtccactggcagtgaaggctctgaagcgtaccctggcaaagccaaacttgtctttcttgtttggcaacggcaagaagagcagcgcttgagcaatttcagaaccgtatcagaccgtccagagccagcgtggttgcatcatcaaatgatcagctggtaactgacgaagacgattgcgcagctcggcggcgaaccctgcgcactaagtatatctgcttttataatagatttctcgtgtacataaaatctaaaaaaacgggttcagttggttacagaactgccaaatttgcttctgaatgtatatgtaaaattcagctaggtttgctcctaagctcctagatgccagttcgacggaactgcaaattgatattggaacaagataaggtcattgccatattaatc

SEQ ID NO: 29816 - DNA, 626 bp, Oryza sativa
  Clone ID: UC-OSFLCYP120A12_FLI
gctagccacgccgtccgctcaggccgaggcgcatcgcgcagggggagaaggggaggagaagatgtcgagcgacggagggccggtgcttggcggcgtcgagccggtggggaacgagaacgacctccacctcgtcgacctcgcccgcttcgccgtcaccgagcacaacaagaaggccaattctctgctggagttcgagaagcttgtgagtgtgaagcagcaagttgtcgctggcactttgtactatttcacaattgaggtgaaggaaggggatgccaagaagctctatgaagctaaggtctgggagaaaccatggatggacttcaaggagctccaggagttcaagcctgtcgatgccagtgcaaatgcctaaggcccatctcgtatcctatgtgtatcaagttatcaagaagatggggaataatatggtgtggatatagctattggacatgttaattatccacatgataatatggcttggatataaggatctcacacgataatatggcttggatatatagctattaaagattttacctatggcatatttcaatgtgtattagtactaagtaagaatgattgcaaggtgtattaactacaaatattgcaataaaagtccctgttactac

SEQ ID NO: 29817 - DNA, 2051 bp, Oryza sativa
  Clone ID: UC-OSFLCYP126G04_FLI
gttcatgagttcgatggctcaaccttcagagagtgcttctccctctcatggaggaacccttatgtccttaggctcgccttctccgccggcatcggtggcctcctcttcggctacgacaccggtgtgatttcaggagctctgctttacatccgtgacgatttcccttcagttgacaagaacacatggcttcaggagatgatcgtgagcatggcggtggccggcgcgatcatcggggcggcgatcggcgggtgggcgaacgaccggtacggccgccggacgtcgatcctggtggccgacgcgctcttcttcgccggcgcggcggtgatggcgtcggcgacggggccggcgcagctggtggtggggcgggtgttcgtcgggctcggcgtcgggacggcgtccatgacgtcgccgctgtacatctcggaggcgtcgccggcgaggatacgcggcgcgctggtgagcaccaacggcctcctcatcaccggcgggcagttcttgtcgtacctcatcaacctcgccttcaccaaggcccccgggacgtggcggtggatgctcggcgtcgccgccatccccgccgtcgtccagttcttcctcatgctcttcctccccgagtcgccgagatggctctaccgaaaggggagggaggaggaagcagaggcgatcttgaggaagatatactcggcggaggaggtggagagggagaaggaggagttgaaggagtcggtggaggcggaggcgcgggagaggagctcgtcggagaagacgagcctggtggcgctgctgatgacgacggcgacggtgcggcgggggctggtcgccggcgtcgggctgcaggtgttccagcagctggtggggatcaacacggtgatgtactacagccccaccatcgtgcagctcgccgggttcgcctccaaccagacggcgctcgcgctgtccctcgtcaccgccggcctcaacgccgccggctccctcgtcagcatctacttcatcgaccgcaccgggcggcgcaagctgctcgtcatcagcctcgccggcgtcatcctctccctcgccctcctctccgccgtgttccacgaggccacctcccactccccgcccgtcggcgccgccgagaccgcccacttccacggcggcgcgctcacatgcccggactactcctcccgctcgtcgtcgtcgttctgggactgcacgaggtgtctcaaggcagcggcggcgtcggcggggtgtgggttctgcgcggcgggcggcggcgacaagctgcgcgccggggcgtgcctggcggcggcggcggcggcgtcgaacgccacggctcgcgacgcgtgccgcggcgaggggagggagtggtacacgcgggggtgcccgagcaggtacgggtggctggcgatggcggggctggcgctgtacatcgccgccttctcgccggggatggggacggtgccgtggatcgtgaactcggaggtctacccgctgcggcaccgcggcgtgtgcggcggcgcggcggcgacggcgaactgggtgtcgaacctggcggtggcgcagtcgttcctgtcgctgacggacgccatcggggcggcgtggacgttcctcatcttcggcgggctgtccgtggcggcactcgcgttcgtgctcgtctgcgtgccggagaccaagggcctccccatcgaggaggtggagaagatgctcgagggaagggagctccgcctcaggttctgggccaagcgccgccaccaccacggcggcgacggcgacggcggcggagaaaagaccggcggcgtgtgacacgacacgaggcctgtttatttagcgttttgatgactgattcgttgcaaatgaacgaaggagtgtggatttggtccgatcacgcacaaacatgtagtcataaatatttaagtttattaaggtaaaatttagataaacttttgaaactttgatcactgatttcatatcagatcaagtttataaaatcgatggcgtttgcgtttggtgatttgtgaacggagccccattgactggcctaataaatcaaagcaaaagccaacatttaaattttt

SEQ ID NO: 29818 - DNA, 1883 bp, Oryza sativa
  Clone ID: UC-OSFLM202101F11_FLI
gcgtggtcgcagcaacggccgcggcgttggtggcaatggaacgcccaatctccatgcttcttcttgctgtcgaacaccagatcgcaggtgacaagaatcagtgagcatgcatcatgtcgtccaacatgttcggcaagaaagggtgggactcgaatgggatggatacatctggttctgtctgcagaagttcttcagatatcaattacattaatcaacgggcaagattgaagagtgcgagcctaaactgtgtgggttcgccgccaaggaagaacaacaatgctacacagtaccggatgtttgttgccacatggaatgtgggaggaagaactcctaataaacgacttaaccttcaagactttctgcaggttgaagaatctcctgacatctacgtcttagggtttcaggagattgtccccctgaccgccggcaatgtgctcgtcctcgaagacaacgagccggcggcgaggtggctggcgctgatccaccaggcgctgaacatgccccaagaaccggccgacggcgacgagccatcgcctttgacgccgccgccgtcgtcgtcgacgacgacgtcggagtcgtcgaacggcgcccggacccggcggcgcgacgccgtgtcgaggtcagccagcggcaacctcttcttccacacgccgtcgctcaagatgctcagcaacagctaccgcgtcgacagcgcgctagtcaagacgtgcaactgctcgccggagcactcctccgtgcgccgccgtgccgcggaggtgcgcgagtccgtgtacctcgccgacgcacccgcgccagccggcgagacggcggcgccagctgccgacgaagacgacgcgccgacgacggaggcgcagtgcgaggcaggatgcggcggcggcggcggcatgagctactgcctgatcgcgagcaagcagatggtggggctcttcctgtcggtgtgggtgaggaaggagctcgtcgagcacgtcggccatctccgggtggactgcgtcgggcgcggcatcatggggtggctcggcaacaagggctgcatcgccatcagcatgacgctgcaccacaccagcctctgcttcgtctgcagccacctcgcctccggcgagaaggaaggcgacgagctgcggcgcaacgccgacgtcgccgagatcctcaagagcgcgcacttcccgcgcgcctgccgcccggcgcccgccgccgcccgccgcgtccccgagaggattcttgaccacgaccgaatgatctggctcggcgatctgaactaccgcatgtcgttaagctacgacgagacaagaacactactggaggacaacgactgggacgctctactggagaaagatcagctgttgatcgagagagaagcggggagagtgttcagaggctggaacgaaggaaagatctgcttcgcgccgacgtacaagtacacgcacaactccgacgcgtacgccggcgagacggccaagtccaagaagaagcggaggacgcccgcatggtgcgaccggatactgtggcagggagacggcatcgagcagcttcagtacctgcgcggagagtcgaggttctccgaccaccggccggtctgcggcgtgttcgccgtcgaggtggacggcggcgatggcgacggcggcggcgccgccggcaagatcatgaagggttactactccctcaacgcccggatcggcggtgacagatcgcagtgtcaccagggtgacgtgtcgtgaactgattatatatttcatccccttttgcaagtttgcaatgatagggtcttgtgtataagaaggtttattaccaagaacagaggatattgtagatactagtatctgacaagaatcccatgactgaaattagtacgagtactgactaattaagaatacagtaattttcgt

SEQ ID NO: 29819 - DNA, 971 bp, Oryza sativa
  Clone ID: UC-OSFLM202103G12_FLI
caacaatggcgccgccgccggaggcgtggactactcgctgacggcggcgacgccggcggggaggacgttcaacttcctgagcgcgctgggggacgtggcgttcgcgtacgcggggcacaacgtggtgctggagatccaggcaacgatcccgtcgacgccggagcggccgtccaaggggccgatgtggcgcggcgtcgtgctggcctacggcgtggtggccgtctgctacctccccgtggcgttcgcggggtactacgtgttcggcaacgccgtggacgacaacgtgctcatcacgctggagcggccggcgtggctgatcgccgccgccaacatattcgtcgtcgtgcacgtcgtcggcagctaccagatctacgccatgccggtgttcgacatgctcgagaccttcctcgtcaagaagctccgcttcaaacccggcatgcctctccgcctcatcgcccgatcactctacgtcttgttcaccatgttcgttgccatcgccgtccctttctttggtggattgctaggcttctttggtggctttgcgtttgctccaacgacctacttcttgccatgcattatgtggctgtcgatcatgaagccaaagaggtttggcttgtcctggtgcatcaactggttctgcatcatcatcggcgttcttctgtcggtgttcgcaccaatcggaggtctccgctcgatcatcgtgaatgcccagagttacaagttcttctcgtgagtgattaattgagaggtgttttaccattcaattaagtgtgttcttaattaattaggggattgttttagataatgcacagagttctatttaattagatgaaagagaaattcgtgtgtccctatgagacatctgtgtgtggatgatatagtagtcgatcaaatgaaggcatattatttatttggcctttgtttgtcgatctatattctagcgttaatttaattcgtgtcgagtttatccc

SEQ ID NO: 29820 - DNA, 1503 bp, Oryza sativa
  Clone ID: UC-OSFLM202104G09_FLI
acaagcaaacaaagaaagaaaagcatcacaaatctcacgcactgtctctcgttcgcgcaaagcacgctgcttttctccgctttgcgagcaccatagcctagcccaccatgtgcggcggcgccatcctctccgacctcatcccgccgccgcggcgggtcaccgccggcgacctctggctggagaagaccaagaagcagcagcagcagaagaagaagaacaagggcgcgaggaggctgccactgcgccaagaggaggaggatgatttcgaggccgacttcgaggagttcgaggtggattccggcgagtgggaggtggagtccgacgccgacgaggccaagccgctcgccgcgccccggagcggcttcgctaaaggtggattgaaaaacactactgttgctggtgctgatgggcctgcagcaaggtctgctaaaaggaagagaaagaaccaattcaggggtatccgccagcggccatggggcaaatgggctgcggaaatcagagatcctcgcaaaggtgtccgcgtctggcttggcaccttcaactctcctgaggaagctgccagagcttatgatgctgaagcacgaaggattcgaggcaagaaggccaaggtcaatttcccagatggggctccagtggcttctcagaggagtcatgctgagccctcctccatgaacatgcctgctttcagcatcgaagagaagccggccgtcatgtcagcaggcaacaaaaccatgtacaacacaaatgcttatgcctaccctgctgttgagtacaccttacaggagccatttgtgcagattcagaatgtctcatttgttcctgcaatgaacgcgattgaggatactttcgtgaacctgtcctctgatcaagggagcaactcctttggttgctcggactttagccaggagaatgatatcaagacccctgacataacttccatgcttgcaccgaccatgacaggtgttgatgactccgcattcctccagaacaatgccagtgatgcaatggtacctcctgtgatggggaatgctagcattgatcttgctgacctggagccgtacatgaaatttctgatcgatggtggttcggatgagtcgattgacacccttctgagctctgatggatctcaggatgtggccagtagcatggacctttggagcttcgatgacatgcccgtgtcggccgagttctactgaggggtttggggtgtagcaactggtgcctgtatatataaggacaaatggaataaacattctggacatccaagaagcggcatgtgtctgtcgggcgcttctagttgcgctatatagctatgttagtatgttagtatgtgctgtgtctagcttagatgctgaagtctcaagtactatttggcagtgaaactatctatctgtaactgctatatgaggctggaacaagttacttagcttctaccttatctgtacttgctatagtggctgtgaaccttgtggatctgaactctgaagccaatgtttactatat

SEQ ID NO: 29821 - DNA, 1126 bp, Oryza sativa
  Clone ID: UC-OSFLM202106A04_FLI
ctcatctgaattgcaggccaattccagttgagtttctccacagaccacagatatggcttccggcaggatagctctgctctgccttcttggcttgctgctggtagcagcctcaccggctgccattgctgccaaagatgacaaaatcttctaccagattactttcatgtggccgggagcgtactgcgcgcagacgaaggccggatgctgcatgccgaagaccgacgtcgcgccggcgtccgacttctacgtcgccggcttcacggtctacaacgccaccaccaactcttccctgtccagctgcagcaacactccattcgacatgaaccaaattggggatgtcacgaggctgatgcagtactggaacaacatcaggtgccccagcaagagcggccagaagggctggaagaacgcgtgggagacgtccggcgtctgctccgacctcaccgagagcgcctacttcgacaccgccctcgccctccgcgacaagatcaaccccctttctcgcctcgtcagcaacggtattaagccggactttgggctgtacagcgtgaagaagatcaaggaggtgatcgaggaggggatcggcgcgccggcgctgatccagtgcagcaagggcccgttcaacaagttccagctataccagatatacgtctgcgtcgcggaggacgccaagacgttcgtggagtgccccagcccgaggaagccgtacacctgcggcgacgacatcctcttccaccctttcaagaagtggatgctcaagaccaactccaccaaatcctacgccgccgccgacgccatcgaccagctgctcgaagcggtcatggaaatctgagctcgatcgatcgatcgatcaagaagacaaattaacccttgttgtgatatgcgatttgtgcgtgtgtgttgtctgtttcgatcgtgatgttttctgcgtgtttatttcgtgatgttctctcatcgcgcccgcgcgcggttgggtacgatccgggacacctacgtagcactgaatccgtctctgtgatgcattcagagaataagtccgaatatgtgcggccttgttaatgttttcatgaataactcgtgtagtgggattactttgtcatcggacatttcatgatttccgatgcac

SEQ ID NO: 29822 - DNA, 1507 bp, Oryza sativa
  Clone ID: UC-OSFLM202107H10_FLI
ggagtaggagtaggagtgacgcctccggatttcccacgcctcgacgaacccccacaaccccgagatcgatcgggaggaggacgaccacgcccttcacctgcccccaaatcttgccccgatctcccccgaccgcggcaatgggggccgcctccgacgacgccgtcaagcagctcgccctcctcatggaccaagtggaggcgccgctgaggaggacgtttcagaatgtgcaccagggctatcctaaagaaacattattgcgtttccttaaggccagagagtggaacgtatctaaggctcataaaatgcttgtagactctttgaattggaggattcaaaacgaaatcgatactgttctggagagacctatagtcccagtagatttgtacagatcaatccgtgattcacaacttgttggactctcaggatacacaaaggagggtctcccagtttttgccgttggtgttgggcagagcacatatgacaaagcttcggtccattactatgtgcaatctcatattcagattaatgagtaccgtgatcgtgtaattttgcccatgttgacggaaaaatttgggcggcctgttaccacctgtgtaaaagttttggacatgactggcttgaagttgtcagcactgagccaaatgaagatgttgacttcaatctcaacggttgatgatttgaactaccctgaaaaaacggagacgtactatgtagttaatgttccctatatattttctgcatgttggaaggttgtgaaacccctgttgcaggagaggacaaaaaagaaggttaaagttttgcatggttgtggaagagatgaacttctgaagattatggactattcatctcttccacatttctgccgccgggagggctctggctcatccaaacattcatctactgacgctgatgactgctactcacttgaccatcctttccacaaagagctttatggtcacattgaggagctagcatcgtgcaaggaactcatcaagatgggatcattacatgtcagcattcccgagcctgaccccgatgacgcaaagattgttgaggtcatccaagctgaattccagaagatcggtgagcagaatggatccgccaatggtcacaaggtttagccaaaacattggccatctgcagaacaccttaaccagtgctggtgacttctgaatctgatgaagttgattactactgtccatgtcagtaattttgttgacaaccccccattttctggggggaatatagcagcagcagcagcagcaaggtcttgcatcattatattcccatgatgatgcaaataaacagtggtgcagccttgagttgatagaggaagagatgaaccagtcaccagtgtatatgaaattagatggaattgaaagccataaacatgtttttgttagtgtaacttacatatgttaaagctgttacaaggaaatccatggatgttgaaagacttctttaaaaaaaaaaagctgtcataagcttgagcgcatagttttgcacc

SEQ ID NO: 29823 - DNA, 1579 bp, Oryza sativa
  Clone ID: UC-OSFLM202109F02_FLI
cagaagcagcttcccttccttccgtatagtgtaacgtacgcatcaccacctcgcgggctggagatggagaaggagtaggagtaggagtgacgcctccggatttcccacgcctcgacgaacccccacaaccccgagatcgatcgggaggaggacgaccacgcccttcacctgcccccaaatcttgccccgatctcccccgaccgcggcaatgggggccgcctccgacgacgccgtcaagcagctcgccctcctcatggaccaagtggaggcgccgctgaggaggacgtttcagaatgtgcaccagggctatcctaaagaaacattattgcgtttccttaaggccagagagtggaacgtatctaaggctcataaaatgcttgtagactctttgaattggaggattcaaaacgaaatcgatactgttctggagagacctatagtcccagtagatttgtacagatcaatccgtgattcacaacttgttggactctcaggatacacaaaggagggtctcccagtttttgccgttggtgttgggcagagcacatatgacaaagcttcggtccattactatgtgcaatctcatattcagattaatgagtaccgtgatcgtgtaattttgcccatgttgacggaaaaatttgggcggcctgttaccacctgtgtaaaagttttggacatgactggcttgaagttgtcagcactgagccaaatgaagatgttgacttcaatctcaacggttgatgatttgaactaccctgaaaaaacggagacgtactatgtagttaatgttccctatatattttctgcatgttggaaggttgtgaaacccctgttgcaggagaggacaaaaaagaaggttaaagttttgcatggttgtggaagagatgaacttctgaagattatggactattcatctcttccacatttctgccgccgggagggctctggctcatccaaacattcatctactgacgctgatgactgctactcacttgaccatcctttccacaaagagctttatggtcacattgaggagctagcatcgtgcaaggaactcatcaagatgggatcattacatgtcagcattcccgagcctgaccccgatgacgcaaagattgttgaggtcatccaagctgaattccagaagatcggtgagcagaatggatccgccaatggtcacaaggtttagccaaaacattggccatctgcagaacaccttaaccagtgctggtgacttctgaatctgatgaagttgattactactgtccatgtcagtaattttgttgacaaccccccattttctggggggaatatagcagcagcagcagcagcaaggtcttgcatcattatattcccatgatgatgcaaataaacagtggtgcagccttgagttgatagaggaagagatgaaccagtcaccagtgtatatgaaattagatggaattgaaagccataaacatgtttttgttagtgtaacttacatatgttaaagctgttacaaggaaatccatggatgttgaaagacttctttaaaaaaaaaaaagctgtcataagcttgagcgcatagttttgcacc

SEQ ID NO: 29824 - DNA, 2221 bp, Oryza sativa
  Clone ID: UC-OSFLM202110H05_FLI
tcgaacaggggtagggaagcgattaaccggcgatcgatcgatcgatgcaagtgatcgcgctcggttgatccaggaattggagagcatcggctgatcgagagatggcggggaacgagtggatcaatggctacctggaggcgatactggacagcggcggcgcggcggggggaggtggaggcggcggaggaggtggtggtggaggtggaggtggcggtggaggtggagggggagggggagtcgacccgaggtcgccggcggcgggggcggcgagcccgcgtggcccgcacatgaacttcaatccgacgcactacttcgtggaggaggtggtgaagggcgtcgacgagagcgacctccaccggacgtggatcaaggtcgtcgccacccgcaacgcccgcgagcggagcacccgcctcgagaacatgtgctggcgcatctggcacctcgcgagaaagaagaagcagctggagcttgagggaatcctgaggatttctgcacggaggaaggagcaggagcaggtgcgccgcgagacttcggaggaccttgcagaggatctgtttgaaggcgagaaggcggacaccgtcggtgaattggcacagcaagacactcccatgaagaagaagttccagaggaacttctcagagctcaccgtcagctggtccgacgagaacaaggagaaaaagctgtacattgtgctcatcagtcttcatggtctagttcgtggcgataacatggaacttggtcgggattcagatactggaggacaggtgaaatatgttgttgaactcgcaagagcacttgcaatgatgcctggcgtgtacagagtggatctgtttactcgtcaagtgtcatctcctgaagtggactggagctatggggagcctactgaaatgttaacctccggttccactgacggagagggaagcggtgagagtgctggtgcgtacattgtgcgcattccgtgcggtccaagggacaagtacctccgtaaagaggccctgtggccttacctccaagagtttgtcgacggagctctcgcgcatatcctgaacatgtccaaggctctgggggaacaggttagcaatgggaagctggtcttgccatatgtaatccatggccactatgccgatgctggagatgtcgctgctcttctttctggtgcgctgaatgtgccgatggttctcaccggtcattcacttgggaggaacaagctggagcagatcatgaagcaagggcgcatgtcgaaggaggagattgactcaacttacaagatcatgaggcgcattgagggtgaggagctggccttggatgcagcggagcttgtcataacgagtacaaggcaggagattgatgagcaatggggactgtatgatggctttgatgtcaagctagagaaagttttgagggctcgtgcgaggcgcggagttagctgccacggccgttttatgcctagaatggtggtaattcctcctgggatggatttcagcagtgttgtggttcctgaagataccagcgatggagatgatggcaaagactttgagattgcctcgccgaggtcactgcccccaatctgggctgaggtgatgcggtttttgaccaatccccacaagccaatgattctggctctgtcaagacctgatccaaagaagaacatcaccacccttgtcaaagcatttggagaatgtcgcccactgagggaacttgcaaacctaattctgatcatggggaacagggatgacatcgatgagatgtccgctggcaatgcaagcgtcctcaccactgtcctgaagctgatcgacaagtatgatctgtacggaagtgttgcattccccaagcatcacaagcagtcagacgtaccggagatttatcgcctcacagggaagatgaagggcgtcttcatcaatcctgctcttgttgagcctttcggtctcaccctgatcgaggctgcggctcacggtctcccgatcgtcgccaccaagaacggcggtccggttgacattaaaaatgctctgaacaatggactgctggtagacccgcatgaccagcacgccattgccgacgcgctgctgaagctggtggcggacaagaacctgtggcaggagtgccggaagaacggcctgcgcaacatccagctctactcgtggccggagcattgccggacatacctcaccaggatagccggatgccggatcaggaacccgcgctggctgatggacacgccgtc

SEQ ID NO: 29825 - DNA, 511 bp, Glycine max
  Clone ID: UC-GMRONOIR068E09_FLI
ctgaattgaatatcgttgaagattcaacattatactcagaaattgagtgttgtgaccttctgaggcggatacatgaaggaaacaagtcaacaggggggcttaaatttgtaacaacttgctatggaatcatcgggtttatcaaatttcttgagccatattacatgctgcttataacaaaacgaagaaagatcggcacaatctgtgggcacactatatatgctatcacaaagagcgaaatggtcccaattcctcatgctactgtgcgatccaaaatggcttattctaaggatgagaacaggtctttagtcaattttgcatgtaattgtaatgtgtctatggtacatttaaagagacatgtagacagtagcattgagagctataccttgtccattgtacttagatgttatgaattacaattttttaatttgagttcattatattgtgcagtgaaaacattctgttagagcatagttgtgttgaaattatacattttagactttttctttgtact

SEQ ID NO: 29826 - DNA, 1514 bp, Glycine max
  Clone ID: UC-GMRONOIR068F07_FLI
ctttgttcattaaagcatctgcaataaatgtggaaacatatgaatctgatagaataattgatcttcctggccaaccttcaagcccatcagtctcacacttttcaggttacatcactgtcaatgaaaaccatggaagggcccttttctactggttctttgaagctcaatctgaaccatccaagaagcctctccttctctggctcaatggaggacccggatgctcctctattgggtatggtggagttgttgagattggacctcttatagtcaacaaaaatggggaaggactacatttcaacacacactcctggaatcaagaagcaaatttgttatttgtggagtcacctgtgggagttggattttcttatactaatacatcttctgatctcaccaaattagaggataattttgtggctgaggatgcctacattttcttggtgaattggctacaaagattcccacagttcaaatcccgggacttttttatatcaggagaaagctatggtggtcactatatccctcagcttgcagagttaatctttgatcgaaacaaagatgggagcaaatacccctttattaatcttaaaggttttattgtagggaacccagaaactgatgattactatgactataaaggccttcttgaatatgcatggagccatgcggttatatcagaccagcaatacgacaaagcaaaacaagtatgtgattttaaacaatttgattggtcaaatgaatgcaacaaggccatgaacgaagtcttccaagattactcagaaattgacatatacaacatttatgccccgtcatgtcttctaaacagcacatcctcaatagctgatgatagcaacggtaacggccctgaatcatttactaaggagagaaatgattatagactaaagaggatgagaatttttgggggctatgacccttgttattccaattatgtagaagaatacttcaatagaaaagatgttcagtcatcttttcatgcagatactaaaagagacactaacgtagcatggaaggtttgcaataattccatattgaggacttacaacttctctgttttctcggtcctacctgtctacactaaactcatcaaaggtggccttaagatatggatttatagtggagacgcagatggaagagtgccggtgataggaacacgatattgcgttgaggctctgggattacctttaaagtctaggtggcgaacttggtaccatgataatcaggttggaggaaggatagttgaatatgaagggttgacatatgtgacagtgagaggagcaggtcacttggtgccactgaacaagcctagtgaagctctctctctaattcattctttcttaactgggcaacatcttcctactactcatggataatcatcgtaatatatgtacaattgtgccagtattttgggttggcaatttttctctcaagaatgaaaacccgtgtatgatcaatataaataaatgaataacaatgacatgtagacatcccttaactac

SEQ ID NO: 29827 - DNA, 818 bp, Glycine max
  Clone ID: UC-GMRONOIR070C07_FLI
tttgcatttgtgatctatgacaacaaggatggaacagtttttgttgcatctggttctaatggccatattgggctctactggggtattgcaggtgatggttctgttataatttctgaaaatctggagcttataaaagcaagttgtgctaaatcatttgcaccatttccagctggtatgtaaacttggtttctctctacctttgcaaaatcagattttgtaactttagagtttggaaaaattacaattaataaaggatttcataatgtgcaatcaaatattgtagcattgattctaaaccaccgttcggattacatgtcaaagtaatacaattataagacattgatattggaagagtaactacatttcaaagagtgatttgtgtctagattctagaatttaacgcatgaccgggttgaaattgcagggtgtatgtttcatagtgaacacggtctcatgaactttgagcatccaacacagaagatgaaagcaatgcctcggattgacagcgagggggttatgtgcggggccaacttcaatgttgactctcagtcaaagatccaggtgatgccacgtgttggaagtgaagctaattgggcaacttggggctaacaagcttagctgattcttagtccagcatttttctttctaagtggttaaaagtgtaacctaatatgatgagtgtgtgactctttgcttttagcccgtttggatatctgcttttctcgtttggttccattgttgtgtacatattcatacttcaatattgaacatgactatggtaatttctaatatgaataacaagttttagtttttgactt

SEQ ID NO: 29828 - DNA, 2685 bp, Glycine max
  Clone ID: UC-GMRONOIR071B03_FLI
ctcggttctcccgcctatccaattcttgaatccgctaaccccaactccttcttccctcattttttcatttttcatttttcacacacaacacaacactttcgcatgttttgttgatgtttcctctctcgctctctgcaaacaataatggacacgccagataggagcaagatcaacacccctctttcccaatttgaggattcgcctgtgtttaagtatatcagtaatctatctcctatagagcccgttaaatctgttcacgttactcagacattcaactcatatagcttttcatcccctccatctgttttcacatcaccccatggcaactgtcacaaggaatccagattcctcaggaggcataaccttttggagacatccaaacctaaggtttcgtctgaagatgtaaataatgtttattcatgtgaagagactcctgcagattcagctcaagcatgtcatgaatcaagtgagcaacaggaaaatactgctcaaaagatttccgttgcagatgcctcaattgagccatgtaatgaaaataaaaacccaaatatctcaattgagcttccacaagtcttaaaatataatttgggtagcccagggtatgaacctctactctatggtgatgaggctaattctcttttggaattgcctggcaatggcaagccagcatcagatgttgcttctgttccagaaggctctgaaaaagattcaattgagggtgaaatgcatcttccgggattatgtcagattgaggaggcaaaagttgaaggccaagattgtggtgtggatagtttgattactgaagcctctgatctgttaatgtttagtcccccagaagcttttaagggtttaaataaacaattaaatccttcaattgagcttagcaatattatgactgtgataccacaatttgccaccaatgatggtcaacaaatgcacattggtaatgcagttgcttctggttcagaacatgaaattgaagatcatccttctgaatcagcagctgccacaggcacaagtcagagacaggacaatcttggcaatcttgctttggtgactagcaatccaagtgaaaagatggataataagcttgtttatgtgacacaccgtggtatacggagacgctgtctagattttgaaatggccagtgtgcaaaggaggaacccagctgataattcaaacaccaactcaagtacagcaaaatctgaggagaggaatgttagtaatgaaaagcaactgcttcccacaaaacacagtggggattcacggagatgtgttttgccaggaattggtttgcacttgaatgcacttgcaagcttaaaggattgcaaaaacataaaaattgacacattgtcatctggaaggcaacctaatctgctcagctctccttcatctgtgcaactctctccaagccaagaacatcaactatcattggtacctgcatcagtggaaagagatttggagccattggagaatgaggttcagcctggtgaagattgtacccagtcattggtattggttcagatggctggtgaagatttccagcagaatagtccgaaaaagaaaaggcgcaagttggaaccagctggggaaggggagtcttgcaagcgttgtaattgtaagaaatcaaaatgtttgaagctttattgtgagtgctttgctgctggagtctactgcatagaaccttgtgcatgccgcgattgcttcaataaacctattcatgttgagactgttcttcaaactcgccagcagattgagtctcgtaatccacttgcatttgctcctaaagtcatacgaagttctgattctgtatctgaaattggggatgaccttaacaaaactccagcctcagcacgacacaaaagaggatgtaattgcaagaaatcaagctgcctaaagaaatattgtgaatgctatcagggtggtgttggttgctccgtaagctgtagatgtgaaggatgcaagaacacatatggtagaaaggatggttctgttccttctggattagaagccgaacctgaagaagaaacagaagcatgcgaaaagggtgtggtggaaaatgcttcatggaaaactgaaactcagaataccgaagaccatcccgaccaatctcttgctacaacaccattaccgctttccagatcattgcttccattatccttttcatcaaagggtaagccaccaagatcttttgttactaccatctccagttctggattgtttgtgagccaaaagcttgggaaatcaaatgctccgcggtctcaacatcaacccaaatgtgtaaagcctttgcaaactgttccagatgatgactctcctgtcacctgcatcaaaacttcttctcccaacggcaagaggatctcctctcctaattgtgacgtgggatcatcacctactactcgcagaggtgggaggaagttgatattacaatctatctcttcatttccttctctcacccctcaccattagaatgaagatcttcttcttcggcttaagttagcctacccccacccctcttcccttggttcacgttttcagtttgttgcagttggagctgtatgcttagggtgaatgtacatgattgagtttcgttttactttcgtaatatgtttgttccgttcatttcataatgtacaacttcagttcagttgtataatatctatcttaactgatggttatcatcac

SEQ ID NO: 29829 - DNA, 726 bp, Glycine max
  Clone ID: uC-gmronoir071g02_FLI
cagtgagcagttaagtggtgttatgcctgtgtctcctgctgaagatgacatcactcattctctaataaatagagatagctttggacattacaatatgggtggtattgcagaggtattattggcacttgagaggattgaacaagatgcagaactaacccatgagcaaattcttttgttggagaccaacttattcctcaatggattaaacttttatgatcaccacagaggcatgcggttggatattgataacatgtcctatgaggaacttttagctctagaagagaggatgggaactgtgagcaccgctttgccggaggaagcatttgctgaatgtcttaaaagaagtatatatcagtctgcatatacacatgagtgttgtaatgaggataaggatgatatcaaatgctgcatttgccaggaggaatatgttgttggagatgaagttggggatctgcaatgtgaacatagatttcatgtggtttgcatacaggagtggttgcggcataagaactggtgccctatttgtaaagtctcggcagcaatgtccaattcatcttcacctcattgattgcattgttcctttcttttacttttcattttgtacaaaatacagatatagatgctctttacctcttcttattgatcgtatgtacatacatagccaatgtcttcatccataaaaactaataaccttagcccctggcttgatggactcttgaacgtgct

SEQ ID NO: 29830 - DNA, 1285 bp, Glycine max
  Clone ID: UC-GMRONOIR073B09_FLI
ccacaggagagtttagagagaaaaataaatcttctggagaatgagttgagttcttttagtgagaaagaggttggacttgaaacaagaattgcacaattgcagagtgagaataattccttacttcaaaaagaggctacattggtggaaagaaccaatcaattgctgaatgaaaaggcagttttgagcctgaaaggggagagtttagaacaaaaaatatatcttctggaaagcgatttgaattctttagtcaagaaggagaattcaactaaagaaactatttcaaacctgaatggaaacattgctgtgctacaagcgcaggtggaagaattggaggagtccaggaataatctttttctagaaaaccagcaattgagggaaaaagtgtcgagtcttcagtcaacggtccaaaatcatgaaaacagtaacacttcttcctgctcatgggatgcatctgtaaaggatcttgcttctgaaaacgaggacttgaagtctgaaattgaagcagcctttacgttggtggagaaattgatggctgaaaatgcagaacttgttgagaaggtcaccgagttatgtgttgagctggatcaccgaagtgcagaagtcggacattctggagtcactgaatccaatgggatgactgaatttgttaaacctactggtgttgccattcctctaccagaatctgctgagtatgcgtctgtatcatcccccaagttgaattcattggaagagacttcagtgaaggataatggtaactctaatgatgctaagcatgttgttggggtaacgtcaaactcgtcgttggtatcggctgatgacgctggagaaatcgtgcaaattccattggatgataatgaaatacaagatatagagttgcaggatgctaagaatgtggaaaatgatgctgatgctgtgccaatcacagatgctccgcttatcggtgctccatttcgtttgatatcatttgttgctaattttgttagtggtgctgacttggttaaccaaagctcttcaaacactgctcgttgacttggttgaccaaagctctgttttttttggctggcagtcttgaacatacaataacctcacttacattaggcagaataccaatataggttggcctaatttgggccattttaatgtttgtatgttaattctttgaacacggaaatattgtactggggaaaagcatatagttttatgtgttcttacttcatattgctttcacttttggaaattatacctttaaaaaatggcatcatgaatagacatgcattaattggtg

SEQ ID NO: 29831 - DNA, 789 bp, Glycine max
  Clone ID: UC-GMRONOIR074F07_FLI
tgacatttacatgtgtcctaagattatcttcacaactaataggaatcaatactttcgtttcattttgcaggatggcaatgacgaacttcgtcgatcacctggcactccagttttcactgcaccagaatgttgtttaggtcttacttatcatggtaaagcttctgacacgtgggcagtaggagttactttgtactgtatgattttgggtgaatacccatttcttggagacacacttcaagacacatatgacaaaatagtcaatgatcctttagttctgccagaggacattaacccccagttaaagaatttaatagaaggattactatgcaaagacccagaactaaggatgacattgggcgatgttgctgagcatatctgggttattggagacgatgggccaattcccgggtacttatgttggtgcaaacgtaagagcatggttactgaagattctgatgggagcgatatacttgattgacccacactgattctaagttggatttcttatgtacagtgaaaaggcccattaatttttccccacggagacatgttatgattgtagagggagtctccaaagaatccttgggaattaagaaaatacagctcatgttgccaacgataagtagtcaactaagtcatgtttatttttgtgttgaggagcattttgtgtcttctacggacttagaggtcttgtatatacagctctttcgcatagaatgagttttttttgtttgttttttttatttctcaaacacgtgccgaattgtgttcagttcatactctttatac

SEQ ID NO: 29832 - DNA, 571 bp, Glycine max
  Clone ID: UC-GMRONOIR078D08_FLI
gtgaaaaaagaaatatgggtgctttcactgagaagcaagaggctttggtgagtagctcattcgaagcattcaaggcaaacattcctcaatacagcgttgtgttctacacttcgatactggagaaagcacccgcagcaaaggacttgttctcgtttctatctaatggagtagatcctagtaatcctaagctcacgggccatgctgaaaagctttttggattggtgcgtgactcagctggtcaacttaaagcaaatggaacagtagtggctgatgccgcacttggttctatccatgcccaaaaagcaatcactgatcctcagttcgtggtggttaaagaagcactgctgaaaacaataaaggaggcagttggggacaaatggagtgatgaattgagcagtgcttgggaagtagcctatgatgaattggcagcagctattaagaaggcattttaggatctactattgccgtaaagtgttataaataaattttgtttcactaaaacttgttattaaacaagtccccgatatataaatgttggttaaaataagtaaattatacggtattgataaac

SEQ ID NO: 29833 - DNA, 962 bp, Glycine max
  Clone ID: UC-GMROPIC0001B08_FLI
caagagcaaggctgtgtctacgagcagctggtgagttggagaagcagaaacgcaaaaacgaggacaaaatcatgaaggagattcaggataaagccttgacaagcatgaaagagcttcaaaattacaaaacaacatgtgagatgcacaaggggaagggctattacgatgccttcaaggtgcaaaaggagtcgaacgacttccaagcaaacgtgaagaggcttgtgctagcaggggtatgggatgaagtcattgagatgctaaagaggtatgaactccctgatgagttcgaaggggacaaagaatggataaagcgtggaaccgaatatcgccgccttgtggagcctctagacattgcaaactattaccgccacttgaagaatgaggacacaggaccttacatgatcagggccaggccaaaacggtataggtacactcaaagatggttggaacatgctaaaaggatgccacctgctcctatcactgaatcaaccttttgggctgaagtggaggaactttatagctggattaacagcaagaagcctcttgatgatcatgtcgagcaaagggttaagcagcttcaaaaagaccttaaaaattggactgatgatgagaaagtactagccaaggatacgttcttgaaggatcctaactttattaggtggaaggatattctacctcaggaactcaaggacacttcttcctagctagtctagttactgctgtgaaaggattctgtattagtcttttttccactcaatgaggaagctataagcttctgatgtttttgatgtgtatttgtcatgcaggtgtagtgttggttacttcagtgttgtaactttgtatttgtattcctaatgtttttgattcccaagttatgtattacttgtgagaaccaaaaatcattcagactgctggactaaataaatttgtttaatagtagggtctgaactagagcggtactc

SEQ ID NO: 29834 - DNA, 1973 bp, Glycine max
  Clone ID: UC-GMROPIC0001B11_FLI
tatgaggtgtttttggttgtgaaaaatgacgagggtgactcgtgattttggtgatacgatgcaaagagaggctgtgccagcggtttcttctgatgtggtgtttgcttctgctcggtttcctaattacaaaattggagcaaataatcagataatggagacaaagggtgacccaaaagtgatatcaatgaaggaggttgttgcacgtgagactgcacagctgttggaacagcataatcgtctctcggttcgcgaccttgctagtaaattcgagaagggtttggcggcggcggctaagttgtctgaagaggctagacttagagaggctgcatcattggaaaaacatgttcttttgaaaaagcttagagatgcacttgaatccttaaaagggcgtgtggcaggcagaaacaaggatgatgtggaagaagctattgctatggttgaagctctagcagttcagttgactcagagggaaggggaattaatacaagagaaggcagaggtgaagaagcttgcaaattttcttaagcaggcttctgaagatgctaagaaacttgttgatgaggaaagagcttttgctcgtgctgaaatagaggatgccagagcagcagttcaacgagtggaagaggcacttcaagaacatgagagaatgtctcaagcttccgggaaacaggacatggagcaattaatgaaggaggttcaagaggctcgaagaattaaaatgctgcatcagccaagcaaggtcatggatatggaacatgagcttcgagcattgagggctcaactcgcagagaagactagacagtatcttagacttcagaaggagttaacaaggacgaagaaaggtggggaaaatgttccacatttatatgaacttgaagggaatgaaacattaggttcttatttgcaaattcaaccttgctctgataatgcccctgaagtttcaagatgtgcaattcagtggtattgtgtgtcgtctgatggtgccaaaaaagaacttatctcaggagcaaccaaatcagtttatgcccctgaaccttttgatgttggacgcatattacaagttgatattatttcagaaaatgagcacatcacactttcaactgctggtccaatagatccagctgctggtttgggaacgtatgtagaggcactaatgcgcaaacatgacgctgaattcaatgtggttgtaacgcagatgaatggttcacatcatccaactgaatctattcatgtgcttcatgttggtaagatgaggattaaactttgtaaaggaaagacaacaattgccaaagaatactattcaagttcaatgcagctttgtggagttcgcggaggcggaaatgctgcggcgcaggcactattttggcagccaaagcaaggtcattcttttgtattagcttttgaatcagagagggaaaggaatgcagccatcatgcttgcaaggagatttgcatttgactgtaatatcatgcttgctggaccagatgacagagctcctctagggacatgatggtcctccttaacatctgattttcttccccttttgtaattatgagtttttctaccttgtattataagtgttatttcaccagtaaaatctgccttgttatattggtaagttagtaatgattcacaccttgtggtatgaatcatttatataattttgtttcatcagtccaaggcatttttttatttgcctctgtgagacgcaagttttagcttacattataattattatagattccatggctgccgtctcaaagtgtttgagatgctaattggttgtatttgatggacagacattcagacaattactgagaactccaattgcattttgtctatggacactggcctcgtgaacaggacaatatgtgaatctaccctcattatgtaatataatatagaagactccaatgtatattgctagatttatctcaaaagaatccaatgtagtgtccaagatactataaaat

SEQ ID NO: 29835 - DNA, 2604 bp, Glycine max
  Clone ID: UC-GMROPIC0001F04_FLI
caaacaacgcaaacgcttctctctctctctcactctctttctttctctatacaacttggaagctttctctctctaaaagcaagcaaggtcctccaccaccacctccagtctccctctttcacacagagaaatactgtgtgtgagaccagttttcggttcatggattccttttctcttctacaattccaaacatctattcttggttcgaacaagttttgggcttttggtggtaatgtggtgggttgagtgattcctcttgttgcatagctatggctacagattcgtcttttgagggccttgcacttgatccttctaagtgcagtaaattgagtatggaggaaaaaagagaacttgtatatgaagtatctaactggtcgcatggtgcatctgagatgctgcagtcatggagtcgtcaagagattttgcaaatattgtgtgcagaaatggggaaagagagaaagtatactgggctgacaaagttgaaaattatagaaaatcttctaaaaattgtttctgaaaagaaatcaggcgggaatgaaactgcgacagaccctgaaccacaatcttctcctgcacctggtcagaagcctgccaaaaggcagagaaagtctgagaatccttcacacatccctgttcctgcgaccagcgttccagtcaataatggtggtgattctattaataccacattctgcaaaaactcagcttgcaaagctaccctgaatcaatcagatgcattttgcaaaagatgttcatgctgcatttgtcatcaatatgatgacaacaaagaccctagcctgtggttaatatgtagttctgagaatccatttcctggtgtttcttgtggcttgtcatgccaccttgagtgtgctttaaaacatgatggttcaggaattggcaaggatggtgagcgtcccaagcttgatggaggcttctactgtgtctcttgttggaaaataaatgatttactcggatgctggagaaaacaactgatggtagcaaaggatactagacgcgtagatatactctgttatcgtgtctccttaagccaaagacttttacaaggaactgaaatgtatgaagaactttataaaattgttgatgaagcagtgaagaaacttgaacctgaagtgggtccactcactggctcaccggtgaagattggaagggggattgtgaacaggctttcttcgggacctgaggttcagaaactctgtggttttgctctggaatcacttgattcactatcgaaaaggatcttgcctttgtcacccaagccaacaaatcaagatgcatatttgctcgctccaaatatgttgaggtttgaagatgtcactgccactaccctcactattattttgggttctgaagaaccctctggtgaaattcttgctggttacaccttgtggcatcgcaaagttgatgatgtggactatcccatggacccaacttgcacctcgctcttaccaaatagaaggttcagtgtctcgggcctaattccaggtacagaatacagtttcaaagttgtttccaatgatttgagggagtcaggtatgtgcgaagttcaagtctcaacagagcatggtgaggaagaagtccctaattgctcagcaactgaaagaagtcagagcccggtaaccaactgtagcagcctttccaatccatcatccgtggaagatgaaactaataactgtaatccatatagtgacctgactgataaccgagcagaccattatccttcttatcacaaggatagcaacaaacttgcttctggaaatttatccaatgatgctattaactgttccaatctaggtggtgcgggacttcctcctgatgcagattctttgtcagacaaacagcatgctggaggaacgactgcctccatacctagttctgatgtgctaaagctcgaaaacaagcattcaccagaggaacaaatcactgaggacatgagcaccgatgatgggttgatttccccagctctaacagggagggaatgtgtgccgttagtgggtagctcggaaggaggcttgcctaatactccctgcaagttggaaacacttaaggatggacctggaaagaataaaagatctaagtccagtggcaaagatcaagaaaatgtatccgggaaaagggagggtccccaagatggaagcacatccaagaagagaagtggagaaaggcaagaggagggccgtgttgcaaatggcttttcggatcgtgattttgagtattatgtgaaggtgattaggtggttagagtgtgaaggtcacatagaaaagaacttcaggcagaaatttctgacttggtacagcttaagagccacccctcaagaagttaggattgtgaaaatatacattgatacatttcttgaagatcctgcatctcttgcagagcaacttgtggacaccttctcggaatgtttgtccagcaagagaacatcagttgtgccagcggggttctgcatgaagctttggcattgaccagattttgtaggtccagctactagccgcaagcttgccatgcagtaattctttagatttttaatatattcttcatttagacagttcaaatacatatatttatttcaacattatcattcatatg

SEQ ID NO: 29836 - DNA, 1082 bp, Glycine max
  Clone ID: UC-GMROPIC0001G04_FLI
atccgtaacacgagcacggaagctgccaaatgatgagataacaagttgcaaattggccataagcaatcgatcaagattggaaccgcctcttccacatgagtactttggaaacgcagttgatgtggtgagcactgcagggttcacggcaggggaattgcttgagaaggatctaggatgggcagcatggaaggtgcacgtggctgttgcgaaccaaaacgacaaagcggtgagacaaaagctcaaagagtggttgaagcttcctgtggtgtaccaacttggtgtgcactttgatccttgtactgtgaccatgtcgagttccccgaggttcaacatgtatgggaatgaatttgggatggggaaagcgattgcagttctgagtggatatgccaacaaaaatgatgggaacgtgacagcataccaaggatatgaaggagagggaagcatagatttggaaatttgcctttcgcctgatgcagtgagcgcgctggaatcagatgaggagtttatggaagctgcttctgtggccaatttcctacactagatagtgaaagctttttgagaggctatgagattcattaattcacaaagcgctctctgccaccgtttcactcactctgctctcttcgactcttctaaagtggattatgggaaaatcacatttactggttagatgagagatctgacaatagaattagttagcacgctgtacattttaagctttgtgtgtaagagagactggcccagcgtgtgtaggaacatcatatggttaagatctcttagtcttatgttgaaattatgcatcaatcgaggagaaagattttaaatgttgagtactgccagaaagaattgggagaaatgtagaggaaggatcacttggagccatttgggagaaatattcagcagatcttcaattcggttcgggcaagcagatttttcttccgtgactaatgaacggcacttggctcccgagtaataaagttaaagcatccgtactttggttcgtaaaaagtgaaaatttctaatttgaatgtttgattttaaaacataagttaaattagattattcatcttctcatctgaatt

SEQ ID NO: 29837 - DNA, 1947 bp, Glycine max
  Clone ID: UC-GMROPIC004A12_FLI
gggcattgacagcaggccaagcttatgaggcaatgaacaatgcagggttccttgattctaacatgatagttgtacttaatgacaacaaacaagtctctttaccaactgccacacttgatggtcctgcaactccagttggagccctcagtagtgctttaagcaaaattcaagcaagttctgaattccgcaaactcagagaagctgcaaaaaccatcacaaagcaaattggaggacaaacacatcaggtcgctgcaaaagtagatgagtatgcaagaggcatgatcagtgcttctggctctactctttttgaagagcttggcttatactacataggtcctgtggatggtcataacattgaagatctggtcaccatctttgaaaaagtgaaagcaatgcctgccccaggtccagttttgattcatgttgtgacagaaaaagggaagggataccccccagcagaaaaagcagctgatagaatgcacggggttgtcaagtttgacccaaaaacaggccagcagtttaaggcaaaaacctctacactttcttacacccaatactttgctgagtctttgataaaggaagctgaaaatgacaagaagatagtggccattcacgcagcaatgggtggtggtaccggcctaaattatttccataaaaggtttcccaagcgctgtttcgatgtggggatagctgaacaacatgctgtaacatttgcagctggtttagctgctgaaggcctcaaaccattttgtgccatttattcatcattcttgcaacggggatatgatcaagtagtccatgatgttgatcttcaaaagcttcctgttcgatttgctatggatagagctggtttggttggagcagatggaccaacacattgtggagcatttgatatcgcttacatggcttgcctacccaacatggtggtcatggctccttctgatgaagctgaactcatgcacatggttgcgaccgcagcagctatagatgatagaccaagctgctttagatttccaaggggaaatggaattggagccactctgccactcaataacaaaggaacctcacttgagataggaaagggaagaattctggtggaagggagcagagttgccattttgggatatggttctgtggtccaacaatgcagacaagcctcagaaatgcttaaggaactaggcattgatgtgacagttgctgatgctagattttgcaaacctttagatactggtctcattaggctactagctaaagagcatgaaatactcatcacagtggaagagggttctatcggtggttttggatcacatgtatcacaattcctgagcttatcaggtatcctagatgggcctctaaagtggagagcaatgatgcttcctgatagatacattgagcatggatcaccccaagttcagatagaagaagcagggctttcatcaaagcagattgcagccacagtcttgtctcttatggaaaggccaaacgaagctcttctgttcaaataaaaagacaaaatggaacaaggatcttgacctggttccccgaagatgcataaaaaaaatttaagacttttgttggtattgtgctttagaggaagctgtaaataactacactggaattgtcggagtttacatcttgatgctcacatattttggataattggattctcaggtcatcactagtgagtaaagagatgaatttattctgacaactcaaggaaccaatcaaggcatcgtaatgtatcaaaattaattaattatattactgcaattaacacagcacacaagtcttctaaaatcatactgcccaataagcaaaattaaaatacgccactgtctggtagctaaacaatctttccattacattagtcgtgaagttcagcttgtatcacaacttgtgacaatgctggttttctatttttagtaatatgtttcaattttcctatag

SEQ ID NO: 29838 - DNA, 1288 bp, Glycine max
  Clone ID: UC-GMROPIC004D12_FLI
ccgatctcccctaacactctagtctgcccgcaaagacactgctgcagtcgaacatgaggacacgctgtcttcttcgtacttctattatgatgttaagagcttccacaagatctcttttgaccaaagggagataattgagtccttggtggacaagaacataatgggacatggagggtctgggactgtgtacaagattgagttgaagagtggtgatattgttgcagtgaagaggctgtggagtcactcgtcgaaggattcggctccggaggatcggttatttgtggacaaggcattgaaagcagaggtggagaccctgggaagcgtaagacacaagaacattgtgaaactgtactgctgcttctcaagttatgacttcagcttgttggtttatgagtacatgccaaatggtaatctttgggattccctgcataaaggttggatccttttggattggcctactcgttatagaattgcactggggattgcacagggtttggcatacctccatcatgatttgcttcttcctattatccaccgagatatcaagtcaactaatatcctgttggatgttgattaccagcccaaggttgcagactttgggattgccaaggttttgcaagcaagaggagggaaggattccacaacaactgttattgcaggaacatatggttacttagccccagaatttgcatattcatcaagggccaccaccaagtgcgatgtctacagttttggggtgattttgatggaactgttaactgggaagaagcccgttgaggcagaatttggagaaaacagaaacattgttttctgggtttccaacaaagtagaaggcaaggaaggggctagaccaagtgaggtattagatccaaagttgtcgtgttcattcaaggaagacatggtcaaagtgttgcggattgctattcgctgcacctacaaagccccaacaagtagaccaaccatgaaggaggttgtccagcttctgattgaggcagagccacgaggttccgattcttgcaagttgtcaaccaaagatgtatcaaatgtcaccgtaataaagaaaccatacgagttataattataattataatttgagtagcttaaagaaagggtaagaggcagcatatgacaactaagataagcagtctctctggatgtaactgagagactcattgtagagtagagaacaaattagtataatctttttttttttctagacaagtagtttgtagattctatctttgactatgtctcttctctctattgctgctcccttttactgtctttg

SEQ ID NO: 29839 - DNA, 1675 bp, Glycine max
  Clone ID: UC-GMROPIC004E10_FLI
taactaacaggatggtcaagtcatgttgcgttatgtgcttgtgtttgatcttacttcacattttcctgcgctttgtgccaatacagtcagcacctgaaagtgccattgtgacacagattcctggcttcagtggcactctaccttccaagcactatgctgggtatgtgacggtggataagagtcatgggaggaacttgtactactattttgttgaatcagagggtaaaccttccgaggaccctgtggttctgtggcttaatgggggacctggctgctctagcttcgatggattcatatatgagcatggtccttttaattttgaggcagcaaagacaagggggggtcttcccacactgcacctcaatccatacagctggtcaaaggtttccagtgttatatatttggattctcctgctggtgtggggttttcatactcagagaataaaactgattacataactggagacataaagactgccactgattctcatgcctttctccttaagtggtttgaactataccccgagttcctttccaacccgttcttcattgctggagagtcatatgcaggagtttatgtgcctactctcgcttctgaagtagtgaaaggaattgatgccggggtggagcccaaactgaatttcaagggttacatggttggaaatggtgtcacagatgaacaaattgatggcaatgctcttgttccatttgtacatgggatgggacttatcccagatgaactgtttgaggaggttaaccgtgagtgcaatgggaatttttatgatccaacaagtgctaattgttctagcaagctttcaaaagttgatgagttggttgatgagataaacatatataacattctagaaccatgctatcacggcacagaagcagagaagattactgaatcctatattaggatgccatctaccttccggaagttgggtgagaccgaaagaccttttcctgtgaggaaaagaatgttcggtcgtgcttggcccctaagagctcctgtgagagatggaattgtaccaacttggccacaactgatgaatagtaaatctgctccaccatgcacggacgatgaggttgcaaattcatggttaaacaatgaagcagtcaggacagcaattcatactgcacagaaaagtgtggtcagtagttgggatttatgcactgacagaatttacttcgatcatgatgctgggagcatgatcaagtaccacaagaacttaacttccaaaggttatcgtgcacttatattcagcggcgatcatgacatgtgtgttccatacacggggagtcaagtgtggacgagatcagttggatacaagattgttgatgaatggaggccttggtcatccaatggtcaagttgctgggtatacacaaggatacgacaaaaatcttacttttctgaccgtaaagggatctgggcatactgttccggaatataaaccacgagaggcattggacttttacaaacgctttctcgctggattgccaatatgatatagaggaaaagagaagatggagtaacgctgcttcttattttgtttgtactttgttaataataatgatttaaggatgtatgaagacacattttatatttgtgttctatgtttaccttattaatttattaccatattaatattaaactagatgtcaacctagtttgc

SEQ ID NO: 29840 - DNA, 1120 bp, Glycine max
  Clone ID: UC-GMROPIC006B12_FLI
acctcttcgaatccattgatacgcattcgagccctagatttcaatctagggtttctttgcacgctaattccatcttcaaattctgccttcattcgattcaggggggaattaaattgtttctattttttttcgaatttaccacaaattagaaatcgataaagaaaatggtgagggtgttgagaagctgcattcaatcgattttgaagctggtgaactcggtgattgggatggcggggcttgccatgattctgtactctgcatggatgattagggtttggcagaggaagatgggcgaacttccctttggtcacgattctgattacccacctccgtggttcatttacatgtttcttggccttggagttgctttctgtgtaatcacttgtttaggtcatgttgctgcagaaactgctaatggctgttgcctatatttgtatatggtatttgtggttttgcttatcatgctggaagctgcagtaactgttgatgtatttgtaaaccaggactgggagaaggacttcccaaaagacccctccgggagttttgatcagttcaagaattttatcaggtcaaattatgagatgtgcaaatgggtaggcctgtcacttgtttctgtacagggactctctttattattggcaatgatactcaaagcactagggccacatcaatattatgacagtgatgatgaatatgctcctgacagggtgccactcttgagaaatgctccgcctcattatgttgttgttgatccaggatatgtgcatggaattgatgcatggaggagacaagacaaataggtaaggccattttgctttgaattgaaccttgatgcttggagccatggaaggtgggcgtggcaatcattttcgatgccagttgacttagaaggggacctgtatgctggagatggattagctattggattaatggctatgagagaaacaagttcttatcgtgacccttgcatctgttacaccaatttcatacagttatgagcaaacgtatacgttgtatcatatatttttatatttcttttttgggtgaatgtacgaacgtatgtatcatattgattcatgtctgtatatcataaataaaatgcagaatctcttgatgaatg

SEQ ID NO: 29841 - DNA, 945 bp, Glycine max
  Clone ID: UC-GMROPIC006D11_FLI
gttccttgaatacaatggaaccacgctttgttgagtatttccgcctggctacaccagagttggagtatggaaggatgaatattggaagtcgaccagcaaagagaagacctagtgaaggtattgcacgcagtgtttcaatgcctccactaggtcttctctttgctggactcagacaaggtttcatcttccagtgtggctaggctttggagcagcatttaaaaaagtcattgaggaaaatgttaagaatctcaatatgctgcaagagatgtacaatcaatggcctttctttagggtcacacttgatttggtggaaatggtgtttgccaaaggagatccgaaaattgccgctctgaatgatagactccttgtttcaaaggatctgtggccgtttggggatcaattgaggaacaaatatgaagaaactaggaaactcctacttcaggtggctggacacaaggaaattcttgaaggggacccttacttgaagcaaagactcaggcttcgtcatgctcccattaccaccctcaatattgtccaagcttacacattgaaacgtatccgtgatcctaactacaatgtgaaggtgcgcccccgcatatcaaaggaatctgcagaggcaagcaaatcagctgatgaacttgtcaaattgaacccaacaagtgaatatgcccctggtttggaagacacactcattctcactatgaagggtattgctgctggcatgcagaacactggttaagtttgtttgaatactgaaagtgagtgctctagttttgttctcagatacactttttttgttttgttattatgttgccccacctttctgtacaatttggtatgctgctctagaattccagaagagctagctaccacacaaatgaatcaatgacattgatctgttatgtttcttatgcttagtaccgttactacacccttcaaaaaaac

SEQ ID NO: 29842 - DNA, 1362 bp, Glycine max
  Clone ID: UC-GMROPIC006E08_FLI
tcaaaatccaaatctatgtgaatctgatccatgcatccagcagacaaataacaagcagccagatggtgatcaacagaagaacaaaaataatatagttatcccggtagtagcatcagttgctggggttttggtgctcctaataattgtagcagcagctataatctgtggccttaaaaggaaaaaaccacaagcatctgatgtgaacatttatgttgagaccaacactccaaatggatcacaatttgcatccaagcaacggcaatatacattcaatgagcttgttaagatcaccaacgactttaccagaattcttggtagaggtggatttggaaaagtttatcatggatttattgatgacactcaagtagctgtaaagatgctttctccgtcagcagtacgaggatatgaacaattcctagcagaggttaaacttctgatgagagttcatcatagaaatctgacttctcttgttgggtattgcaatgaagaaaacaacatagggctcatctatgaatatatggcaaatggaaacttggatgaaattgtttcaggaaaaagtagtagggcaaagttcttgacatgggaagacagactccaaatagcattggatgcagcccaaggactggaatatctgcataacggttgtaagccaccaataatccacagagatgtgaaatgtgcaaatattttattaaatgaaaacttccaagcaaaattggctgattttgggctatccaaaagctttcccacagatgggggatcttatatgtccactgttgttgctggaactcccggttatttggatcccgagtacagcatatcaagcagattgacagagaaaagtgatgtttacagcttcggagttgttcttttggagatggtcacaggtcagccagctattgcaaaaacacctgataagactcacataagtcagtgggttaaatccatgctttccaatggggatataaaaaatattgctgactcaaggtttaaggaagattttgacactagctcagtctggagaattgttgaaatcggaatggcttctgtgtccattagttctttcaaaaggccaagtatgagctatatagtgaacgagctaaaggagtgtttgactacagaattagctcgaaaatatagtggtcgtgacactgaaaacagtgactcaattgagttggtcactctgaatttcacaactgaacttggtcccccagctaggtaatacattcactgataccaaaaaaatgttcctgaaagcagtggtgtgtttcaatttctgtttgctgtacctgaatttattgcagttttgcatgctcaattcttgtagtcttttattcaatggattaatttttctgctatttt

SEQ ID NO: 29843 - DNA, 2709 bp, Glycine max
  Clone ID: UC-GMROPIC006G10_FLI
gaaagagagagaagaacaaattcaacactcagacacacacaaagtgactcttccgatgatgttaatcggcgacggtgccggttgccggaaagtcctcgtcggcgttaaattagatcctcgcagccgcgaattgctgacgtgggctctcgtcaaggtcgccgagcccggcgacctcgtcattgcgcttcacgtcctcgactccatcactgagggaacggcatcgctgttatctctcgtgaagacgttcgattccgttctcggcgtttatgaaggcttctgcaacctaaaacaggttggtctgaggcttaaagtgtgtcgcggaggttcggtaaggaaggcgttggtgcaggaggcaaaggcgtttggcgtttccaccgtgattttgggaacttcgaaatcttatcatactattcgttcttccgcgtgggttgcgaaatactgcgcaaagaaattgccgaagtgtatctctgttttctccgttgataatggcaaaatcgcgttccggagagaagctaatggaaattgcagtgatcgagagaaattgtgtgaagggtcaagtttgtcgtcaaaatcgttggtggtttacacaaataagaatatgaagagttgtggaagttgtgcattgcaagagggttctggaactgagtttgagcaagggttgtgtgaggatgttgagaaggagaatccgcttgctttggttccgtttaagaagcttgaagatgctccttgtttttcggttgtggtggataattcgaagcctaaacctggttggtcactgcttcgccatgtgtttcatcacaagaagcataaccataagtcttcttctatgaagaatacatttgtttttcaacgggcgttgcggcagccgaattgtcattcttctgctgtggtccatccagatcataaacaaattagttttaagcagattgatgattcccctcttgatggggtgagtggtgccattgtgccatttgaatctgctacaactactctctttactcttccctccatttgcagtggtttgagtagccttcctgaagaattgttagtattacaagagaagtactcgtccttgtgccgattatatcgtttgcaggaacttttatctgcaacctccaactttgcatctgataatttgattggcagaggtggctgtagttatgtttacagaggatgtcttccagatggcgaggaattggcggtgaaaattttgaagccgtctgaaaacgtgataaaggagtttgttcaggaaattgagatcattacaactttgcgccacaagaacataatatctatatctggcttttgtttagagggcaaccatttgctactagtgtatgattttttatcaagaggaagcctggaagaaaaccttcatggcaacaaggtggactgtagtgcatttggttggcaagaaaggtacaaggtggccgtgggtgtagctgaggcactggattatctgcataatggctgtgctcaggctgtgatccatagggatgtgaaatcttctaatatccttctttcagatgattttgagcctcagctttcagattttggactggctagttggggttcatcttcttcccatattacttgtactgatgtggccggaacttttggatacctcgcacctgagtactttatgcacggtagagtgactgataaaattgacgtatatgcttttggtgttgtactccttgagcttctctcaaataggaagcccattaacaatgaatgcccaaagggccaggggagccttgttatgtgggcaataccaattttggaaggtgggaagttttcccagttgcttgatccaagcctaggcagtgaatatgacgattgccagatcaggagaatgattttggccgctactctctgcattagacgggttcctaggttgcgacctcaaatcagccttatattgaaacttctgcacggtgatgaagaggtgataagatgggcagaacaagaagttattgcgccacaggaactcgatggatgtgatgaggaaccagttccaactaacattcagtcacacctaaaccttgctttactggacttggaggatgatacgatttctatcagtagcaccgagcagagtgtctctttggaggactatttgcagggaagatggagtcgatcttcaagttttgactaaccagttgttcatattgatgccacattgaaatcaaatgtttgtttcataattattttttgtttttcttaggttagattttcaaattctgcagtatagcacagattgggtcttggaagagaggtccaacggcaaaaaaagttcagcccccctccttgactttgtagctatgtctcactcaatctgtattctggaaagcttttagcggtagaaaactcatgttggtgcgtttgggcttttgggatcagattctaacggggctaattgcgtaaaatttgaccaaacaatgaagagtacatatattccactttgagagaacgaccttttgcttcttagttgcctggtgtcacatccaaagtccacatacataaagtgtggtctcgtcgtcattaagactatatatctttttttcctttttcttttcttaactaaaactattttctatgctttcttcttgtgatgtgaaattgtgaataaactgatctgtaaagtttgagtttaaggtaactttcactggattttcatgctattaatatagatgcaaatatataagt

SEQ ID NO: 29844 - DNA, 1618 bp, Glycine max
  Clone ID: UC-GMROPIC006G11_FLI
caaaagcggaacgacgtcgataatcggcatcgtggcaggtgtggtatccggcgtcgttttgatctcactcatcatccttttcctcatcgtcttcttccgacgcaagacaatcactacgcccaaggactacaacaagtccaagtcctccgcgacctccaagtggggcccactctccttcacaacgaccaagtcaaccaccaccacgaagtcctccctcccctccgatctatgccgccacttctccctcccggagatcaagtccgccaccaacaacttcgacgacgtcttcatcgttggcgtcggcggattcggccacgtgtacaaaggctacatcgacaacggctccacccccgtcgccatcaagcgcctcaagccgggttcacagcaaggcgcgcacgagttcatgaacgagatcgagatgctctcgcagctccgccacctccacctcgtatctctcataggttattgcaacgagaacaacgagatgatcctcgtctacgacttcatggcgcgtggaaccctacgcgatcatctatacaacaccgacaacccccctctgacgtggaagcagcgcttgcagatctgcatcggcgccgcgcgtggacttcattacctccacaccggcgcgaagcacacgatcatccaccgcgacgtgaaaactaccaacattttgttggatgataagtgggtggccaaggtttcggacttcgggctttccagaatcgggcccacgggcaacgccaaggcccacgtcagcaccgttgtgaaaggcagcattgggtatttggacccggagtattataaacgacagcgtttaactgagaaatctgacgtgtattcctttggagtggtgctgtttgagttactctgcgctcgtccgcctctgatcagaactgcggagaagaaacaggtgtcgcttgctgattgggcgaggcactgctgccaaaatgggaccataggccagattgtggaccccactttaaaggggaggatggcgccagagtgtttgaggaaattctgcgaggttgcggtgagttgtttgttggacgacggaacgctgaggccgtcgatgaacgacgtcgtttggatgctggagtttgcgttgcagttgcaggagagtgctgagcagcgtgaaaatactaatattgttgataatgaaattaatgagagaagagaggaggaggctagtgatgatttgtttagtactggaaccagtgtgggccaggtttcggattttaacaagagtagcggtgtggtgagtgtgagtactgatagcgaagagcttagtagtagctacaaagagagtgataagttgatgtctgggactgttttctctgagattgtggatccaaagccacgttgagagaatcaaattgatctcaagaatgaagacctaatactactagggctagcttgaggctcgcaagttatgtgtttagtttcataatatatagttgtaatattacaatgtctgtgtacagaaatcaagttgcttctatctcttgggaatctagacaagtgcaaaggttaattggttggtaagtcataaatttcaatcatttttgtaaccagcctatgtgttacgtgttcaatcattattataacattttttttgtcc

SEQ ID NO: 29845 - DNA, 1162 bp, Glycine max
  Clone ID: UC-GMROPIC007C01_FLI
ccagtttataagtacaagtctcctcctccaccagtctacaaatacaagtctccacctcaaggtctccgacttcggactcaccgccttctccgaccaccttaaagaggacgggctgttacacaccacgtgcggcacgcctgcgtacgtgtcaccggaagttattgcaaagaaaggctatgacggtgccaaggctgatatatggtcatgcggagtaatcctctacgttctcctagctgggtttttaccctttcaggatgataatttggttgccatgtataaaaaaatccatagaggggacttcaagtgcccaccgtggttctctctcgatgcgagaaagcttgttacgaaactgcttgatccgaatccgaatacgaggatttgtatttctaaagtgatggagtcttcttggtttaagaaacaggtgccgaggaaggtggaggaggtggttgagaaggtcgatttggaggagaagattgagaatcaggagacgatgaatgctttccacataatctccttgtcggaggggttcaatttgtcgccgttgttcgaggagaagaggaaggaggagatgaggttcgccaccgcggggacgccgagcagcgtcatttcgcgcctggaggaggtggccaaggcggggaagtttgacgtgaagagtagcgagacgaaagtgaggcttcagggacaggagcgtgggaggaaggggaagctagcgattgcggcggatatctacgccgtgacgccgtcgtttatggtggtggaggtcaagaaggacaatggggatacgttggagtataaccagttctgcagcaaacaacttcgtcctgcgcttaaggatatcttctggaattctgcacctgccagtgcttgaatggtatattatatatatgatgtctgattattgttttacaacaccatttgtcgaccttgttattttattttgtttttgtttaggaactttgagttttgttgataagatctgtttgtgttttgttgtttaaattgttagtttggtacttggggactggttagtgggtacttactctctctgtcgcccagaattgttgttaagagatgcacacgttgtggatgattctgtcatgtttgtgtttcaattatgagtgtgtaatttggagtacttgtggggcttactgcgactttgttc

SEQ ID NO: 29846 - DNA, 3211 bp, Glycine max
  Clone ID: UC-GMROPIC007D11_FLI
gggcacaacccaacccacccttcttcttcttcttcttcaaaacctcaacagattgtggaattgcgcgttgaacaacgactcaattattctcccgcaagctctgtcctcacttcaaagcttcgaggttaggttcttcgagagtttctttgtttttactccgtcgcttcccgagaaaccgtcgcttgcgtgagcgaggcttgtagaaccacgcgaggagtgtcgcggatgagagatctctggtgaggtctgtggaaatggcatcatcggaggtgacgatgaagggaaattgcttgaaccacaacgacggcggagccacggagcctcattcgccgtccacggccaaagacgcagaagctgcacttttcagggaactatggcacgcatgtgccggtcctctagtcacggtaccgcgggaaaaagagcgcgtgttttatttccctcaaggacatattgagcaggtggaggcgtcgacgaatcaggtggcggaccagcacatgccggtttacgatctcccacccaagatcctttgtcgggtcatcaacgtgcagctgaaggccgagcccgacacggatgaggtgtttgctcaggtgactttgcttccggagccaaaccaagatgagaatgccgtggagaaagagccaccaccacctccgccaccacggtttcatgttcattctttctgtaagactctgacggcgtccgatacgagtacccatggtgggttttctgtgctgagacgacatgctgatgaatgtcttcctcctctggatatgtcgaagcagccacccacacaggaattggtggctaaggatcttcatgcaaatgaatggcgatttaaacatatctttcgaggtcaaccgcgtagacacttgcttcagagtggttggagtgtttttgtcagctccaaaaggcttgttgctggggatgcatttatatttcttagaggtgaaaatggggaacttcgtgttggtgtccgacgtgcaatgagacagcagggtaatgttccatcctcagttatctcaagccacagcatgcatctcggtgtccttgcaactgcttggcatgccatcttgaccgggaccatcttcactgtttattacaaacctaggaccagtcccgccgaatttattgttccgtatgatcaatatatggagtctttaaaaaatagttatagcatcgggatgcggttcaaaatgaggtttgaaggtgaagaggctccagagcagaggtttactggtaccgttgttggaatagaagattctgatcccaaaaggtggagagattccaaatggagatgcctcaaggtgagatgggatgaaacatccaacacccctcggccagagagagtttccccttggaaaatagagccggctcttgctcccccggctctaaatcctctttcaatgcccaggcctaaaaggcctcggtctaatgcagttccttcatccccagattcttctgttcttactcgagaagcatcatctaaagtaagcatagacccttcaccggcaaatgggtttccaagggtcttgcaaggtcaagaattctcgaccttgagaggcaattttacagaaagtaacgagtttgatactgccgagaagtctgttgtttggccacctactgcagtagatgatgaaaagatggatgtttctacttcaaggaggtatggttcagagagctggatgtcaatggggaggaatgagcctacatattcggatcttctttcaggctttgggaccagtggggatccttctcattcatccctgaaggatcaaatgagccctgcttattctgctagaaagcaatcattggatcatgaaggcaaacttcacatgcctcatccgtggcctgtaatgccctctagtctgtcactgaacatcttggactctaatgcaaaaggtcctacacatggtggtgatacatctttccaagctcgagggaatttgaggttcagtgcatttggtgaataccctgcactgcatggtcataaagttgaggattcacatggaaacttgatgccacccccacctgcaccccaaactcaatatcagagtccttgttcaagagagcttatgtcaaaacatgtatcagcaaaaacttgtgaggctgtgaaaccaaaagatggtgactgtaagctatttggcttctcacttatcagtggccctatcgtaccagagccttctttatcacaaagaaatgtgagtgagcctgctggtcagatgcatcttacagcacaccaacaaagaacatctgaaaatgatgagaagtcagatcactcaaagggatcaagacctgtagatgatctagttgttgatgaccatgacagaccattacagacttctcagtcgcatactaaagacgttcaagccaaacctctcagtggttctgctaggagttgcactaaagttcacaagaagggcattgcacttggtagatcagtggaccttacaaagtacagtggctatgatgaattagttgccgaattggatcagctgtttgaatttgggggtgaattattgtcaactaaaaaagattggcttatcgtctatactgataatgagggtgatatgatgcttgtaggcgatgatccatggcaggaattctgtgccatggtttgcaaaatttatatctaccctaaagaggagatccagaaaatgagcccaggtacactgagctcgaaaaatgaagagaaccagtcggtgatggctagtgatggtgcagatgcaaaagttgttaaatgtcagccacatcaaaagttcaattcagaaaatggccttgacgcctaatgattagtagattgatttccatagctttcagattctgggatggaaagtaaggaactgtcatgaagccatccatccagttggaaaacataacttgaagatgaaatcgaggctgactgctgcttatcagtgactgcttcaaatcaaatatataagatggcattaaaagagtagtatccgtccaattttggaaatcccggaattagtagtatatgcctgcccagttatacaatccctagtatttaatcaattgtgtttttgagtgaggtgatatagggtgatatcgaccttgcttttttttttttttaaaacaatcccaccttgtagttgttgctgtacatagttgtttctctcccaccctatgaacaacaacccattaatgtaatgaaagtttcgtataccaggtcgcggccttatggttggtatcc

SEQ ID NO: 29847 - DNA, 389 bp, Glycine max
  Clone ID: UC-GMROPIC007G06_FLI
attatattatggtgaagggatgctgtgttggaccgaagaagcgggttatcactcttcgtcagtcgcttctcaagcagacatctcgggtggctctggaagagatcaagctcaagttcatcgacacctcctccaagtttggacatggccgcttccagaccactcaggagaaacacaagttttatggtcgcttgaaggcttaaattcttgttttccggataacttgtgcgatgaaaatttttgcagcaaaacaagacattttagtggtgttttttgttgagtcagacaatgggtacaacacattcgcagagttgtgtttcttttagtttgtgctttgaacagttgtattttttcccctcttttattataatatcaactaatttattatggct

SEQ ID NO: 29848 - DNA, 1391 bp, Glycine max
  Clone ID: UC-GMROPIC008A09_FLI
ctgttttatacagaagatgccaattgcaagaagccaacgatttagtgaggaaataacttctgatgaacgggtaaagatgcaacaccctacaagttctgattctaccgtcacagagccaactcaccaaactgcacatgaatgctgtatgcaaatggcaaatgaaatgatctgtattcagaatcaactttcagatattgaaatcaaacaggctaacatgatgcaccaattacagatgtttacaactggcataatggatgccctttctacaatccaatcaagaataacaggcttagagaatgtatttgatagattaagtcaagaatctttgcaaagaggaagacattcttattcagaaaactccaaattagggagacagagtgaaaatgttgcctctcccaggttctccatatgcactccaacaccaaggccatctgtggaaattaataataagcaatcagactctatgtcagttaaaaattccgaaagttgggagaaaaaggcattttcaaggagccaaccaaggattcattctggagatagtttggatatgtggaaaagtaacaaggtcaaggctaccagaaaatttacagagaaggatgttttgaacagctcatcaaaggataccttacaaatgggttctgtaaaaaatgatggtatcttctctgctaccagaataaccaatgccagaaatgattgttctgagagtaataataactactggaagcatgtaaaacgtcttgtatgtgaaggggatctgaactctgcatatagggaagctttgtgtttcagtgatgaatttattctcgttgagcttttgaatacaactggtccagttatagaaagtttatctgtgaagacaatgaatgttcttcttagtactttagcatcatatcttctggaaggaaaattatttaatactataatcccgtggctgcagcagattgttgaaatgagtactatccatggaccaaattgcattgctatctctattgaagccaagaaacatcttttatcggcagtccaggaggccatgaacctgcattttttcagtcatgcagaaagaaggcgtgtggctgaattagcaatgaaattacatcatatatggggtaagatcactgaaagttaatattggtgtatctgacgaaaaaataatgtatgttgccattttctgttgggattcagattttgttcctcgttgaactcaaagccagttcttgttgtatgtattttgttcgttagttggtgggtgagtgttaggttttgcgaataatctgctagtaattctggaattcatgacttgtgaagtgtttttctttttccttcctgaattggcacctgtgtgcattcaaagagtattgcatctttgagaatggatgtcaatattgatcacc

SEQ ID NO: 29849 - DNA, 995 bp, Glycine max
  Clone ID: UC-GMROPIC008H09_FLI
aaccacacaacctacgaaagcaacgaaacatcaaacttgtacggagcaatgagctctcatgctttaaacaccaatgtgaatgctcttgatcactttgagatacccgtaacgacgccgtttcaggacgtttctgcatcggtgccgtccatagcagcgttctgccggagttctagcttccggaacattttcttgacagagaattgggcggagctgccgttgaaggagaacgacaccaatgacatggtcatctacggtgctttgcgtgatgctgctgccaccggatggttccccgccaatggaaatgaggtgagtaatgttagtgtagctgtgaaaatggaaaatgagggtcaaaatagtaaaactacagccgcgcgtggcactcgcacgcctccaaagaaggggttgagctaccgaggcgtgcggaggaggccgtgggggaagtatgcggcggagattagggacactaagaggaatggtgtgagagtgtggcttggaacctacgaaaccgctgaggatgcagctttagcttatgatcgagctgcatttaagatgcggggctcaaaagctaagctgaattttcctcatttaattggctcggatcatgagccaattaaggttacgctaaagaaacattgaaacatttgtcggatgtttctttatagtgtcctttgtcatccacggtagccataaagcggagtaaagatagctccttgacagatttggagctggatatatgattcaaatatgtggcagttttcaatagacacgaggtggcaataataaaagggaatatatatatatatatatatatatatatatatatatatatatatatatatatatgaaatgtattactactatcttgccattcttatggcattgcagaagtgtgaggatagtttgtcatagtattttttttttcctttttctttgtaatatgaatagttgtatctcatgacaatgaaaataatgaagaatatataacaaattgatgg

SEQ ID NO: 29850 - DNA, 1793 bp, Glycine max
  Clone ID: UC-GMROPIC009B09_FLI
ctcaacaacaacaaacaccaacgctgtccgaatccaacaagctccacctaaatccacgtccaatctcaccgacccatctcgttttttcttatcagtcttcaccgatccacacttggctacactacttaggtgattgtagcgaagaagtggacgtaaatttgcatgcagtgataggaggattcatatatacgtgggtgaaggacgttgatgatgacgatgaagaggttggtgagagtgaacagggatgcgattgcagcatgcatgacttgcccgctttgcaaaaagttcctcaaagaagccactgctatttccctttgcctgcatacgttttgcaggaagtgcatttatgacaaaattacagatgaagaattggaaaattgtccagtatgcaacattgatttgggcattgttccgcttgagaaaatgaggccagataacattttgcaagatttaaggaacaagattttccctttcaaaaaaagaaaggagaaggcacctgtatctgtctcttcagtactattaccagctagaagaaaggagagatcactgtcgtctttggttgtcagcactccaagggtatgtacacagtcaaccatgacaggaagaagaacaaaacctgcaagaaaggctagtggcctgcagggatctagtttatccattgagaagttcattaaaaaagaagaggaattactggaagatcaccaagataatttgtgctcacctgacacttcaaacaagtctgctaagaatggtgggcagagtttgtcaccttgtaaaaatagccaatccatatgcaatagagaaccacagaatggcgctgaaccacaggaagcaaaatgggatctttggaaaactttgaattatttagcagaggctgcaagtaggagtaagccttttaagtctaatgtgcaagcgtctgatgctaaactagaatctatgaaaatgactgatagtgatgctaaagtgctgaaagccaaaattaaggaaaagaagcgcaaggcaaaagttgaagaagaaaagattagcactgatcatgcctcttcagatacatcaaaacccaacaaattgcgaagagttcgccaaaaaaaggaacctgtttttggagaatctagaatatcacctcaggctgttctggatgctaccgacagaaatctcttatggaatgattcaatttggttctccttagcagcttctgaaaaccaggaaggagatgcacctttaccacaaattccttcaaattatgtaagaataaagaacggaagcatacctgtttcctttatccaaaaattattaatgaagaaactaggcctgaaaagtgaggatgaggttgagattaaatgcatgggacatccagtgcttccttcactgcaggtgcaaaatttggttgacctgtggggggttgatacagcgtctttgggacatagaatttcagcaaccattggatcctcagggaaagattttgtcatgatcctaacctatggtcggaaggtcctgcacccttgatcgtggttcccaattctgccctttctcatttttattatagcatgataaataaataaaaaaacgtcagagaataatcgcttcctcgtcaacgggcgtttttatgtagctgttgccaataagcacgcagttatgaggaaatctcctctcctgctagactgttgaatgtagagtagcatgctgttctgttggtcattgtagtgatcattggtctctgatttttctatagcatgtttttttgttttcatacttgttgctacagatggtttcttggatatttgacatttcaattt

SEQ ID NO: 29851 - DNA, 751 bp, Glycine max
  Clone ID: UC-GMROPIC010D08_FLI
agcggtgtgttcgacgcgaaagcgcgtgagcagctgttcgagaaaacggttacgccgagcgacgtcgggaagctgaatcgattagtgataccgaagcagcacgcggagaagcactttccgttaagcggatccggcgacgaaagctcgccgtgcgtggcgggggcttcggcggcgaagggaatgttgttgaactttgaggacgttggagggaaagtgtggcggtttcgttactcttattggaacagtagccagagctacgtgcttaccaaaggatggagccggttcgttaaggagaagaatcttcgagccggtgacgcggttcagttcttcaagtcgaccggaccggaccggcagctatatatagactgcaaggcgaggagtggtgaggttaacaataatgctggcggtttgtttgttccgattggaccggtcgttgagccggttcagatggttcggcttttcggggtcaaccttttgaaactacccgtacccggttcggatggtgtagggaagagaaaagagatggaactgtttgcatttgaatgttgcaagaagttaaaagtaattggagctttgtaacattacatagtttttgagtttcttttgtgaattttgtaactgttgaattcatgaggtagagatggtgatggtgttgttgcaagttgccactcacaaaaggtgtatagtctcagacaaaaagaaaaaggaaaaattagggcaagaaaaattgttgaacagaaattttcttaac

SEQ ID NO: 29852 - DNA, 770 bp, Glycine max
  Clone ID: UC-GMROPIC010G10_FLI
tattaatatgcggtaaccaaagtagtttacatcaaccttctcaaaacaaaattcccaccccgctaaacaacacaaaatccaaaaagctattgtatccaatggcattacatgcatcagtgcacaacaacaatagcaattacttatcctctgcctatgcctagtcataagtatggttctggtggtatttgtaagcatactgatataataatatatgtgtgtgtgtgtatatatatatatatatatatatatatgctttgtggcaggtggagggaagaactgtgaaagctcaaatatgggatactgccggacaggaacgatacagagcaattacgagtgcctactaccggggtgcccttggagctcttcttgtctacgatgtcactaaaccaaccacattcgaaaatgttagccgatggctcaaggagctaagggatcacgccgatgctaacattgtcatcatgttgatcgggaacaagactgatctcaagcatctcagagctgttgccaccgaggatgctcagggttatgccgagaaggaaggcctttctttcatcgagacttctgctcttgaagcaactaatgttgagaatgctttccagactattcttgcagagatataccgcattatcagtaagaaatcactctcttccaatgaccctgctgccaatattattaaagaaggcaagactatcacagttgggggggcacccgaacccaacacaaacaagccttcttgctgtacatcatcttgaaaccattgctacttgctc

SEQ ID NO: 29853 - DNA, 2409 bp, Glycine max
  Clone ID: UC-GMROPIC011A12_FLI
aacggatatccacttcctcttcttctcttcccatttcccttccaatctcctaatttctcttcagcttctgggttctccattttccttcgtcttctgcatctgcattccgtagattcagttctcgtcggaaaatggacgttcgccgaagacccattcctccctccggcgatcgccgacaaacccagaagctgaagaacaccgccaccaccgattcgcagactcttctgcctctctacctcaccaacgccctcttcttcgcggtgttcttctccgtggcctacttcctcctccaccgctggcgcgagaagatccgcaccgccactcccctccacgtcgtcacccccgccgagaccgccgccatcgtctccctcgtcgcctccgccgtctatctcctcggcttcttcggcgtcgcctcccgcgcctccctcgacgagctctccgacgacgagatcatcctcaaggaagactcccgcgccccgggcccgtgcgccgcggcgctgtcggactcctgctcactccccaacaacaaaatccaagaccaattccctctgccacccagggctgtccacagtttggcgaaggaaaaacaacatattccttcgccaccacaagtggacagtcctgtctctgtctcagtctcggtctcttcctcctcggacgacgaggacgaggagatcgtgcaagccgtagtgtcgggctccatcccgtcctactcactcgagtcgcggctcggtgacacccgtcgggccgccaccatccgccacgaggtggtgcagagactgacttcccgatccctgtcaggtttacctctggaaggtttcaactacgactcgatattggggcagtgctgcgagatgccgatagggttcgtgcagatccccgtgggagtagcggggccattattgttggatggaaaagaattcaccgtgcccatggccaccactgaagggtgtctggttgcgagcaccaacagaggttgcaaagctatatacgtctccggtggggcctcctcggtgttgcttagggatggtatgaccagagcacccgttgttcggtttccctccgcccagcgcgccgcgcagttgaaattcttcttggaggatcctctcaacttcgattctcttgcttcgttttcaataagtcaagcagatttgccaggttgcagaatattcagtgtgctattgcgggcaagaatttgtacatgagattccgatgcagcactggtgatgcaatggggatgaacatggtgtcaaaaggtgttcaaaatgtccttgattttcttcagagtgacttccctgacatggatgttattggaatttctggaaatttctgttcggacaagaaagctgcagccgtgaattggattgaagggcgtggcaagtctgtggtgtgtgaggccataattaaggaggatgtggtgaagaaggtgttgaagaccagtgtggaggccatggtcaagcttaatatgctcaaaaaccttacgggttcagccatggctggtgctcttggtgggttcaatgctcatgctagcaatattgtgtctgctatctacattgccactggtcaggatcctgcccagaatgtggagagttctcactgcatcaccatgatggaagctatcaatgatggcaaggaccttcatgtttccgtgaccatgccctccattgaggttggtactgttggaggtggcacacaactcgcatctcagtcagcatgtcttaatttacttggtgtcaagggtgccaacaaagaatctccgggtgcaaattctaggctactggccaccattgtagccggttcagtcctcgccggggagctatcgctcatgtctgctattgcagctggacaacttgttaagagccacatgaaatacaacagatctagcagggatatatctacaattgtccaatgaactggccacagtacacttaaacttgtgttagagactaatattctaataagcaaaccatcagataaagacaaaaataacgagaaaaaaattggtattgatgatggtgggggtaaaagataaagtgatggttggcatcttccatgggcaaatccagctccccagaagcgtggggttggttggcattcattgaatgtctgcttcgtgtgaggccttttctcttatggagattgtacagaggtacttgaattagagggtggaggtaaacaggagccacacttttgggattagagtttctctgttttccaaaaaaaaataaaaaaatatcattttgtgttgtgtgttatcctcttgtttaaggctactgcttcaataatgtggtactttagagggtagtgtttttacgtgttgtaatctccatcttgttgatttgtaattgtagcaagagatgtctccaattaggatgtagagttgttaataataacagtctctggttgctc

SEQ ID NO: 29854 - DNA, 1616 bp, Glycine max
  Clone ID: UC-GMROPIC011D05_FLI
cttctcccagtgacagcaactcccatttccactctcaccaaaaccctccctctctcaaatcactacttactctcctataaattcaaattcaactccctcgtccgccattgctccctctccgaccgcgaggagcagcgctggctccgcgaggagcagcgctggctccgcgacgaacggcgctggctccgcgaggagcagcgctgggctcgcgagcgcgaccagctcctccgcgagatcgccgacctcaacctccaaatccaggcgcttgagcgtcgcctctcgatgcgcgatttgtcctctccggcttccgtctccgacgccgtcgccaatgtcacgttgctcctgaaggtgctgaaggacaagaatctggttctcgagagcgtttcgagtctgcggaacacggaggcagaagaggaggaggagaagaagcaattcgaagaggttgtcgaacacgtaaaggaggttgtgatggttgaggaatctgctagggttgaaaagaggatctcgttgcggataggttccgaaggagaagaggttcgacaaatgcaggaagcattgttgaaattgggattttactctggcgaggaagacatggagtattccagcttctcaagtggaactgagcgtgctgtgaagacttggcaagctgcactaggtgcccctgaggatggtatcatgacagctgaacttcttgaaaggttgtatttggagataaggaataagggcacaggtagtgcgactcaagacaaacaatctactactgttttgccaaaggaagttgaaaatggagctgcagttgcttcagtggcagaaaattcagaggttcagcaaaaagatgtgaaaaatgataaggaaacagaagtctcccaccggggagtttttctccttggagagaatcggtgggaagaaccatcaagacttgttgcaagggatggagttgataagagcaagaacaaggatatgacaacaaaatgccttcaatgtcgtggggaaggtcgcttgatgtgtacagaatgtgatggatctggcgagccaaatattgaacctcaatttattgaatgggtggaagagggtacaaaatgcccatattgtaaaggcctagggtatactgtatgtgatctatgtggagggaaaactatggtatagggctttggagcttacagagctacgtgaaactctacagagaaacctcacaaattacaacatagattgaacggtgcatgcaattttaaaccttcaaaatgaatgaggtgatatgccatactgagtatattcaaacatacattttccccttgtccgaactacgtttgtttcaaactttatgatttgtcaaatcaaaaagttatgtaatgctgttaatttgtagatgcttcacaggcagacactgtcatctttgaatactatttggccataagccaaaaataataggtggccgaagagaatgacaaatcgaagactgcacaaaggcttttatagcaagggttgcggaagtgtgagcagtttccaaaatccttcgagttaactcgaaataaaggtgtggtagcatcgagctcagtcaaatacttggcactagacctatatctttaatgcttatttatttgagggacttggagatt

SEQ ID NO: 29855 - DNA, 2788 bp, Glycine max
  Clone ID: UC-GMROPIC011D08_FLI
tctctctgcactcaaattcgtggccttactttttccatttacactcactcacgcacgagcttcaaaaccaaaaccaaactctgttctaacctccaaacttttatgccattcatgactcataacatcatagaaaaagaagaactactcacgaaccgcgaccaccaccgacaataaaaggacaacaacgttagtgtttaaaagcatgaaaatgctgccacctcccaccgccggaggtgcctcccacagcggcgccggtgaccgcaccgtggtggtgggcatgaagatggactctcacagcaccgagttgctcacttgggctctgttcaaagtggctcagcccggtgatgttgtgcttgctcttcatgttcttgggaatgatgaaattgtgaatcgagaagggaaatcctcgttgttttcacttgtcaaagcatttgactctattcttgccgtttatgaaggattctgcaatttgaaacaggtggatcttaagttcaaaatatgccggggttcatcagtgaggagaattttggttcgagaagcgaatgcttattctgcaacacacatcatagttggaagttctcaaggtcttcatataattcggccatgtatatctgtggcaaggtactgtgctaagaagttaccaaaggattgttgggttcttgctgttgataatgggaaaatcgtgttcaagagagaagggtcacccgcaactcgtgctgaattgaaaggacttgaccaggatcacaaaactcggttgctcggttcgattcataggacaatcagcaagggttcaaaagtgctagatgatgatggtacagggattcatgaaaagggttgtggtaatggtgaatattcagatcacagtttggctaaggcttttttggattctaaagaattcgttgagaagaagaggtgctctatttgtgcttcagaagaagagtcttgtggtgatgcttctgatgagaataaccctttggcaatagtgcctgtgcagaccaacgatgctgcttctaaaccaggttggccgctgcttcgtaagacaattgtatctgacaagaaatgttccgaaaaatcactgttgcgccagatctcggtggtacaatgggcaatgcagctaccctctagagatctttcatatgctgcacatcaagaccataaagcaaacaattgtgaccaaaataaggatcagtttttagctctggatagcaagagtggtgctcttgttccagtggatgccgaaataggaactgcttcttcgcctgaacgcaattcgagaagcattcctaaggaattggagggccttcatgagaaatattcttccacttgcagattgtttgagtaccaagaacttgtattggcaacatcaaatttcttgccagaaaatttgattgggaaaggaggaagtagtcaggtttatagaggttgccttcctgatggcaaggaacttgctgttaagatcttaaagccatctgatgatgttttgaaggagtttgttctagaaatagaaattatcactaccttaaatcacaaaaacattatttccctccttggattctgctttgaagatggcaatcttcttttggtctatgatttcttatcaagaggaagccttgaagagaatctccatggtaataagaaaaatccacttgtgtttggttggactgagagatacaaggtggcaatgggtgttgctgaggctttggagtatctgcataataatgaaggccaatctgtgatccatcgcgatgtaaaatcatcaaatgtgttgctatctgaggattttgaaccccagctctctgactttggacttgctaaatgggcatcaacctcatcatcacatataatttgcacagatgttgctggaacctttggttacatggctcctgaatacttcatgtatggcaaagtaaatgacaagattgatgtctatgcatttggtgtagtgcttcttgagcttctttcagggagaaagcccataagtggtgattatcccaaaggtcaagagagccttgtcatgtgggcaagtccaattctaaatagtggaaaggtgttacaaatgttagatccaagtttgggtgagaactatgatcatgaagagatggaaaggatggtcttggcagctacactttgtatcagacgtgctccaagggctaggcctctaatgagccttatctctaagctccttggaggtgatcctgatgtgatcaagtgggcaagactagaagctaatgctttggaagcaccagaaatgcttgatggtgaagcttgtccaccttccaatttgcagtcacatctcaaccttgcattgcttgatgtggaggacgactcgctctccatgtgcagcgttgagcaaaacgtctcgttggaggactacttgagaggccggtggagtcgctcatcaagctttgattaagcaaactactagaaaattgctagaagaataagaaggattgtgttttttgaaatctaaatccttttgtagataattttgccgtgttgcatgtgctgtgaatgtttttatagatgggtttaggatgagaggttgtttgtgtgtgccctcctccttcccttgattgtcaaggaaactatgccttgtaatttgtaaggctagatatcctttgtcgttttactttaattacttggtgctagtttcaatccttaatctcaatttgattgagtgtaatatgttctggtgcgaagaataaaagatgaaaaagttgtatcttaaaactacataatgagtactgttctcatgcattttaatcaagttaatggcaatttcttctct

SEQ ID NO: 29856 - DNA, 1102 bp, Glycine max
  Clone ID: UC-GMROPIC011E01_FLI
ggcaaatgtcacacaagtgtcctatgctgttggcactgacacaaggattggaccaaagttcctgaattctagtgttggttttggtggctcctgcttccagaaggacatcttgaaccttgtctacatctgtgagtgtaatggcctgccagaggtggctgagtactggaaacaagtgatcaagatcaatgattatcagaagagccggttcgtgaaccgtgttgtttcgtcgatgttcaacacagttgcaaccaaaaagatagccattctggggtttgcattcaagaaggacactggggacacaagggagacaccagcaattgatgtgtgcaagggactactcggtgacaaggcacgcctaagcatatatgatccacaagtcactgaggaccaaattcagagggatttatggatgaacaagtttgattgggaccaccctattcacttgcagccaactagtcctacaactgagaagaaagttagtgtggtttgggatgcatacgaggcaacaaaggatgcagatggtgtctgcattctcactgagtgggatgagttcaagactcttgattatcagaaagtgtatgacaacatgagaaaaccagcatttgtttttgatggaaggaacattgtggatgtggagaagctacgtgatattggtttcattgtgtactcaattgggaagccactggatccatggctcaaggacatgccagctgtggcataagagagagatttcaaggatcgaggcattcaatttggttcaattttattactaataattttttttttggaacaattttttggttgccatttttcactttcccatagtagttggcataaatgagtataaattttgggaaagtacgaggccatatgttttgtgtttccttgtactgcaatccaatactgtttggctgttataagtttataaggattttttttatttgattagtttggtgctaatatctgtttgatgaatgttttggaaatttctgcatgagaaaaatttggacctactccaaccataaaagttgctcttaatgttgaaatatgaagggtatgttcatccatgtaaatttcaatttgggatatgattttcacatat

SEQ ID NO: 29857 - DNA, 1550 bp, Glycine max
  Clone ID: UC-GMROPIC011F07_FLI
ggattttgagattccaccagaggctcagcgtggtagtctgtcaacggtggaagggatacttatgagagcagctgatgaacttcagacccttcaagaggaacgcaaaaaagtggctccagagacagctgaggcaattgatcagttcctggtgaaactgcgagcctgtgcaacaggagaatcagccttcacatttattcttgatgatcctgctggaaacagcttcattgaaaacccgtttgcaccatcatctgatccatcattgactatcaagttttatgagagaactcctgagcagcaagcatcattgggataccttgttgattccactcacattgaaggaattcatgatgaaacaccagaaggaggagaagctgtgactgctgatcaagtgaggagagaacctcatgggtcaataggggcaacagctggtcatcgagccattgcacagagtaacagttcagaaattgctgaagccttatttcgatatactgcaccagaagaggtgatgacatttccatcttcttgtggtgcttgtgctgctagttgtgagactcgaatgtttgtcaccaatattccttacttccaagaagtaatagttatggcatccacatgtgattcctgtggttaccgcaactctgagttgaaacctggtggccgaattcctgaaaaaggaaaaagaattactcttaatgtgaagaatgttaatgacctgagccgtgatgtaataaagtctgatactgcaagtgtaaaagttcctgaacttgacttggagctggcaagcggaacccttggaggaattgttactactgttgaaggtttaattacaaaaattagtgaaagccttgagagggtccatggctttacttttggagatagtcttgatgaacagagaaaaggcaagtggatagactttaaagcaaggctaaacaagcttcttagcttggaagaagcttggactctaattctcgatgatgcattagccaattcttttgtagcacctgcaactgatgatctaaaagaggacaatcaattatcatttgaggaatacgagaggtcatgggaacaaaatgaagaattaggtctgaatgatatagacacctcttctgccgatgttgcttatgaatcaacaaatactactaaaactgagtgaacattatgtggtttcctctcctcacaccccaaccaaaacaaatgaagggaagaagctgttgttaggaaaggaagaatttttgtgccaatttgattcaatgagacagaggaaggatggagaagtcaattgtcttaagcgtcatgtaatggctgattggtttattaatatgtaagcaagtccattaactagtatcatctttctgaaatagttcagtcgtgaaagatgtgatctcctgtgaattggtaagttaattgcttattaatggttttgtagccatctaagattgtttcttttggcattttttcttctttaccctcttctttttttaattggcgaaggtcagtacagttgaaatatagttggatacttttgaatatgttgattaaggattatttagtct

SEQ ID NO: 29858 - DNA, 704 bp, Glycine max
  Clone ID: UC-GMROPIC011G03_FLI
ttccacccacaaggtgatgggggaggaataatactagattatggcaatagtactactcacttgaccacaggggctggatttgggcaaccctatccacagaaaagggctcatggttcattccatgggcctcaaaagcaggcccaaacaaatttcccctactcaccacaccagcaaccccaccaccagcaaccccaccaccagcagcaactccaccaccagcagcaactccaccaccagcagcaaccacagaggaagagaacaaaccagctgagtcagttgaaaccccagtagaggttcctgttgagaagactgaagcttagacctatggacagtgtgagtgagaaaaacaagtttaaaaatggtcctagttgtggggatcaggtctaccattttgcatgccatgttgaaaagcctcttttttttttttctttttatttctttagtttactttattaatattattatatgatgcttaagtctttggttgtattatggagggtacacctacgtgtaagcacaacacttggctccacatcagcgtgcttgccacgtggtgacatgagaaattctgggagttgtgtattgaagtgagcaagctgctggtgctggagtttaggggtgatggtttattggcagggttacatgagtttgtgatggtgtgttactgtgtttctttaggtttgaataaatgatatttactttat

SEQ ID NO: 29859 - DNA, 1000 bp, Glycine max
  Clone ID: UC-GMROPIC012A02_FLI
tctcattgttcactatcccgatcgtaattacttcctaactttgcgttttgcggcatataatttgccatggaactcagttttaggccacaacttgggcttgtttgtgtgatattgctgttccctgcactgtgtaactgccaggaatatttcaccaaatcaagagcaacctattatggtacccctgatggctacgggactccaacgggagcttgtggctatggcgaatttggacgcttgatggatgggtatggtggaagagtcactggggtgtctgggctgtggaggaatggagctggctgtggtacatgttatcaggtaaggtgcaaaataccaaaattgtgcgatgtgaatggagtaaccctagtggtaacagactacggtcagggagacagaacagacttcatcatgagcccacgtgccttctcaaaattgggagtggataaaaaagcatctgaagagattaagaaaaaaggcacagtggatattgaattcaaaagggttccctgtaaatacaccggcaatgtcttgtttcatgtccaggaaactagcagcaaccctggttacttcgctgttgtcattctctttgtaaacggaaaatacgacgtcactgatgttgaaatgtggcagaagagtcaacaacgatgggaaccactacgcaggtcctatggggcagtgtttgactttgctaacccaccaagtggtgaaatcctcttgaggtttaaagcgggttcttggaagcaggcgaaaatccctgctaattggaagcctggagctacttatgacaccaaggttcagttttaatagaaagaaaaatgcaatctgcatgggatcccaacaagagattacaaataagctctagtattactctgtttgtaattagtgtcaatgttattggtcatgtttctattttctaaagggttggaataatggggaatattcatctaattccccctctaaaattacatgtaatatgaataaaataaaagtgtttgaagttgtt

SEQ ID NO: 29860 - DNA, 780 bp, Glycine max
  Clone ID: UC-GMROPIC012D02_FLI
aaatgagcagtgacgctttccagcttctagggatggctgagaggggaatgttgcctgagttcttcagcaagaggtctcgctacggaacacctctcataggaatactcttctcagcctccggcgtgattttattgtcatggctgagctttcaagaaattgtagctgcagaaaatttcttgtactgctttggaatgattttggagttcattgcgttcattctgttgcggatcaaacaccccaacgcatcccgaccttacaagataccggggggaactgctggagcaattatcatgtgtatccctccgacaatattgattggtgtggtgttgtttttctccacccttaaagtaatggttgtaagccttattgctatggcaattggccttctgatgcagccttgtctcaaatttgttgagaagaagagatggatgaagttttcccatagttctgagctccctgattttggcaatcaggaggacactcgcactttggtgcattaatctgtcctgtttcaataatatggagatgatttgttcttctaggtcttcaagcatgcttgttaagtttatacttctctgaacccaacaaccatagaagggcagctttttatcctacacctttggtaattcaactgtttgtctgtgtttttagtttgatcaatagatgggatgccaattagaaacgtggaagatagtgtttagaatgtcttgggaaatacaattatttgttaagtggattatgttatcatttgtcaagaaaaaaatttgattattttccttc

SEQ ID NO: 29861 - DNA, 1179 bp, Glycine max
  Clone ID: UC-GMROPIC012G10_FLI
gcccttgagaggggcaagtcccgaggcaacagaattcgcttagcggttatcgaccacgtgacttccatgcccagcgtggtcatccccgttaaggacttggttaaaatctgcagagaggagggtgtggagcaggtaatttcttcttttcaaatgataattgttaataatgattaacagagaaaatcatcatcttataacttggatgaagtaggtattcgtggacgcggcacactcgattgggtgcacgcgcgtggacatgcaggagatcggagcggacttctacaccagcaacttgcacaagtggttcttctgccctccctccgtggcgttcctctacgcacgtgcctcctctaaggcacgtgacctgcaccatcccgtggtgtcgcacgagtacgggaaggggttggccgtggagagctcgtggaccgggaacagggactacagcgcgcagctggtggttccggcggttatggagttcgtgaaaaggttcgagggtgggattgaagggatcagaaagaggaaccatgatttggttgttgagatgggggagatgctggtggaggcttgggggacccaccttgggagtccttcgcatatgagtgctagcatggtgatggtgggtttgcctccttctttgggtattgggagtgactctgatgctcaaaagcttaggaccctttgagggatgaatttgatgttgaagtaccaatttattttcgtggtggggaagatggctctgttactgcgtatgcacgaatttctcgtcaggtttacaacaaggttgaggactattataagttcaggaatgcggttaatcaacttgtgcaagatgggtttacttgtgctcttctttcggcttgaaattggggtagcctatgctctgctcttagttttaattaactcctcaataacatattcgtccgttttatatgtgggatactatttgcaaatgttgagtttgcactttgctgattgcgctattttgcccggtctgttgaaaatttcattgtctatatatccaagtatttgagtggacatttgttgtttaacattttgactactcgtttctgcaatattgcaccatcagtactgtagtggtctggtggttgcttctttgatattttacaacattgctgctgaagcacaaataaacacccatgatatccataggtttacact

SEQ ID NO: 29862 - DNA, 742 bp, Glycine max
  Clone ID: UC-GMROPIC012H01_FLI
tcctacagtagcaggaaatatcactcttcactctcgagctatattttgctttcttagttcccaacaatatggccaaatccactttctttgtctgccttaacctttcattactcttctctctagtcacagccacttactactcaagtttaaccccaacacttttgggttttcgcgaggagcagttcacccacctccacttcttcttccatgatgtcgtgacaggcccaaagcccagcatggtgtttatcgccgagcccaacgggaaagcgaaggatgcccttccgttcggaaccgttgtggcgatggacgaccctttaaccgtggggcccgaacaggactcgaaacttgtgggcaaggcccaaggaatttacacttcaatatcgcaagaagagatgggactaatgatggtgatgacgatggcattcaccgatggagatttcaacggcagcaccatcagcgtgttggggaggaacatgatcatgagtgaacctgttagggaaatggctattgttggcggcactggggcttttcgttttgcacgtggctacgctcaagccagattttactctgttgatttcaccaaaggagacgctatcgtggaatacgacgtattcgtgaaccattattgagatttactccttccgtttcgcaatagttacggagaattgtattagaaaaaaaaactcaaaataaatgttattttaacttacaatcattcaatgaaataactttagtacttttt

SEQ ID NO: 29863 - DNA, 882 bp, Glycine max
  Clone ID: UC-GMROPIC013C02_FLI
tgcctttcttttctaattttttcccgccggttgctagtgttttcctacttctgtcacacatacagaggcaaaaaaattgaatcgtgaccaggatcctgcatcaacaaaggctaggcttggttttaagactttcatctttaggtggtgtgtgggcattgggcaagtttattttcatagatttgcataagtaccagttttagaacggttataattttcttcattcgagcattttcacccactcagccttttctcgcctcaacgctaagtagaaaactattggtgagttgagttcgctcctcagaggtaactaactaatttcgagatttcttccttcaatcccaatgcccttgatcattagtttcatccattgcaaaaatttcattctaatcacctataaatagctatatatgcaagccctaagtaacttagaagaactcacgctgcttatgtctgttgttcttttagggtcaatttggatgtttattcttgattttattgatagtattcaccttgtttgttgttatgtttgatttagaccacaaactgtttgatgtatgttctcagtcatggagggtgatagcgttacattcatttccaatcctgagacctatgaattggagggtgatagttttacacacatttcctctcctgataacggtgataagtctaagacgattgtggtgtggtcaatttcttataaaaattaaattctcattttttgtgatcattttgattatgggttttgctttgctagtatttcaattgttatttttgggatgactggtatctggcatccttgcatcttcacattaagaattggcttgatattcgatagcctttggtctagagaattttgacaataattaattttttccattgctg

SEQ ID NO: 29864 - DNA, 2368 bp, Glycine max
  Clone ID: UC-GMROPIC013E04_FLI
gcttttctcatacgaagctctgtgctcgctgttatcagttttttttcctctgtttaacccagaaatatgtaacacaaatcaaaacatcgttgttgttttatttgagcatgcaagttggctaactcttggaaaggaaaggagcttcaagaagagagagataaaataaatggtgcaagatatgaagcagcaagacaatggagaatctaagaagaaggagcgtcacattgtgacttggactcaagaggaggatgatatactaagagaacagattggtattcatggaactgaaaattgggcaattattgcatcaaagttcaaagataaaacgacaagacagtgcagaagaagatggtacacttacttgaattctgatttcaagaaaggtggatggtcagctgaggaagacatgctcttatgtgaggctcaaaaggtatttggtaatagatggacagaaatagcaaaggtggtctcaggcagaacggataatgctgtgaaaaatcgtttctccacactctgcaggaagaaacagaaatatgcagctttagcaaaagagaacagcacttcatacatcaattcaaataacaagaggatgatgctccaacattgtaataatatggatacaacatcagaatctggagtacctattaagaatttgaggagggccgatattgctgatgatgcagaaaagatcaaatttgaggaccgatcacatttacgaaatggaactccaataaatcagcagccaagagcaccacttgcagtcttagctcaaaactctcataactcaaacaacttgacagaccagcatcatctttgcaatcccaagtttagcagttccgcccaaaataacaagattcaaggaacatttctcaaaaaagatgacccaaagataagtgcattgatgcaacaggcggagttactaagttcactagctctaaaagttgatacagagaacatggaccaaagtcttgaaaacgcatggaaggttcttcaagagtttctgaaccgatccaaagaatcagatatccctggacaaaaggttccagatgtacggcttgtagatcttaaagatatgattgaggagttgaagagtggtaatgaggaaggccgggttcttcaagagcttctgaaccgaaccaaagaatcagatagtactgggcataaaattccagatttacggcctgcagattttaaagatatggttgaggactcaaagagtggtaatgaggaaggccaggtacttcaggagtttctgaaccgaaccaacaaatcagatatccctgaacataagattccaaatttacagcttgtagatcttaaagatatgattgaggacttgaagagtggtaatgaggaaggccaggcttgttggaggaaaatggactgttatgaaaactctccaggcagttctggatacagtacaggatcaattctcatctgtcagtcagctagtgataatttggagcactcattgcatcaggatattggaaccgaaatgaagtctaaacaacttgaagatgaaaaaggagtaaaagtggttatgcctactgcaaatgtagatcaagatatggtaccatgttgtatggaacagataaacaatgacgggattgtttctacctcatcaagattggagttcagctcccctcttcaagtaacccctctgtttagatctttggcggcaggaattccaagcccacaattttcagaaagtgaaaggaacttcttaaggaaaacactaggaatggaatctccatccatcaacccaagtgccaactcatcacaaccgccaccctgcaaaagagccctactacctagtctataaactatctgagatacaaatattgaaccgttctttccctgttctgaatcctactttgtcttccttggcagtaatctggcttgtggagaaaaaaatacaatttcactgtgcctaaaattttgaaaggcatatgctgctccccaagaatgttatgatgcattctttccaccttcaacatatctaacaactcaaaagttacctttttgaaacttgcacataaaaattggcttgcttagtgtgtcattctttggcttgttttcttataatattattctgggtttgtttttctccaatccagcaatcagcattttgtccggaaccttattttttttgtacagagcttgctgtgtaatcactagcatcctgattcctgagtgtgtatgaatacattagcatatatagaagagagaaaaaagaaagtgagaacttggattctaatttgttgtttggtgtgtgcataggtattttaataaagatttttcccttatggttctgatgtactgaaacttaactataagtgattggaaatgcattttggttttggtgtgc

SEQ ID NO: 29865 - DNA, 807 bp, Glycine max
  Clone ID: UC-GMROPIC013F07_FLI
cttcgcccacaacaaatcccattcctgcatctcctccttcagcatcgctgcaaactttactttccatttttgtccttcctccccgagaaaaaaatggcgaacgcagcatctggtatggccgtccatgatgactgcaagctaaagtttttggagctcaaggcgaagaggacgtaccggtttatcgtttttaagattgaggagaagcagaagcaagttattgtggagaagctgggtgagcctgcaaatggttatgatgatttcgctgccagtcttcctgccgacgagtgtcgatatgctgtttatgattttgattttgtcactgaagagaattgccaaaagagcagaattttcttcattgcttggtcccctgatacatctagggttaggagcaagatgatttatgccagctccaaagatagattcaagagggagcttgatgggattcagattgagctgcaagcaactgatcctactgagatgggtcttgatgtgttcaaaagccgtgccaattaaatgattctgattatgcataataggagttgtgatggggatggtcaacttggctaatttggactcaattttccaagttttgacatgaggtctatagcagcttcaacaaagcttttcttgttccagtgtatcttgtggtttgtgacatataacccgtgtttgggtgtcatcttagccctattcctactagttaattttgtaactgttctttgtgtgattggacgaaaatttgggatcaggtattgatgtaatattgccagttgccatcttattaatgtcttgtgacttaaattaact

SEQ ID NO: 29866 - DNA, 2020 bp, Glycine max
  Clone ID: UC-GMROPIC013G04_FLI
cccaatccaatcaatggcttcttctctttccccttctccctcttccctcgaccaaacccttcgcgacgtcgacgactacgttctggaaaatgggtcagaaggtttgtcaagggacacacttcattatgtgtacgagcttgtgaagaatgggaatgtggcatttcgagagaacagaatggaagaggcaatcaacttttactcaagagccaataacatcaaatcaggtgatccaatcatcctcagcaatcgaagtgcagcttatattaggattagccaatatttcatgcacagaacaccatcatcttcagaacgtaggccattgagtgggcttgaacccacaacacttgctgaactgggtttgaaggatgctgagaagcttgttgaactccaaagtaattcagcaaaatcatatcttttaaaggccaatgcttttctactgttagagaaatatgaaaaagcccgggatgttattctttcaggccttcaagttgatccttttagtaattctcttcgggcttctcttcaaaatttggaaagtgtttcatctagttcaagagggatgagtacacatggacatccagaacgtaatgatgattttgattgcactctctgcctgaagttactgtatgaacctgtcacaaccccgtgtggacattctttttgctgttcgtgtctatttcagtcaatggatcgtggaaacaaatgcccattgtgcaggactgttctgtttattagtcctagaacatgttccatcagtgtgacattgaagaacatcatacaaaagaatttcccagaggaatatgctgaaaggaagcaagagcacgacagtttaatcaaagctggtgtagatttactccctctttttgtcatggatgttgtcataccatgtcaaaggtttccactcaatatatttgaacctcggtatagactcatggtaagaagaataatggaaggcaatcatcggatgggaatggctatacttgattcaacaggttccttagctgagtttgcctgtgaagtggaaatcacagagtgtgaaccacttccagatggtcgtttttatatagagattgaaagtcgcaggagatttcgtatcatccattcctgggatcaagatgggtatcgtgttgcagaggttgaatggatacaagatattatgccaccagaagggacaagtgaaagagatactttacagcaacagacatataatgcagtcgaagatgctagatcatggatagcaagagctaaagaagcagcaagacatggtaatttttaaactataattatatgatgtttacctaggactactttgtactttggtgatagtgaaacccaagatatattggtaatttttaaaccatcatcagatgatgtttacctactacctaggacttctttgtactttgattataatgacaaccaagatatattggtcatcgcctttttcttttcccattttttttgggggggttgctgaacatatatttccagcacttataggaatctgttaattctgatgatgctttagtttttgttatcctatgtttctgaatgggagtgacctttttcctctttgcacctttacaaatgacaatggactgctgcaatactaaactactggaatatcatacagatcaaagaaaacttgagagactcgccagtgttgaagtaatgatgccctcaccaaaagaccctgagcgctttagtttttggctggctactctttccaatcggaggcctgcggaaagattggatctcctacgcataagagacactgccgagaggattagacggggcctgatatttctccgccaggaggaacaagggtgcagaattcagtaagacaagctgaggagggctgccactattattgcaattgaatatttgtttattgcaaattcatttacaagtctttcaacattcttcggcctcataaacaaccgttgatgaggtcatttttgctgtaacatagggttgaacagtttttctaatatatataatcatctacaacacatttttt

SEQ ID NO: 29867 - DNA, 1411 bp, Glycine max
  Clone ID: UC-GMROPIC014A06_FLI
gtccaaatgaagccattctttgctcggactcattccaaagcatgtatactcaaatgctatgtggcctcattgagcgccaccatgtcctccgcctcggcgccgtcttcgcctccgggctcctccgtgcaatccggttcctccaactcaattggcccgaacttgcccatgatatccaaaccggaaccttaaattctcggatcaccgacccggcaattaggagttacatggacaaggtgctaaaatccgacccggaattggcccaatttgtgacacaacaatgttccaaggacaattgggaaggaatcatcacaaggatttggcccaacacaaaatacttggacgtcatcgtaacgggtgccatggcccaatacattcccactcttaactactacagcggaggagggttgccacttgcatgcaccatgtacgcttcatcagagtgttactttggactcaaccttaatccgatgtgcaagccctctgaggtttcatacaccattatgccaaacatggcatatttcgaattccttccccacgatcctaagcctggctccaccagttcaaaactagtggagttggcggacgttgaagtggggaaggaatacgaactggtgatcacaacctatgcgggactctatcggtaccgtgtgggcgacatcctccgagtcaccggtttccacaactcggcaccacaattccacttcgtgcgcaggaagaacgtgttgctgagcattgactcagacaaaacagacgagtcagagttgcaaaaggggattgagaatgcctcaaagcttttatcagagttcaatacaagcgttgtggagtacacgagttccagacacaacaacgattccgggtcactacgtgatttattgggaattgttgaccaaggactcgacgaactcacccagtcacgaggtgttgaatcggtgttgtttggagatggaggagtgcttgaactcggtgtatagacaatgtcgtgttgctgatcattccattggcccattggaaattcgtgttgtgaggaatgggacctttgaggagcttatggattatgcaatctcaagaggtgcgtccataaatcaatataaggtgccaagatgtgtgaatttcacacccataatggagttattggactctagggttgtgtctgtgcattttagccaggaattaccacattggacccctgaaaggaggaggtgaggttcttcgtatgtggcttattgggcttgagtcaaacatgtagatgtagattttatttgttgtttttttgctaaggttttgtattttttgggtagtgtgtaggactcatggtgagtctacatggagatgttgaattaggatgtctcttggttggattaattatgtatttcggttcgattaacttgtgtaaaagatgtgactttttttt

SEQ ID NO: 29868 - DNA, 1526 bp, Glycine max
  Clone ID: UC-GMROPIC014B05_FLI
aagatccttacaaaagcttagtaaagatttgaaggaaacacaacaggacagggacaaagtggtgcaggaattgaaccgcctcaaacagcatttactggaaaaggcatctgaagactcagataaaatggatgaagacagcaaaatcattgaagagctacgcgatagcaataattatttaagggctcaagtatcacatcttgggagaactctgaagcaagcacttgcaagtcaagaggagctgaagatggcaaatgatagtgaaattctcaagtctaaagaagccattaatgacctgaacaagaaactagcaaactgtatgagcactatagatgctaaaaatattgaacttttaaatctacagacagctctaggacagtactatgctgaaattgaagccatggagcatttagaaagggagttggctcatgcaagagaagaaatagctaagctttctcaacttttgaaagaagcagatcacagagcagatgtatcaaggaatgaaaaagaagaaattttaggcaagctttcacaatctgagaaggtgcaaactgaatggagaagtagagtaagcaagcttgaggatgacaatgccaaattgaggaaggttcttgagcagagtatgacacggttgaatagaatgtcgatagattcagattatcttgttgacaggcgcattgtgataaaattacttgtaacttattttcagagaaatcacagcagagaggttttggacctcatggttcgcatgctaggattctctgatgaggataagcagaggattggaggtgctcaacatggttcgggtaaaggtgttgttcgaggagttcttgggctgcctagccgcttggttggaggcctcttgggaggaaattcgactgacaccgctgcaaatgcaggatctgataaccagtcttttgcagatttgtgggttgattttcttctcaaggaaacagaagaaagagagaagagagaatcatcagaaaatacaggtaaagccatggaaaattcttccgataaaagtccttatactatccctgtcactccaccattttccaatcggaggtttgatgctggaacaccatctgcttttcaaattactccaacaaatcaaaacatcagtcgtccccctcgtggttattttcagcattctgaacattttgattctgagttctcaacagttcctcttacatcatctgatggtaaaactactagttcaaaccagcatccgagatactgaatatacattggagtacccaattaaacaaatgtatatatcattgtttgttcaattaattctttcacattcaaaatgagtgtctctttttcacctaagggggtacggggaacttctaaagtttttactttccattgccttcggcatctcgtttgatttgacgtatataatttgggaattttggaagatgtagatgtcatataatatcgttcccattgctttaatgcatataatacaattctatacttgaaccaattagcagctataatatattctctattttgtgatgcat

SEQ ID NO: 29869 - DNA, 2734 bp, Glycine max
  Clone ID: UC-GMROPIC016E08_FLI
tggaagctggtacacctctgacgggaatcctgatctcctttcatctaacgtggcagacataaagctccaatcatcaagtgcaccagcacaaccattagggtttcatggctatgttcttacagggaaactgaaatcgccaaagctttggtccgcagaaaaaccatacctctataccctagttgttgtcctgaaagatagatctggccgcattgttgactgtgaatcatgtccagtagggtttagaaaagtatctaaagcccacaaacaactgcttgttaatggacatgcagttgtaataagaggtgtgaacaggcatgaacatcatccacaagtggggaaggcaaacatagaatcctgcatgatcaaggatttggtcttaatgaagcaaaacaatattaatgctgtgaggaacagccattatccccaacatccacgttggtatgagctatgtgatttgtttggcatgtacatgatagatgaagccaatattgagacacatcattttgactattctaaacatctcaagcatcccactatggaaccaaagtgggcaacttcaatgctggatcgtgtgatcagcatggttgagagagataaaaatcacacatgtattatctcctggtctttagggaatgaatctggatttggaacaaatcattttgctttagctggttggattcggggaagagattcatctcgggtattgcattatgaaggaggtggatccaggactccgtgcactgatattgtgtgtcctatgtatatgcgtgtttgggacatggtgaaaatagccaatgatccaactgaaacacgtcctctgatactgtgcgagtattcacatgcaatgggaaacagtaatgggaatctacatatatattgggaagcaattgacaacacttttggactccaaggaggctttatttgggattgggttgatcaagccttggtgaaagtttatgaagatggtaccaagcattgggcatatggaggtgaatttggggatgttcccaatgacttgaatttctgtttgaatggcctcacatttcctgatcgaactcctcatcctgttttacatgaggttaagtacttataccaaccaatcaaggtggctttaaaggaaggaaaattggagataaaaaatactcatttttttcaaacaacagaaggattggagttcagctggtctatttctgcagatggatacaaccttggatctggtcttttgggccttgtccctataaagccccagagtagtcatgctgttgattggcaatcaggtccatggtattccctatgggcttcaacagatgaagaagaactattcctgactataacagctaaacttttgaactccacacgctgggttgaagctggtcatattgtttcatctgctcaagttcaattgcctaccaggagaaacattgcacctcatgttattgatattaatggtggcactctggttgctgaaacactaggagatacaatcgtagtcaaacagcaagatgcttgggatttgactttgaatactaaaacaggtttagttgaaagctggaaggttaaaggagtgcatgttatgaaaaagggcatcctcccatgtttctggcgagctcctatcgataatgacaaaggaggaggttcagccagttatttgtccaggtggaaagcagctggaatggactgcctccactttattactgagagctgttctgtgcaaaatattacggagaactcagttagaatattggtggtttttcttggtgttaccaagggcgaggatggttctctctccaaccaagacaagtcaaaggttttatttacaacagaaatggcatatacaatttatgcttctggggatgtcattatagaatgtaatgtgaaaccaaaccctgatcttcctcctttgccacgtgtgggaatcgagttaaatgtggaaaagtctttggatcaagtaacttggtatggaagaggaccatttgagtgttatccagatagaaaagctgcagccctggttgcagtctatgaacataatgttagtgagttgcatgttccttatattgttccgggggaatcttcaggtagggcagatgttagatgggcaacattcagaaacaaagatgcttttggaatatatgcttctaagtatggtagctctccacccatgcaaatgagtgcaagttactacagcacctcggaacttgaccgtgcgacacacaatgaagagctcattgaaggagatagcattgagattcatctagatcacaagcacatgggattgggtggagatgatagttggtcgccatgtgtccacgaacagtatttgattcctcctgtgccatactcattctctgttaggctgtgcccagtaaatccagccacttctggtcatgacatctacaaatcccagtttcaaaactcttgatttcttggatcacatgacttgttctattcaagaataaacatcttgtagaagaccgaagaccgaagaccaaagactggtgtgcttactaaggactacaaagaaacttggaagctattggtgtaaagatcccatgcaatcattttggttggaagcttgatttaataatgtggaaggtgaataatcttattgtacaaatttgttccattacccaaggaaccaagcagacaatttcacaacttgtttaataaatgtgctgtaactgtgatatgaataatttactgttcttatttgaagatcaagggcaatgaaatgaac

SEQ ID NO: 29870 - DNA, 1105 bp, Glycine max
  Clone ID: UC-GMROPIC018A05_FLI
atttcatttcgtcaatcactcctaacttctgcattccaaaaatgaactcggacacgacgtcgtattggtgctacagttgcacgcgcttcgttcacatccacgaccagaacgacgtcgtgtgcccccgctgccatggcggcttcgtcgaaaaggtcaccgccgggcaatcggcaaggcaggggttccgccgccgccgccgcaacgccgggagccactcgccgttcaacccggtgatcgtgctccgtggaccgggggaggacgaggagagcagctttgagttatactacgacggattcgacggcgaggggctccgcccgctgccgtccaccatgtcggagtttctgctcggatcgggattcgaccggttgctggagcaggtttcgcagatcgagataaacggcttgggaaggccggagaatccgccggcgtcgaaggcggcgatagagtcaatgccgacgttggaaatcaccgagtctcacgtcgcgtcggagacgacctgcgctgtgtgcaaggaggccttcgagctaggcgagttggcgcgtgagatgccgtgcaagcacctctaccactccgattgcattcttccatggctctcgatgcgaaactcgtgtccggtgtgccgccacgagttgccgtcggagcaagccgcgccggaaaccagagtcgccggccagatcgaggaggaggcggtaggcttgaccatatggaggttgccgggcggcggattcgccgtcgggaggttcgccggcgagagccctttgccagtggtgtacacggagatggagagtggcgggaactccaacgaaggttctcgaagaatctctctggctgttggaggcggcagagttagggaaagtcgtggtggatttgggagaattttccgcaatttgtttgggagaattggggctttgactagaagccgtagcctttcaacttcactcttcaatagaagaagaagtactagaacctgggtcttgggaaattgatttggatggagttggttttggaaaacaagctttcaatttgagattcttattgtaaatgggcatagaactgattcgaaatgtctttgcattttgcgttatatcaatagatgtttttctcc

SEQ ID NO: 29871 - DNA, 1717 bp, Glycine max
  Clone ID: UC-GMROPIC018D09_FLI
tagatggtctgctatagcggcaagtttgcccggaagaacagacaacgaaataaagaatttttggcatacccatttgaagaagaggatccagaaaagtggagtgcacaatggcaatccttcctcacgtatcttgcaagaggcacaagcaaatactagttcgaatgcatcaagtgtaatgattgccaattacggtttaccctcaaggaatattaatccacctattgcaggattttacggtgcagtctcctcagatacttttggagaaattaaggacaatcatggttcttgtcagctcagtgaagaaatggaattttggtacaatatatattcatcaaatcagggcaaacatcatgagacaatggaaatctaggatattatatagctagattgcatgagatactacatataatttgtctcactcctacaaattaactttttatttttatttttagatatcaacctttaattggtttcagcttggtgtttgtgtacaaaacttaaaatccattttggcaaagcaaattgccagatgaaaactaaagatgatcgatggataatttttaaataaaggctcgagagaagtttgtaaatgcatatatactgaaacaaagtacttttgactgccattttttttggtagtgacttttgactgttatttgaggcaaaggcaaacttttccttcaactttaaacttcaattcaattatgtagttcttagttcttaggaatcattgcaattacaattattatttttgaaaacttttttctgtttttaaaaataaaaatagaaaaaagaaacagtgataataattttttaaagtattttccagtataacatcttctttttaaaaaataattaatattctactttcaatattttatcatttatatttttccaattcagtatcttatcttttttgctttttatttctattctaaaaaaaattgtctttttaattacaaaaataatacatacacttattgtgtactttaccaataaaaaaaaccttactgtgtaattttttctaatgttgacaatacttgcctattattaaattctttttaaaactgaagaatcgaagtaaaatctaacacggcttgccgaataatattaaactcttaaaaaataacaagtcttaaaatagattgactgtactgcacagtggtgatattaaacactttgttttttttatgataatataataatggcccgttgatgtcgctttatgattactatgttagtttcaaatgttttccacagtaggaaaattattttggttgtaggatataccgtaagacttcctcctacactggattattctttttctttttaaaaaaaaaacaatgttttcctttcctattatgcaaatcaagttcactgtctcccttggttccatcaagcttcttcctttgcttcccacagtgtcatgacctcgtctacaagaagctgtcgttggtgtcaaaaagctctccatggatgcctactagggctttttttgggttcaccacggaaatcaaaatatcctgagtaaactccaccacaccaagatcgcataagtgttttttttttcagtttagtttttatatattttaatttattttattatgttcttaaaaaaaattatattgatgcttgtaatttaatttgggatctggtgaatatatggtgatgtttgtaatttaattttagatgttggtgaataaattgtggcttattt

SEQ ID NO: 29872 - DNA, 1327 bp, Glycine max
  Clone ID: UC-GMROPIC018F12_FLI
cacttagaaaaacgtggctctgcattatcgctagcggccgacaccatttctgattgtagcatcattattattactgaattctgcagtttcaaggtgaagcctgaagcgccatggaagctcaagcggttcaagtcttgcgatattcagctacgctgcattccaataatcccaagcttgagaaaacagggaccaatggctctctccgaatgtttggtggatttaagaaacagctttttgtttcgtctaagttgcagagtgcaaaaccttcggcgaatatacggcgaaggacagcatctttggtggttgcatgttcgcataataatattccagcttcagcattggaatatggaagctttcattcttctgttgaagaaaagttgattttgaagattaaatcacaagagatcgaaccatacttaagtggacgctgtatatatcttgttggaatgatggcctctgggaagacaactgtgggacggatattgtcagaggcgctttcttattcgttttatgatagtgatgcattggtggtgaaggaggttggtggaatatctgtaactgatatattcaagcactatggagagcctttttttcgtaataaggagactgaggtgttgcagaaggtgtcaataatgcatagacatcttatttctactggtggaggtgctgtcgtgaggcccatcaattggaaatatatgcagcaggggattagtgtttggttggatgtacctgtagaagtcttgactcagagaataacagctgaaggaactgattctcgcccacttctacattatgaaggaggagatgcatacacaaagactatcacgcatttgtcttccctttttgaagaaagaagtgaagcatatgcaaacgccaatgtgaaggtctccttggaaaatatggcagcaaaactgggccgaagagatgtgttagatttatctccaactgctattgcaatggaggcgctggaacagatcaaaggctttcttataggtgaagatggcttttaagcgtgtgctagcagaatcttccacacaagcatgctttaattgtgcatatttttctcttcaaataataattatagcatggcaatgtgttatatctttttgttaggaaaaggaatgatgcagcatcatcaacatgcacatatttagtattttttttattcgtaaaaattaaaaataagtactagaattgaagttttacaactttcacgtactgaactagatctcgttagtgtaggaatttagtgtttatgtgtaatttgtgtgatcatatataatttgacggcatgcagcatttaatttgtatatcttttttttttttt

SEQ ID NO: 29873 - DNA, 1701 bp, Glycine max
  Clone ID: UC-GMROPIC019B11_FLI
tagtataaggggcagcactggctacacagttcattcataagctatttcaggaaagtataacaaaggtttcctgaacacattaactttgaattgacagaacatgagaataataaatctgtattctcatcccaaggagcatggtagatttctgtaactattttttcttcttatagatgtgaaagaagctagaacacaagacagtagtcaaggggaacaatgaatgcactagcagccaccaacaggaactttaagttggcctctaggcttctgggattggattcaaagcttgagaaaagtttactgattccattcagggaaatcaaggttgaatgtaccatacctaaagatgatggcaccttgcaatcttatgtagggttcagggttcaacatgataatgccagaggccccatgaaaggaggaatcagataccatcctgaggttgaccctgatgaagtgaatgctttagcacaactaatgacatggaaaacagctgtagcaaatataccatatggtggtgccaaaggagggatagggtgtgacccagcagaattaagtatatctgaattagaaagacttactagagtttttacacaaaaaattcatgatttgattggaattcacacagatgtgccagcacctgatatgggaacaggaccacagaccatggcatggatactagatgagtattccaaattccacggttactctcctgcagtagtgactggaaaacctatagatcttggtggatctctcggtagagacgcggctacaggacgaggagtcctctttgcaacagaggctttgcttaatgagtatgggaagagtgtatctggacaacggtttgtcatacagggttttggaaatgtagggtcatgggctgcccaattaattagtaataaaggtggaaaagttgttgctgtgagtgacataactggagccataaagaacagcaatggtcttgacatcccaagcctacttgagcattccaaagtgcacaggggagtaaaaggattcaatggtagtgatccaatagaccctaactcaatattggttgaagattgtgatgttctagtcccagcagctcttgggggtgtcatcaatagggaaaatgcaaatgaaatcaaggccaaatttattgtggaagcagctaatcacccaactgacccagaagctgatgagattttgaagaagaaaggggttgtgatcctcccagacatatttgcaaattcaggaggcgttacagttagctactttgagtgggttcagaacatccaaggtttcatgtgggatgaggagaaagtgaacaatgagctaaagacctacatgaccaaaggtttcaaagatgtgaaggaaatgtgcaaaacccatgaatgtgatcttcgtatgggagccttcaccctggcagttaaccgtgtcgcacgtgctactgtccttaggggctgggaagcttgacatccattgcttctgctttcaataaattaattaaagagctcccactctcagcaacacttcacaaagtttttgttgctttcaactaatgtgttgggtgaatcgtattttcacgccaaattttctttcaataaattagtatagtatataaatctttttgtaactacatgtgtggttctatgccacttcttgtgacagccacgctttttaatataatgtcactttgctttgaaaaaaaaaatctgatttatc

SEQ ID NO: 29874 - DNA, 1266 bp, Glycine max
  Clone ID: UC-GMROPIC019F04_FLI
ggcaaatggagtggaaccacctaaaaggtcaggaaatttatggctctgtaagacaacatcagatggctcttctgaattcatagatcttgatatcttagtgagcaaactttcttgcaatgatatcgaggaacttcgatgtgcagtaggggagctccgacttcttgccaagcaaaatagtcaaaatcgaatgctgattgctgaagtgggtgctataccccaccttgttgatctcctctatgcacctgatgctggcacccaagagcatgtagttactgctctcctgaacttgtctatcaatgtggataataaagagcgcatcatggcttcagaggctgtgccaggcatccttcatgtgctagaaaatggtagtatggaagctcgggaaaatgcagcagccacctttttcagcctctctagggtggatgagaacagagtggcaattggtgcgtctggagcaatcccagcattagttactctattttgtgagggaagtcaaagagggaaggtggatgccgcaaaagcactattcaatctgtgtttatcccaagggaacaaaggacgggcaattagggctggtattgtccctaagttgatagaaatgctaacagaacctgatggggatatgagggatgaggcattgacaataatggctgtagtggctaaccattctgatggacaagcagcaattggatctatgaatgttgtatccactttggtggaattagtcagtaacggatctcctgggaacaaagagaatgcaacttcagtgttgcttctcctatgtaatggagaccctttttatttgtccattgtcagttcacttgggttggtcaatcctctcttggacctggcaggaaatggttcagaaagggccaagcggaaagcttcccagcttctagagttgataggaaaccattgagactatacttggaaaactgccagctagattttaggtgcatctgttgctattttatgttacagcagatggcaaagatagtgattgtagatgtgatttatacaataggttactataatataggatccccaatatttccttttcattttttagtttaaaggaaatttccattttactctaccaatcaatcatttagttgaattgaatcacttgtgctgtagagcttgtaggaagggttaaggtggctgttaaacacatagtagaaatacagatatttgtaatcagaagaaaaaaattgtaaacttcttcatcccaaactcctactgacttaatggcattttgtttttttg

SEQ ID NO: 29875 - DNA, 646 bp, Glycine max
  Clone ID: UC-GMROPIC019H03_FLI
gcatgatacctttacttctgtgtggaggacttaaaacgtacagcgctattcttctttgtcccattttcttcagcttagcacatttaaatcatttcttggagatttatgccaagcaaaactacagaatagtgaaggctgctatggttataggtcttcagcttggctacactgttgtctttgggtcatatgcgtcttttcttttcattcgaactggacaccttatagctcccttagttgcgcacatatattgtaattttatgggactgcctgtattgtattcgcagagaagtgatttggaagcttagtttcagctggacttctgattggaggcacaaggattgtaagtgtaacattcataataggatttctgggcttcttgtggcttcttttcccaatgacgggcccagaattgtataatgatagaatagataactgcagttgttggcaaagctactgcacatggagagaaacgataagaatgacccagatgtaaacgttactatttttttttttttggggaggggtttggtggtgaaggaagagtgaactaagaatgaattctataagaacacagtgacactcaaaattgctagaagttaaaactttccccaaagggctcataaatatcagcttcataaatcatgac

SEQ ID NO: 29876 - DNA, 746 bp, Glycine max
  Clone ID: UC-GMROPIC020A07_FLI
gaggggcacaactcatgggtcagcggtgtggcttttgattcatattggtcatcacctaattcaaatgacaatgaagagactgttagatatcgatttggttccgttggtcaggacacacaattgcttctatgggacctggaaatggatgagattgtggtacccttgcgacgtccttctggtggatccccaacttacagtgctggaagccagtcttcccaatgggacagtgttgtcccgttgggtaccttgcagcctgctcctagtatgctggatgttctgaaaatctctccactcgttacccaccgtgttcatactgaaccactctcaggcttgatatttacccaggaatctgtacttactgcctgtcgggaggggcacataaaaatctggattagacctgcagctgctgagagccaatcaagcaacgctgaaactctcttatctaccagccttaaggagaagccttcaattttgagtaaggttggcaattctagccacagacaatgactaagatcttgctaataattgaaagggtattcactttgaagacccttttaataatttcttcaatgtccttcttagtctccctctatcccttttcacagggctaaaagccatgcaatttacttctcactggtgccttgagtggcctctggttttaaatcgagcctaatggcgctgcgtgatcaatgtagttgacctcacctagtgggttaaagttataattattgtttttaatatggttt

SEQ ID NO: 29877 - DNA, 301 bp, Glycine max
  Clone ID: UC-GMROPIC020E03_FLI
cttgatgcagtaaataaagtcatcaaaggataccagaagttcagtgcaactcccaagtatatggtctacaactgagttattctttcatcttttcccgagaccatagtagaacgtacgatcttatctttattttcccctgaaaattgaagggcatgcgattctttctatttaactcctgtttgaatgcatctttgtctgtagcaaacgtttccttcatgttacatccaaaattgagagcaaaaccttcttttagccttttgaagaatatacttgttatcaatggaagttgttcgttattggg

SEQ ID NO: 29878 - DNA, 1744 bp, Glycine max
  Clone ID: UC-GMROPIC021B03_FLI
ctgtggtgatgatcagatcagtcttatttacatattggggtctaaagacatctcaaagcttcttcagtggaatgcttgaaagcatcttgcatgcaccaatgtcattctttgacacaactccctctggcagaattttgagtcgtgtatctactgatatactttgggttgatatctcaattccaatgttggtgaacttcgtcatggttgcttacttctcagtaaccagcatcctcattgtaacatgccaaaatgcttgggaaacggtcttcctcttaatcccactgttctggctgaataactggtatcggaaatattaccttgcatcttctcgggaattgactcgccttgattccatcaccaaagctcctgtgattcaccatttttcagaaaccattgctggtgttatgaccatacgcggcttcagaaagcagaacgcattttgtcaagaaaatattgacaaagtgaatgctagtctgagaatggatttccacaacaacggtgctaatgaatggcttggttttcgcttggactatatgggagtgattttcctttgctttgccactatttttatgatctttctgccaagtgctattattaagccagaatatgttggtttgtctttgtcctatggcctggctctcagtagtctcttggcatttaccataagcatgacttgttctgttgagaacaaaatggtttcagttgagagaataaagcagttctccagccttccctcagaagctccatggaaaattgctgacaaaactcctcctcagaattggcccagtcaaggcattattgagttaaccaatttgcaggttcggtatcgaccaaatactcctctggttctcaagggaatctctctcaccattgaagcaggagaaaagattggtgttgttggtcgtacaggaagtgggaaatcaaccctcattcaggtgttatttaggttgattgagccttcagctgggaaaataactgttgatggaatcaacatttgcaccctgggccttcatgatgtgaggtctagatttggaattattcctcaagagcctgtcctctttcaaggaacagtacgaagcaacattgacccccttggactgtattcagaggaagaaatttggaagagtcttgagcgctgccaactgaaagatgtggtggctgcaaagccagagaaacttgaggctccagtggttgatggtggagacaattggagtgtggggcaaagacagcttctttgcttgggaaggatcatgctaaaaagcagcaaaatattgttcatggatgaggcaacagcatccgttgattcgcaaactgacgctgtgatacaaaagatcatccgtgaggactttgcggatcgtacaattatcagcattgctcatagaataccaacagtcatggattgtgacagggttttagtcattgatgcaggctatgcaaaggaatatgacaagccatcgcgtttgctagaaaggcattcactttttggagcattggttaaggagtactctaatagatcagctgaactagaggcttagattctaacaaggacccagttgatgcactcagtttccatccaacacacagcaccaaagtcaaaagacatgagtcgatgggtctattgagagatcaatatttttgagcattagttttgatgttttactctttcagtagtttaataattagactaggacaataggaaggaaattttaaaattttttactaataaaaaatcaagtttggctgc

SEQ ID NO: 29879 - DNA, 716 bp, Glycine max
  Clone ID: UC-GMROPIC021E04_FLI
ttagccagtatgctaacatggcttccttccctggcagtggaaatgggctaagatcccttccttcgtctgatgatgcaaccctttacttcagttcagatcaagggagtaattcatttgattatgctcctgagatctcatccatgctttctgctcctttggattgtgaatctcattttgtgcaaaatgccaaccagcagcagcctaactctcagaatgtggtatctattgaagatgattctgcaaagacactctctgaggagcttgtggatattgaatctgagttgaagttctttcagatgccttatcttgaagggagctggggcgatacttcattggaatccttgctatctggtgacacaactcaggatggtggaaacctcatgaacctttggtgctttgatgacattccttccatggctggtggagttttctgaaccgctttttctttggtctccctgtgtgtaaataaagctacaagttgtttttctctgtttttgatttttgttgcatttgttgttctcttgttggacacatccccccatgtgtctgaaaaaaaaaatgtaatttccatttttgttgctttctggaatggttgtcatccgtgttgaagatggagttaaaacaattaactcgctcaagcatctcttgtatctaaagtatggggctatatagttatttaggtgtcctttgccttgtcaaaggccttagttttgggg

SEQ ID NO: 29880 - DNA, 3179 bp, Glycine max
  Clone ID: UC-GMROPIC021F08_FLI
gttttcattcattttgtgtctttttatttattttatttgttcatgtggggttattggttatttttctatgatcggttgatcacaggtgagggactgaaaggtagcaatggcgaccaggaacttggaaaagatggcatccattgatgcacagcttaggcaattggctcctgccaaagtgagtgaggatgacaaactgattgagtatgatgctcttctgctggatcggttccttgatatccttcaagatttacatggggaggatctgaaggaaacagttcaagaagtgtatgaactttcagctgagtatgaaggaaagcatgaccctaagaaactggaagaacttggaaatttgataaccagtttggatgctggggactctattcttgttgccaagtccttttcccacatgcttaatttggccaacttggctgaagaggtccagatttctcgccgccgaagaaacaagttgaagaaaggggattttgcagatgagaacaatgcaactacagaatcagacattgaagaaactctcaagaaacttgtatttgacttgaagaagtctcctcaggaagtttttgatgcactgaaaaaccagactgttgatttggttcttactgctcatcctactcaatcaattcgtagatctttgcttcaaaagcatggaaggataaggaattgtttatctcaattgtatgccaaagacattactcctgatgataagcaggagcttgatgaggctctacaaagggagattcaagctgccttccgtacagatgaaatcaggaggacccctccaacaccacaagatgagatgagagcagggatgagctacttccatgaaacaatttggaacggtgttcccagatttctgcgccgtgtagacacagctttgaacaatatcgggattaaagagcgtgttccttataatgctccccttattcaattttcttcttggatggggggtgatcgggatggtaatccaagagtaactcctgaagtgacaagggatgtttgcttattggctagaatgatggctgctaatttgtattattcccagatagaagatcttatgtttgagctctctatgtggcgctgcaatgatgaactacgcgttcgtgcagaagaacttcacaggtcttccaagaaagatgaagttgcaaaacactatatagaattttggaaaaaggttcccccaaatgaaccatatcgtgtggtactcggtgaagtaagggataggctctatcagactcgtgagcgttctcgccatttgctttctaatgggtactctgacattccagaggaagccactttcaccaatgttgaggagttcctggaatctcttgaactatgttacagatcactatgtgcttgtggtgatagagcaattgctgatggaagccttcttgatttcatgagacaagtctccacttttggactgtcactagtgaggcttgatatcaggcaagagtcagatcgtcacactgatgtgctggatgccattaccaaacacttggaaattggctcgtaccaggaatggtctgaagagaaaagacaggaatggttgttgtctgagttaagtggcaaaaggcctctatttggacctgaccttcctcaaactgaagaaattagagatgttttggacacatttcatgtcatagcagaactaccaccagacaactttggagcctatatcatatcaatggcaactgcaccatctgatgtgcttgcagttgagcttctacaacgtgaatgtcacatcaagcatcccttaagagttgtgccattgtttgagaagctagctgatctagaggctgctcctgctgctctggcacggttgttctcgatagactggtacagaaataggatcaatgggaagcaagaagtgatgattggatactcagattcagggaaagatgctgggaggttctctgcagcatggcagctatataaggctcaggaggaacttataaatgttgccaagaaatttggtgttaagctaaccatgttccatggtcgtggtggaactgttggaagaggaggtggacctactcatcttgctattctgtctcaacctccagacacaatccatggatcacttcgtgtgacagtccaaggtgaagtcattgagcaatcatttggagaacaacacttgtgctttagaacactacaacgtttcactgccgccactctagaacatggcatgcaccccccaatttcgccaaaaccagaatggcgtgctttgatggatcagatggctgtcattgctactgaggaataccgttccattgtattcaaggaaccacgctttgttgagtatttccgcctggctacaccagagttggagtatggaaggatgaatattggaagtcgaccagcaaagagaagacctagtggaggcattgaaacactgcgtgcaataccttggatttttgcatggactcagacaaggtttcatcttccagtgtggctaggctttggagcagcatttaaaaaagtcattgaggaaaatgttaagaatctcaatatgctgcaagagatgtacaatcaatggcctttctttagggtcacacttgatttggtggaaatggtgtttgccaaaggagatccgaaaattgccgctctgaatgatagactccttgtttcaaaggatctgtggccgtttggggatcaattgaggaacaaatatgaagaaactaggaaactcctacttcaggtggctggacacaaggaaattcttgaaggggacccttacttgaagcaaagactcaggcttcgtcatgctcccattaccaccctcaatattgtccaagcttacacattgaaacgtatccgtgatcctaactacaatgtgaaggtgcgcccccgcatatcaaaggaatctgcagaggcaagcaaatcagctgatgaacttgtcaaattgaacccaacaagtgaatatgcccctggtttggaagacacactcattctcactatgaagggtattgctgctggcatgcagaacactggttaagtttgtttgaatactgaaagtgagtgctctagttttgttctcagatacactttttttgttttgttattatgttgccccacctttctgtacaatttggtatgctgctctagaattccagaagagctagctaccacacaaatgaatcaatgacattgatctgttatgtttc

SEQ ID NO: 29881 - DNA, 1522 bp, Glycine max
  Clone ID: UC-GMROPIC021F10_FLI
gctgttacggtttggtttggtggttatttgattggtgtgcatccatgttgagctagtggcgatcggatccagctacagcctacaacctacagatcaaggaaggaagatgttgggtgttataaggcacaagagtattcgccccgccttctccgcaatcagacacttctcttctgcagctaaagagattactgtcagggatgctctcaactccgcgctcgatgaggaaatgtcagctgatcctaaagtcttcttgatgggtgaagaggttggggaatatcagggtgcatacaagatatccaaggggctgctcgacaagtatggccccgagagggttctcgatactccaatcactgaggctgggtttgctgggattggagttggcgctgcttactatggtctaaggcctgttgtggagtttatgacttttaacttctccatgcaggcaatagatcatattattaactctgccgcaaaatcaaactacatgtctgctgggcaaatatctgtacctattgtctttagaggacccaatggtgctgctgctggggttggtgctcagcattctcaatgttatgcatcttggtatggttcatgccctgggttgaaagtcttgtcaccatattcatctgaagatgcccgtggtttgcttaaagctgctataagggaccctgatcctgttgttttccttgaaaatgaattgttatatggtgagtcattccctgtttcggccgaagttcttgattccagtttttgccttcccataggaaaagcaaagattgagagggaaggaaaagatgtgactattacagcctattcaaaaatggttggctatgctctcaaggctgctgagacactggcaaaggaaggaatcagtgctgaggtcattaatttgcgttcaatccggccgcttgatcgatccacaatcaatgcttctgtcaggaaaaccaacaggctggtgacagttgaagaagggtttcctcagcatggcgttggcgctgaaatctgcacatctgtcattgaagaaagttttggttatcttgatgcacccgttgagagaattgctggggctgatgttcccatgccttatgcagcaaatctggaaagaatggctgtcccacaggttgaagatattgttcgtgctgcaaagagagcatgctacagatctgtgcctttggctgcatctgcttgaatgttctggaaaattttcatgtcctggttagttctttgcagaaacaaaattttccctattttccgccacaaaacagcaggaagaaattgcaaccaaagaatgctgattttaactcatttattatgttaggctttggtttaaaagattctgttgtatgcataatactgtcctaattttcaggactcacagatgctatacattttttccccttctcagcatatctgggaggaagttaatgttaaataacttgtacaacaatgacacaaaggcagcaggaagttttctgcgtttttggtttctgcttggcaataactaaaaatcaactttttgaat

SEQ ID NO: 29882 - DNA, 1092 bp, Glycine max
  Clone ID: UC-GMROPIC021G08_FLI
cagtggaacgacttcctttcgcccctcacgcgccgcttcaacgtctacgtcccggacctcctcttcttcggagactcccacacgacccgccccgaccgctctgaagccttccaggcccagtgcgtcgcggccctcctccaggcccacggactccagagaaccagcgttgtgggtataagctacggcggcttcgtggcgtacagtctcgcggcacagttcccggagcgcgtggagaaggtggtgctatgctgcgccggggtgtgcttggaagataaagacttggacgaagggatgttccaggtgaagactgtggatgaggctgcggatattttgctgccgcagacgccggaaaagttgaggcagctcgtgcagctcgcgtttgccaagcctgtcaaaaccatgcccacttgctttctcaatgattacattaacgtgatgtgtactgataaccgccaagagaggaaagaactaatcgaaacattacataaggatagaaaattatctaatcttcctaagataacccagcctacgttaataatctggggagaaaaggacctggtcttccctatggaattagctcataggctacaaagacatttgggagagaacgctcaactagtggtcattaagaatgcagggcatgctctcaatgtagagaagcccaaggagatgtacaagaatttaaaatccttcctccttgatcccgctactccaactccaactgcgcaaaaaaaccacagtaacggtagctaagtggattagcagagaaatggaagagatttatttttcggcattgtttgtgaatatgcttgtgtatctatttgtttatacgctgttatcagccacgcggtagttttcggcacggataggacgagaagggatagtcgtgaaactggttctttatagagtaaaagaagagcgtatctgctgccaatttaaagtatgcggatgagcatctgaaaagaaattttacagatcatccactgtaaactcatatatcaggaaacttggctacggatagaatctgattcagaggaatttgttgctaaggatacaggaattgcatatgaaatatcatgagctggtgtgggt

SEQ ID NO: 29883 - DNA, 2975 bp, Glycine max
  Clone ID: UC-GMROPIC021H06_FLI
cgaagcatctaggaaatattacttctctcacatacctgatgctcgaagcaaaccaattttctggtgatgttccaactgagcttgggaaactaatcaacttgcagaccttggttctgtcatccaatcaattgactgggagctttccaccttcacttgcaggactacaaaacttgaccgactttagaataagtaataacaattttactggaaccataccaaattttatacagaattggcaacaactcaaaagactagaaatgcatggaagtggactagagggacccattccatcaaatatctctctcttgaataacttagaacagctaagaatcagtgatatagaaagtcctagccaggactttccttttctggggaacatggcaggcttgattactttggttttaaggaattgtaacttatctggtgtgataccttcatatatctggacgatgatggctttggagaatttggatgtcagttttaacatgcttgttgggcaaattccagcagttataagtgcaaggcgtctaagatatatctacctaacaggtaatattcttagtggcaatataccaaattcagtcctgaaggacggaagtagcattgatctttcatacaacaactttacttggcaagatgatgaccagcctgcttgtcaggacagcatgaacttgaatctgaatttgttcagaagctcgattaaggagaataagttagaggagtatgttccttgctccaagaatttcatctgtccacggtattcaagttgtttacatgttaactgtggagggaaggatgtaaatgtaaaagatgataaaggagaaaacctttatgtgggagatgatgttcagggtggcactgcaacttatttctacagttccaatgatcactggggatttagtagcaccggagactttatggatgatttcgatggccagaacatacgttacacagtatcatctccatcttcaaatatgcctgaattatacaaaacagcacgtatatctccaattacacttacttatttccataattgcatggaaaatgggaactatactgtaaacctccattttgctgagatacagtttacaaatgataaaacatttagaagtcttgggaagcgcatatttgatatctatgttcagggaaaactgattcgcaaaaattttgatatagagaatgagacaaatgttgctgagaaaccactggtactgcctatatacaatatcagcattacaaataatgtcttggagattcggttctactgggctggaaaaggaactactagaattccggatgttggagtttatggtctccttgtatcagctttttctgtggtttcaaattctagagtttgctcaaatggagaaaagaaagtttctgtttctataataattgcaattgtagttggtgctctatgcttagtgctgtttacatctggattcatttggtggaagtggaaaggctttttcagagggaaactgcgaagggcaggtacaaaagatagagatactcaggcaggcaattttagcttggagcagatcagagttgctactgatgacttctcttctgctaataagattggggaaggtggttttggtcctgtatacaagggtcaattgctagatggtacttttatagcggtcaagcaactgtcatcaaaatcacggcagggaaatcgtgaatttataaatgaaataggcttgatatcttgtgtgcaacaccctaaccttgtaaagctttatggatactgtgctgaaggagaacaactcttgctggtatatgagtacttggaaaataacagccttgcccgagttttatttggtagtgaaaacaagcagcttaaattggactggcccacgaggtttaggatttgcattggcatagcaaaaggtttagcatttctacatgatgagtcaagattcaagatagttcacagagatatcaaggcttctaatgtgttactcgatgacaaattgaatccaaagatatctgactttggcttggctaagcttgatgaagcagagaagacgcatatcagcacccgagttgctgggactataggatatatggcaccagaatatgcattatggggctaccttactgacaaggctgatgtttacagttttggagttgtggcattagaaattgttagtgggaaaagcaataacaattatttaccagatgatggaagtgtttgtcttttggatcgggcatgtcagttaaaccaaactcggaacttgatggagctgattgatgaaaggttggggccagaccttaataaaatggaagtagaaaaggtggtcaaaataggtctcctgtgctcaaatgcttctccaacacttaggcctacaatgtctgaagtagtgaatatgcttgaaggacatgcagatattcctgatgtaatcccagaaccaagtacctacaatgatgatttaaggttcaaagccttaaggaatctccatcaatatcaatcaaaacagagtttgagtggaaaccagagccagagttcaatgacacatacattcacctcagcatctggtggtaatactcacactactagttatattgaggatcatagttcagttgacagtagttagttttctcctttcaccaacttgacgcactttaccagatagcagtggtagctccagatcttagggcttgaaaattttgaccagcatggaaccttctattttcacttgtgtagttttctgctttctgaagaggtctccaaaggagtatgagaagatttttcctttcttccttatgtcacccttatttgatttgattttactttttttgtttctttaatgtacaaatatattgctacaaataaagcaatctctaaatcataaatttaggttacttctttatttatttctatgtgtatccatataacggaagttcaattcatacctgatgtaaaatattataataaattataaattagattgtgtatgtttcaaacggat

SEQ ID NO: 29884 - DNA, 1667 bp, Glycine max
  Clone ID: UC-GMROPIC022A03_FLI
ctcattttgcaagctttctttggtttcacaccatttttctattgacttcatcacaatataaaagatcattagtgtcggtattatcaccaccatattcttttggacttcctctgctatttctaggtttcgttttatttggctttgattttcttctgcaaccttatctcctgcaaagctttgattactgagtctaacttcccctgccacagtttgccttgtttacctggatcatcggttataatgttttctctcaatttggtcatcaaggtattctggtctctccatgtgttctgttctattgcaagggatagaagatcttaactctgtttcaatttccctgtttttcttcacaagcagagctctgtttttaactggtctttgatcaaggatggccataaaggcaattgagttgttgaaaggaagcggaaaccatgaagagatatttgaagttcttgcagcagtggctgcatctttgggggatgtaatagatgatgtgaacactttgcaggtaacacctttaaagggggcaatgaccaatgaggtttttgaggtaaattggccaaccaaaagtgatggtcatcaaagaagggttcttgttcgattatatggtgaaggtgttgaggttttcttcaacagggtggatgaaatccaaacctttgagtgcatgtcaaagcatggacagggtccacgccttcttgggaggttcaccactggcagagttgaggagttcattcatgccaaaacactctcagctgcggacctccgtgaccctgaaatatctgctttgatagcatctaagatgagggagtttcacaatcttcatatgcctggtgcaaagaaggctcagctttggcagagaatgaggaagtggcttagtcatgccaaaagtttgtgctcccctaaagaaaccaagaattttggcctggacaatctagatgctgaaataaatatgcttgtggagttgttatctcaaggaaatcaacagattggtttttgtcacaatgatctacaatatggtaacataatgatggatgaagatacaagagcaatcactttaattgactatgaatatgccagttacaatcctattggatatgatctggcaaatcatttctgtgaaatggtggcaaattaccatagtgacgaacctcatgttcttgactacagtaaatatcctggtctggaggagcgtcaaaggtttgtttataattatttgagttctgaaggtaagaaaccaagcaatagtgaagtggatcagctagtgaatcttgcagaaaaatacactcttgcaaaccatctattttggggcttgtggggacttatttcgagtcatgtcaatacaattgactttgactacaaggagtatgcgaggcagagatttcagcaatactggttgaagaagcctactttattggactcaccaagtatcgtttcccaagatgggattgccaatggtgtgaaccattgacatggatgcttcttatgtatttagcatgttcagcttggtatgtgttgactaatatatagaaaggcatgatgtgatgcataaaatttgtaaataatatataactaaaaatgtgtgatttgagaatttttacaacagttatgttagtaatccctccttttgtgataagttgaggaatggaagtgagaattcctagtttgtt

SEQ ID NO: 29885 - DNA, 527 bp, Glycine max
  Clone ID: UC-GMROPIC022C10_FLI
cactaacactatagtgctttgacttcttccaaacttggtttccatgatatcatggcggaagtttacaagaatgggccagttgaagttgcatttaccgtttatgaggattttgcttactacaaatcaggagtttacaaacacatcactggttatgaactaggtggtcatgcagtaaagctaattgggtggggaacaactgatgatggggaggactattggcttctcgcaaatcagtggaacagagaatggggagatgatggttacttcaagatccgaagagggacaaacgaatgtgggattgaagaggatgtaacagctggtttgccttccaccaaaaacctcgtcagagaggtgactgatatggatgctgacgctgctgtttcattctgaatgtaaatatattgcctttccaattatattctgtatgggtattgtaattgaaaaatcagcactagatgttgcctgtagtctgaacctctgttttaaggggaacaatctaaattatgattacgatgttcaaagatgtt

SEQ ID NO: 29886 - DNA, 1819 bp, Glycine max
  Clone ID: UC-GMROPIC022D09_FLI
ttggacttccacctcaccgttttcagccactttctttgcgccatggaaacaggtaatctgccagtttttccatatttgaagtaaggatattcatcttatgaccaagagtgtcaatctttcggattaagagttattgctttagttttatctagagtaaaggaccagctagtgagatgctatagatccttaattcaaatctcatcaagagaaggtacgttgtctggcatgcgtacttgttgaaggtgatatatgacctaaacaattatcagaacttaatctgatttcaaggcagtttttctgagctgatctggatgggaactgatgaagaaagcacagctaaagtttctaaaccatcttctacttcttctactaagataccactggcaccttcatatcctgattggtcaagctcggtgcaggcttactatgctcctggagtcacaccacgtgcattttttgcctcaactgttgcttccccaactccccatccttatttgtggggaagccagcagcctctaattccaccatatggtactcctgttccatatccagctatatatcctcctgggaatgtctatgctcatccaagcatggcaacgaccccaagcaccacacagaatggtacagagttattaggaaaggagtctgatggaaaagatcgggtttctgccaaaagttcgaagggtgtgtctacaaacagtggttccaaagcaggagacaatggaaaggcaggctcaggttctggaaatgatggtgtctcacaaagtgctgaaagtggttcagagggatcttcagatgctagtgatgagaatactgaccaacaggaatcagctacaaacaagaaagggagttttgaccaaatgcttgttgatggagccaatgcacggaagaattctgtgagcaccattcctcattcttcagtacctggaaatcccgctgtctcaatgtctccaactagtcttaatattggaatggacttgtgggacgcatctcctgctggtgccgaagctgcaaaaatgagacataatcagtcttctgcctcagaagctgttactcctccaaccataatgggacgtgaagtcccgcttggtgaacaatggatacaagacgatcgtgaactaaagaaacagaaaaggaaacagtctaatagggagtctgctaggaggtcaaggctacgcaagcaggctgagtgtgaagagttacaaaagagggtggagtctctgagaagtgagaatcgaattctcagagaagagcttcagagagtatctgaagaatgcaagaaacttacatctgaaaatgattccatcaaggttatacagtaaataaccttggcctacattatttatcgagacttcatgcaattcagtgataataaagattgtatcgaagagactgttccagtcacaatgtaactccagaagtaggtcttggaccaaggattgtgtgttgtgccttcttcagatatgacggtgcatatttctccaattcggggtttggtcaaaatcttgaaaaaatcgtaatcatgaatcatcccatgatcgtaagttgaggatagtgcttgccattgggtcgagcttctggaagggcattggcttggcatattcagaagccagatagtgttcaaagaaatcccatatttttagtatttacttgtgccgatgaatagatgattttatgctaattgggcacttctgttcggtgttcagtagtttcactttctcaacttctgctgatgtttacatgccgctttaatttccgagcaccttgtaagaggtaaccatggaaccatgtgtttgttctaccaatttatatttgagct

SEQ ID NO: 29887 - DNA, 2755 bp, Glycine max
  Clone ID: UC-GMROPIC022D12_FLI
gagagtgataggtgagtggggagagaaagacagagagagaaagcgggtcagtttctttttggagtattgggtcagcttcttttggcaatgccaaagttggtcacgctctctgaaaatgcagcagctgcagcagcaggaggcatgaagaacaacaacctcaccactccttcaaatatcatcatttctcactcgttacttcactttcttctttgcttctctctcttcttccctctcctttctcattcttctcctcatggctggtctcatcgatctcaacaacgcaaccgaagacgatgaaatgccgtcgtctggctcctcctccaccgtgtgcctcgagctctggcacgcctgcgcgggtccattgatttccttgcccaagaaagggagtgttgtcgtgtacttccctcagggacacttggagcaacaccttcacgattttccgctccctgcctctgccaacatcccctcccatgtcttctgtcgcgtcctcgatgtcaagcttcatgctgaggaagggagtgatgaagttcattgccaggtggtgctggttcccgaaactgagcaagtacatcagaagctgcgggagggggaatttgatgctgatggtgaagaggaggatgctgaagctgtgatgaagtccacgacgccccacatgttctgcaagactttgactgcttctgataccagcactcatggtggattctccgtgcctcgtcgcgctgcggaagattgcttccctcccctggattacagtcaacagaggccttcacaggagcttgtggcgaaggatctccatggccaggaatggaggtttcgacatatttatagggggcagccacgaagacacttgcttactaccggttggagtgcatttgtgaacaagaagaaacttgtatctggagatgctgttctgtttcttaggggtgaggatggagaattgagattgggaattcgtagggcggctcaattgaaaagtggcagtaccttttcagctctttctggccagcaattgagtcctaccagtcttatggatgtggttaatgctttgtctgcaagatgtgcctttagcattcactataatccgaggatcagtacatctgagttcatcatacctatccacagattcttaaagagccttgattattcttattcagctggaatgaggttcaggatgcgcttcgaaaccgaagatgctgcagagcgaagatttacaggattaattgttggaattgctgatgtggatcctgttagatggcctggatctaaatggagatgcctaatggtaaggtgggatgacttagaagtcacaaggcataatagggtttccccatgggagattgagccatctggttctgcttctactgcaaataacttgatgtcagctggtttgaagaggaccaagattggattgccttcagccaagctagaatttccagtttccaatgtgattggaacatcagactttggggaatcactaaggttccagaaggtcttgcaaggtcaagaaatgttgggtgttaatcctacttatgatagtattaatgctcagagtcaccaggtatctgatttgaggaggtgctatcctgtctcaaactatcctaggattgctgcaacaggaaataacattggaatcccacaagtgagttccaatgtttccagcaatggcataggctttagtgaatctttcagattccagaaggtcttgcaaggtcaagaaatatttccaagccaaccatatggaagggccctgtctgttgatgaggcttgtggaaatagtcgctgtggactctttgatggttaccaggtgatgagatccagaaatggatggtgttccgacatgagtaacaattcctcaaatttgcatcctcctgttccatctgggcaagtttcatctccatcatctgtgttaatgttccagcaagcagtcaatctagtttcaaactccgattataacaacaaaattagtcaggtgatgggaggtaagttccatcaacgagtttcatatgcttctgatgttaaaggtggaaaatttgtatcaaccccctatgagcctcttctctgtggactagctaaggaaggcacaaattcttttggtctttcaaactttcataatcagctggatagttcacgttcacacgattccatatcagtactgagagctaatcaagagttggttccctcgtgtaaaagtagttgcagagtctttggtttttcattaactgaggttgctcccattgcaaataaagaggctgctgactcatcttctgtagcatgttctggaccttcctttacaagacacgttgatgatgatttccatccagggcattcacttaggagcaaggcagtggcaagttattgcaccaagggtgtgctgcaatattgactatgaaatcacgatgtacgctagtactgatgctggcataaggtagcagaatacaatgtccacagttgttgtacttgtgtgctttgctctagtaacttggagtattggagacaaaaatattgtaactatttgcctaatttagatactttttaattaggctatgaccacattctagttcttgtattaatcttttatgttctctttattggctggcttgtatggggaaaaacctctaaacgatgcatgtttatccaccgttttggccatatgctgaacgaagtaagccaggtggttgtgcataacccttcatttatcttgaattgggcatttgattacattagagagcaataacgcttcatgtttcatgtcctt

SEQ ID NO: 29888 - DNA, 1630 bp, Glycine max
  Clone ID: UC-GMROPIC022E10_FLI
ttccaaatgggtcctggtgctctgcagtcaacatatgttgagaagaaaagattcacgcctgaatccgatagttcatctttaactgagtggaaatgggaaggaaccattgctaaaggcggaacccctgtttgttgtgcacgctgcttccctgttgggaaagtcctagatatgatgttacctgagttcttggattgcactgcaaaaactggtctagatatgctttcaaagcattactaccaagcagttggtgtttgggttgttttctttgtgcctggaagtgatgctgacatggaatgctacaatgaatttatgcattatctggaggaaaagcagcgcgctgcagttgccaagttggatgacaagaccaccttatttcttgttcctccatcagagttctcagagaaagtactgaaggtacctggtaggttgagcatatctggtgttattctgaggttggagaatcctgatttaaatcatggtcctgaacacattcaaagagaaatgactaacaaaaatctgctgtcctataatgagaatatactgcatctgaagtctacatttccttcagtacgtgtacctacattcccatctattccagaaatgggtaattctggaatcagcaatctttcatttctgggaaataaatttgcagcagctccatcagtttctgattcagctcgtgctgtggctagcatgtccgagtttcatgatgaaagaagtcacaactatcctacccagcagcgtacttcttctcaaaatctccagaacttctctaataaagctctaccattgcagccatcaagtggtgctggagaacctattgctgatgaacaccaacctatcattccaagggcagcgcaggatgtaaacgcgattcaacatcccagtggaatttctggtattccattttatggtgatagcaagttgtcttatccagatataagacatttagatcctttatcagtgcctgtgggagcccttgctccagaacagcttgcacaactagcagcaacgcttcttgagcagcagaggcaatcgggaggctcttcgagtacatctgcgttggctgatccccagcagattaacaggtttggcacatccgacacctcatccagatttatctcatccgacaactcatccagaccaccccagaaatatgctacagaaaacaatgtggtgaattctgatctctcagcatctcagatgggtcaaagtcaaatgctacagatgcaaaagcaacaacagatcgtaaatgtgcctcagttgtcacagatagttcaaagggaaccacaaagtgaggctaatggaaaccagttggatagcagcttgcaggaagatgctgatgtagatccacagagacgtctacaagcaacactgcagctggcggctgttcttcttcaccaaatccagcacggaaaaggaagttgagcagtgtcaggatatatggtgttgctttattggtttaatgtatttaacataaaattttaaacaaggattaacggttgtaagtaggatggtcagattttcattttactcgttgcagtggcttgtagtcagttcttagttcttagcgcttttattggtagtgtcctttcttttctaaaattatggtagggttaattaacttttt

SEQ ID NO: 29889 - DNA, 1646 bp, Glycine max
  Clone ID: UC-GMROPIC022E12_FLI
agaagttcacaggtgctgtcaaggagatgctatgcgtcagcctcagatctccccccacaccaggaaattggaatgccttctctctcacctacaatgacagaggttcctactattttaatcttatgagattgctgtatagtgggtcatgatttctcctaaattattcccaatgatattcagggtaacattgcaagatggttgaagaaagaaggtgataaaatctctcctggtgaagtgctctgtgaagttgaaactgataaagccactgttgaaatggaatgtatggaggaaggttatctggccaagataatccgcggggatggggcaaaagaaattaaagttggtgaggtaattgctgtaactgttgaagatgagggagatattgcaaagttcaaagattatcaaccttcagcatctgaaccaagtgcagtccctgccaaagaaatatctgccccacctacaccaaagaaagaagaggaggtagaggaacctggccgagaacctgagccaaaggtttctaaacccagtgcaccaccctcatctggagatcgcacatttgctagtcctcttgctagaaaattgggcgaagagaaaaatgtacctctctctagcattaaaggaacaggacctgaagggctcattgtgaaggccgacattgatgattacttggcttctggtgctaaagaagtttcagcatcctccaaggccaaggttgcaacagatgcagcattggattatactgacattcctgtctctcagatacggaaggtcacagcttcacggctactattatcaaaacaaactattcctcattactatttaacagtagatacatgtgttgacaaactcacgagtttgcggacccaactcaattcattgcaagaagcctctggtggctcccgcatatcagttaatgaccttgtaatcaaggctgctgctttggctctccgtaaagttcctcaatgtaacagttcatgggcaaatgattatattcgccagtataataatgtgaatattaatgttgctgtgcagactgataacgggctctttgttccagtcatcagggatgcagacaagaaaggcctctctacaataggggaagaggtcaaacaattggcaaagaaagccaaagaaaacagcttgaaaccccaagattatgagggaggtacatttacagtgtctaacctgggagggccatttggtgtcagacaattctgtgcaatcatcaatcctcctcaggctggcattcttgccgttggatcttctgagaggagggtcgttccgggttcaggtgctgaagagttcaagtttgcttccttcatgtctgtgaccctcagctgtgatcatcgtgttatagatggtgcaattggtgccgaatggttaaaagcattcaaaggctatattgaaaatccagagaccatgttgttgtaagaataaattgaaggctcccatgacgtactaaattcctttcaagacgttgtaggcaggggatgagattttgttcaccttggtatttctatatggcccatttgggttttgttattgtatccctgaccaatttttgattgaagtatttaatcactgaaaataaattttgcagatttgtaattcttttaataagagagggtagattaggcatttaattt

SEQ ID NO: 29890 - DNA, 917 bp, Glycine max
  Clone ID: UC-GMROPIC022F04_FLI
atgatgaatggtttaagaaagattataagcctccagtatctcaggtatagtgatacgagtggtgggatcaggatccaagattcgtatcactatacctgagatattggatgatgaatggtttaagaaagattataagcctccagtttttgaggagaacggggaaaccaacctcgatgatgttgaagctgtctttaaagattctgaagagcaccatgtgacagagaagaaagaagagcagcctacagccatgaatgcatttgagttaatttccatgtccaaaggactgaaccttgaaaacttgtttgatacagagcagggatttaaaagggaaacaagattcacctcaaaatcccctgcggatgagataatcaacaagattgaggaagctgcaaaacctcttggctttgatgtgcagaagaaaaattacaagatgaggcttgcaaatgtgaaagctggaaggaagggaaaccttaatgttgccacagagatattccaagtggcaccttctcttcacatggttgaggtacggaaggcaaaaggagatacattggagttccataagttctacaagaaactttcaacaagcctggatgatgttgtctggaaaacagaagatgatatgcaaatgcgagaaacaaagtgatattgttattatcattatcttgtgtaattttctttatgtctgaggttctactattttccaatttcttcattcgttatttcctcttaaggttccttcgtgtaggtttgtttggacatttaattacatattacttatatattgcgtaccatgctactattttttgaaagcatgcagagtttatgtaagaattttactcatcaacagttccagttatgttcatgaaacaaaaaattgtaagaaaagttgtatatatctatcttccttttttgctagt

SEQ ID NO: 29891 - DNA, 901 bp, Glycine max
  Clone ID: UC-GMROPIC023C12_FLI
ttacaatggctgctgtttctttaaggctcctttgctttcttttttttctctgtttcacaataacatcacaagccgcgcagacatgtgataacgacacagggaactacacagtaaacagcacgtatcacaacaacctcaacaccctcttatccagtttctcttcccacaaagaaatcaattacggtttctacaatttctctcatggccaagacccagacagagtatacgccattgggctctgcagaggagaccaaaagcctgatgattgcctcaaatgcctcaacaattccagagtctctctcgcaaaggagtgtccaaaccagaaacatgcgattgattggggtatagagtgcatgttgcgctactccaaccgctccatatttagcctcatggaaactcaacctatggtggaactcgtgtacacgttggatgtaaagggttcagtggaacaattcaacgaggcgctgcagagcttgatgaggaatctaacacgcacagctgcatcaggtgactctcgtctcaagtatgctacggctagcacacctgctccgagttttcaaaccatatttggttatacgcagtgcacccctgatttgtcatcggaagattgcaccaagtgcttggaagaagctatttcaaaaattccagagtgttgtagtggcaaggctggtggcaatgttttaaaacccagttgtagaattagatttgacccctacgtcttctatggaccaacattaaaattagactcagatgcaccatcagtgtccaccaacaaaacttcttcttcaccaggaaagagcaacaacacatcaagaactatcatcgccatagcagtgccagttgccagtgttgttttagcgctcagtcttttctgcatctatctaacagtgaggaagccaag

SEQ ID NO: 29892 - DNA, 786 bp, Glycine max
  Clone ID: UC-GMROPIC023G11_FLI
ggaacgaagaacgaaacgggtttggatacgggttggggttgtggttacggttttggttggggttggggttattattattggggtcgggttttgcgtgacgagatggaaaaagaagagaggggtgaaggaagaggattggggttcgcccggcccgtataagaatctcgaatccgcaagttttagatccattgaaatgagcaatagtaacagtgccaacgaatgacgcaaggggtgacgcatgtgctcttagttgacaattggtggggtccatctaatctaatgtttgttttctgttggtgttgaggtccggtgaaaaggtaccggattgtgttggttttctcaccaaccaggggcgcaactctcgcaagtggcggtttcaaaaacatgacttcactacagtgttatgatcatagcatggtaaagtcaatcagcttcatagactgaacttaaactaaataaacatttgtcggacgtgtcttttttatatttcaatttgacttgaaactgccgccgccgcttcatttgaaagtgaggctccattagttaaaactccttgcttgctcacagtcacagatatgaacgtaatgtaatgctcttccggcctttatcttttatactctacagtaaggccaatttattcattctttgaaatttctgggggagccaaggccattttaatcttcttttccattttttaatttattttgtctaccatgttcgttttatgtcattttatatttatcaagtaaatatgatttaactaagcaagtaaatatgatttatctg

SEQ ID NO: 29893 - DNA, 487 bp, Glycine max
  Clone ID: UC-GMROPIC023H06_FLI
gattggaagcctcatgtatcttttggccacaagacctgatcttactttttctgtttgtctcattgcaagatacatggatagacccactgaacttcacttagctgcagcaaaaagagttttgaggtatttgaagggcactatggagtttggagtgtggtacaagaaacagaatggaagagtaaatttgcaagggtggactgactcggattatgcaggtgatttagatgacagaaaatccacttctggatatgttttcacctttggatctggaccaatctcttggtcatctaagaagcaggccattgtgaccttatccaccactgaggcagaatttgtagcagcagcatcgtgtgcttgtcaagctgtttggctcaaaagaatccttgatcaacttggcaaacctcaagacagtggagttgtgatctggtgtgataatagttcttcagtcaagttgtctaaaaacccagtcatgcatgggagatgcaag

SEQ ID NO: 29894 - DNA, 2287 bp, Glycine max
  Clone ID: UC-GMROPIC024C04_FLI
gatttttcgaaaccttagcttcagagagagagagagagacaaagagagagaagcaatcgtggtctctcttctatgagcttcacttcgattcccgccacttctctgcaagcataggattttgggttcttgtgtgaaggatatggctgaggtggtgaaatcagaggagtgttgtcaggagaataagcaatctactgctgcttcttgctcctctgtatccgaaggcagtggcagtgcaattcacaagtctccggggagatgtagccctgcatccacatcgccctcacatcggaggaccaccggccctataaggcgtgctaagggcggttggactgcacaagaagatgagacattaaggaatgctgttgcagtttttaagggaaagagttggaagaaaatagctgagttttttcctgatagatcagaagttcagtgtctgcacagatggcaaaaagttcttaatccagaacttgttaaaggaccttggacacaggaggaggatgataaaattgttgaactggtgtcaaaatatgggcctacaaaatggtctttgatagccaagtctttacctggtcgaataggcaaacaatgtcgagagcggtggcacaatcatcttaatcctgacataaagaaggatgcctggactttggaagaggaattggccctgatgaatgctcatcgtatacatgggaacaaatgggctgaaatagctaaggtccttcatggaaggactgataatgcaataaagaatcactggaatagttctttgaagaaaaagttggatttttatttagctacaggaagacttccaccaattcctaagaatagtccacaagttcctgtcaaagatacaattagacgttctgctagtaaatcaatgcttggttgttcaaataaagaattaaatgcagctgttgaaacatcatctgaaactacagccattagtaagctagatgacagtggcaggaatcagtttgagtcctcaggcacagttagagaagttggtgattcttcaagtgttcctgcaaatgactctgccgattctgactgcgtagaatgcaagcctggatcatccaatatcaaccccagctgtagcaactcagaacacgtgtcaagagctaattttggaacaacttttgggccaatatctgagaattctggactcaatggaaactcaacttttgagcattgtacaaacaatggtgacaggagcagtaccaggttaatcggaacatcttcacaagaaaatccaacctgtggttctttgtgttatgagccaccacagttagatggttcagttcccatagattctctttatttaaattatacttgccagcagaatgagtactgtccgagtccaacgatgtcacctactggtttcttcactccacctcgtgcgaagggtagtgaattatgcactgagacacctgaatcgatcttgagaaaggctgctaatacttttccaaatactccttccatattgaggaggagaagaactggggcccaaacactcaccagtcccactaaagttttgaaagtagataataatccacatacttctaataaaacagagagaaccaatgatgattctggttctgggcatttctccgggagtccagcaagccatggctatgggattggcattcccaacaataaggcattcaatgcatctcccccatacaggttaagatccaagcgaacagcaattgtcaagtcagtggagaaacaactggagtttgcatttgacaaagagaagaatgacgacaagaggagtaatgtgatgactgaagatcgtctgcatgaaaaaaaattggttgtgacatagtgcataaattggattatggctggacttgcttttgaaggtagctgattgtttctctaaattgtttgacaatgtttaccaattttatgaagaaaattcagtgcacgggtcacaatgacttggcacttctccacacttgatagttggctgtcatttccatcacacttcaacaaaattcagcaacagtagataaattccatttacttgtggatacatatagctagttgtatctatcagatttgtacagttgtcttaggaaaaataaattttctaatgttttatcaatgtttttagattccttcaatcctttctctaaataatttatggcctgacctacttaataagtgtgtaaccttacattgttgcacccgctagtttgatgtacactatacattgaaattactgtttgacaatcacagaaaggtgttcatcatgaaattatcatcaaaatcaaagataaattaatgc

SEQ ID NO: 29895 - DNA, 967 bp, Glycine max
  Clone ID: UC-GMROPIC024C09_FLI
gaggaatatggcttccttaagctcctcattagtgctgctccttgcagctctaattctatcccctcaagttcttgctgactatgagaagcccccaatttacaagccacctgtttacacaccgccagtttataagcccccagttgaaaaaccaccagtgtacaaacctccagtttacaagcctccagttgaaaaaccacctgtttataagcctccagtttataagccacccatttacaagcctccagtgtataaacctccagttgaaaaaccaccggtttacaagcctccagtttataaaccacctgtttacaagcctccagtgtataaacccccaattgaaaaaccacccgtttataagccaccagtttacaagccaccagtgtacaagcctccagtgtataagccaccagtttacaagccaccagtgtacaagccaccagttgagaagccaccagtatacaaaccacccgtttataagccaccagtttacaagccaccagtgtacaagccaccaccacaacaacaacgacgaccacgacatccaccaggcccgggcccgggccttccgggcctcaatttcgggcccggtctactggaccgaggcccgaagcggctccgccaccccctaccgctccaccagccgcccctcctccgggccactcgccggaaccgtaacgccgccggcgaaggatgacgtggacacaccttacttgagtcttagagaactcaacatggagcaacaacaacaactccagcagaggatgtctacctcggccatgcccatatacttggtcacttgaaaaaaaaaaaaaaaaatcaaaccaatcacttattagggtatcaccactttcaaattcatgtctcatattttgtgcaacaagaaaaaaatattggtggttgattggagtggagtagcttggttggttacatatttagatttattatatttttgggtgggtttattttt

SEQ ID NO: 29896 - DNA, 875 bp, Glycine max
  Clone ID: UC-GMROPIC024G12_FLI
gtgagcacattgcaatggttaagggtgacattggggatggacatgatgttcttgtaagggtacactcagagtgtctcactggagacatatttggctctgccagatgtgactgtggaaatcagcttgctcttgcaatgcaacagattgaggctgctggtcgaggtgtattggtatatcttcgtggacatgaaggaaggggcattggcttgggccacaagctacgtgcctataacctacaggatgatggacgggacaccgtagaagccaatgaggagttgggattgcctgttgactcaagggaatatggaatcggtgcacagattttgagggacttgggtgttcgatctatgaagctaatgacaaacaatccagcaaaatatgttgggctcaaaggttatggcttgacaatttctggtaggatcccattggtatctcttatcacaaaagagaacaagcgatacttagagaccaaacgtgtgaaaatgggtcacgtatatggctcggaatttaacagcaaattgaaccatcaagacactggcaatggtaaagccaacagtgatgatgattctaatgctgctgctggcttataaaggtgcattttttctgccagatacacaattttatgtcacaaacagctgagaggaagtgtagatttcggcactgcagatggatttatacaaagagaatctggatgctactcatgatttaatttttctaattcatttgcctgacttttcttctggcaggctctataaatcaggcttcctcaaacatttgtcactccgaaattttatctagtgccatgtttaaggtttgactttcttgctttcttttcgtgttcatgatatataaaggtgatattccaatttccacat

SEQ ID NO: 29897 - DNA, 855 bp, Glycine max
  Clone ID: UC-GMROPIC024H11_FLI
tacaatgcaaaactttccgactttggccttgctaaggatggaccagttggagacaaatcccatgtttctactcgagtaatgggaacatatggttatgccgcacctgaatacttagcgacaggtcatctgtatatcaaaagtgatgtttacagttttggtgttgttcttcttgaacttctcactggaagaagatccttagacacgacatttgatggagagcagaaacttgcagaatgggctcattctttgctgaaggaaaagaagaaacttctaaaaatcatagatccaaggttggatggtgattatccaattaaagcagttcacaaggctgcaatgcttgcatatcattgcttgaaccgcgacccgaaagcaaggcctctaatgcgagaaattgtacattcattggagcctttgcaggcacacacagaggcacctattggaaaaaaacgttgaccataatcagtgaggatcctgaatctgatttgaaaaggaaagatgcaaaatgtgtgatagagagggaaaagtgcagaaaaggagtgaagagtttcgggagctgggcttagcctgaatggaattgagtttcacactggactacctgagaatgctttgagtgaagatttgatctccgcacgtttgtcacttagcacgattcctcttatgcttggcacagaagtctggaaattgaaggagtcttttttaggaactatgatttgcgtagaagtaattgtccttagcgcatcacttatgagttgtcacctatttaaggaatttctttgtactttttctgcaacttttcattattcatttttcgagtacattctctgataaaggggttgtgacagtgacctttgtgct

SEQ ID NO: 29898 - DNA, 3037 bp, Glycine max
  Clone ID: uC-gmropic025a05_FLI
ctcttataagcaaccccatctctctgtcccaatcccaacataccccccactggtccttttccattctttatacagacacacacaataaagaaaaagaaaaactacgttttcctttcactattctttttcaccctctccctctctcccatatatgatccaatatattgctataatacaatagaaccaacaactgtgacagacaaactctgagtagtacctcttttattctcctcctccttctctttcattctcaaaccactctgccatagtcttttctttcacctcttaatgaaacctcttggtttgtgtggttgaaacaaacaaagataagtcataataataaatcgggttggattcggaagggatgatggcggtgagttcagcctgcaaagatgggagcaaggtggcactggacaacggcaagtacgttaggtacacacctgaacaggtggaagcactggagaggctctaccatgaatgtccaaaaccaagttctcttcgccgtcaacaactcatcagagagtgtcccattctctccaacatcgaacccaaacagatcaaggtttggttccaaaaccgaaggtgcagagagaagcagcggaaagaagcgtcacggctgcaagctgtgaacaggaagctaacagcaatgaataaattactgatggaggaaaacgacagattgcagaagcaggtgtcacacctcgtctatgaaaacagctttttccgccaacagacacacaacaacaacgctacgcttgccacaacagacacaaacacaagctgtgagtcggtggtgacgagtggtcagcggaacttgacaccgcagcagcatccaccgagggatgctagccctgcaggacttttgtccattgcagaggagactttagcagagtttctttcaaaggccactggaactgctgtcgagtgggtccaaatgcctgggatgaagcctggtccggattccattggaatcgttgctatttctcacggttgccctggagtggctgcacgtgcttgcggccttgtgggtctagaacctaccagggttgccgaaatcctcaaagataggctctcatggtttcgtgattgccgaactgtggatgttctaaatgtgatgtccactggaaatggtggaactattgagctgctttacatgcagttgtatgcgccaacaactttggcacctggtcgtgacttctggttgctgcgttacacatcacttttggaggacggtagttttgtggtctgtgaaagatcacttaacaacactcagaatggtcctgctatgcccccagtgcagcattttgttagagcagacatgctgccaagcgggtatttgataagaccctgcgaaggagggggatccattattcatattgtcgatcatatggttctagagccctggagtgtacctgaagttttgcgcccactgtatgagtcatcaatgctgctagctcaaaggacaactatggcggccttacgtcatttgaggcaaatttctcaagaggtttctcagccaagtgtaactggatggggaagaaggcctgcagctttgcgtgcactgagtcagagattgagcaagggctttaatgaagcagtcaatgggtttgcagatgatggctggtccatgttagagagtgatggcattgatgatgtcacccttcttgtgaattcctcacctagcaagatgatgggagttagccttgtctataacaacaatggatttccttctgtgagcagttctgtgctatgtgccaaagcatccatgttgctgcagaatgtccctccagcaattcttcttagattcttgcgggagcaccgatcagaatgggcagacagcagtattgatgcttactcagctgctgccatcaaagctggtccctgtagcttgccaggggcccgatcaggaggttttggcggtcaggttattcttccactagctcacacaattgagcatgaagagttcatggaggttatcaagcttgaaaacatgggctactatagggacgacatgagtatacctggtgatgttttcctcttgcaactttgcagtggagtggatgagcatgcggttggcaccagtgcagaacttgtttttgctccaattgacgcatctttctctgatgatgcacccattttaccttctggttttcgcatcatacctctagattctggcacagatgctgctagtccaaaccgtacacttgatttggcttctgcacttgaggttggcacaacagcaaacaaagcagctagtgacaactcagctcattctgggagcacaaagtctgtgatgacaatagcattccagtttgcattcgaagttcaccttcaagagaacatagcaaccatggccaggcaatatgttcgtagcatcattgcatctgttcagagggtttcattagcactttctccttcgcgctttggttctcacaatgcttttcacttaccacctggcactcctgaggcacaaacacttgctcgatggatctgtaacagctatcggttctatcttggggtagaacttctaaaatgtgaaggcagtgagtccattctcaagtctctttggcatcactcggatgcagttttgtgctgctctttaaaggcattacccgttttcacgtttgcaaatcaagctggacttgacatgcttgagacaactttggttgcacttcaagacatcactctggaaaagatttttgatgacaatggaaagaaaactctgtgcactgagttcccccagataatgcagcagggtttcatgtgtattcaaggtggtatctgtttatccagcatgggaaggccagtgtcctatgagagagcagttgcatggaaagtgttaaacgaagaagaatccgcccattgcatctgttttatgttcatcaattggtcctttgtctaatatattaaacagtattaggatgtaggaaagaaaagtagagcacaagagtacctaactttggcgaatccctagaatgctttaaaactctagtgggcatatgcgccaccaagatctatctatggccccatttgtttt

SEQ ID NO: 29899 - DNA, 1745 bp, Glycine max
  Clone ID: UC-GMROPIC025B06_FLI
tctctataaccggcctcctaattaaactcacttgttggtggaaaattaattaaagtacttcttcattcaatggatcagcttggaatcattcaaccatcttcttcaaccaaggttgaaagaaggctagtggagaaaaacagaagaaatcaaatgaagaacctgtacaacaaactcaactctcttctccctagctataaccccaaggaagcattaccactgcctgaccaagtggatgaggcaatcaactacatcaagagtttggaggcaaaggtgaagatggcacaggagaagaaagagaatttgcagggaattagaaagagatcccgtggttgcttctccaataatagtgccaattttgctgcaacttctggtttcccaaaatcgccacaacttgagattcacgaagtgggttcttctctacaagttgttctgacttgtgggctagaccaccagttcattttctatgaaatcattcaaatactgcatgaagagaacattgaggtcagaagtgtcaattcctcgctcgctggagactcagtgcttcatgttgtgcatgctgagattcctcagtcttttcttcaatttggagctaccaaagtaagtgagagattaaaaaggtttgtgaatgggtcctgcagtgatgtggaaacacagcccgagttgtgggattttgaaattggtactgatgatatgtggggtttctagatcttacaaggatgcatttaccaaaagttttgtaaaataagaaaaaaaaatgttagctataatactacaacaagctttaagagtactgtatcaaacatattttgcccatgttccaacaggttttgacgggaattaactaacgagatggtttatcttttgtttgtttgtttgttatgatttgtaactttcaacattaattcagaaaacaaagttctcctcttcacattaaatattgatacctaacataattaagaggtggacggtggtcagtttcattgactgtcttataagtatctactatcctaaatcaggttcccaaaaccataggcacatgcatattaattatatgtctggatcatgaattgcactcattctaatgacaaatttcataagcttcttctaaaactctctcaatatgaggttctatttgatgtcaacaagcaaataaaatattgatggaaaagacagtagtgaaccgaatgaagatgttggctaggatttaataagtagatgggagcacataaatatgttaattgcttcgctgtggattagacagttcacagaagaagattcaatagaaccttgctgagtttcttttccaattcccttgtactactgtccgccattggttttcaatgctcaagggctacacatcttgattcatttcactaatttttggcctttgctaaaacttaacataatataaccaagcatcatataactagctaaatttaattataagaaatttaattaactcatgcggaagaagtctttttctgttcgtatatagggtttttgtttagcagacctttctttgcaaaaaacaataggaaaatcaggtaagttgttctaatctttctcaacatatatatacttggtttggcgtaatgcaagctggaccaactcttatgtttttatgagcataaactaaaattgtaaatgcttttttcctcagtgtgttgtgtatctagggttctgtaatggttaaagaaaattttgttaatttatatattaataaaaaaattggagctgacacttct

SEQ ID NO: 29900 - DNA, 723 bp, Glycine max
  Clone ID: UC-GMROPIC025F07_FLI
tgcaattactgccagcgcaagtttttcagttctcaggctcttggtggacaccagaatgcacacaagagagaaaggacattagcaaaaagggctatgagaatgggatttttctctgaaaggtacgccaatctagcatctctccctctgcatggttctttcaggtccttaggaataaaggcgcactcttcactgcaccatggtttctcaccaacaatgaggcgtcctgagataaagaacaatgcaagatttgatcaagggtatgttggccacccgatattcttggaggatgatgagtcagatttgttgtggcctggtagttttcgtcaagttgctgaggcaggtgatagtcatcagaatttcatactgactggaagttcaaatttgagttttactgaggtgaatccacctgtagacatagataactcaacaccagatttgactttgaaactttgaaggaggttatttggtatggttctgaccttgagttgtcttctttattgctatgttataacacagtaagacatgcatgcaaggggccatgattgccagattgattcctatactcagttgggtttccttttacttttactctcattttcagttttctgttaggaatcttgctttggtattttgctttttatgtttctcattgtataagagctccgggaggacaattttggagcttctgtgcttgttatatatatcatgttatcccttcactgt

SEQ ID NO: 29901 - DNA, 2191 bp, Glycine max
  Clone ID: UC-GMROPIC025H11_FLI
caacacaacatcgtacatagacagtttgatttttgtgttggcctttcgtttgtttgtttatttaggatattgtaagagttagtatgataaataacagcacgtgcatcggaattttcattaagttttttttttttttttcagttgatagtttattgcctcagatccgccatggacgcagctccgaaggcctttgtctgatttcctctttctttcacttgtcatgggactgaatcgaactccaagacataaccctgttcttccaaccaaatctccaattctcagtcgttcacattctcgttctcagaccatgaaaacaacacagatctttggtgtgtctctctcactcattcttatcaacctggctgctataatggagcgtgcagatgaaaaccttcttccatctgtctacaaagaagttagtgaaacatttaatgctggaccatcagatttgggttacctaacattcgtaaggaactttgttcagggattatcatctcctctagctggtatacttgttatcaactatgatcgcccgacaattcttgccatgggcactttctgctgggctttatctactgctgctgtgggcgtttgccacgattttctgcaggttgcattctggagagcaataaatggctttggcttggcaattgtgattccagcactccagtctttcatcgctgatagctacaaggatggagtgagaggaaccgggtttggattgctgagtctcgttggtaacttaggaggcataggaggtggtgttttggctactgtcatggccggccaacagttttggggcatacaaggatggcggtgcgccttcattttgatggcaactttgagtgcattaattggattccttgttttactatacgttgttgacccaagaaaaagatttcctaccacacgtgatgctagtgagagttcagacagggatgacactgtctataaaggcaatgctagtgcagcatcaatatggatagactcttgggcagccacgaaagctgtgatcaaagtgaaaacatttcaaataattgtcttacaaggcattattgggtcactgccgtggactgccatggtgttcttcacaatgtggttcgaactaattggttttgataacaatacgtcagcaaccctcctgagtctttttgctattggatgtgctatggggtcattcattggtggatcaatagctgatcaactatcacaagtctaccctcattctgctcgtaccatgtgcgcacaatttagtgcctttatgggcattccattctcatggtttcttcttaaggtgatccctcagtcagtaagtagttttcctatcttttctgtcaccctctttataatgggtctaactatcagctggaacggtgcggctgcaaatgctcctatgtttgctgaggttgtccctgtaaaacaccgtaccatgatttatgcatttgatcgagcttttgaaggctcgttttcttctattgcggctcctctggttgggattctttctgagaagatgtttggctataattcaaagtctgttgatcccatcaaaggatcttcaccagaggctcttgccttgtccaagggccttctttccatgatggctgttccatttggtttgtgttgtttatgctacacccctctatattacatatttaggcgggaccgtgaaaatgctagaatgcttgctgtgaaagaggaggagatgatgtgagacacaacacaacacaacacacgtttttaagtatggtagatcattttaaaggagccctctagctctcctctgcttgtgaattgggtccccatttaattggagtttaaagctccgaaaaacacgtggttccgacttttgaatccaacttcgaacaatgacctcatttgatttttttatttgaagaatccaggttaatcatacattcatggttccgtcatggctaggttgcttattaccgaggattgaactcactctggcttctgagccatttcttgagatggcatctgtagctgaatggatcagaaatatcaggatatttaacccaggctcatactgttttgtggcgagatcatcttgttttcatacgattgtacactataaaatacacaagtaaatttgcatgcttggttcaacacttcgactacacaaaacaacaatgctaatgaagtattttgaataacttcaattttttccgccgct

SEQ ID NO: 29902 - DNA, 2768 bp, Glycine max
  Clone ID: UC-GMROPIC026F05_FLI
atttcaatgattttgtattttaagaaaaacctttagcctggatatgtctcttatgggtttataattgtggcgaaatggtttttcattccaaatatataagaacatggaggagacacgagaagatgcagggccggcagagcaagggccatctaatgtgtcgtggtggccttcagattttgttgaaaaatttggatctgtttctttgggttctcaggatgagatcttaagtaataaggagtctcctcgacattttgacaaagatgttttgtcttctcagaaagcatcacaaacactctggcgcattggagtgctttcagaaccaataccaaatggtttctattcagtcattccggagacaagactcaaggaactttttgatagtattcctaccttggacgagcttcatgctctgggtggagagggttttaaggctgatatcattcttgtggattcagagaaagataaaaagctatccatgttaaagaaattaattatggcattagttagaggattaaactctaatccagctgccataattaagaagatagctggattagtttctgatttttataagcgtcccaatgtggaaagtccagcaaaagctgcactagatgaaagctctcacatgtttgagaatcgaggagtccagatgctggggcaaataaagcatggttcttgccgtcctcgagctatcttatttaaagtattagctgatactgttggtcttgaaagtaggctcatggtgggcttgccaaatgatggagctattgaatgtcaagactcatacaagcatatgtctgtgatcgttgtattaaattccgtggaaatgctggttgatcttatgcgatttccaggccaattgttaccacgatcaaccaaggcagtttttatgactcacatttctgcaggagagagtgattcagcagaaaatgattcttgtgattcaccattagaacctaacagccctttatttggggtttcagagagtgctgagaaggaggaaaacctccaattccatagaagatttgaagcatcttcaaatgtatcaggcctttccttgagaaatgtgatgttaagatcaaatagcagtttgagtttgtcacatagtgaacccaacattgccactgcatttggtcggcgtagtcggagaaaggtcattgctgaacagaggacagctagttcaagtccagaacatccatcatttcgagcacgtgggcggtccatgcttagtggtgataggacaacgtttagagattttgccgatgatcaggctacatcaagatccagctataggtcagacaacacatcctcgtcagaagctcgtcggatacgaagaagaagcatcagcattacaccagagattggagatgatatcgtaagggctgtaagggcaatgaatgaaactctgaagcaaaatcgtcttttgagagaacgaggggatgataactcattccccaattctccaaacaatagtagtagtgatgcaaatcttcagaaaaatgtgtcaaatttccatcttgatggccatgatgaaagatctgccctctattcttttcagcgtgaccaaggagcttcacaaaaggcaatgtcattaccatcttcaccacacgattatggaggccaggcttctgagagaagtggatcatcaagatacggagtgaatgatgaaatggagtcaacatggaataaagtactggaatctccaatgttcaataataaacctctgttaccatatgaaaaatggaatattgacttctccgaattgactgttggaactcgcgtagggattggtttctttggagaagttttccgtggcatatggaatggcacagatgttgcaatcaaggtttttctagagcaagatttaactgctgaaaatatggaagatttttgcaacgagatatctattctgagccggctccgacatcctaatgttatcttgtttcttggtgcttgcacaaagcctccacgcttgtcaatggtcacagaatatatggagttgggatcattgtattacttgatacatttgaacggtcagaagaaaaagcttaattggcggagaagactaaggatgttgcgtgacatatgcaagggtttgatgtgcatacacagaatgaaggttgttcaccgtgatctgaaaagtgcaaattgtctagtgaataagcattggactgtcaaaatatgtgattttgggctttcaagaataatgacagagtctcccatgagagattcttcatcagctggaacgccagaatggatggctcctgagcttattcgaaatgaaccgttcacagaaaaatgtgatatcttcagccttggggtgataatgtgggaactctgtaccttgaacagaccatgggaaggagtaccacctgagagggtggtttattctgttgcgaatgagggttccagattggagataccagaaggccctctaggcaggctgatttcagagtgttgggcagaatgtcatgaacggccaagttgtgaggagattctttctcgtttggtggacatcgagtactccttgtgctgaagcaatatcttttgtacatagaaaactttgggtagagttgttacattgtattatcggctgatgttgtggactatttgtgaattttgttctttttcgcagaacatgcgaaatatgaatcgatatcttatccctgtgctgcagctcgtctctttctggggcaatgaaaaagatgagatcaatccgtctctcaacataattttctgtccaatgaaaagaacagtgttccgagtgt

SEQ ID NO: 29903 - DNA, 1837 bp, Glycine max
  Clone ID: UC-GMROPIC027D05_FLI
gaacaatgttaccccagaagcaaggtgaagaaaccatgatgtcaaaccttaacgaaacaacgattgagcgtggtgaagagagagaggaagagaacgtgggtggtggttcacattccagtttgaaaagcattctttggcatggtgggtctgcttatgatgcatggttcagctgtgcctcaaatcaggttgcgcaggttctgctaacactgccatactctttctctcagctgggaatgctctctggcatcatattccaagtcttctatggaataatgggaagttggacagcttatctgattagcattctgtacatcgagtacaggaccagaaaagagaaagagagtgtcagcttcaaaaaccatgtcattcagtggtttgaagtgttggaaggtttactgggtccatactggaaagccattggcttggccttcaattgcactttcctcctctttgggtccgttatccagcttattgcttgtgcaagcaacatatacctcataaatgaccacttggataagaggacctggacttacatattcggagcttgctgtgccaccacagtgttcgtaccttcatttcacaactacagaatttggtctttccttggccttggcatgaccacttacacagcttggtacatgaccattgcagccattgctcatggccaggttgaaaatgtgactcacactggcccaaaaaaattggtattgtatttcacgggcgccaccaacattctctacactttcggcgggcacgccgtcacagtggaaatcatgcatgcaatgtggaaacctcaaaagttcaaatatatctatctttatgctactctttatgtgttcacactcaccctaccatctgctgttgccgtttattgggcctttggtgacaaactcctggaccactccaatgctttctctcttcttccccgctctggttggcgcgatgccggtgtcatcttaatgctgattcatcagttcatcacttttggatttgcttgcacaccattgtattttgtgtgggagaaggtgataggaatgcatgacacaaagagcatatgtttgagggcacttgctaggttgcctgtggtgataccaatctggtttttggctattatcttccctttctttggtcctattaactctgctgtgggggctcttctggttagcttcaccgtgtatgtcatccctgcttgtgctcatatgctcacttacaagtctgcttctgcacgacagaatgctgctgagaaattgcccttcttcatcccaaactggacggcaatgtatgtggtgaatgcatttgtggtggtgtgggttctagtggttggatttggatttggagggtgggctagcatgacaaactttatcaaacaggttgacacatttggactctttgccaagtgctaccaatgcccgccaaaagtccctgcttccaacaacacaatgctgcatcattgaaaattatatatgttcttctgctttaaacatatagggacacatcagcatctccacccttgtgtatttcccctatctttttgtttaatctctctagctataaatattgttaatgctgatgttcccttgtgtagaaaggcaacattgttatatttcgctttcgaatcattttggttaatcataagcatgcactatagttatagcatatgtagggagtgatgtttggcaattggcatatagcgacctcaagtatagcctgcatgtttccaataatgtctttgcattccaatataatcatttttttcttctccaaatctcaagtattggtagaacatgtatgtttggtgaaagttacattataaaagcgtgtagtatatgttgcttcc

SEQ ID NO: 29904 - DNA, 592 bp, Glycine max
  Clone ID: UC-GMROPIC027D10_FLI
atggaacgtataagatgctgatttatattttaatgatcagtagttggagattggaatggagcctggccatttggaggaaaacaaatgagaaagagtacttaaaaaaagtcacaaggccagctgggggaagcttaatttaaagcattaaaatcaaaatgaaaggaattgaataatttgaattggtccctcatgacagctcccctctaacgactcactttcactataagtaccaagtatttcatgcagcttttgtcagtcatcactaacacaccaaacccttcttctctcttcccctgaaacatccctcctcttccaacaaaatcagtgaggatctgagaagaagcattggccagaggtggtcagctttttccttctacgcatgactgcaaggggcagcgaccccataaggggtcgtctttggccacaaatggccttggcattggccattgctttcatttcttccactgtggtttccgtcaatgctgatggttatccttactattctcctccaccaccttatgaatacaagtcaccacctcctcctccttacgtctacaagtctcctccaccaccatctccatcacctccaccc

SEQ ID NO: 29905 - DNA, 409 bp, Glycine max
  Clone ID: UC-GMROPIC027E02_FLI
gttgtgatattcattgcttggctggttgccagaatacttttgttcgtttacatgttttaccatgtctacctgcactttgaccagattgagcagatgcacgcgtttggacaagtgttagttattgttgtgccactggcactatcagttatgaacttgatttggttttcaaaaattatcaaagggttgaggaagacgttggcgaagaggcagtgaaaattctgcttagtgatgttattttagaaaactgatatacaggtcaatgatgtgtagtgaaagatgtaacagaacagaaacaattgaaagtgtttggatcccctgtggattcgaacttgtacaaagatgttcattctgccttttttcttctattaatgtacatttattagtttaattttaatatattgttcgatgc

SEQ ID NO: 29906 - DNA, 2289 bp, Glycine max
  Clone ID: UC-GMROPIC027G02_FLI
agaaggttaaatgcaagaatagaatatgccaagtttcttcaagatactgtaaaagaaatggcaaaggagattcagaactcacaaagtggagaaatgaagaagacagcagaagatcttgatgaatttatgaacaaggtcagaacaggtgctcgagtttctaatgatgaaatcttaggatttgccaaattatttaatgatgagctcaccctggataacattagcaggcctcgcttggtaaatatgtgtaaatatatgggcatcagcccatatggaactgatgcatatttgcgttacatgctccgcaaaagattacaggagatcaagaatgatgataaactggttcaagttgagggtgtcgaatctctttcagaagcagagcttcgtcaagcttgtagagatcgaggattgcttggattactttcagtggaagaaatgcggcagcagcttagggactggctggatttgtctctcaaccattctgtgccatcttccctcttaattctttctagagcattttctgtttcaggaaaggtcagaccagaggaagctgttcaagctacactctcttctctgccagatgaggttgtagatactgtgggggtgacaactttgccatctgaagattctgtttcagaaaggaagaggaagttggaatatcttgaaatgcaagaggagctgatcaaggaggaggaaaagaaagaggaggcagagcaggccaaaatggtagaatctgttggtagtgaaggggatttgggtattatgaaagagagggcttcaacaaccaaccaaacacaaggagaggtaaaaacaaagacattggataaacaggagcacctctgggagctcagccgtgcattagccgttttagcatcagcatcttcagtgagcagggaacgtgaagagtttttgaggcttgttagaaaggaggtatatagattctattgcatatgaatactttatggcccttcaaagaaaagtcaaattgcaatatcttttaaatgtaatttagtatgtttctgcattcacattatttaacattgatttgttaaaaattgatttgctggataaaataaatgcattttgttagaagcttagaatttaacttttgtcaccatttgttcccaataaaaaaatcagtaattgagtttcagttcttgatcttgacattatcatcattgttgttgttgtttgataaaaaagattcaaaatgttttctctatagctttgtaccgagagagagacttgactggataggttagtctctaatatgactgattcaccttcttgtatctgtgttgtacacataaggtagggatatgggcacataagaggataagcccagcccattgcatgttaactgtcattttcttggggctttgagaaaatatttcctttttcctctaatacttataaaaaagtcacttcgtttcttatttgcaaagatttgaagaggaaattgtgaaaacaacattttggtgaaaaaggaaattgaaacagaaaatgttttcttaaaccaacaagctattcagcatgtccagcttcttttacatacaaaatcaaatctaacctacaactgtacagatggagctttatgatagtatggtagggaaagaaggtacagaaggtgagcaggaagctaagaatgcctataaagctgcaaggaaggaaagtgatggtgctattgaggcagctatttgtgataaggtttcttcagcacttgttgacagggttgatactatgctccagacacttgaaaaagaaattgatgatgttgatgctaaaattggagaccgctggcggttgctagacagggattatgatgggaaagtgacacctgaggaggtagtatctgctgctatgtatctgaaggacactctgggcaaagaaggaattcatgagcttatcagcaacctttccaaggatagagatgggaaaatattggtggaagacattgtcaaattgggcacccagaaagaagaagccgatagagatgaagcgggaagatcatagtgtgttccattgatattaacttcatggttctagtcgagttccacatcattttatctgtgaaattgtgttgtattgccatgttttctttgaaatgtaactgtaaagaacgatggttggttttctgtaatgaataatgatctcatagaaccccaagccatgcccccaacaaagtattacaaggtagggatcttattcaatagaaaggttggaaaatgcaagcacaaagaaattaaaattattaatgtgtcaaaacaagattaatgtatttgcattcctttc

SEQ ID NO: 29907 - DNA, 1254 bp, Glycine max
  Clone ID: UC-GMROPIC027G09_FLI
gttctgtaggtctaaaaagatacagtttctccgatatcaagaaaataaccaactccttcaaaattaaactgggagaaggtggttatggttctgtctacaaaggaaaattactcaatggttgctcggtggcagtgaagatactgaacgagtcaaaagagaatggcgaagagtttatcaatgaggttgctagcataagcaaaacatcccatgttaacattgtctctctccttggattttgtctagatggaagcagaaaagctctaatatatgagttcatgtccaatggttcacttgaaaaatacattcacgagaagacagctgaaacaaaaactactaccccatccttgagttgggagagattgcaccagattgcaataggcatagctcgaggactagagtacctgcacaaaggatgcaacactcggattctgcatttcgacattaagccacataacatccttttggatgaagcttatcgcccgaagatatcagattttgggcttgctaagcttagcacaagagatgaaagcatcatttcaatgtcaaatgctagagggacagtagggtatgtggctcccgaggtgttcagcaaaagttttggaggtgtttcacacaagtctgatgtttacagctatggaatgatgctgctagaaatggttggagggcagaagaacatggacgttgaagctagtcgctcaagcgagatatatttcccgcagttggttatttataagaagcttgagcagggcaatgatttgggacttgatgggatattgtccggtgaggaaaatgagatagcaaagagaatgactatggtgggtttgtggtgcattcagacaattccttcacatagacctaccataagtagagtcattgacatgttggaaggtagtgtggattccttggaaatgccaccaaaacctttcctgtcttctcctccaagatcatcaacagatttttccactgcaatatccaaatcacttgccagtgtctgatgctgctgctggagttgcatgtgttctttcaaacatagtataccttacaactttcgctattgatcatcaaagttaatatcggtccttctatatatatatattttgtaagtgtctcttttttatttggagcgggatgggggtgatggggcctcatgcatgggatatgcaaattaaataactgcaacagtgtgcaatagtttctcctattcatatttagagaaatctatgtttattaacattaatttatgagtttaatttt

SEQ ID NO: 29908 - DNA, 1326 bp, Glycine max
  Clone ID: UC-GMROPIC027G12_FLI
gctaaggctgctgaagctggagcgcataaaggactacctcttgatggaggaggagttcgtggcgaaccaggagaggctgaagccgcaggaggagaaggccgaggaagacagatccaaggtcgatgatctccgaggttctcctatgagcgttggtaacctcgaggaactcattgacgaaagtcatgccatagtttcgtcctcggtggggcccgagtactatgttggtatcttgtctttcgtcgataaggatcagctcgagcctggatgcgctattttaatgcataacaaggttctctctgttgttgggcttcttcaagatgaagttgatccaatggtctctgttatgaaggttgaaaaggcacctttggaatcatatgctgatattggtggtttagatgctcagatacaggaaattaaagaagcagtcgaacttcccctgacgcatcctgaactgtatgaagacattggtatcaagcctcctaagggagtcattttatacggcgaacctggaactgggaagacgttgctagctaaggctgtggcaaactcgacatcagcaacctttttacgtgttgttggtagtgaattaatacaaaaatacttgggagatggtccaaaacttgtaagggaacttttccgagttgctgatgatctttccccatctattgtcttcattgatgaaattgatgccgttggtacaaagaggtatgatgcccactcaggtggagaacgtgaaattcagaggactatgttggagttgctgaaccagttagatggtttcgattcaagaggtgatgttaaagtgattcttgcaaccaacagaattgaaagccttgatccagccctgctgcgacctggtcgaattgacaggaagattgaatttcctctccctgatatcaaaacaagaagacgcattttccagatacacacttcaaggatgacattagctgatgatgtcaacttagaagaatttgttatgactaaggatgagttctctggagctgatataaaagcaatatgtactgaagctggcttacttgctttacgagaacgccggatgaaggtgacgcatgccgacttcaagaaggcaaaggataaggttatgtttaagaagaaagaaggggtgccagaaggactgtatatgtgaagcatcttcatcatttaccccggccttctttctttattacagtctttttgttgttctgtgaacggatgtttgtattttgatttttggtcgtttatgggtctacattatcacgggatttaatctcaactatagttacatagctttctttgatttaaaaaaatcgggaaaattttcctgcc

SEQ ID NO: 29909 - DNA, 1786 bp, Glycine max
  Clone ID: UC-GMROPIC028A03_FLI
agagtcacaacattgggtgctgttcatgagatcagacagttgcaaatgatgttgaggcatctaacaagcaatcttacatttcaagaagcttatgacatgacaggtagaattcttgggattacagtttgttccccaaggaagcacgaaccacctagatgtcttaactacttgacttcaccccatgtggttatatggagtgcagtcaccgcttcttgtgccttccctggcctttttgaggctcaagaattgatggcaaaggatagaagtggagagattattccttaccaccctccttttaacttaggtcctgaagagggctccacaccagcacgccgttggagggatggtagcttggagattgatttacctatgatgcagttgaaagaactattcaatgtcaatcattttatagttagtcaggccaaccctcatattgcaccattattgagattgaaagaatttgtgcgcacttatgggggcaacttcgctgccaagcttgctcatcttgtggagatggaggtgaaacataggtgtaatcaaatactggaacttggttttccattaggtggacttgctaagttgtttgctcaagactgggaaggtgatgtgactgttgttattcccgcaactcttgctcagtacaccaaaattatacagaacccttcttatggagagcttcaaaaggcaaccaaccaagggagaagatgtacctgggagaaactttcagccataaaagcaaattgtggcattgagcttgctcttgatgagtgtgtggtgattctcaatcatatgagaagactaaagaggattgctgagagagctgcttctgcttctcaaggtttgtccagcactgtaaggttcagtgcttcaaaaagaattccttcatggaattgcattgcacgagagaattcaactggttcccttgaggaccttactgatgttgctgcctcaaagcatcaaggcattagcagttcctgtggaaccaatggcaaaacttggaagacctaccgtggcatacttgatggaagtgacagtgactctgaaagtgttgatttgcattcttggacaagatctggtgggcctttgatgagaactacttcagcaaatatgtttgtcgattttcttcaaaacttagacgttgataccgatcaaaacaataaaggcttagtgagtcgtgctaaccctaatgattttcagtatcgtagccccaggctcgcaacactggataggaactctgatagcacagaatctgagccaagggaaattggcaacagggttttcaatgtgtccagcatacttgtgaccgaaggtgatcttttgcagcctgaaaggatccataatgggattgtgtttaatgttgtcaagaaagaagacttgtcacccttaagtggtagcagtcatgattttgaaaattacaacattgaagttgctgaatgtgtccaagatgagtgtccagggaaggagatagatgctgctagctcagcttctgaacatggagatgatgaagaatccacagtagctaggtccttaactgaaactcaagactacaattccatggatcatcattcgggtatggatcagagcattgttgacagttagtttcaagtatcagttcttttccagtgacattttaatattttgttcctattgccctccatattgtaaatagtactcattctaggcttggaggagaatctctattcatgattttgatgggaataactcaccatttggtttactcttgtaactaagataaagtgattgtatacaaattccacgaccacac

SEQ ID NO: 29910 - DNA, 557 bp, Glycine max
  Clone ID: UC-GMROPIC028E07_FLI
ttgacacactctctactcactcacctgatgaggagtacttgggtgagaggcaacaaccttccatttggtctggcgacgctgagattgtagaggcgttctacgatttctccgccaaggttcaacagatagagaaggtgattgatggcaggaaccttgataggactctaaggaaccgttgcggtgcaggggtgttgccttatgagttgcttgctcctagctctgaacctggtgttacatgcagaggggtgcctaatagtgtgtccacataactatactaaactaataaataagggagtcactcccacattttgataattaaacattaatatatatatatatatatatatatatatatatatatatatggttggcttactagttactaccataccatggacagtgactctcagtgtatgcccattttgtacctagatttaataagttgttatagtatatattggtaacctagggctgtatagactgtgtatatgaaaatgagtttggtggtgttggaggatgtgtgactgtttataaagttattatcacaatttgtagtt

SEQ ID NO: 29911 - DNA, 3198 bp, Glycine max
  Clone ID: UC-GMROPIC028F03_FLI
ctttccttcagctgcagcccccgttttgttacgaccgatgcgagctctgttgtgctgccaccgagctgccatttcaccattgtgacccattgatcggggaagtgccaccctctggtgaacccaacgctgccaaccgcatcgccacccaacttcacacgcgccaacatattctccagcttaccaaggtatgtctgcatgtccatgttctccagcttaatgctcattaagctggatggtttaattgccgaatattccactcttacgccctttactactgatgcagactttttacaaacagcacggacagttcttcatggtggttgctcttgctggacacataccagaccttgaggcagtccgtaaccagattttatcgagtcccatggttcctacctatgacttagttcaggaacagttgttgtgtctctccattccacatacctttgggcagaccctcttccacttctaccgaggattcctctgcccttgtctttcactcctctcattgtggaagacgaggtggaggacgtggtattcactgccactactgcaagaactggggtaaggagattttcacatcaaagctagagaattgtcctggtcaattaatgtgtcccaagtcaccacctctacctcatatattactatctctgctgctaaatataatgagcttctcaagcttcgagcagccaacaaacctgcatcacttgttacctctgtggctcaatctagtaatcctgtagcctttgtttctcaatcctcctatcttggaccttggattcttgattctaatgcctctaatcatatgactggtaaccaatctcttttctcttccttgactttttcggacacctttccttttgttactcttgcagatggctctcatattaaaatctagggcatcagacaaacacaccctcttcctcaactttcattaaattttgtcttatttgttcttggttatccttttaatttaacctctattagcaaactcacccgcactcttatttttctgtcctatttgttagtaatttcgttcttgaacaagatcgacgcactgaatggatgattggagcaggatatgagtctggaggattatatcaacttacacctcgggttgtttgtgtctcatctgcatttgcatgtattagttcccaatcattctaattttaagtcctttccatgcgagttgtgtcaactaggtaaacatactcgtatcagttatggctctcatgtcaataagggtgatgcgttaccttttgtcttagttcactccaatatttggggtctcaattgagtctattccaaattagattatttttattttgtcacatctatacaagatttctctcgttgtacttgggtttttctaatgaagaatcggtatgatgtttttttttctattttttgaagtttttccactaagattcaaaatcagtttgcctcctcaattaaaattttacgaactaataatgcaaaagaatatttgtcgtcccagtttcagtcctttttaaactcacataggattcttcatcaaacatcatgagcccatacaccacaacaaaatggtgttgcagaacgcaaaaaccgtcacttggtggaaacagcttgcacccttcttcttcactataatgtcccacttcgtttttgggggatgctcttcttactgattgtcatctgattaactgtataccttcatcggttctcaataatcagattccttattccatctaaatcctatacaggaccttcattatgttccccttcgtgtctctagaagtacatgttttgtccatgatctcactccaggtagaaataaactctgccaagtatctaaaatgtatttttctaggttactcctgtctccaaaagggttaccgatgcttgtctccttaactttaatggtacctggtctatgcaaatgttacattctttgagactactcttttcttttcttccaccattgaagatgtcctctagtggttccacctattgttccagcaccacttgttgctcatgctccaagttcacctccacctcctctactcacataccaccaacaaacacaagcactaccagcagcgccacctactgatcctccaacatcatctcctgctccaaacatttgtccaccaccaccgcctacactttaatttcccatctacacaaaggtgttcggtccactcataatcccaatcctttatatgcttttactcttaactttgattatttatctccctcctattactctcttatctcttctttggattttgtgtctattccaaagtctacacgtgaagccatggctaaccataattggcaacaaccgatgttggcagaaatggctgcgcaagatgccaacaacacatgggagcttgttcccttgcctcccaacaaatccactgttgggtgtcattggatctatacgatgaagatcgcaccatatggcactattgatcgctacaaagctcgcttagtggctaaaggatatattcagatttttggtcttgattattgtgacactttatcacctgtgaccaaaatgacctctattcatctttttcatgctatggctgcaatctgacattggcctcttcaccagttagacatcaaaaatgccttcttgcatggtcagttgcaagaagaggtgtacatggatcagccacccggttctatagtctctggtgactcccgccttatctataagcttcgccgctcaatctatggcttgaagcaatctccccgttcctggtttggtcatagttcagctctactctacttgagtttggtatgactcaatgtgaagctgatcactcagtatttttccttcattctaagtctagactatgcctctatcccattgtatatgttgataacatcgtcatcactggcgatgagtccgcaggtatcctacccctcaaatctcacaccttcatagtcacttttagactaaggacttgggccccctcaagtacttccttggcatcaaagttgctcaatcctcatctggaattgtcatttcctagcaaaattattcctgagtcatactgccatggatcctaatatgaagcttcttccaagtcagggggagccattcaaaggccctagaagatattgtcgtctagtaggcaagcttaattacctcactgtcactagaccagatatcacatttgcagttagtcaattcgtgaaggaatc

SEQ ID NO: 29912 - DNA, 763 bp, Glycine max
  Clone ID: UC-GMROPIC028G01_FLI
catcatcatggcatcctgatggtgtgacctttgccactggaaaccaggacaaaacctgccagatttgggacttgcggaatttatccaagtcagtggctgtgctgcagagcaaccttggagccatccgttcaatcaagtatacttcagatggccggtatatggctgttgcagagcctgcagattttgtacatgtgtatgatgtaaaaagtgggtatgagaatgaacaggaaattgatttcttcggtgagatatcaggcatatctttcagtccggacactgagtccctgttcattggggtctgggatcgcacttatggtagccttcttgagtatggccggcgacggtattatgcataccttgattcacttacttgaatattcaaggaacaaaaaatgacatggtagctgaggtgcactttaatagcctgctttaatatctgattgaggtaggttggtttatgtataaattgagtatcctgctactgttctcaatttgttttatactggtagggtgtgtttatatcagtgtgtggaaagcgagagggagtgtacaggaggctagaaggcaatgatagtgcagatggggtggaaagtaaaaaatgctgagtatcagtatgttatttacagtgtctatctgtgcaaacagattatggagagaacatataaattatgatgttctttgatagggaaaatgagttttgctcattgaggatatttagtttcctttagttttcttgcaaaaataataatggacacttaaaatt

SEQ ID NO: 29913 - DNA, 1301 bp, Glycine max
  Clone ID: UC-GMROPIC028G12_FLI
gctttattggtaaaggggtgatgtgaattcttgaagttaaaactgattcgtgggaggaaaatacaaattttcaccaagtttaatctagtttgatgagtagtgactagtgagtggtattctattgcaggattgaaagatgggtcaagcattcggttgctaccaagtcgatcagtcaaatgtggctatcaaggagcattttggaaaatttgatgatgtcctagagcctggatgtcactgcctgccttggtgtcttgggtaccagattgctggtagtctgtcgctgcgagtgcagcaacttgatgttcgatgtgagacgaaaaccaaggacaatgtctttgtcaatgtggttgcatctgtgcaataccgagctgtgtctgagaaagcatctgatgcattctataggcttaccaacactagggagcagatccaatcatatgtttttgatgtcatcagggccagtgtaccaaagttggagttggattctgtctttgagcagaaaaatgatatagcaaaggctgtggaggaggagcttgagaaggccatgtcaacctatggatttgagatagttcagactctcattgttgatatagagcctgatgttaatgtcaagagagcaatgaacgagataaacgcagctgctagattgaggttggctgcaaatgagaaggctgaagctgagaaaatactgcagatcaagaaagcggagggagaagcagaatccaaatatctgtcaggactcggtatcgctcgtcaacgtcaggccattgtggatggactgagggacagcgtgcttgctttctctgagaacgtgcccgggacatcagctaaagatgtcatggacatggtgctggtgactcaatactttgacaccatgaaagagataggagcatcgtcaaggtcctcgtctgtgttcatacctcacggtcctggggcagttaaagacattgccgtgcaaattcgggatggtctccttcaggccactgcctcacagaattaagctttcttggagttgtaaataacaaatagtatgtgtgtcaggtttttttcaggaaatgcttcttttgtttgaacttataaagtctgcatctttactcttcttatatttgatagattcatagcagtgtctattttatgtgtaagtactgatgtgcagttttgaatacttgtttaaggatagtcttaatgtcaagttgcttgtgaatcattaaggaatttgttatgtaagaattacttcccaaaagatgtgtttttcttttagtgtcctatcttgcaagtggatgtgtaaatttgtagttctctat

SEQ ID NO: 29914 - DNA, 2639 bp, Glycine max
  Clone ID: UC-GMROPIC029A05_FLI
gcaaaaccgagctttacccaattttcttcctgttgaattttccacggttcagtcttcaaaatcacatttttctcgatcttcaccttctggggtgctttttttttcttttgtttttcgccatggaatcgaaaaaccctgcgaggtttacgctggggaagcagtcgtcgctggccccagaacgccataacaaagaagcagagctccaaaacgatggagaagttgttgatcagggtgtgaggttgatgtattcggcattcgaaggcgatgtagatggaatttgtgaggcgttggagtctggtgtgagtgtgaattacaaggatattgataatcgcactgctcttcatgtcgcagtgtgtgagggattcactgatgttgttgatttgttgctccagaaaggtgccgaagttgaccccaaagatcgatgggggagcacgcctcttgcagatgctattttttacaaaaagaatgacgtgatcaaactattggagaagcatggagcaaagcttctgatggcccctatgcatgttaatcatgcacgtgaagtcccagagtatgaaatcaatcctaaagagcttgattttaccaacagtgtggagataacaaaggggactttctgtattgcactgtggcgtggaacagaggttgcagtaaaaaagcttggggaggatgtaattagtgatgaggagaaagtgaaggctttcagagatgagcttgctctgttccagaaaatccggcatccaaatgtcgtccaatttctgggtgctgtgacccagagtagtccaatgatgattgtgacggaatatcttcccaagggagatcttcgtgatttcttgaaaagaaaaggagctttgaaaccatcgacagctgtgagatttgcacttgatattgctaggtatttgacactctcatgcctcgatttatttggattcttctgtttgcaacatagaatctcagaatctgctctctctttaccaatggggttatttaaaatttttgaaattttatttttttaattatatagtaaataaattaatgtatatttatggattacccattgaagtccatgtttaattgggtttatgtaatgatccaatccatttgtccagtaacataagtgagcggacatagatagagcaaaatagaatatgatctaagtggttaaatgggtttggctcaatattgtcaatcctactttctatatgacccacaaagacaaaataagttgttaatttgatgaaaaggcactcaatgcaattttgaaagataccttgttcatacataattcttgatttgaacagtttcttatccgaattttcactgattacatgtcatacatggaattttgttttactcaatgcaattttctttgaaatcatgtaggggagtgggttatttgcatgaaaataagccatcacccattattcaccgtgatcttgagccttcgtaagtttttcttttgttcaattattgttttttcctctattctttcttattggcttaaatatctttttcattcctacaaattagcactattttcattttcgtctttgcagatttatttttgttgttttagtccttgtaaaatgttttttttttttttcttaaaacattttagataacacttttttcactctttaaaacatttttttattgttcaaagcgttatctaaagtgccttaaagacgaaaaacaaaacaaacatattttataaggactaaaatgaaaaaaataaatttgcatggacgaaaatgaaaaaaaacactaaattgcagggatggaaaatgtatttaagcctttcttgttctttatgtgaagtccatgtgtctggtttaatagtctgatacagtctacactttttttataaatattgcttatgagtaagctaacagtaatatattgcgggatgattctgggcacctaaaagttgcagactttggggttagcaagttgctggcagttaaagaagacaagcctctaacttgccacgatacttcctgtgggtgctgcttttcttcagaactatcattatgctcacttgaaatatctaaatatctgaaattctgtattttcttattcacggggcataagataatattgtcattattgtgacattttgcatgtgctggacttttacatgctgattcatggtttaattttctgaaactgggaatttttttttgtttttgtttataggccgctatgtggctcctgaagttttcagacaagaatatgacactaaagtggatgtattttcatttgcactaattctgcaagagatgattgaaggctgccctcctttttctgcaaagcaagacaatgaagttcctaaggtatatgctgcaaaagagcgtccacctttccgagctccagccaagcattactcctatggaattcgagaattgattgaagagtgctggaatgaaaatccagcaaagaggccaacatttaggcaaataataacaaggctggagtccatctacaacacaattagtcacaaaagacattggaaggttatcatctctcttatgttcccccctcccccgcatcagatttttgtgcttgcatatgcttgttcaaaactgtgtagaccagactgaatgcttcatctttgtttataaatattaatgaatatttgaaac

SEQ ID NO: 29915 - DNA, 1639 bp, Glycine max
  Clone ID: UC-GMROPIC029C12_FLI
ttggctgcagcaagggagcaatcccagtctgctcaggaggaggctgaagagtggaagcggaagtatgacattgctgttagagaagcaaaagctgctctagagaaggcagcaattgtgcaggagtacacaaacaagcaatcacaattgagggaagatgctttaagagaggaattttctagcactttggctgaaaaggaagataaaataaaggagaaaactgccaaaattgagcatgctgagcagtgtttaacaactttgaaattggaattgaaggctgctgagtcaaaaataagaaattatgagtcagagatatcaccactgaggcttgaaattaaaaagttgattgagagattgaaaactgaaaatgctagggctcagtcatatgagaaggatgtaatggtaattcaacaggagattaaccatctaaaggagaagtacaacaccgagtgcataaaatttgaggaagttcaggaaagatgtcaaattgctgaaaaagaagctgtaagggctactgaagtagctgacaaagctaggactgaagccaacttggctcagaaggagatgagcgagatgcagaggcttgcaattgagagactggcacatattgaaagggctgagaggaaaattgaaaatttggagagggagaaagataatttggaaggtgaattgcaaagagtgagggattcagagaaagatgcacttgttagggtttcaacactagaggaaaaggtgggacagagagagaaggatatagattcactcttggagaaagatggaacacagaggcgaaatagcacacagattcttgatcaacttttggaaacagaacgtgaagcatgtgctcaggcaaatagcagggccgactctctctctctccagttacagtctgcacaagcaaaaattgattctctccatcaagaactgactaagtttcaactgaatgaaacaatattggacagtgagctaaaaactgcctctcgtggaaagcgtttgagggtagatgatataggtgtagaatctggtcaggacatggattcgagccctagaatcttaaggggaactaagagatctaagagtacatctagtccacttaagttttcacatctggaagatgttagttccattggaggtgatgaagacaactatagtcagcaaactaacgaggatgattataaaaagtttacaatccagaagctcaagcaagagctgacaaaacacaactacggtgatcagctgcttgagttgaagaatcccaacaagaaagctatccttgctctgtacgagaaatgtgttcttcagaagtcatagccaatggcatagcatgtaatcatgtccaccagtagaggcctctaacaagggtgtgggccatacaaatttcatttatgtcatggtggctcgcatctagaccaaaagtgttttgttaattcgatttttcagttttagcttcattaatcatactgtatgtgtttagttggcttgctattaatgactccggttggccaaagagatgatggtctgatcttcatttgttaaattaaatgctcgagttagttgtattcagtagattttgtatagttattcggtgtttatttgtaagttaacgctactaacaatggatattaaattagttttaaaccat

SEQ ID NO: 29916 - DNA, 957 bp, Glycine max
  Clone ID: UC-GMROPIC029E12_FLI
aaacatgtactctcttgagtccttctatgacttccttagagacaagtacgttgaggccagcatgtttgttgtcccaaccaaactcattgatgttgtctctaaggaagtcatagaaggaaacatgtactctcttgagtcctacaagtcctcagcagagagcttcatttgcaccctcatacccgaatcaccaagctcacacatagagtacacgccaggtggacttgtgtacagacccggaggcagcaacttgcaacatgcaacttcaattgctttccttgaattggtctatgccaattacctaacacacgcttcacaagccatcaattgtggcaatgtctatgttagtgcacaaacacttcgccaacatgctaagaggcaagttgattacattttgggtgataacccaatgggattatcctacatggttggctatagcaactactatccacaacgtattcatcaccgtggatcttccttaccctccatcaaggatcatcctcagttcattgcatgcaaagaaggttcaatttattacaattccaccaatcccaatcctaatgttcttgttggtgccattgttggaggacctgacgaaaatgatgattatgtggatgatcgagttgattttaggagatccgagccaaccacatacattaacgcaccatttgttggggttttagcatattttgctgctaatcccaactttagttaatataataaaaacaattaccataaggtataggttcatctttttgtaaatgaaaagatatacgccgaagatgtttctcatcttgagaaaatcaagagggtagaggcttgattgggtttaggagcattactagaaaggatgacgggtttttaattacttctaaatgttttattctcgatgtttggatgtacgggtttgttaactatcttaaagttatatcagtgaatataaagtgttcattttgtttt

SEQ ID NO: 29917 - DNA, 1034 bp, Glycine max
  Clone ID: UC-GMROPIC029F05_FLI
ggattgattgtcagttcccgcaaagattcgctccaacattttaagaagccctgggctcatgagcatgaacctgttagaaatcttgtagatgctgttaatgtatgatttcttatctttctgttcattacaccacacatacacagcagaaggttacaatgttcatacatggtcaatgttatcttctcagaaaattaagccaacagtgttgattggaacatctggacaaggaagaacttttactaaagaggtgattgaggcaatggcttctattaacgagagacctattattctttctctttccaaccctacgtcacagtcagaatgcactgctgaagaagcttacaagtggagccagggacgtgccatttttgcaagtgggagcccatttcctcctgttgagtatgaggggaaagtgtttgtgcctggccaggccaataatgcatacatatttcctggatttggtcttggtttaataatgtctgggaccattcgagtgcatgatgacctgcttctggctgcctctgaggctttggctgcacaagtgagccaagagaactttgataagggactcatatacccaccattcaccaacataagaaagatttcagcacacatagctgccaatgttgctgctaaggcttatgagcttggcctggccactcgccttcctcaacctaaagatttggtgaagtttgcagagagctgtatgtataccccatcctacagaagctaccggtgaagcgataataaatagcctatttttctttttccttttcgttttatcattttatcattttattgtcaattatttaatttttttaccttctttatgttgctgttctgttcttgtaagttatttgttgggttagtaggttaggacggtggtagttggactaaaaaggtagcttgaaaatttgtgttctgctataaatgttatgtgacagtaatctaaattagaaaaggaagcatttctaaagtccgcatagtatataaaattcttgaaaagttgttgaatgatctatctttttctcgac

SEQ ID NO: 29918 - DNA, 4107 bp, Glycine max
  Clone ID: UC-GMROPIC029G06_FLI
gctcaaatatgtgcatgtgattgttttaggcatcgatggactggtcgatatgaggctcatttgtgggataagaattgctggaatgaatcacagagcaagaaaggaagacaaggttcttcattattttgctctctataatctccatatagttttctgatttccttcacttatatgattatttgatttattgtcatattaattatgttgtgttggttgaaaatggctatggaaaacaactggatgcagtatatctaggtatgatttgagagtattaattaattagcttgcatatataacaaaaaccttcattatttgttccccttaaattggcggatgggggacgatttaatgattgcaataaacttgggtttgctaggggcatatgatgatgaagaagccgcagcacgtgcctatgacttggcagcattgaagtactggggccaagataccattctcaattttccattatcaaattatgaggaaaagctcaaggagatggagggccagtcaaaagaagaatatattggatccttgagaagaaaaagcagtggattctctcgaggagtttcaaaatacagaggcgtagcaagacaccaccataacggaagatgggaagctcgaattggaagggtctttggcaacaaatatctataccttggaacttacggtaatttcattgtctatgatctaatgtaaagaaagcgcatgcatagatggatgctacttcttattgaaattttatgtgaatttcgttaaataaagaataaatttatatcattgagtgtgactcacataaaatttaggattaaatgtaattttagtcaattcataattttaatttttctattttaaaattaaaacatttatttttcttattttaaaaaatttgtaattttggtttttctatttcaaaatataaatatttaatttttatattttaaaaaattgacgattctggtttccttttttagaaaatctataattttaatttaatctttaattttgtatatgctttatttcttttatttcttattttgtaactaattaaatcaaattttgatgataccttaaatgaatatattagatttataattcaattggaccaaaagaaaaaaataaaacattgataaaattgagaatttgatcaaaattacaattttttaaaataagaagactaaatatctattttaaaacgggaaagactaaaattgtatattttttaaaacaaaagtactacatgtttcaattttaaaatatgaataaaataaaatagggaccataattacatttatttctaaaatttatataataaaaaaatgtgtacagaaatatattattaacagttttgaaaagtaattttcctgcattatattattgttattcaaatctcaagatgtctcaaaataagaatattgttagttattttttaaaaaaaaattgaatatgtgattttaaagtgtgcgtctatacatataatttgtcaattatatagttcaggggacgaaatgttttttaaaatcctaatcaaaaggtcattttctatgcatttgatgtacaattctcttagacagaagcatatggccttaccttagcatttgaatgcatttacatggttcatatatagcatttcattatcatcatttatatttggttatatttgctacgaattataaaacatgcatgtgatatgggcctatgtcagcactctaaataatgaacaaattaaattgtatgtttatgtattggttgaatataaacgaaataaagtagctaatataggtgtagcgatgtttaattaattaagagaggatgtacccatacctgaaattttgaaaatgtatttgaccattctttccggttctaacaagaaagtacctacttggtttcaacatggtcccgcggatcaaaatagtaggacaaatataaaggtcaacatatgcaatcagatcatattggttgtgatatagatcaccaaacttcaactgcttaatagagctatttaataatgatatcattcttttctagtcattttaatataaaccaaatcggaagaagaaaaagagaaatcctagaccgacatatgcaaacaataatacaattaaatttgcttacatgtgtgtgtccatatgttattatgtcgtattgtagctacacaagaagaagcagccgcagcatatgacatggcagcaatagaatacagaggacttaacgcggttacaaactttgacctgagccgttatatcaattggccacgtcctaaaacagaagaaaatcatcaaactattcctagcaatgaaaatgtaaactctaatgctgaacttgagctaggttcggctagtgatgagatcacagaagagggtgtagcaccatcttcagaatcaaatccttctcgtcgcacattccctgaagacattcaaacaatttttgaaaatcaagattcaggcatctacactgaaaatgatgatatcatttttggtgacctgggctcctttggtgcaccaatttttcattacgagcttgatgtttagaattggaggacttcttctggccaatacgttatttttcaaaagggggtaatcaaccaaaaaagatgataaagaaattagggggtaagagtaaacattttagagatcgagtggaagattctttaaaagtaacatacaaggggggaagagggattggatcattttatttgcgatagaacaagatgcatggcatacaagtacaactgcctcattttaacaatttagttttattatgtatgtctccacaagcgtgggtagatgtcacaacatttagttattataagcaataagaataatatttttttaaagataaatgttaaattattaaatcatatttaatttgttaagttttaaagattaataaaaatattttttaaatgtttaatgatgatattttgtgtgtcatttaattgtaaattattattgatataatttttaagataattttattaaaattaataatttatcctaaataataattttttattgaatgataatataaaattattttatattattaacatataattattttttttcatttcttaattagtcatatgatcacgattaattttaaatttttgcctcccacaattgtattacaaacacattttgtctttttatgcaaatttgcaacgaaataattgatgtgtttacggaatcaaacccaaaacaaaactaacatagtttcatgtcactttaacattaatttacacacaggcgcactaaagctaacacattttcatgttactttaacattaattttcatttttaactatacttgtttgtctttttttataaaaaaaaacttgtatatgtaattaccaatcataacagcattaatccttattcaagcgacaaattactgtcttttgacgaggtgattgatgtgtttaagggattaaacccccaaacagttttttattttattttatgaaaagctaactcattaatcttcaaaatttacacacaggaagagtcttaactcacgtgattactttttcatattttttatttttattttgtttaaatattatgatttgttggatttacttagattaatggctgagattttgtgtaagtcatgaaacttatacttggtgtgagatgatcttatcctatatatatatatatatataggataagtgtggtaagatgaagccatgaagagccgtgaaaaaggataaaataaaaagaaattaataagtgtggttttttttttcctcttaaattattcaaagacaagttgcgtaggtaggttaatagttgtggagatatattgggctcagcaatgagcagggctccgataataaggacaagtacaactctcccaccggcgaggtattgctttcactgggatcactgacgttgtcaaccaaaatccatccaaaagaaaaaatgaaatttgaataataagttaaacttttaacaagataaagaaaaataagaattaataaaaattgaaaacaaaaaatgtttgtataagaaaataatatatttatataagcttattatatgaaagtaaattgaaatataggaatgagacacagaggattagacgggatgaatatgaaagatgttg

SEQ ID NO: 29919 - DNA, 1396 bp, Glycine max
  Clone ID: UC-GMROPIC030A08_FLI
gaaattcccacaagattacggaatactttgaggcaattccaggggtcccaaaaattaaagagatgtacaacccagcaacatggatgctagaagtgagttctgtagcagctgaagttcgtcttggaatggactttgctgaatactacaaaacatcatctttattccagcgaaacaaagctcttgtaaaggagttaagcacacccccgcctggagctactgatttgtatttccccaccaagtattctcaatccacattggggcaatttaaatcctgtttttggaagcagtggctgacatactggaggagtccagattataatctcgtcagatattttttcaccttggcttgtgccctcatgatagggacagtattttggagaattggcaaacacagggagagctcagctgatctgacaatgattataggagcaatgtatgctgctgttatttttgttgggattaacaattgtcaaactgttcaaccaattgtagccgttgaaagaacagtgttctatcgagaaagagctgctggaatgtatgctcctttgccttatgccttagcacaggtcttttgcgaaataccatatgtgtttttccaaactgtttattactcactcatagtgtatgcaatggtgagctttgaatggaaagtggagaagttcttttggttcttctttgtcagcttcttctctttcttgtacttcacatattatggaatgatgactgtgtccatcacaccaaaccaccaagtggcatcaatctttgcagcagcattctatggactctttaatctcttctctggtttctttatcccaagaccgaaaattcctaaatggtgggtgtggtattactggatttgtccagtggcatggacagtgtatggattaattgtctctcaatatagagatatagaggacccactttttgtgcctgggagtactactcaaaatttcactgtcaaaggatatattgaagaccactacgggttcaaatccgacttcatgggtccagttgctgcagttttggtagctttcactgtcttttttgcctttgtattttccttctgcatcaaggcactgaacttccaaacaagataaaagaacttcatcaatgttggaagtacaagttatgctacggcatgttgtaacggtctaaatgacctgtgaatgtaaataactgaggctggagttaatgctcaagatttattatgcaacattataagcttaatagatgaccacgatagttttgctagcagagggttcttaagcaagtgtaaatctatatcaattgtactgttattagtttgatttgctacctagaagaagttagatgtttcttatggtcaattcttgcaacaacattgtttgttataaatagcagcttattcttttacatt

SEQ ID NO: 29920 - DNA, 2798 bp, Glycine max
  Clone ID: UC-GMROPIC030B11_FLI
atttatgcattccatttcagttccaaagttgcaacagaagagagaggaattttatggatattcgaataactccttctcggggtggggatcctcctaccacagtcaggtggattcgtctaggctttctgatttttctggctcatttaatgaatcaatgcatagtcagagtttgcagattgttccagtgcagaataaagggtccttgagagttttgctgctacatggaaatttagatatatggatccatgaagccaagaaccttccaaatatggacatgtttcacaaaacattaggagatatgtttggtaaattacctggtagtgtgggcaataaaattgaaggaactatgaataagaagattactagtgatccttatgtatcaatttcagtatccaatgctgttattgggaggacttacgtcattagcaactccgaaaatcctgtttggttgcaacatttctatgttcctgttgcgtatcatgctgctgaagtgcactttcttgttaaagacaacgatattgtgggttcacagctcattggcattgtggcaattccagtggagcaaatatactcaggagcagtagttgaaggaacctttcctatcctgaataataatgggaagccttgtaagcaaggtgctgtcctgaccctatccattcagtacatacctatggagaaattgtgcatttatcaccaaggagttggagcagggccagaatacattggggttcctggcacatattttcctttgaggaggggtggaaccgttactctgtaccaagatgctcatgttccagatggcagcctccctaatgtgttgcttgacagtgggatgtattatgtgaatggaaagtgttggcaagatatctttgattccataagtcaagctcggcgtttgatttatattacaggatggtctgtgtggcacaaagtaaggttggttagggatgctgctggttatgcttcagattataccttgggtgatcttgtaaagtcaaagtcacaggaaggagtaagagttcttctccttatctgggatgatcctacgtcaagaagcatttttggttataaaacagatggtgtcatggcaactcatgatgaggaaactcgtagattttttaagcactcttcagtgcaagtgcttctttgtcctcgcagtggcaaacgacatagctggatcaagcaaaaggaagttggaacgatatatacacatcatcagaaaaccgtgattgtggatgctgatgctggaaataatagaagaaaaattatagcatttgttggtggacttgatttgtgtgatgggcgatatgatactccccaccatcctctttttagaacattgaatacaatacataaggatgactaccacaaccctacttttacgggtaatattggtggttgtccgcgggagccatggcatgatttgcattctaaaattgatggtccagcagcttatgatgttttaactaactttgaggagcgctggttaaaagcttcgaaacctcacgggattaaaaagttgaaaatttcatatgatgatgctttgctaaggctggaaagaattccagatgttattggcatcaatgatgctccaagtgttggtgaagataatcctgaagtttggcatgttcagatatttcgttcaattgattcaaattccgttaaggggtttccaaaggatccaaaagatgcaacgagcaagaacctagtttgtggaaagaatgtgctgattgacatgagcatacatacagcatatgttaaggccattcgtgctgcacaacattacatttatatagagaatcaatatttcatcggttcttcttacaattggagtcaacataaagacctaggtgctaataacttaatcccaatggaaattgctctaaagattgctgaaaagataaaagcaaacgagagatttgcagtgtatgttgttattccaatgtggccagaaggtgttccaacaggggctgccacacaaaggattctattttggcagaataaaacaatgcaaatgatgtatgagacaatttacaaggctttggttgaggcagggcttgaagctgcattttctccacaagattatttgaactttttctgtcttggtaatcgagaggccatgaatttgtatgataatgccggtgtgactggagctcctcccccagcaaatagtccacaagcagccagccgaaatagccaacgcttcatgatttatgttcattcaaaaggcatgatagttgatgatgaatatgtgatattggggtctgcaaacatcaaccaacgctccatggaaggaacaagggacagtgagattgcaatgggagcttatcaacctcatcatacgtgggcaagaaaacaatcttatccacatggacaaatccatggatataggatgtcactttgggcagaacatacaggaacaattgaagagtgctttttgcaacccgagagccttgaatgtgtaagaagggttaaagcaatgggtgaaatgaactggaaacaattttcagctaaggaagcaacagagatgaaagggcatctactgaaatacccggtagaagttgatcgaaatggcaaggttagaccccttcaggactgtgaagagttcccggatgtgggaggaaaaatagttggatcttttcttgctatgaaggagaacctaaccatttgatattgagtttattacttattagtttgagtgttttcacattatgctagccaataggatatggtgtatgtatgtacattacaacatagaaacaattttgaaaagcatgatagttgaagaaacaattacc

SEQ ID NO: 29921 - DNA, 1936 bp, Glycine max
  Clone ID: UC-GMROPIC030F11_FLI
attggaaactacagtgatgggaatcttgttgcatctttattggcttataaaatgggagttacacagtgcacaatcgcgcatgcacttgagaagacaaaatatccagattcagatttatattggaagaaatttgaggataaataccacttttcatgccaatttactgctgacctaatagccatgaataatgctgattttatcatcaccagtacataccaggagattgcaggaacgcatccatgactgtactgagagacttataccgtgtttggtgtaacataacttgttgtctcaagattcctaaattatgcgtggtgacagcaagtgtcatggactcatggcttaccaaagaccactcagttatatgatgctatacctagtcatttcttttgtctcttgatatttctctgaaaggcatatgagctagttactattttgtttaagcatcctctctaggcatctcacatatctatccctggtgctaacctacattttccttgtaatctatatatacttttttttcagttaagctaatgttactcatttcattttcttaacctgtctttcaggaaaaatactgttggccagtatgagagccacgctggttttactcttcctgggctctatagggttgtccatggcattgatgtttttgatcccaagttcaatattgtctctcctggagctgatatgtcaatatatttcccctactctgaaaagcagaacagacttacagccctgcatggttcaattgaacagctattatttgctcctgagcagactgatgaatacattggtttattgaaagacaagtcaaagcccataattttctccatggcaaggctagacagagtaaaaaacataactggattggtagaaagctttggtaagaacagcaaattgagggaactggtcaaccttgtcatagtagctggttatattgatgtaaagaagtccagtgacagagaagaaattgcagaaattgagaagatgcatgagctcatgaaaaagtataacttagttggtgattttcgttggattgctgcccaaacaaatagggcacgtaatggggagctgtatcgctacatagcagacacacaaggtgctttcgttcagcctgctttctatgaagcttttggacttacagttgtggaggccatgaattgtggactccccacttttgctacttgccatggtggtccggctgagatcattgagcatggtatatcaggattccacattgatccttatcaccctgatcaagcttcacagctattagttgaatttttccaaaagagcaaggaggacccaagccattggaagaaaatatctgatggtggtcttcaaagaatttatgaaaggtacacgtggaagatttattccgaaaggcttatgactttggcgggagtttatagtttctggaaatacgtttccaaattagagaggcgtgaaactcgacgatatcttgagatgttctatatcctcaagttccgtgatttggcaaattctgttccgctagctaaggatgatgcaagttaactagctatataatttcaccaaaggcttgacagcagacataataagagtcatttatgtaaatataatagtctgcttctcgtgttttgaaatctagtgaggcgacctagaggagtttcatggaagacttgtcttgtctatgttaacttcgattatgtaagagatggcgagcactggttgttgaatttggatgtctcttgttttcgtttgattagtagtcatcaatgatatagacctggaaattacctgtgactgtgaggattgttatccttactgatgggtaagaataaagcattatgaatcaatggcctaatgatctgtattgtggcactgtataatgttaatgtatatgatgagacggtctagccaagccactgttgggttgggtttaacacttgct

SEQ ID NO: 29922 - DNA, 1974 bp, Glycine max
  Clone ID: UC-GMROPIC031E01_FLI
caaggaggagacaacacaacacaaggtgcaaaaaaacagaaattaaacactacaagtatagggtgagaaaatgggtgaagctaaggaaatatggtctgcaccaataacccctagaacagcttcagtggttggaacacctgttgtggcatctccacctgtgtcatgtccaccctctcagcttcactctccatctctaacaaggtcacccctccttcaccctgaggatggagatgcaccacgtcctaataaaacttctaagactccaaagacaccaagaacaccaagaaccccaagaacaccacttagaatctctaatttgactccaaagttcctcacacctttggggagccctgtgaggaaagctctgaggttcaccaagcttgatcctcaggatgcttggcttccaatcactgagtcaaggaatggtaacaagtactatgctgcttttcataccctttgttctgggattggaattcaggcccttgttctccctgtggccttcacttttcttggttggacgtggggaatcataagtatgactctggcgttcatatggcaactctataccttatggctgctggtcaaccttcatgagtcggtagaacaaggtgtacgctactgtcgataccttcaactctgcggtgctacctttggggagaaacttgggaaaatcctagccttgttcccaatattgtacctatcagcagggacatgcaccacattgatcatcataggaggatccacagcaaggacattttaccaagtggtgtgtggtgaaacatgcactgccaaacccatgaccactgtggaatggtacttggtgttcacctgtgtagctgtggtgctatcacagttgccaaacttgaattccattgctggggtgtcactcattggagctgtcacagctgtagggtattgtactgccatttgggtaacctctgtggcacggggtgccctaaaggatgtgagctataaccctgtaaggactggaagcagtattgaaaatgcctttggagtgcttaatgcattgggtatcattgcctttgctttcaggggccacaatctcatccttgaaattcagtctactatgccttcaagcgagaagcatccatcacacgtgcccatgtggaaaggggtcaaggtttcttacacaatcattgccgcatgcttatttcccatggccattggaggctattgggcttatggccaattgattcctgcaaacggaggaatgctcacggccctataccaataccattctcgtgatgtgtcaagattcgtgcttggattaacaagtttttttgtagtggtgaatggtttgtgctcgtttcaaatctatggcatgccagcattcgatgacatggaatcaggttacactgcaaggatgaagaagccatgcccctggtggcttcgcgcgtttattagggtgttctttgggttcttgtgcttcttcataggagtggctgttccgtttttgtctcaattggctggtttgattggaggagtggctttgccagtgacattcgcgtacccatgtttcatgtggctcaagacaaagaagccaaagaagcttagtctcatgtggtggctcaattggttcttggggacattgggtgtggctttgagtgccatattggttgcggctagtttatatgttatcgttgatactggtgttaatgtgagcttcttcaatcctcagtagtctcacatacagagtgaaaagaagtactaggaaaatgatgttgggaggtaattaattagtaagagatttactaagggttgtctttcttttttttcttctttttttgttgagaaattcaaattcgtaacctcactttgtagttctaggttgattttccctattagtgacatttttataaatatcattaactacataaggggaggggaaggtaaatcaagattgtataaattttcttgttctggaaattgaaaaatacttagagtttatttgcc

SEQ ID NO: 29923 - DNA, 1735 bp, Glycine max
  Clone ID: UC-GMROPIC031E05_FLI
gaatcttccatctccatttttcacccgatttctttgccagggttccagaaatgtttaattttaaacaaagatgagtacgactgaattatctaatatgaagcaacctcctgttccgctggcaaccctgattggccaggagctacgaaatggaaaaattgaaaaaccttttgtgaagtatgggcaggctggcttggcaaagaaaggagaagattactttttaatcaagacagattgccagagagttcctggggattcatcaacactcttttctgtctttgcgtgaacaagtggagcatcaatttattcccacaatggttatgatatccataaagaattcttgattggcagatctttgatgggcacaacggtatatctgctgctatttttgcgaaggaaagcatactaagtaatgttttgagtgcaataccgcaagatatgggtagggatgagtggcttcaagctctgcctcgtgctctagttgttggttttgtaaaaactgacatagagtttcagaaaaaaggggaaacttctggaacaacagctacatttgttctgattgatagatggactgttactgttgcatctgttggggattcccgttgcatattagatactcaaggaggtgttgtttctctcttgacagttgatcacagattggaagaaaatgtagaagagagggatcgcgttactgccagtggtggtgaagtaggaagactcaatgtatttggaggcaatgaggtagggcctcttcgctgctggcctggtggattgtgcctttctagatcaattggtgacacggacgtgggagaatttattgtgccaataccacatgttaagcaagtgaagctttcaaatgctggtggaagacttattatagcttctgatggtatttgggatgctttatcttctgatatggctgccaagtcatgccgaggtgtacctgcagagcttgctgcaaagctggtggttaaggaagctttaaggtcaagaggtctgaaggatgatacaacttgcctcgttgtagatattattccttcagatcatcccgtgttgccaacaattccaagaaagaaacgtaacgtgctaacttcccttctctttggaaagaaatctcaaaactctacaaacaaaggcaccaataagctttctgcggttggtgttgtggaggaattatttgaagagggttctgcaatgcttacagagaggttaggcaaggattttccatctaatacgaatcctgagattttccgctgtgcggtttgccaagcagatcagccctctgtggacagtttatcaatgaacactgggccttttttccccccagtatctaagccatgggaaggtccattcctctgcacaaactgtcagaagaagaaagatgccatggaaggaaaaaggtctactaggccctcggagacagcatagtaatatagtattctagcaacatagtaaatattagtataatttttctctggcagtgtgagcatgcttgcttctacatttgggtggtgattgtcattggtgtgtaagaatgaggttgagatagccatattaggtctattggaggttgtcgcaagtttgtttttggcgtgtgctctcagctgttggactgactgacagaacaagcaatgttgtttagtagataacttctattagtttgattactaacggcttgtaattaactggcaatttcattgttaccctttataggtttatttgtttttaacaacagtac

SEQ ID NO: 29924 - DNA, 1776 bp, Glycine max
  Clone ID: UC-GMROPIC031F08_FLI
gcctcgctctgtttctgtctctgtgtttgcggctgaggattccgaacgagcgaccttcttcgtttctcgcaaagtttaagtcatcatgggtaaggaaaagactcacatcaacattgtcgtcattggacatgtcgactctgggaagtcaactaccactggtcatttgatctacaagcttggaggtattgacaagcgtgtgattgagaggttcgagaaggaggctgctgagatgaacaagaggtcattcaagtatgcctgggtgcttgacaagctcaaggctgagcgcgaaagaggaattaccattgatattgctttgtggaagttcgaaaccaccaagtactactgcacagtcatcgatgcccccggacatcgtgactttatcaagaacatgattactggtacctcccaggctgattgtgctgtccttatcattgactccaccactggtggttttgaagctggtatttctaaggatggacagactcgtgagcatgctcttcttgctttcacccttggtgtgaagcagatgatctgctgctgtaacaagatggatgccactaccccgaagtactctaaggctaggtatgatgaaattgtgaaggaagtctcttcctacttgaagaaggttggttacaacccagacaagattccatttgtgcccatctctggtttcgagggtgacaacatgattgagaggtccaccaaccttgactggtacaagggaccaactctccttgaggctcttgaccaaatcaatgagcccaagaggccctcagacaagccactcaggcttccattgcaggatgtctacaaaattggtggtattggtaccgtgccagtgggacgtgttgagactggtgtcgtgaagcccggtatggtggtgacttttggtcccactgggctgacaactgaggttaagtctgttgagatgcaccatgaggctctcacagaggctcttccaggtgacaatgttggctttaacgtgaagaacgttgcagtcaaggatctcaagcgtggttttgttgcatccaactccaaggatgaccctgccaaggaagctgccaacttcacatctcaagtcattatcatgaaccaccctggccagattggaaatggatatgcaccggtgcttgattgccacacttctcacattgctgtcaagttttctgaaatcttgaccaagattgacaggcgatctggtaaggagctcgagaaggagcccaaatttttgaagaatggtgatgcaggtatggttaagatgattccaaccaagcccatggtggttgaaactttctctgagtatcctccccttggtcgttttgctgtgagggacatgcgtcaaactgtggctgtcggagtcatcaagagtgttgagaagaaagaccccaccggagccaaggtcaccaaggccgccgccaagaagaagtgatcgcatttgggcaattttgctagcacatgtgatcatcatcgtggttactcctttatagtagttttatccttgcagagtcttaggtgttttgtataagttatatttttaagtttctgccgatttcatgtagccgtaactttcaaaactaggttcttgatcggcggtggtcaattttcattgctgtttgtttttgatgagtactgttttttgttttgatggtaagaagagtctgagatatttcgaatttcacaagcagctatagggttttagtccatttcctttgctgctgagggatgttttaagttgcatttaatttataacgaagttttataaactgtttatggttt

SEQ ID NO: 29925 - DNA, 1441 bp, Glycine max
  Clone ID: UC-GMROPIC031G09_FLI
ccactggatctgctgttccctcgcctcgctcatctgcctctactccaaatgtcatggacatggctgctgcaatgagcctctttcctggttcgccgtcatcaatttcttccatgtctccatctccctttgcacagccaatgtctccatccacaagtggcatttctcattcatctaatgcttggccacagccaaatgttccagctcttcatttaccaggaagcaatattcaaactagccgattgagatcttctcttagtgctcgtgacatgccacctgaagacttggatgtgttgcaagattttgatggccagcaacaccttttgaatgacttaggctgtttctcgcagccccatcctggtggcatttcagtgagtcgatctggtcggtccaagacactaactccatcaaatcttgatgaactattttctgctgagatttcttcatctccccggtattctgacccagcagtggcttctgtattttccccaacacacaaatcggctattatgaatcagtttcaacagcttcaaagttcattatcacccataaatacaagtgtctcgtctcctaggaatgttgagcatcctctattccaggcttcatttggtgtctcttctcctggaaggatgtcaccaagaagtatggagccaatctctccaatgagctctcgattatcatttgctcagcgtgagaaacagcaccaacagctgcgaagccttagttcaagggaccttggtgccaacattcctgtctcaatggttgggtccccagttaactcctggtctaattggggttctcctcatggcaatggaaaagtagattggtcagtaaatggaaatgagctaggtcgattgcacaggtcatcatcgtttgagcttggaaacaatggggaggagcctgatctatcctgggttcaatcccttgtcaaggaatctccatctgagataaaagagttgggaggttctggccctgttgcatttgctgatggaccgagttcaaatcctcaagttgagtctgttgatcattccgttctaggagcctggcttgagcaaatgcagctggatcagcttgtagtctaatcaaactgacccattccatcttgtgatagtgaaaaatggagggagacgagcattttggtttgaaccttaaaattgaagatcgagggttctagtcgtggcgacagtggtcggtgtagtgccataaaagcaggtgggtgccaagtgtgatacatgtgcctagctagattcaggatatgggaccgtggcaggttgacgtgaagattgcattgattattgtgttggtggggaccaaggttggcttggatcatatatttgaacacttgaaaagacaaggatagatcaatgaaatgcaagtttatatgtagctgctacttattatgaatgtttatttaaataataaaaattttaagtgagttggttct

SEQ ID NO: 29926 - DNA, 1161 bp, Glycine max
  Clone ID: UC-GMROPIC032F05_FLI
caacttgtcatgttttataaatatttctgaacttcttttttaaatccttgtttctatttattcaggcatatgtgcaacaactagagagcagtaggttgaaactgatatcgccagcagggaatatttatttcaagtactggagatcaggcacagtcaatgaatggaaatggcgctatggcatttgatgtagagtacgcacgatggttagaagagcataatagacaaaccaatgagctaaggactgcaataaattctcatgctggagatattgaacttcgaaccattgttgacaatttcatgacgcagtttaatgatatcttcaggctgaaagctattgcagcaaaagctgatgcttgccagattctgtcaggaatgtggaagactccagctgagaggtgtttcatgtggattggaggctttcggccatccgaactcttcaagcttcttctaagtcagttggagcctttagtcgagcaacagatggatatctacagctttcagcaatcatgccagcaggctgaagaagctctttcccaagggatggatgcattgcagcaatcagtatctgagacattggctaatggttcgcccagctcatcaggctccccgggaaatgtggcaaataacatgggtcaaataactatggccatgggaaagcttggtacacttgaggggtttcttctccaggctgacaatctgcggcagcggacattagaagtaatgcttcaaatattaacgaccaggcaatcggctcgtgctcttcttgccatcagtgattatttctcacggctgagagagctgggttctttgtggccttccaggccaagggagtgaagcatttcacagccccattagtggacttctttcatgtctgactcccttaaacaccgatgattattgaatcttgtgctctgaatgagttcaatggaagctggtgtctttggacaatgaattcctcttgaagcctagttgtgatgctataagcattaaatgctatgacttttctactctgctgatgtggtgcaacatttttctttaagcttttgtggttttaaaatagtttcaataatttgattatataggtgtatgatagatagaagttgttgatttgacaccctctactgcgagatatacataaataaataaaatataaaacttcgt

SEQ ID NO: 29927 - DNA, 1361 bp, Glycine max
  Clone ID: UC-GMROPIC033A03_FLI
tccaaatttcgtttgtgagacaagctaggcacaatttttgttattcctatcttatcttaacattgtttcttggagttgattgaaatggcagtgcaacctgaaattgagcatcccaggaaggcctatggatgggcagctagggatacatctggtgttctctcccctttttggttctctagaaggaaaacaggggagaaagacgtgacatttaaagtgttgtattgtggagtatgccactcggaccttcacaagttgaaaaatgaatggagtgattccatctatccccttgtccctggccgtgagattgttggagaagtgacagaggtgggaagcaaagtagacaagttcaaggttggagacaaagtagctgcgggatgcttggttgggtcctgccactcatgccaaaactgtgtcaacaatcttgagaattattgccaacaagtgattcccacatatggtgcaaagtatgtggatggcaccatcacatatgggggattctcagacttcatggtagcagatgagcactttgttgtcaacattccaagtgccctacctcttgatgctgcagctcctctcctttgtgcagggatcacagtgtatggtcctttgagatattttgggcttgacaaacctggcatgcatctgggtgtggttggtcttggtggactaggccatctggctgtcaaatttgcaaaagcccttggcttgaaggtcactgtcatcagtacctctcctaaaaagaaaaatgaagccatacaacatcttggagctgatttttttgtggctgcaatgtgcaccttggatggtataattgatactgtttctgcagtccaccctctcatgcccttgattgatctattgaagtctcatgggaaactagtagctgttggggcaccggagaaacctctggaattgcttctcccacctttaattttggggagaaaaagtatagcgggtagttacattggaggaatcaaggagacacaagaaatgattaatttcgctgctgaacacaatgttagaccggaaattgaagtaattcctatggattatgtgaacacagcaatggagcgtctccagaaagccgacgttaaatatcgatttgtgattgacattggaaacacattgaagccacactattagttttgggccgagtcaaaaaacagagaatgaccattgaccaagggaagggaacactacaataatacaaagcactcttaaggatgtttaatattccttgtgttattctcctagatcttttgtatccatttttattttgaataaagggaacagaataattgcattcactaattttggtgtgccatatccatgttatatatattatgggaaacatgcatttg

SEQ ID NO: 29928 - DNA, 1145 bp, Glycine max
  Clone ID: UC-GMROPIC033E01_FLI
gaaacagagcaaagagagagtgtgtgaaaagtgaaacaaaaaacagaacaacaatggcgacacttaaggttcctcagcctcttccccccgttgcagatgattgtgagcagctccgaaaagccttctcaggttggggaactaacgaggagctgattgtatcgatcttggctcataggaatgctgctcagaggaagcttatcagagaaacttatgcccagacctatggagaagatctcctcaaggccttggacaaagaactcacgagtgattttgagaggctggttcatctttggacacttgattctgctgaacgtgatgcatttttggcaaacgaggcgactaaaaaatggacttcaagcaatcaggttctggtggaaatagcctgcactaggtcctctgaacaattgtttgctgcgaggaaggcttaccatgttctttataagaagtctctggaggaggatgttgctcatcacacaacaggagacttccgtaagctcatactacctctggttagttcttatcgatatgaaggagatgaggtcaacttgaccctggcaaaaactgaggcaaaattgctgcatgagaagatttcaaacaaggcttataatgatgacgacttcatcaggattttggccacaaggagcagagcacagattaatgctactttgaatcactacaaagatgcatttggacaagatatcaacaaggacctgaaggctgatccaaaggacgagttcctgtctttactaagagcaactgtgaagtgcttgatccgtcccgagaagtacttcgagaaggttgttcgcttggcgatcaacaagcgaggaaccgatgaaggagcccttacaagagtggtggccacaagggctgaggttgatttgaaaaacatagcagatgagtatcaaaggaggagcagtgtccctcttgaacgtgctattgttaaggacaccaccggtgactatgagaaaatgcttgtggcgcttttaggacatgatgatgcttgacatactcctttgtgtttgtgtgtgtgtacttgtggcagaggtactatatagtgtgcagtgtactgctttgtggttccatgttgttgtgttttctggccattattgtcttcctttgttgaataaaatgaaccactttggcac

SEQ ID NO: 29929 - DNA, 945 bp, Glycine max
  Clone ID: UC-GMROPIC033E02_FLI
ttgctaggagaatgcattttgagtatagcactccaaagaagaaaaccagaatttgaatatgacgttagggtttgagggttatagttataccacaacacttggaaggaagagggtcgtgttattacacaatgaagcttcttctctcaactctaattcggcggtgaatccattgaagagaatgtgcagcggaaaattcacttttgactctgaaaggtctcgccttgaggcccttcctcttgatgttctgattagggtgttgtgtggtgtcgatcatgaagatttggagcaacttgttcgtgtctcaaaaactgttagagaagcggctgagattgctaggagaatgcattttgagtatagcactccaaagaagaaaacttttgctcttcctaaaccgtttgatatagagggtgctggtgggtttgaggaaattgatactccaaatgccccattgaggaaacctaagtcaaagctgattggaaagaatctggctagcatctcagtggcattgttcgcttccgctaattaagaagaacagtgactggacaaggaaaaagaagcaacttgtgatggcacggacaatttctcttgttttgggtagttctgtgaacagatagtattaatttgttatgtgtatattagttggtacttggtagattagagagggacttgatacatacttagaagatctcactagctgatttcacacgttttgaaatagtctttacaagctaaatcttcttcaattccttcattgaagattgctttgacttgtttgcaatctttctgtatatctataggacaagtagaaagtgggataggttatagatgattatttggagggaaatccttggcccttctagtgtgataaatttaactgtgcacagtccattaagcatagttttgtgcttctctaataaaatgagtaaagtttccgctattacgatt

SEQ ID NO: 29930 - DNA, 1105 bp, Glycine max
  Clone ID: UC-GMROPIC033E03_FLI
aaggcaacaaaggggttcagccaagagattggaagaggtgcaggagggattgtgtacaaaggcattttatcagatcaaagacatgttgcaattaagagactctatgatgctaagcaaggagaaggagaattccttgctgaagtgagcatcattggaaggctcaaccacatgaatttgattgaaatgtggggatattgtgctgagggaaagcataggttgttggtgtatgagtacatggagaatggttctttggcacaaaatctctcatccaacacacttgattggagtaagagatatagcattgctcttggaacggcaagggttctggcatatcttcatgaagaatgcttggagtggattttgcactgtgacataaagccccagaacatacttcttgatgctagttatcagcccaaggtagcagattttggcctgtccaagctactaaatagaaacaacctcaacaattcaagtttttcaatgatcagaggaaccagagggtatatggcacctgagtgggttctgaacttagcaatcacctcaaaggttgatgtttacagttatggaattgttctattggagatgataactgggaagagcccaacaacaaccggtgttcaaaacattgatggagaagagccatacaatggaaggctggtaacatgggtgagagagaaaaggagtgccacatcttggttagagcacatcattgatcctgcaattaagacaaattatgatgaatgcaagatgaaccttttggctacagttgctttggactgtgtggaggaagacaaagatgtaaggcccaccatgagccatgtggtagaaatgctacaaagccatgaaagtgatcctcgtaatatcatcaatgcttgatggttacatttcttggtcctcataatgctaattaatggtatacctcataatactattatcaactcttgatggctactttcgacgtatcaggtactcaccgcaaggaagtagattttacattttagaatgcttctatatatatactttttttttaattctatatttttgtctttcatgtggtgtttgtaatttgtaaagttgtttaagataaataaatttcccttgtttg

SEQ ID NO: 29931 - DNA, 700 bp, Glycine max
  Clone ID: UC-GMROPIC033E09_FLI
ctcgaggagtactttatcttcatcgagactcaagactaaggattatacatagagatcttaaagcaagcaacatcttactagatgatgagatgaatcccaaaatatcagactttggtttagctagaattgttagaggcggcgatgatgatgaagctaacacgaaaagggttgttggaacttatggttatatgccgcctgagtatgcaatggagggaattttctcagaaaaatcggatgtttatagctttggagtgttattgctagaaattgtaagcggacgaagaaacaccagcttttataacaatgagcaatcacttagccttgttggatatgcatggaaactatggaatgaagacaacattatgtctataatagatcctgagatacatgatccaatgttcgaaaagagtatattgaggtgcatacatataggacttctatgtgtgcaagaacttacaaaagaaagacccacaatatccactgtggttttgatgctcataagtgagattacacatcttcctcctccaagacaagttgcatttgttcagaaacaaaattgtcaaagttcagagtcttctcagaaaagccaatttaactcaaacaacgatgtaactataagtgaaattcaaggtagataacaacatgaatcgacactgccattgttaacaataacttgtgcttaatatataattattaaccc

SEQ ID NO: 29932 - DNA, 843 bp, Glycine max
  Clone ID: UC-GMROPIC034A10_FLI
gtcggagctgtctgtgcaaatttgcgttgttcttcgcggcacacctcactcactgaacggtaagtatggcggacaaggctgttacaatccgaacccgaaagttcatgaccaacaggcttctttccaggaagcagtttgtcgttgatgtccttcatccagggagggcaaatgtttccaaggctgaacttaaggagaagctggctaggatgtatgaagtgaaagaccctaatactgtatttgtcttcaaattccgaacacattttggaggtggcaaatccactggatttggtttgatttatgatacagtggagaatgccaagaagtatgagcccaaatacaggcttatcaggaacggccttgacaccaaggtagaaaagtcaaggaagcaaatgaaggagagaaagaatagagctaaactagtgtccaacgagaactacgaaaagggcttgatttatccaccattctctaacatcagagaaatttcagctaacatagcagcaagtgtagctggcaaggcatatgagctaggcttggctactcgtctccctcgtcctcagaatcttgtcaagtatgctgagagctgcatgtattctcctgtctacagaaactataggtgaattatggggcaagtcacttgactttggctgtaataaacacatgtcttggtggcatgtgtgagttgttttatgtaacttatgcataagtgagtggttttatgctatttattatgaaatcaccaaaactgcaggtgaagtatgctttttgttatggggcaaatcactgttagctttggctgtaataaaacatataatgctttgtattatgaaatcttagtttcatctc

SEQ ID NO: 29933 - DNA, 1270 bp, Glycine max
  Clone ID: UC-GMROPIC034E12_FLI
gctgaggcggcagagggatgtgctcaacagaaggatcgagttctgcaagcagaaggacgccatcggaatggcagcgaggctcgccgagacaacgttctttgcgttcagggagtacaccgaggaggagctccggttggcgacggataacttctccgagcgcctcaggttgaagtccggcggggattggaccaatgtgtataggggacgctttaaccattccactgttgctatcaagatgctgccttctttgtcaccccaacatttccaatccaaggtgaggcttcttggtgatattaggcaacctcatctggttgccatggttggcttttgctccgagcccaaatgcatagttttggaatacatgcgcaatggaagcttacgagacatgctgttttctaggagaagaaaccgaaccttacgatggcatgaccgaatacgaatagccacagaagtttgttcgggcctgggctttctcaatgtagctgagccaaggcccgctattcattgtcatttgaccccatcgaaaatcctcctagaccgccatttgattgcaaagatcacgggctttgggctccatgaatgccatgatgaacattgtaatattgagtcagatttgcgggccataggggctttgttaatgcaccttctaactggaagaaattgggctgggctcgttgaggaggtgatgacggtagatatagatagagaggctttgggtggcgttcttgatgagatggctggacaatggccattggatctagcaagggaacttgcgggcctggctatgaggtgcatgtccatcaaaagcgagccgaacttggaattgagcattgcaagggttttagaggaactcaatgagataagaagaaagggggatgaaattgttggaagggaaaggcgaaagacaaacactaatggtggatgtataaatagagagggatccagtgatgtgcctagtgttttcctttgtcccatacttcaggaggtaatgaaaaacccacacgtggcagcagatggattttcttatgagctagaagcaatagaacactggctgcaatcgggacgtgacacatcaccagtgacaaatttgaggctgaagcacactttcctcacccctaatcatacccttcgttccctaattgaggactggcagaccaacaaatcaacctgagttagcttcggattgaaatactaacaacacgctctttaatacacttgttacttaaacaataaccagttgagttaatgattcatgggcagattcaagtct

SEQ ID NO: 29934 - DNA, 674 bp, Glycine max
  Clone ID: UC-GMROPIC034F08_FLI
aagcaattaatcatattcctctctcattctcactataaacacaaaacccttcccatcctaattaaggtgaaaatgaaggcatcacccattgcttggttcactttggtggttgtgcttcttgtggctgaagttcaagtttcaatggcagtgacatgcagcccagtgcagctgagtgcatgtgtaagtgcaataacctcttcaacccctccatcaaacctatgctgctccaagatcaaagaacagaaaccatgcctctgccaatacctcaagaaccccaatctcaagaagtttgttgactctcctaatgcaaggagagttgctagcacttgtggaactcccttcccaaggtgctaagtgttaataaattggaagaggttttaatttctctgcctgattatgcatcttgatatctatccaagtgtttggccagagactagagagtgaaagaaaattatgtgttaattgttatcatatatatatatatatggtgtggtttaaggtctctatatatgttttaatgttagtgagattaagtattagtcctaatggatatgtgatgctttggtttcatgtcattccatttcagttccttggtgtggtctcatctcacgtaacgttaattagttgttgcaaaaggctgtatttataattcaaagaagtatctgtttctgatc

SEQ ID NO: 29935 - DNA, 919 bp, Glycine max
  Clone ID: UC-GMROPIC035H02_FLI
actctctccacacacatatataaacccaaacaagtgaacaacactccctcctttgtcccattactagtacatacattcccctaaccaagttttaagtttttctcaacagaatggaagcaaccaacagaagctcttcctccacttcctcttcctctgattgctgctcttccgagtccaaccccaacaagcccgacagaatcaaaggcccatggagcgccgaagaggatcggatcctgaccggactcgtcgaacgatacggcccacgaaattggtccctcatcagccgctacattaagggaaggtccggcaagtcatgccggctccgatggtgcaatcagcttagccccgccgtggagcaccgccccttctcggcccaagaggacgacaccatcatcgcggcccatgcccagtatggtaacaggtgggccactatagcccgattgctaccgggccgaaccgataacgccgttaagaaccactggaactccactctcaagcgcagagccaaaggtattaacattaatgttaatcacgccaacaacgaagtggctgcttcttcttccgctccttctcgccacttcgacttcgaggatgatccgttgaccgcgttgactctcgctcctcctggtattgctaatggcactgtggcggaggacgccgtgccggaccatcgtgcctcgccggaggggttttgggatatgatgagggatgtgatcgcgagggaagtgagggaatatgtgtcttccaatttttctgataactcgggttttcattaaatcaatcataatcataattgttattatgcttcttcttttttctttttttttttttaactttaggcaaattattctgcaatttgattttgccttactggactttggaatcggatcagagaattaaattaaattagacccttctg

SEQ ID NO: 29936 - DNA, 1137 bp, Glycine max
  Clone ID: UC-GMROPIC035H03_FLI
ttctagttcgtgttcttcgtcgcaaatccgaagtaggatctctcttgttttttctctaggtttttcgcgatggcgtcgaagcgaattttgaaggagcttaaggatttgcagaaggatcctccaacatcttgcagtgccggaggcttgcctgagctgcaaattctttgaggcttgatgaagctgaaggagaaataattgttttttttgtagagtattgaattaatttttgccatggacaaaaaaatgtttaggggaatgtacaattctaagcatatattgtttcatatattttaaggtgggaataggatacatagtccccaacatctccctatgcaattgtattcatgattcagcgttttgtttcctggatcatgcatctgttggcggctctgtctgttttatgacaagattatgcaataaaagaagttagaactgctgtagttgtaaatttacacactattgatggagtgtggtccaaacctttatatgtgatggtcctgttcatgaagatatgtttcattggcaagctacaattatgggtcctccagacagtccctatgctggaggtgttttcctagtgactattcatttccctccagattatccctttaagccacccaaggttgcattcaggacgaaggtgttccacccaaatataaatagcaatggaagcatttgccttgatatattgaaggagcagtggagccctgctctaaccatttccaaggtgttgctctcaatttgttccctgttgacggacccaaatcctgatgatcctttggtccccgaaattgcacacatgtacaagacagacaggaacaagtacgagtcaactgcaagaagctggacccagaaatatgccatgggctaattgacatagagaagagagcgatttttactttcagtgtttaggccaaacagccttgtatgaatatttgtggtcttcgattaaggcccctccagttgaagatgaatggggaaatatttcttctgttgtctgtattgcagaatgcaaacgctacttttaaaacagtgaaatgtaagcccaattaaaaagtttaaaattttaaccttgtattgacagtattgtcgaatatttagagaatgattggtttgctctgttattctgttttagtt

SEQ ID NO: 29937 - DNA, 1421 bp, Glycine max
  Clone ID: UC-GMROPIC036A11_FLI
ctcagccacagccacaacacacaaacacaaacccttcgttcctctctcgttcccttcttcaattcgatcaaacacagaatagtacttttttattatgatggccgtggcccgaaaggaaatggaccggatcaagggcccgtggagcccggaggaggacgaggctcttcagaagctcgtggagcggcatgggcccagaaactggtccctcatcagcaggtccattccgggccggtctgggaaatcgtgcaggctccgatggtgcaaccagctgtcgccacaggtcgagcaccgggccttcacgccggaagaggacgagaccataattagggcccatgctcggttcggtaacaagtgggccaccatagcccgcctcctctcgggccgcaccgataacgccatcaagaatcactggaactcaacgcttaaacgcaagtgcgcgtccttcatgaccgccgatgaagccgccggcggcggcttcagcccgaggccgctcaagcgatcgttcagcgccggcacggcggtgcctcctccaggaagcccctccggatccgacgtgagcgagtccagcgctgctcccggcgtggtctctgtctctgtctctgtctctccttcacaagtgtttcgccccgtgccggttcggccggttgtcgaaacggcgtcgtcgcaagacgacgccgacgccgaggatgctggacctactacctcgctttcgctgtctcttcccggggtggagtcatcggaaatctctaatcgcacctcgacggttccggtgatgccggtgaacaccgtggctgtggcggctccggttccgttaccggcgccggaggttggattaggagcgttgaatttgaatgcggagtttatggcggtgatgcatgagatgataaggaaggaggtgaggagttacatggagcagcagaatgggatgatgtgttttcagggtatggaaatgatggaagggtttaggaacgtgtcggtgaagagaattgggattagcagggtggattcgtaattattattattattattattattatgacctaattagtgttttcacaaaatgaggtttatgaagaactatgatcaagggaagagaaaaaaaaaaaaaggaagctgttttcctttttttattttatttttagggaataataatattggttagtgtacagtgggaacgagacgagagaagccaagagtagtagcctggaatggaatgatggaaagtgaaatttcatggcaaatttgaaatttctttggcttgtttctgagcctctttggatgatcctgtgcttcaggtttatttggtttggaaaaaaacataaatgaggggttagatgcgaaaaaagaaagagaggggttggatttaaaaatgaatggaatatcctcaaattttcaatattaagttcacattttattttcac

SEQ ID NO: 29938 - DNA, 1780 bp, Glycine max
  Clone ID: UC-GMROPIC036B10_FLI
gctctcatcagattcgggtcgggttagcgttatcggataacttcgcccataaattctctgtttacggggcgaaaatgacagtattcttagcgacgaggctcgtgttgcggagatccccgccgcttctctggcggcgcagcttttctcgggcggcggtagaggccgaaaaggacactgttgccgtgccgtcgcttccgttgttcgattactctccgcctccgtatgcggggcccaccgctgacgagattctggcaaagcgcagggagtatctgagtccttccatcttgcacttctacaagaatcccgtgaacatagtggagggtaagaagcagtacctgtttgatgagaaggggagaaggtacgtggatgcgtttggagggattgctacggtgtgctgcgggcactgtcaccctgatgtggtcgaagccatagtcaaccaaaccaaaaagttgcagcactccacagttctctaccttaacaacgccatcgccgatttcgctcaagctttgacttccaagcttcccggtaatctcaaggtggtgtttttcacaaactctggaacagaagcaaacgaattggcgatactgattgcaaggttatacacagggtgtcatgacataatatctctaaggaatgcttatcatggtaatgcagctgggacaatgggagctacagctcaaagcatctggaaatttaatgtagtacagagtggtgttcatcatgcagtgaatccagacccttatagaggcattttcggttctgatggagagaagtatgcaagagatgtacaagatatcattaacttcggaacttctggaaatgttgcagccttcatttctgaagccatacagggagtggggggtatcattgaattggctcctggttacttgccagctgtgtacaataccatcaaaaaagcaggaggacttttcattgctgatgaggttcaggctggctttggtcgcactggtagccatttctggggatttgaggcccacaatgttgttcctgacatagtgacaatggctaagggcattggaaatggcattcctcttggtgctgttgtaactactccagagatcgcagaggtcttaacccgccggagctactttaacacatttggtggcaaccctgtttgtactgctgcagggttggctgttttaaaagtaatagagaaagagcagcttcaacaaaacgcgtttgtggttggatcctatttgaaagaaaggctcactgccctcaaggacaaatatgaattaattggtgatgtgaggggaagaggcctaatgctaggagttgaacttgtcactgatcgtgaacttaaaactccagcaaaaggtgaaacgctgcatgtaatggaccaaatgaaagaattaggagtacttattggtaagggtggttactatggaaatgtcttcagaattacacccccgttgtgtttcaccaaagaagatgcagactttgtagcagacgcaatggacttgaccttgtctagaatgtgaagctgagccaagatcctagctttaataaaagtctattatatcataaatgaaactgtattatctcatctccatagctggtaaaaattacatagatgcagacttatatagctaaaatagcagaccaatctactgtgatcttaggctatgcatgagccaacaactcgttgtctcttgtttgatgtttatctttccaaatgaatgagccaacaactcgttgtctcttgctttgtcgtttatcttttctcgtagcatgttattagcttaatatctttttcact

SEQ ID NO: 29939 - DNA, 878 bp, Glycine max
  Clone ID: UC-GMROPIC036C10_FLI
cagaaaatgaattcccaattgctttgcatctttctgctggtcatttgcaccgtttccattggcacactgacacaagcaaagccaattccggaagaagctgcggcaaccgaaaccaaagcggacgaaggcaaaaaagaggagccgaaaaaggaagaagccgaagcgaaaaaggaagaagcgacgaaggaggagccgaaaaaggaagaaacaaagaaaggagagggcaaaacggaagaagctaagaaagatgaagccaaaaaggaggagccgaaaacggaagaggccaaaaaggaagaagcaaagcccagtgccccggccgtcttaactgaagctgccgataatgtgaacaaagcggtcgatgacttaagcgttaaacaggcaaaagcattgaaaaacgcggccgaagcaacggcagagaaaacgccggaagagcaggaaaaagcattgaaagaagtggcagaaaaaggaggaaacgaacagctgaagacggctgtcaacaaaattttggaggcaaaagcgaaaaacgacgcggaattggaaagcgaagtgaaaacgaaaacggcaacactttctgaggacagcaaaaaggccagcgcagagttgactttgataattgaagacaaaaagacgactttggacgagaaggtgaagcggacggaggagctgacagccaaaatgtcggacaacacgaagaaggagctgaatctgaacaacagtgccgacgtcgtcgccttcgtcaagtcgtactccgccgtcgccgtgccggcggtggccacggagggcaaagcatgatcaatcagtctgatcggaggattcggcattgttgtgtgatgaaatgtagccaataatgaaattcattgattaaattaattttcgtt

SEQ ID NO: 29940 - DNA, 600 bp, Glycine max
  Clone ID: UC-GMROPIC036D11_FLI
atcgagttctgcagccaccaccacaacaacccaatgcgtgagatcgaaaagccattgaagagctcggacatgcacgacgtggtctcggactgggacgccaactttgtggacattgagcaggacatcctcttcgagctgatcctggcggccaactacatggacatcaagagcctgctcgatctggcgtgcgcgaaggtcgcgagcatgatcaagggcaagaccccgcaggagatccgcgagactttcaacattgtgaacgacttcacacccgaggaagagagccaaatccgcgaggagaacaagtggtgcgaagaagcgtaggcggctagtcagtcaccgaatgcagaacggcgacgacccggtccttgggctcgattgccgttgtgcagcagtccgttcaccatttgcgctctgcatattagtcagctgattgattgagggagagcagcgagcagtcagtggattggctctcaggttttcttttgtttcctgtcggcccatccgcgatcttgaatagaggtcgtggactctttattaaatggacatcagcggatggcgtgcatttacacggtaattgataaagagtcgttgcttcatact

SEQ ID NO: 29941 - DNA, 1624 bp, Glycine max
  Clone ID: UC-GMROPIC036E09_FLI
caatttcgtctttccctattttatatatcgctgctgctgctgctgattatgattatgtttttgatggggatatacctcagcactcccaaaacagagaaggcctctgaagatggtgagaacgacaagcttcgcttcggtttgtcttccatgcagggctggcgtgcttccatggaagatgctcatgcagctcatccatatttggacgagtctacgtcatactttggtgtttatgatggccatggaggcaaagcagtttcaaaattctgtgccaagtatctacaccagcaggtgcttaagagtgaagcttacttagctggagatttaggcacatctttacagaaatcttttctcagaatggatgagatgatgcgtggacaaagagggtggagagaattagcagtcttgggggataaaatagaaaagttgtctggtatgctagaaggctttatatggtctcccaggagtagtgaagccaatgaccgtgtcaatgattgggcttttgaggaggggccccattctgattttactggaccaaactctggaagcacagcttgtgtggctgtcatccgaggaaacaaacttgttgttgctaatgctggagattctagatgtgtcttatcaaggaaaggccaggcacacaatttgtccaaggaccacaagcctgaacttgaggctgagaaagacaggattctgaaagctggtggtttcatccaagttggacgggtcaatggaagtttaaacttggctagagcaattggagatatggaattcaagcagaataagtatttgcctgttgaaaagcagattgtaactgctgatccggacataacttcagttgagctttgtgatgatgacgagtttcttgtaatagcttgtgatggaatatgggattgtatgtctagccaacagcttgtggacttcatacatcaacagttaaagactgagaataaactttctgcggtttgtgagaaagtatttgataggtgtttggcaccaacagctggtggtgagggatgtgataacatgaccatgatcttgattcagttcaaaaaaccttccagcagcccagatgcatcatctgtcacgaaccagcctcaatcgtctgctcaaccatctgaagctgatagaagttcagagacaatagaatcgaagtgagagaatttcggacctgacttgatggtcatcaatttcttactgcatgttgaagcattggtgagctgaggttcttgccttcttgggtactattttatatccagatttcaggatgttaattgtcaataggggattgcaaatttgtgaaaaactaattcatgggactagtattggctttgtacacaagtgtgggtgttcagaatatgaaggaacaaaaaaaattcagcaagcatactgatgtacaccgaatgactaaaattaccttttggaagcttacctatgccaatataagtgctgaccggaagaatgtgtagaaactagaaagaacatgtagtatactggagttatattcatgatccataattagtagcagttccaaagaccacccctttatgggttggtgcacccgtgatgtcttgttattattgttaaatttctctcttttttggaaattataaatcctcgttgattt

SEQ ID NO: 29942 - DNA, 423 bp, Glycine max
  Clone ID: UC-GMROPIC036F07_FLI
gttctggaacttttgactggaaggaagcctgttgatcatacactaccacgtgggcagcagagcctggttacttgggctacaccaagactcagtgaggataaagtcagacagtgtgtagatgcaagactaggaggagaatacccacccaaagctgttgctaagatggccgctgttgctgccctgtgcgtgcaatatgaagctgatttcagaccaaacatgagcattgtagtcaaagctcttcaacctttattgaatgcaagacatgggcctgctggtgaaactccaaactaatctttgtctatatttatatctgtatcaatgagtatgtgcataagtgtgcacgtgagatataagaaagtgactgcttcagaagcggatggaaatttgcttgaacatgtttatatatcccattgtttacattgc

SEQ ID NO: 29943 - DNA, 1080 bp, Glycine max
  Clone ID: UC-GMROPIC038D03_FLI
tgccattccgagcaaagaaaccaaaaggaaccttctctgtttccaaaccagtcatggcaagtatgtagaatgcctgctttctgtgagtaagaaattggacgtagagggcctagttactggggtcttctgcttcttacagctagctagcccagagctccaacaagcattacatattcagcgcctatccgagcaaactgccttgaagagattaaatgcattaagttacatgaaaaggcaaatcaggaatcctttgtgtggaattatattttcccggaaaatgttggagggtactgccttgggaacagagcagaaacaacttctacgcactagtgctcagtgccagcagcagcttagtaaaattcttgatgactcagatcttgatagtatcatagatggttacttggatcttgaaatggctgagttcactctgcatgaagttctggttacctcacttagtcaggtcatgacaaaaagtaatggaaagagtatccgaatagtcaatgatgttgcagagcagattgtgatggaaactttatatggtgatagtcttaggcttcagcaggtattggctgactttttacttatttccatcaatttcactccaaatggaggtcaggttgttgtagcaggcactctaaccaaagaacagttaggcaaatccgtccatctcgttaagttagagctcagcataacacatggtgggagtggggtaccagaagcattactgaaccagatgtttggaaacaacgggctagaatccgaggagggtattagcctactgatcagcagaaagctgctgaagctgatgaatggagatgttcgctatctaagggaagcaggcaaatcagcttttatcctctctgctgaacttgcagcagcccataatttgaaaggttaaaagttttggaaaaaagaataaaagatgatgcaaccagcaaaacacaatctgttttgtacatcataaagagaacggagctagaaattaattgcatccaatgtaactctaatttgttcccacgtttcttgttaactgcttcttgtaacgtacgttgtagatatgtattaatcttcttcccattc

SEQ ID NO: 29944 - DNA, 1446 bp, Glycine max
  Clone ID: UC-GMROPIC039D05_FLI
gcattgagttgcgctgttccttcctcctgttgttcgtatttatttcatttacgccgccgtcgtctccgccgcagagagcgatgtcttccgtcgaaacggagatggagccactcacgtcgggggccagcaaccgcataattccgctcctcaaggccctcagagcctccctcatcttcgtctacaccttcttcctctccttcctcctcttcgtcctcccccgccgccgccgcctctcccccgcggcggggccgccctctccgaagaagcatttgaggcggcgctggctcgtgcgcgaggaggaggacacgtgccgcagaagggcgctggcgcaggacgtgggaatgggtcgcgacgaagggtggtaccgctggagcacttccatcttctacggggttcggaacaacgctctgttttgccggtcgtggttcccggttgccggtgatgttaagggcattctaatcatcattcacgggcttaatgaacacagtggaagatatgcggactttgcaaggcaattaacatcatgcaactttggtgtctatgcaatggactggataggtcatggaggtagtgatggattgcatggttatgttccatctcttgatcatgtggttgtagatacgggggctttcctggaaaagattagatcggagaatcctgggataccatgctttctctttggtcactccactgggggagctgtggtcttgaaagcggcttcccatcctcatattgaagtaatggtggaaggaattatattaacctcaccagctttacgtgtgaagccagctcatcctattgttggtgctgtagctccaattttttctctggtagctcctaggttccaattcaaaggagcaaacaaaaggggcattccagtttcgagggatccagcggctttgttggcgaagtactctgatcctttggtctacacaggacctataagggtacgaactggccacgaaatattgcggatatcctcgtacttaatgcgaaacttcaactctgtgactgtgccattctttgtcctgcacggaactgctgataaggtgactgatccactggcctcacaagatctatatgataaggcagcttcaaagttcaaagacataaagctttacgacggcttcttgcacgaccttctgtttgagcctgagcgtgaagagatagctcaggacattatcaactggatggaaaagagattatttactatttgaaaatgttagtatatatatatatatatatgggggggttaataggaaagggaagacacaagggaagaaaaagggatgccatgtttgtaagtgtagaaaattgaagtcgccctgggaaatggggggaggcggatgcagataggtttattcatcttttcattttagtgttttgaatatatgtattgtgtgaagatctttgttttatcaagaaacttgtacattttatagactt

SEQ ID NO: 29945 - DNA, 510 bp, Glycine max
  Clone ID: UC-GMROPIC040B05_FLI
ggagagagcgagagagagagagagaatggcagcacttggtggcaatcgtgatgtggcaggaagccagaacagccttgagatcgatggtttagctcgctttgctgttgaagaacacaacaaaaaacagaatgcccttttggagtttgaaaaggtagtaagtgcaaaacagcaagtggtttctggtaccttgtacaccatcactttggaggcaaaagatggtgggcaaaagaaggtttatgaagccaaagtttgggagaaggcatggttgaacttcaaggaggtgcaagagttcaagcttgttggagatgcacctgcatagtctagtgcttaattaggttgcagaagagtgaagagtgagacagcctggctcgaaggggaaagcctaaggatatatcaaagcatgctatatgtataaaataaatgtagcttttctaccttcggtattgatatttgaaatcgtgatttggcatcttatatatgatctctgtgtttgtctatacctatttatct

SEQ ID NO: 29946 - DNA, 3061 bp, Glycine max
  Clone ID: UC-GMROPIC040D02_FLI
gttttcaggtccataatatgatgcaattactcattagatcagaaaatgacggtattctgtgtcccattccacagtaccctctgtactcagcctcaattgccctccatggtggctgcctggtaatgttttctccatacagttgcataatgcataatttaatttggtcactatatagatgcaccctgttttgatgattttataggttatgtgccatctttgaaaggacaaataagagaaatggtctatgtatatgtgcatgattgacatgaaactttgaatgcgaactatcttgttataatgttttggttggattatcagcttaacttcaatatctttttttctaaaggtaccttattatctagatgaagcaacaggctgggggttggaaatacctgaactcaagaagcaattggaggctgccaagtctaagggcatcaatgttagggctttagttgttataaatcctggcaatccaacggggcaggtgagcggcaaggaattatgtagttttaggggatgtttcaaagagcttatgtggagcttaattgggttaatgaaaatgacttatgactcctatataagctccttttagtttttttttcaattctttttagtttatttctgagttttatggtcaattttatgtatgttataatctcatgtgatgaaagcttatttaagcgtttaattaagctgtactcttaatataggaggatgcttactgcttagaattcatgaagctttgttgattaaatttgataacttgaattttctgtcatgcctccaggttcttggtgaggcaaatcagcgagatatagtagagttttgcaagcaagaaggtttggttcttttagctgatgaggtaaatggactattcttcaaaatcttagatattcaattaaattgattttaaatatgttgtaattcatgcaccttggatatgacgacaattattagatcctatccgaatttttttatgatgtcaaaatatatattggaaactactgttttgttgaagcatatatgggatgattctattataagtgtaatatactattgatgggtggaatttattttgaaggtatatcaagaaaatgtttatgttcctgagaagaaatttcactctttcaagaaggtatctcggtccatgggatatggtgagaatgatatcaccttagtatcttttcaatcagtctccaaaggtaagttggtaccagagttaattaattataacaagagagactagtcttttatgctaatttatgatccatattgatggaagatgcctttttctttgtcctcaggctatcacggggagtgtgggaaacgaggaggttatatggaggtgactgggttttctgcagaagtgagggaacaaatatataaagtggcatctgtcaacctttgctctaatatctctggtcaaattcttgcaagcttggtcatgagtccacccaaggttaactcctttcatctttaagtaaaatttccttttgggtaataaattaataattcttttgtttgaatagttaaaagagcattgaacataattcttaccatgattggttagagtgccaacctagaattaaaatatcagcagcactcttgcactataaaagagtgtacatggttaattggaaggaattatacttgaagcattgcctttcaagaacagtaactttgtattggtcaatgacaactatgcatttactctagagtgatatgcgccactcctgttggagctttctttattccatgcctttggcattttaagccaaaatacacctagaatcccatctgaaataagaagacatgtaattagggtaatccccattggaatctctaataattaacagtgttattaaattattttaaacagaattccttgttcacaataaggaaatgtggtttggtataaaatttcaccatttctgtcattccattactagtttgatattcaatgtattcaatggatgtctgcaggttggagatgagtcctatgactcattcatggctgagaaggagaatattttggcgtcccttgccaggcgtgcaaaggttagtttacctaggaaataatttgagatggtaaaagcacccaacattttaactttgattcaagagtaatattttagaatttctaaggtgcatttcctctttgccccaatggaagtttggatttccacttcaccagagttcgttttgaagagattctcttacactatgaactgaccaccatggcccctaaaatatttacaaattttactatcatattcccactctaagagaacctttaccaattttttttttgctttcttttgtgatttattctgaacagacactagaagatgcattcaacaaattagagggtgtaacatgcaacaaagcagaaggggcaatgtacctgttcccccaaattcgcctgtccgaaaaggctatcaaagctgcagaggctgcaaatgcaacacctgataacttctattgcaaacgcttgcttaatgccacaggagtagttgttgttcctggttctggttttggacaggttagtttatgtacttattctttttgtaaaacacttctctttaatttagcatgacataaattcatttactgatatagaccaacaaaattaatgatttcattttccatccttttgataattataaactgattgtattgttaaattgttgttgtgtcttgcaaggttcctggcacatggcattttaggtgcaccatattgcctccagaagaaaagattccggccatcgtcacccgcttgactgagttccatgaaaaattcatggatgagttccgtgactaagtcctacttgaattttatccgtcaatttaagggtacccaattgatatttgatgaggatggattttgtagttagagaaaatagtctcttttgttttcaggaataaatttgtcaactccttatagttgcattttgaatatgcaagacttgaaaggatatttgattttctccattcttatacttgtattaggtcctatataaatctctttttaatcgaataaacttcgtattagaatacccat

SEQ ID NO: 29947 - DNA, 1554 bp, Glycine max
  Clone ID: UC-GMROPIC040F08_FLI
agtttcgttattcgcccgacacattttttctccgatcccctattcctctccattctccgctgtgtcgatttttgttactcaaaagggaaattgatttgatagatagacagatagatcgtttctatgggttaaagtgaaatccgaatccgaatctgaatctgaatctgatctaatcattttcatgttagggcgtgcgatctccaatcaagcgcggttgtgtttaggtttcattttgttgggcgtgtgagtcgtagggggtttcgaagagcatagaataatgccttcggtgcccgttgatctccgtctagttccttctttgaccgttttccatggtggatcctcttttcatcgtctgaaaaatcttgaaaaaagtgatcggcgtggtaatcttagttaacactaggtctttcgttttcttccaccttctctttcttttctcgctctcttttggtcgtcgttgttgttggttctgctctgagcgagctgtgattaattcgtcagcggatcgggatcgagggtttgctattgttgttctttctgtgtttggttgctattctctgctcctgttttgatagtgttgtagttgcagctccaaacgtcgttttataagtacctgatgctattgatggacacgtgctctaataccaatgttgtgcatgacgacaacttcataagtaatcttggaaggacttttagtgagtcattacacattcaagatgctcagaaatctttacttgcttctgaggggagtgacatctataatgtgaatgaggaaaaaatatgtaaagcaatgaaagatcaagcgacaaaagtaaatatggcgtgcttgaaaaaatctgcaacctttccaattcctaataccatgttgccttcaagctcgtctgataaggaggctgatacttcagtcacagaaccactctatgagcattctgctcatcaaacttactcacgctctgtatctctgcctgctcctctgaagcttatacctgccataaaaggtagccgtgagaaacatgggggttcacaggtgaaattgaatgtgaaatgggccgctgatgtgtatgatccagtgcctacattgttatctcacactgtaagaagcaacaagaagcaacagaaatccaggaagaagaagcctgaaaagaagaatggaaagaagggtcaaaaaggaaattcatctcgtgggggcagcagcaaagataagcagtttcgcaagctaggtgggacttctggtttgtgctacaagtcaatggattcttgtgataaagtgcttggagttgctactgaattagatgctcttgatgttcgaagccaggattcgtactgtggaactagcttccttaaaaaatcagttactgaactgcactactcggttgcagaagcactatgagtgaaatactctgaatgtcttttcttatttccttcatcgtacataaataagctatattttgctgttggcttgtttggtggaaaaaaaaaaaaaagacatgggattgtatggtgaaagctatttggtaactctttagagtacatgcagtcaagattggcattttt

SEQ ID NO: 29948 - DNA, 2570 bp, Glycine max
  Clone ID: UC-GMROPIC040G06_FLI
gggctggttcgctgcttgtcactcctgccatggaataaagaagaaactgatttgcacaataaggatgctactggacaaagggtattgcatgcctttgaagttgatgtgtctatgagctctaatggtttttcttatatcataaagaatttgaaggatctagtgccagtattaataaatagtttcctggaatttattccattggttcatgctatggaaagtcttgaagggaagtcttttggttgtatgatatccattcttcatagcatatatcttatagtcaggtctattgcttatgggactgataaggattcagaatccccaagttctcaaggtggacctgatgcagctgtatgggatgttaacatctcttctacattcttgaagaaattatttcctcgtttccccctcaacccggttgatcatctttctgaaaaggattgtgataggttgtttgacttgaacatgatcgttgccaaaatattttttgaattaaatgaatggacgagtcttcctcctaatttgttggagacatttctagaattttttgaaaatgctttgcttgggaagttctgcagggctacacagtctggtaaggctgtctgggaagagtgtttagttcagctcctttcatttattcctaaatttctttcacgtggggcaagctcttggacatcacgtcttcttcaggcttttacccagacatttagggaaagcaagccaggttccttgatgaaattggcatgtgtttctgctattgaagatatgctaactcctattgaaagcatgctttccatagagacaagcaatccagaaaatttagaacttcaagatgccttactcgcatggattagagagctccctctgttgcttatccagcttggagataaacacccaacctgctcccaggttgtgttacgccttcaacttcgtattggacaatgttctttgttgaattcatcacttgtttgtatgtatgacaacacacagtactcattgctagatttttattgtacatgtcaaggaggacagatatgttatggtccttttctcaggcttcctagagaatctcaagagctctctttatgttccctttactatttctcttatttggacctgcctattttaaagtcaatagcttgttgttgcctaagtgcagatctagatccctatgtgttatttaggatcatagaggttctccattcagcctatagagatggacatataaaaattgcagattacttgagtgttttcatcaccttggtcttgcgtttcaaagtttcccctgaaatcggttctgctggttttaagagtgatccactctgccaaactttgaagtcaatgacaactgttctttgctcatacatggcacagatgggtgacaattctcttgttctgcagatagtagagaaagtggtaattgatcagataccacaaatgccttctttggataatagttgctctctcctgagaatgcttgttacagtggattccaagcccacaagactttctgaacaaagcattatcattctaggccagcatctttctgaatatctgatggatgctgtgcagtgcattccagaagatggtgatgaacaggggactccctccattcaattaagtactcagcattattatctcctaccttgttttttcttgtttgatcggtgccataaacttatgaatcttgtgttgaagagaatgggatcagctataactgaaagtagtttgtcaccaatatctgataaatgcactcaacatacaaggaactgtttggatagagtgaatgctgtcacttctgtactttttttgatgcacaaggatgctaaattgcaaccgattatgtctttattcaaggaagatattgataacgtcatacataaagttttttctttaaagacatcagggcggatcagtacgacaattgaagaaaggcatgaaatacaatgtgcatttgaacgactgaaaatcttaacgggataacaattgtcaagaaggatgttctgaattgagaaactggttcatgatatttgcaggcatcgttggcatagaagggagttttttttgtcaaattgacagacagaggacatggactgagctctggggtgtaatttgatctctctccatatgtgtgtgccctttttgtcttagattgcttccgagttgtaactttttctctctaacttgcggcgaagtctggatcaaaactggtaaactttgttagggtaaactcggcatcagttttattactatcagagcatacttggcattggcatcctcatctactaacctacttctcccaagtttaatttgcaagcagttttgaggcctgcctgcagcaggcactttatttcactttggagaaatctaaattttgcatgcagcctcagttttgtttcactgtgtttctattagctagcctcgtgatgagcgtcaatggcttagacacagtagatattatagttttcgtgttaattttctttcctatacaagtatacaacaatagtgttaagactaaagatttctgaccaaaattttgatgataatataactttatatgagattatttaagt

SEQ ID NO: 29949 - DNA, 1274 bp, Glycine max
  Clone ID: UC-GMROPIC040G10_FLI
gacgacgcgcgtcttgcgcattcctcctcctcctccgtcgccgtggtccgcgccctcgaggagcgcgtcgaggcgcgccaccgcgagatccaggccctgctcagcgacaaccagcgcctcgccggcatccacgtggcgctcaagcaggacctcgccgccactcaggaggagctccgccgcctctccgccactgccgccgaggtcaaggccgagcgcgacgccgaggtgcgcgagatctacgagaagtcactcaaggtcgacgccgaggtccgcgccgtcgccgccatgagctccgagctggatcgcgtgcgggcggacgtgcaggagctcgtggcggagcggaaggagctcgcggcgcaactgcatgccgtggagagcgagcttgcaaaggcgcgtgcggaggcgcagtttgtgccggcgattaaggccgatatagaggccatgcgccatgagattcaacgaggaaggaatgctattgaatttgagaagaagacacacgctagaaaccttgagcacagacgggctatggacaacaatatgattattatggaccgcgaggttgaaaagttacgtgctgacttggctaatgcagaaaaaagggcaagggctgtgatggctgcagatgcaaaaacaaatcctggatatcctgctaactatgacaatcctgagatgggatatggaggaattacatgtcctcctgattcttatagcatgcatcagctgcaagctgtggttgacactcattctccacatgaagctggagcatcattacattatccgaatgacctgcaacatacacaagtgcctagatagtctttgggatgctttagtttttaaagagaatgtagcattgccatctccttcccctcccccaaaatggttttaaattcttaagcttgtatatatgctttactatttattttcgattgtaacatgttcaggtagtttgcgcaggttcaattttcctgtatctcctttaattctttcatgagacttgttcaaatttagaaagctagtttttgtttcgtaaaaagcataaaaagtttcttagattctattctggcaagttgtggttaagttccgatgagttgtgatcgagttcctggtcttcgtagaatctttgatctcctactccagtgttggggagatacttacaaaaaggactctgacgatcaagtcagttgagcccaaggtgtttgtgtatgggatgataaaaaatgtatcttgttgtgttttctttgggtctatatgtacacgttcaaccttgagaagat

SEQ ID NO: 29950 - DNA, 713 bp, Glycine max
  Clone ID: UC-GMROPIC041C12_FLI
ctcattcttatttttttcctctcttcactttcactctctctctctctcagccatcatcatgggagcagtgattctcccagatctcggcaccgagattttgattccggtctgcgccatcattggaatagggttcgccctcttccagtgggtcctcgtctccaaggttaagctctccgctgccagagacgcttcccctaacgccgccggcaaaaatggctacaacgattacctcatcgaagaagaggaagccctcaacgatcagcaccttgttgaaaactgcaaaggttcaagtagatacttattggccaaccttatttgctaaacttgctgagaagaaaaatcttggcgatttgatagccaatgcagcaggcggtggtgcaccagttgctgttgcagcagctgcccctgttgctgcctctggtggtggtggtggtgctgctgccgccccagctgctgaggagaaaaagaaggaggaacctgaagaagagagtgatgatgatatgggatttggcttgttcgattagggacattctcaatatgatttggttaaattttgtggttctttacctttaagtttactttatggatattgtaggttttatttttgtgctggttatttatatctgtatacgacttgattttgtagttttatgaacttcggaatgtgggtttatgtccatttgagaattcggatgggagaaattgtttacttt

SEQ ID NO: 29951 - DNA, 811 bp, Glycine max
  Clone ID: UC-GMROPIC041D02_FLI
tgatcggtgttcgcttgatctcatcataatcgtcagcgtcaattgaagaagatgccgatcagaaacatcgccgtcggaaggcctgaagaggcgactcaccccgacacgttgaaggcggctttggctgagttcatctcaaccttcatcttcgtgttcgccggctcaggctccggcatcgcctacaacaagctcaccgacaacggcgccgccacccctgccggcctcatctccgcctccatcgcccatgcattcgccctcttcgtcgccgtctccgtcggcgccaacatctccggcggccacgtcaaccccgccgtcaccttcggtgccttcgtcggcggcaacatcaccttcctccgcggcatcgtctacgtcatcgcccagctcctcggctccatcgtcgcctccctcctcctggccttcgtcaccgcctccactgttccagcattcggactctccgctggagttggagttggcaacgccttggtgttggagatcgtgatgaccttcggtctggtgtacacggtctacgcaactgccattgaccccaagaagggtaatttgggaattattgctcccatcgccattggtttcattgtcggcgctaacattttgttgggtggggccttctctggagcggccatgaaccccgctgtgacatttgggcctgctgtcgtgagctggacctggaccaaccactggatctactgggccgggcctctcatcggtggtggaatcgctggccttgtttacgaggttgtctttatcagccacacccacgagcagcttcccaccgctgactactagagggggg

SEQ ID NO: 29952 - DNA, 925 bp, Glycine max
  Clone ID: UC-GMROPIC041D06_FLI
tttggctggctttggtaacttgcctggtgatatggtattctgggattacattgataagaaacaacttggagccactaaggctgaatggtctgtgactagtgaatggtctccggatgggtgctatttcatgacagctacaacagctccaaggcttcaagttgacaatgggatcaagatttttcactacaatgggtcattgtacttcaagaagatgtttgacaaattgtaccaggttgattggaaaccagagtcacctggtaagtttggtgatattgccgaattaattaagtctctaaatttggtacaacttgaagataaaaaaccatcaggtcaaggaccaccaaagtctacccagacttctacaaaggcctcttctgccaaccccacaacacaaaaacctgctgcatatcgtccaccacatgctaagaatgcatctgctattcaggcagagttgtttggagagactactgcagaaacactgagcaagaatgcattacgaaacaagaaaaagagggaaaaacagaaggagaaaaaggctgcttctgatgccagttcttcatgatggaatcaatgttcttcctgactcgttctaaattgcttttctgctactgcactcgcgcacctgaaaatttgaggctttcagattttggtttactggcaactttgggcagttttggtttgctcagattttgacgtgattgaagtcatgttgtaggtttgtgctttcttgagttttcagctgggatataaaaggtgggagaagataaatctctttatcctcatgataaaagaagtatttattgtaagagaagtgaaattatacgttggtcacaaacattattttgtttccggttgggatataaaaggtgagagtagaagataaatgcccctttctcctcccgataaaatatgtattttttgcaag

SEQ ID NO: 29953 - DNA, 445 bp, Glycine max
  Clone ID: UC-GMROPIC041H03_FLI
tttcagaatatactgctcaggggtgagggtgaaaactggagaaggcattgcagaagtttgccttagtgggtttattgcttttgacattcctcctcctcgaggtcctctctggattcttggcgatgttttcatgagggtatatcacaccgtctttgactatgggaacctccgagttggtttcgccaaagctgcctaacaagacatctaggagattatatagggcatgttttaataagcttgttagtgtgttgtaaataagctttctgtaactactatggcacaggtttacattatagatctcaagaatgtacttgtgaaactatgcaccttgatgtattgtgttgtatttgaagggaccattttcattaaatgtcatgtagaaccgtatagattattataccccctatgttatatgccatgtcaatgtggatagcatggaaggcct

SEQ ID NO: 29954 - DNA, 1967 bp, Glycine max
  Clone ID: UC-GMROPIC042B11_FLI
cttcttctccttctaacccaacctgtttctccgacaatcacattcaacgcttctgtcatggaagaagttaatgtcgtggaaactaaggatggaactgtctcagtagctgctgcgtttgctggtcaccaggaagccgtgcaggatagagaccacaaatttttaagcaaagctgttgaagaagcatataaaggggtagattgtaaagatggaggcccttttggtgccgttatagttcataatgatgaaatagttgctagttgtcacaatatggttctgtgtaacacagacccaactgctcatgctgaggtgacagcaataagagaggttagattttgaataaccaagtgatttagttattttcttgtagcaaataatggtattgctgtgtttttctgactgaaatttgcacatgatgaatatgccctgccccattggatagcaaactctttgatgctctctattattggtttatttttttaatatgtcaatttcgttgtctctgacataggtcgctttttaaaacaagtattgactttttaaagaaactactaatgataaataaaaaatgtggtaagaagagtgtgttaattgacattactcttgtttttgtaaacgtaatgttacttgtaaatgttaggtggggaatatccacagtgcacatgtagaatcgtttgtcctagttttccaaagaattctatacagaaatctagtttgtggttgctattcatgattttgactaaagggatctacagattaagaatttacaagctttgattggacatggttgaaaggataattatcaacacaaacatacggttttttgtagatactactcaaactttggttacctcttttagttttagctcattgggggcaaattttaagccactcattaagattatttttattgacaacatgcctgtgtgtaaaatgatcaattaggatttgacagtgtcaaacaatggttttggatttgtattcagttcaatctatgcaagaaaaaccaaaaaggggatgagctctgatacatgcagaacataattaatcttgtcacctgctggaaactggctaaatccctgttaatatttgttgttgaattttttggatatgctgctgaaagatttgataagattataatttatacatatggtatgacttgtgaggctatgcatgcttaagggtactgttgcccgtttaaattctaatatgcagatcatgttggtctcagttgacaatgctgcagtattgtgaagaactttaaaataatatatttgccaccagattagttgcctcactttttgaacaacaggttaattattagataatttgacatctagtatcaatgtatcattctatctaggttttataaaggctagctgagactttatgggctcttaacttccaaataaaacttaaatctcgctgtatgactcgtgtgcattatttttttatagatgttataaactttatgcagtgtcaaaaaatgattcatgcagtgttttcattttacaggcttgcaagaagcttaagcagatagaacttgctgattgtgaaatatatgcttcttgtgaaccttgccccatgtgctttggtgcaatccacctttctcgaattaagaggttggtttatggagcgaaggccgaggcagcaattgctattgggtttgatgatttcattgccgatgcactgcgaggtactggattctatcagaaagcaacattggaaattaagagagctgatggtaatgaggccatcattgctgaagaggtttttgagaaaacaaaggaaaaattccaaatgtattagatctgtgattcttttcatatctgatggcaactggctattcaggattattgccttcatttaaattattgaaactgttgatagtggattgaactcatttgagtacaacaaattatatgctacaatttggtttacatcagataatgactatcccattgtcaatc

SEQ ID NO: 29955 - DNA, 1688 bp, Glycine max
  Clone ID: UC-GMROPIC042C12_FLI
aattaatcatggggagagatgtttcaagatcagcatttgtgtttggatttggatcattcatcatagtctcatcttcttatgcaaaggatatcaatctaagtattatttcagtgatgtcctatataagtcttgtttatctcgctgttatcttcctatatagatccttaatttgcagggggatcataaacgttgaggactcaaattatgttgtgggagaagaagatgcaatttggatgctaaaattaatcctcccttacttgaatgagttcctatcaaaactcaaagccttgttttctggagatccaggtaccacaataaagttggcagtgttgctctttgttttggccagatgtggcagctacataaccgtttggaagatggccaaatttggcttctttggagtttttactgtaccaaagatatgctcttcgtattctgcacagttaactgaatatggaaatttttggattcgtcgattccgggatgcatgggattcatgcactcacaagaaagccgtggctcttggcatcttcgggcttgtatggaatttatcatcagttgttgctcgcatttgggcaggtaaaaccatgtaaattaaatgatatttgctaatttcttttaccatcttatcttttttttttttatcactgatattcactactacttatgtttggtgacctttttatatttctttggaataatcactttttgtttaaatttagagaaattagtttttggttaagcatataatttatacttcctatacatgtcgcacattctcagtttagttctttcaagtcaacacttattaaatcaatcttatacttgtaaacattcactttttttattcaccaaaaaacatttgtcaccgtacccctacttaatttggtctttatatataatatatttttattttaatttagtccttatatgtataacatattcttaatttgatcctatatctagagactaaattaagaaattaaaagtcaacgtataacgatagtgatcaaattgatagcatttgcatgtatagagactgattgaatattctttttacaaataaagaccaaattaaaatatgcaacacgtacggcgattaaatgtttaatcttagtttttatgctttaataatttgtttgatatgcaatgtgctagtagctttgactaattgagcctggcacatagacatgcacacattaatgaatggtgtggtggtgttctatttttgtagtgttcgtactatttgcagccttcagatattatcaacaacattatttggtgagagatgaatggggggaagatgaagcaggatgtgatgaaacatggcaagaccctgttggagttagaccgaaacaaggacctgcaaccaactttagtgataccaataaaataaagaaagggttctaaaagtatgtgttgatgctggcagctagttgtaccacatctaacaggctggtccaattgcatgcaccgtgccatgttttcctttaaaactttttttttttttaggtttcacatggaagtttcttttgtctaggctgtaaatttttgttcagttaatataaaggtttaatttagtaaacaaatccaccacggttcaataggagaagggaataacttttttttttaaaggaggacgtttgtgttctgtaattagcattcagttaaaataatttatttttatt

SEQ ID NO: 29956 - DNA, 1159 bp, Glycine max
  Clone ID: UC-GMROPIC042D11_FLI
aggcattatctgatccttacttcactggcttggcgaacatggaccgtgaaccatccactcaacccatttcaaaacttgagtttgaatttgagagaaggaaattgaccaaagatgatgttagagagttgatttatcgagaggtgtgatcatagtacatttatgttgttcctgcttcaatttattgtcttctttgtcctgtggtaagaattatgtaaatatttcaagtgaacagattttggagtatcatccccagatgctccaggagtatcttcgtggtggagatcaaactagcttcatgtatccaagtggggttgatcggttcaagcgacagtttgcacatcttgaggagcattatggcaaaggtgaacgaagcactccaccattgcagagacagcatgcctccttacctagagagcgagtttgtgctcccaaggatgaaagtaaacaaaacaacgattctgaaaagccaagtggatcaaatcttcagcagagtcctccaggttctgatgagacaggtgctcaaaatggaacctccaaaccaaactacagtgcacgtagcttgttgaagagtgccagcattagtgcttccaagtgtgtagttttgaaacaaaataaagatccagaggtagctaactctatcttttcaagtgcatggctatttgctgagagaagttattatatggtcaaggtcatgtgatcccgaccaatctctagtaacccacgtaatcacaattttcaatttataaaagtgttaataatgcgtcacataaaaaaaggtgggaaccacatggtctaagaccatgaaataatttctccttggctggaggttttgaaataatgagaatatccaataattggttgcaatatgtgttgtcaatattcatgtcacgttttttttttgctttagcaagagccaattacggaggtaaatgatgaggcagtggatggagtgacaggtgagattgctgccctccatgcttgattataactttggtggtttgaagcactacatgcaaatcctcctcgttgttagtgctaggactcatttagtcatgaactgccatcttgtattactgttgtaattatttattttgtgtacggaaatgcaatgtatactagtcacattttattatgaaactaaaaaggagacaatgttagc

SEQ ID NO: 29957 - DNA, 528 bp, Glycine max
  Clone ID: UC-GMROPIC043E02_FLI
aattgcggaagcaccattcacgatgaatcatgtaagttcacgatcctgaagtgaaaatttgttatctatacatgtatgaactttagtaatgaaaatacctatttaatttgttttcaggttctagtttttatcgaggaataaaggcaagctctatttggagtcaagtgaaacatctatcttcctgtccaagttctttgaataaaagtctgaatgtgtcatctctgcactacaatatttgtgattctgaccaagttggttctatttgtttgatggccatcttgcacgtcctgatcttattgtgttcaagtgacagacaaatcagaacagggaagagagatttgaaatgtaaatgccaagtgaaagtgaaaagtacagtccagttttagtgatctctttaatttatttgttcatagattaatatgatggtgtatgattgcttttctatttattgtggcatttttgtgttgtaccctgttgttgtgtttgcaataagtattagtaataaagcagcaaattcaatttcagttc

SEQ ID NO: 29958 - DNA, 944 bp, Glycine max
  Clone ID: UC-GMROPIC043E05_FLI
aacttcttatccatttcagcacaaattctcttggttttaccccagagtttttgggacgtgtcaagcttgttacctcaattgcatctctgctcggtgttggtctttataatggatttctgaagaatgtgcctttacggaaaatattttttgcaactacccttttaggttcaactcttgggatgactcaggttttccttgttactggactaaaccgtaagtttggcattagtgatgagtggtttgcaattggtgattcattaattctcactgttttgagtcaggcttctttcatgcctgttcttgtgctagcagcaagattatgtcccgaaggaatggaggcaactcttttcgcaactctcatgtctgtatctaatggagggagtgttgttgggggattgttaggggcgggattgactcaactatttggaattaccaaggacagatttgataacttggcagctttgataatcctttgcaatcttagctcattattgcctctgcctcttcttggccttctccctgggggcaatcctgatgtgaatgaggaggacaattccgatattgagatgaaataaattctttgtatatatatggtatgatgctaaagttgctaccaaggccttgttttatcatgccatccagttcacttcaaactaaaacagactgattttgtgaagaaagaaccttctacacaatatgctttggagcaactcaagacagtgctaaccatcaacgaaagtatcagtctcgtcagaactcagaattatcattcacggggttgttttgtagtgtactttctcctttttgtttaatcatgtacccctttacttctttgtaagaactcgggctttgtatttattagccaataattgtcattcgacaatgggaaccgagttttaggcctcggacgagtttgtataagctattgttattggcaatttcct

SEQ ID NO: 29959 - DNA, 1116 bp, Glycine max
  Clone ID: UC-GMROPIC043H07_FLI
tctcagatagcagatgcagtgcttgttgctcgtagtcttggggcgacacttgtcatccctgacattagaggaagccaacctggtgacaagaggaactttgaggacatttacgatgtcgatgtgttcatgaaaagcatggaaggagtggtcagagtgttaaaggatcttccttctcatgtatcaacacataaaattgccgccgtgaaggttcctaatcgggttacagaagactacatagctcaacatgttgaacctatttatagatcaaaggggagtgtcaggcttgctacttatttcccttcaataaacatgagaaaagcaggggaaaaaagtgatgctgaatctgttgcatgcttagcaatgtatggaagcttagagttgcagcaagaaacgcatgaccttgttgactcaatggttgaaagacttaggactttaagccgaaagtcagatggccaatttatagctgtggatctgagggttgagatgttggataagaagggttgtcaaggaagggatagtgaaaaagagaagagctgcttcaatgcacaagaggttgcagtgtttttgaggaagattggttttgaaaaggatactacaatctatgtgacacaatcaaggtgggatgaaagccttgactctcttaaagatttgttccctaaaacgtatacaaaggaatccatcattcctgcagataagaagaaaaggtacctagactctgaagattctgagttggagaaagtgattgacttttatattagttctgagagtgatgttttcgtaccggcaatatcaggtctattttatgcaaatgtagctggtaagagaatcggctcgggtaaatcccagatactggttccggccaatattccagattcatctgcttctgcctccagtttcttgtcccattatgtctccaagaaaaaccactttgcctattcttgttactgttagttcgaagtgaagacattcttagcatccagtgggtaatgttgtgtaccaattgtactgaatgatgctttccaaaatgtaccctttcgggaatttcagtgttatggcctaaggcctcttgtttgagtgttcaccaaaaaattcaagttactgtgatttgacatgtac

SEQ ID NO: 29960 - DNA, 3349 bp, Glycine max
  Clone ID: UC-GMROPIC044C09_FLI
caacaacaacaacaactctctctgttttcggttatcacaaagcacatttgacatcactcactcactttctctcttctcttttcttcatccgttctactctcacttccgatccttcaattaatcatgttcataaagaagctcgtggagaaagcatccataaagatgcctcttggaaattcattggatgggttaaaaggtagtgatgtagatccacgtttggtatttcatcaaggggtaccatctggtggtgccaagtttgcctatgacaatattcagaagatactggccctatctaccaaggatggacggattaaactatttggagaggataatgcccaagtcctacttgaatctaaagagcctgtgcctagcaagtttttactgttcattcagaaccaaggcatccttataaatgtcactttcaataaccatattgaggtttgggacatagacaagaaactgttgtctgatgtgtacattgttaaggaagaaatcacttgtttctcagtcattaaacatagcctctttatgtatattggattttctaatggcaatatttcagttttgatgcttgatcaagaaccatggcatgtggtacgtatgaaatacaccatacccctttcagcttcttatggaaattcaactgaagaatctgacgatacagtggtgacacacgtactgcctcaaccagcagccgagagtcagagagttctcataatctttagaaatggccaaataatattatgggatattcgagaaatcagatcaattttcagaactggtgggaaaatattgcagacaagatataatgaaacaaggaaggtgtcttctgcttgttgggtgtgtccttttggaagtaaggtggttgtagggtacaacaatggagagctcttcatttggagcatcccttctctaaacacaggaaatagtttagcaactgattataatagtcaaaacactcctatgttcaaatttaatttaggatataaatcagacaaaacttctataggatcagtaaaatggatttatgctgaaggaaaggctagtcgactatatgttatgggaggttctgattatgccccttcaaacttgttgcaggtagtgttgttgaatgagcatacagaatctcgcacaattaagatggggcttcatttgccagaaggttgtattgacatggagatcatatcaacctcaagcaagcatagacaaaattatttcattttgcttgggaaatcaggccacgtatatctatatgatgataatttgattgaaaggtatctactgcaaagccagtctaagtccagtccttcactgccaaaggaagtggttgtgaagttaccactggcagattcaaacatcacaacagcaaaattcatctccaacaattccaatttttttagttctgaagatgagtattacaatcagctggtaaagaattatccaccacttgttcccattgaaacaaatctcaaagatgggattaacttcagttcttccaatttcactggattttcaaacattagaaacatgtacataactggacacagcaatggagccataaatttttgggatgcaacatgtccctttttcaccccaattttgcaattaaagcaacagagtgaaaatgatttttctttaagtggtatacccttgacggaattatattttgatagcaactctccactccttttttctggtgaccaaagtggaatggttcgtatctatagattcaaacctgaaccatatgcctcgaatagcttcatgtcccttacaggaggtacaaagaaagggatcgatcacgtaatccacagtatgaaacttataaagactagtggtactgtaatttgtatgaacatagatcacagctcaaggcatcttgctgttggttctgaccaaggaaatgtttcagttatcaacatagatggaccatctttgttatatcggaaacatattgcaagtgaaatttccaccggtatcatctccctgcagttcaaaacctgcagtttgcatggttttgagaaaaacattttagcagttggaacaaaggactcgtctgttctaacactagatggtgaaactggaaacacattgagcattggaactattcatcctaagaagccctctaaagctatatttatgcaggtgttggatggacaaggagaacaaaccgcaggatcagttacaaaagatggcttagagttgaaagaagggattcatattgaagatgcaacagcaaagcagttgtacattctgctgtgttctgagaaggctttgtatgtctattcttttgcacatgctgtacagggtgttaaaaaggtgctttacaaaaagaagtttcattcctcttcctgttgctgggcatcaacaatttacagcctctctgatattcgtcttatactccttttcgccagtggaaaagtagaattaaggtctttcccagagttaactctaatagtggagacttcagttagaggtttcacttattcacctccaaaattgaagtcattttctgatagccagatatgttgttcatccaaaggagatcttgttttggtgaatggtgaccaggaaatttttgtggtctcattgttggcccagaggaatattttcaggcttttggactctgttagctgcatctacaggaaggaaaggatgccatcacaagaagagcttgttcctggccctgtcatccataaggaaaagaaaaggggtatattcagctctgttatcaaagattttactagcagtaaagaaaagcatgcacccctcttggaaaagaaagatcccaaagaaagtatacgggaactctcagcaatattctcaaatgcaaactttgcatgtaatgataatgttgataagccaacaatggatgaaaatcagcttgaattaaacatagatgatattgacctagaggatcatgtagaaaaacgcaaagaacaaagcatattgggagctcttaataagaagaaattggctggcacatttcaatctctgaaaggaagattgaaagagatgaagggaaacaaccaaaaaacatcagataaggaagggcaacaggatcaaaaagatggtgcgcttgatcaaattaagaagaaatatgggttttcttcttcctccaatgtatgaatatatctatcacatgcattctcatcatgcttgacttttctaccacataacaattcacaagcatggcattttatgtgcttatttacaagcgaaaggtgttgcctaggccatagtgctaatttctattttggagttgtcaagtgtatttgttaatgcaaacatagtttgacaatcgagattgatcattaccaagtatctctaatctacgatttattacctaccc

SEQ ID NO: 29961 - DNA, 641 bp, Glycine max
  Clone ID: UC-GMROPIC044E08_FLI
caagactggagctccctgccgatctgaaaggcttgccaagtacaaccaggtaaaaatcgtcaaagcttatctttgttttttttacatgagctgtatactagaatacctttgaaaactggattttttaaaggctttgatttagaaccaatgtttttatttgttttaatttttgttctctcccatactatattacatgccgcagcaggaccaataaaaaaattagtgtaaaattaaattgggatgtccattgcttatattattgaccgttgtcacttaccctttggtctgtggtgcagctcctgaggattgaggaggaacttggttctgctgctgtgtatgctggtgccaaattcagagcccccgtggagccctactgattgtttagcccaagattaccaagcatcatttaaataagattctattgatgactgcataggacatgtattttttgcgaaaaataaacttgtctactacttcagagaatataggttttccgggcgtggaattttgaagcgagaaaataaggcagtagatgtatgtctgatgcctagttttatttgaaatctagctttagggggtgtttggtgcgacaaattgttttccagaatcataatttttgggaattaaaaaattttggtcgt

SEQ ID NO: 29962 - DNA, 662 bp, Glycine max
  Clone ID: UC-GMROPIC045D10_FLI
ggcctatttgaggtagttggttttagagatgcttggcatggtcttgttttgcttgcaccaaagggacacggaactcgtttggcacagacaagcagaatccgttttgagtttcacaagggtgcagctgactgcacattcatgagaattgatggagagccatggaaacaacccctcccaaaagatgatgacgcagttgtagttgagatatcacaccatgatcaagttagcatgcttgcaaccccattgtgccgttctaaaagtatttatgatccctcctcaccttccgatgaccgcgaagaagatgatagcagtgaagaagaaccatcagaagattgggaagaacggcgcaaatttggcgcagctgagacattcaaatatcctgatggaattgatatagctcaagtaagttagtgtacagagaggagtagcattgctcagtgtttggtggtacaaaggcaagtagtagggtataaaatgaaagggtaggagtaaaattcttttcttgtttggtgcaaataattttccttactcgtacgtgtaatgtacagaggacttccgaggaaattaaccaagattaatgactagtgattaatgtaatgaaccttggatagggttattgtttgttgtcttacttctagttgcaaaatttattctttcatttc

SEQ ID NO: 29963 - DNA, 1080 bp, Glycine max
  Clone ID: UC-GMROPIC046A05_FLI
attgacttcccaaagcagaagattgttgttgctggtgctggaagtgctggaattggggttcttaatgcagcgagaaaaacaatggcaaggatgttgggtaataatgaagtagcttttgagagcgcaaagagtcagttttgggttgttgatgcacagggattaatcacagaaggacgtgaaaatattgatccagatgcccttccttttgcaagaaatttgaaagaaatggatcgccaaggactgagggaaggagcaagcctcgtggaagtggtcaagcaagtgaagcctgacgttctcctaggattatcagctgttggaggattattctcaaaagaggtactagaggccctcaagggttcaacatcaaccagaccagccatatttgctatgtcaaatccaacaaagaatgctgaatgcaccgctgaagaagcattctccattttgggtgacaacattatttttgcaagtggaagtccattcagtaatgtggatcttggaaatggtcatattggccattgcaaccagggaaacaacatgtacctctttccaggcattggtctcggaactcttctttcaggcgctaggatcgtctctgatggcatgctgcaggctgcagctgagcgtctggctacatacatgagtgaagaggaggtactcaaaggaattattttcccttcaacatccagaattcgagatattacaaagcaggtagccacagctgttataaaagaagcagtggaggaggacctagctgaaggatatcatggaatggatgctcgggagctgcagaaacttagcgaggatgaaatcgcggaatatgtgcagaataacatgtggagtccagagtaccctacattagtttacaagaaagaatgagtaacctgcagggttgataactacaatttccctctcgatgcatgtttggttcgatcaggttgttcacagaatcctgtttactggattagatgatttaaattctgaaacattatctcatagcatatttctaaaagtctagaaaacttgtattttatgtacatgatgcttcttttaaataaaaatgaaaagccaagattagttttt

SEQ ID NO: 29964 - DNA, 1797 bp, Glycine max
  Clone ID: UC-GMROPIC046B01_FLI
aaacacacttattctttctttcttgtctttaaggtcaacaacatagttatagcacaaacttaattcaccatggtttttccaaaaccctcttctgagtctgacctctttctttgttccaactttgcttctcactatgccagggactctcttcccaggttcagcatgccagagaactccatgcctaaggaggctgcgtaccaaaacattcacgatgagttgcagcttgatgcaattccaaagctgaacttggcttcttttgtgaccacttccatggaagaagagtgcaacaaactcatcatggaatccatcaacaagaactatgttgacatggacgagtatcctgccaccactgaccttcacaatcgatgtgtgaacatgatagcacgtatgttccatgctgagatcggagaaaatgagaatgcaactggagcaggaacagttggatcatcagaggccataatgctggcagggcttgcattcaagaagaagtggcagaacaagcgcaaggcagagggaaagccttatgataagccaaatttggtgactggttccaatgtgcaagtatgttgggagaaatttgcaaggtattttgaggtggagttgagggaagtggaggtcagagaaggctattatgtcatggaccctgccaaagccgttgaacttgttgatgagaacactatttgtgtggctgcaatcttgggttcaacttacaatggagagttcgaagatgtcaagcttttaaatgacctgttgctagaaaaaaacaagcaaactggatgggatacgcctattcacgtggatgctgcaagtggtgggtttattgctccattcctatatccagagctagaatgggatttcagactcccattggtgaagagcataaatgttagtggccacaagtatgggcttgtttatgctggcattggttgggttatttggaggaccaaggatgacttgccagaagaccttgtcttccatattaactaccttggagctgaccaacccaccttcaccctcaatttctctaaaggttctagtcagatcattgctcaatattatcagctaattcgccttggccatgagggataccgtagcataatggagaactgcagagacaatgcaatggtgctgaaggaaagtttggagaagagtggacactttaacatactctcaaaagacaatggtgttcctgttgtggcattttctctaaaggacagaagccagtacgatgagtacaagatatcagagatgttgcgtcgccacggttggattgtgccggcatatccaatgccaccagctgctcaacacatcaatgtgctccgtgtggtcatcagggctgagttttcacgcacccttgctgaacgccttgtgtttgacatatacaatgtgctgcatgaacttgaaaagctacatccccccaaagtgaccaacttcattaaggaagaaaacaaggccttggttgaaactggtgtcaagaaaactgcattggatgcacatagggaaatcattgctcaagaatcaaacaagcgtcagaaaattatggctgcctaactcactatgtcaactaaacaaggagccagagccttcgccatatttgttctaactccattcaaaatccacccttaactatattcactttattcttttcctaatattttgggcaagtcaattagctagctttagtttgttttcctatgatttgatgtcaattgagatatgtaattcaacattgatgtattatttttaaatgtttcaccacattgattttgtagtaaaagttcagtttttgtttgttac

SEQ ID NO: 29965 - DNA, 977 bp, Glycine max
  Clone ID: UC-GMROPIC047B06_FLI
ggtgatttcagtgagtgatcggtgttcgcttgatctcatcataatcgtcagcgtcaattgaagaagatgccgatcagaaacatcgccgtcggaaggcctgaagaggcgactcaccccgacacgttgaaggcggctttggctgagttcatctcaaccttcatcttcgtgttcgccggctcaggctccggcatcgcctacaacaagctcaccgacaacggcgccgccacccctgccggcctcatctccgcctccatcgcccatgcattcgccctcttcgtcgccgtctccgtcggcgccaacatctccggcggccacgtcaaccccgccgtcaccttcggtgccttcgtcggcggcaacatcaccttcctccgcggcatcgtctacgtcatcgcccagctcctcggctccatcgtcgcctccctcctcctggccttcgtcaccgcctccactgttccagcattcggactctccgctggagttggagttggcaacgccttggtgttggagatcgtgatgaccttcggtctggtgtacacggtctacgcaactgccattgaccccaagaagggtaatttgggaattattgctcccatcgccattggtttcattgtcggcgctaacattttgttgggtggggccttctctggagcggccatgaaccccgctgtgacatttgggcctgctgtcgtgagctggacctggaccaaccactggatctactgggccgggcctctcatcggtggtggaatcgctggccttgtttacgaggttgtctttatcagccacacccacgagcagcttcccaccgctgactactagaggggggaaaatgaaaataaaaaaaaaaattgtgtattattgaatttctctggaatcttcttctgtgtatggttttccttccttgtgttttcttcctaattcactttcgagggttgtacttgttcctttcgtcttaaatcgttggatggttgatgatc

SEQ ID NO: 29966 - DNA, 899 bp, Glycine max
  Clone ID: UC-GMROPIC047C07_FLI
atcatggaggccatggaggctgaactggatctcgtcgtctgcatcacagagggcattccccagcacgacatggttagggttaaagcagcacttaacaggcagtccaagactcgtttgataggaccaaactgccctggcattatcaagccaggggaatgcaaaattggaatcatgccaggttatattcataagcctggtcgcataggaatcgtctctcgttctggtaccttgacatatgaagcggttttccaaacaactgctgttggccttggacaatccacttgtgtgggtataggaggagatccctttaatggaacaaacttcgttgactgccttcagaagttcctaaccgatcctcaaacagaaggtatcattcttataggagagataggaggaactgcagaagaggatgctgctgcactaattaaggagagtggaactgagaagcctgttgttgcttttattgctggtttaactgctccccctggtcgtcgaatgggtcatgctggagctattgtgtcgggtggcaagggcactgcacaagacaaaattaaaaccctcagggaagctggggtcacagttgtggagtcccctgccaaaattggagctgccatgctagatgttttcaagcagaggggcttggttcaatagtttgggttcatttaacttcaaatcattttggtttcgattgtttacatgctcaaaatttcttgattcccattggtaatgatgggctatttttcctttttctttttggagttacgagaggtgcattaaaataaaattcaagatgctttatatttgcggaaagtttgatagtctttgaactccggattttctggcgttgatttgtaaacacgatataccctttgccaatgaatttccagcaacttcaaatt

SEQ ID NO: 29967 - DNA, 570 bp, Glycine max
  Clone ID: UC-GMROPIC047D08_FLI
cgcacagcaaacaaggccaaagcaaaactcattgttgtactgacacgtggcgggtctacagctaagttggttgctaagtataggccagcggttccaatattatcggtggtggttccagtgttgagcacagactcatttgattggacatgcagtgatgagacgccagcaaggcacagcttgatatataggggcttgattcctatattgggggagggatctgccaaggctactgatgcagaatctacagaggtcattctcgaagctgctcttaagtccgcaacacaaaggggcctttgtaagcctggtgatgcagttgttgccctgcatcgtattggtactgcctctgtcataaagatctgcatagtcaaataatatttcatgctcaactcatgcagggttattatgttttgacctttttctttctttctttctgctgtttatccatattatcataaaatggaggatttacttactacctgtagaacgactgggtttttgtatactctgtttaaattacggagtacttctaaatgagtttatcatggaaataattactatttttttcctttt

SEQ ID NO: 29968 - DNA, 916 bp, Glycine max
  Clone ID: UC-GMROPIC047F08_FLI
actaaatgaaaggtttttaacccttaggtcaatggtcccttcaatcagtaaggatgacaaagtttcaatactagatgatgctattgattaccttaaaaagctcgagagaagggtaaaagagttggaagctcacagggtggtaacagacatagagactgggactagaagatcaccacaagatacggtggagaggacttctgatcattattttaggaaaaataataatggcaagaaaccagggatgaaaaagaggaaggcttgtggtgtagatgaggcagaaaaagagattaattcagatgctttaaaaggcagttatgctaatgatgttactgtgagtaccagtgacaatgaaattgtgatcgaattgaagtgcccctcgaaagcaggaaggctgctagaaattatggaagcaatcaacagtttcaatatagattttagttcagttcagtcaacagaagctgatggaaatctttatctgaccattaaatctgtgctcacaggaccaagtgttgcaacaaccaaaagaatcaaacaagcactccaaaaattggcttccaagtgctgaatttttatctataccttgaaaaccgtggggggtgttgaatttaattcataccactgccgtgtgacatagagagtccattagattgatggagtcacaactcacaattgcagctcttggagattttttttctttgaagatttctcataaaaggaaaatgtagactttcactcatctttcggcaataccataactcttggtgacgcaagatatatggactttgaatcacttgtaaatgggtaggtaggcttagttgactagatttatgtaattaatgccatttgctcctatgggaacactaaggttgaccaatgactaaatattgacagagagacgtacattattaattatgat

SEQ ID NO: 29969 - DNA, 1643 bp, Glycine max
  Clone ID: UC-GMROPIC049A02_FLI
tttagccttgagagacgaaagtaggcttataagtgagcgaatgaaacaccttctctatgaggtcccagtcagagttgcaggagggctgttatttgagctcttgggacaatccgcaggtgatcctcttgttgaagaagatgacattccaattgttcttaggtcttggcaatctcaaaacttccttgtaactgtaatgcatataaaaggatcagtatcatggataaatgttctgggtataacagaagttcaggagcttctttctgctggagggtataatatgccgagaacagtgcatgaagttatagcactacttgcttgtcgtctctcacggtgggatgataggttattccgtaaatctatatttggggcggcagatgagattgaattgaagtttatgaacaggagaaaccatgaagatttgaatcttttcatcttaatcttaaatcaagaaatcagaaagttatcaacacaggttatcagagtgaagtggtcactccatgcaagagatgagattgtctttgagcttctccagcatctaaaaggaaatggagcaagaaccttgttagagggaataaaaaagagcacaagagaaatgattgaggagcaagaagctgttcgtggccgcctgtttaccattcaagatgttatgcaaagcactgttcgagcttggttgcaggatagaagccttcgagtaacccataatttagctgtatttggtggtgttggcgttgtcctcaccatcattactgggttatttgggatcaacgttgatgggatacctggggcagaacagacaccttatgcatttggtgttttcacggccatcctcgtcgttctgggagtagtgctgatagcagttggcatggtttaccttgggctgaaaaaccccgttgctgaggaacaggttgaagtaaggaaacttgagctgcaagaattggtgaagatgtttcagcatgaagcagaaactcatgctcaaatgcggaaaaatatttctcccaagaacttacctcctactgctggtgatgctttccgtagtgatgcggattatcttgtaatacagtagaaatactatcatactaatactttaattgtccaaggatgctttaacatcaattacttttggtgttaactgttgttccaagtctgaagttaaaagcatgaattgaaaaagcatttctctttgcttattcatgaactttggtgaatgtggattgtggaggaactcacaaccgtggttggatggatgggggacgtcagtgatgataagctcatactttcttttggacattcgtaggcctcagtctctaacaaagccgaaattcttctaggctttgctctatacaagttcttcattgaataaattagaagttttatatgaaatgaatatttgtatgcctcgtatgcaaattgttcatttagctgaatatttgtatgccttgtatgcaattgttcatttagctgaatttataaacgtcatgtcaacttagtgtatatagaagattttttttttttttttttgtaataacaaagtgaaagatgtgatactactcatactagtgagactttagacattctagttctactaaggatttgtatcgttttgctgcctttgtttttttagtaaaataagattaccttagctt

SEQ ID NO: 29970 - DNA, 1545 bp, Glycine max
  Clone ID: UC-GMROPIC049A03_FLI
cttcgtatttttgggttttctgagaagtgcgtgtgttgatggggggtcaaaattctaaggaggaaagttggaggcagagttcatctgtcaggtcttcttcttcttcttggagtgcttacttggatccactatcgagttatggtttcaatgaaccgcaaccatcatattcttcttatggctatgaagcttatggtggcgatggaatggtacgctatgatagtacaaagctagagaggaggtactcaagaatttctgatcattacagttccatagatcaggttagtgaggctcttgcacttgcaggccttgagtcttctaatcttattgttggtgttgatttcaccaagagtaatgagtggacaggcaagaattcattcaataggcgaagcttgcatcacattgggagaggtctgaacccttatgagcaagcaatatcaattattgggaaaagcttggcagcattcgatgaggataacttgatcccctgctttggatttggagatgcatcaacacacgatcaagatgtcttcagtttctatccgagtgaaagattttgcgatggatttgaagatgtgttgagtcggtatagggaaattgttcctcatcttcgacttgcaggtcctacttcatttgcgccaataattgaaatggccatgagcattgttgaacagagtggaggccagtaccatgtgttggtgataatcgcagatggccaggtaacaaaaaatgtagacactaaacatgggagaccaagtccacaagaacagaagactgtggatgccatagttgcagctagtaaatttcctctttcaatcatattggttggcgttggagatgtaccgtgggacatgatgaaggaatttgatgacaatatcccagctcgggcctttgataattttcagtttgtgaatttcacagagattatgtcaaaaagcatccctccttcacgaaaagaggcagcatttgcacttgctgcattgatggaaattccttctcagtacaaggcagcaatagagcttaagctactgggtagtcggcaagccaatgctcctcaaagacatgctcttccacctcccagatatagttctcatgctgcaaggtttgagccaagtatccctcctcaacatggcaacagccacccatttgccacagctccttctgccccaagttccacttctgacaatcaactttgtcccatttgtctaagcaatgcgaaagatatggccttcggatgcgggcatcagacatgctgtgaatgtggacaagatcttcagtcatgccccatgtgcaggagccccataaatacaagaattaagctttactaatcgtatgtggcttgggaattggtattattttttttcttatttttgtgtggtgccagtcacaattctttggttttttcttgattcgttaaattcatcaaaggttagaagtaggtgtggttgggtgcaacacttgatcagatgtatgtttccagatatgaaacggggaattctccatcaattattgtagatatattcatttaatgaattatattttttcttt

SEQ ID NO: 29971 - DNA, 500 bp, Glycine max
  Clone ID: UC-GMROPIC049C12_FLI
ccggagctggccacggtggcggcccccacttcggcgaccgacgtctacagcttcggggtggtgctgctggaggtggcgtgcggtaggcggccgatagagacgtcggtggcagaggaggaggtggtgctcattgattgggtcagggagctgtacgcgaaggggtgcgcgcgtgaggctgcggatttgaggattagaggggagtacgatgagggagatgtggagatggtgttgaagctagggttggcttgttgccaccctgatcctcagaggagacccaccatgaaggaggtcgttgcgtttctcttgggagaggacccgccggaggcacccggaaaagtcttgtccgatttggttcgcggtggcgaggattccgacgaggccgcgcctttgcaaccctcccctcctccggtttgaatatttttgtgttgattaagtaattcttcattttaaataatcttgtttcaattagacaaaattattataaaatttttctaccaaat

SEQ ID NO: 29972 - DNA, 1961 bp, Glycine max
  Clone ID: UC-GMROPIC049E02_FLI
acacaaggaggagacaacacaaagtgcaaaaaaacagaaattaaacactactagtagctagctagggtgagaaaatgggtgaagctaaggaaatatggtctgcaccaataacccctagaacagcttcagtagtaggaacacctgttgtggcatctccacctgtgtcatgtccaccctctcagcttcactcaccatctctaacaaggtcacctctacttcaccctgaggatggagatgcaccacgtcgtaaaacatctaagactccaaagactccaagaacccctagaacccctagaaccccacttagaatctctaatttgactccaaagttcatcacccctttgggaagccctatgagaaaagctctgaggttcaccaagcttgatcctcaggatgcttggcttccaatcactgagtcaaggaatggtaacaagtactatgctgcttttcacaccctttgttctggtattggaattcaggcccttgttctccctgtggccttcactattcttggttggacgtggggaatcataactatgactctggctttcatatggcaactttacaccttatggctgctggtcaaccttcatgagtcggtagagcaaggtgtacgctactgtcgataccttcaactctgcggagctaccttcggggagaaacttgggaaaatcctagccttgttcccaatactgtacctatcagcagggacatgcaccacattgatcatcataggaggatccacagcaaggacattttaccaagtggtgtgtggtgaaacatgcactgccaaacctatgaccactgtggaatggtacttggtgttcacctgtgtagctgtggtgctatcacagttgccaaacttgaattccattgctggggtgtcactcattggagctgtcactgctgtagggtattgtactgccatttgggtaacctctgtggcacggggtgccctaccggatgtgagctataaccctgtgaggactggaaacagtgttgaagatgcctttagtgtgctcaatgcattgggtatcattgcctttgctttcaggggccacaatctcatccttgaaattcagtctactatgccttcaagcgagaagcatccatcacacgtgccaatgtggaaaggggtcaaggtttcttacacgatcattgcagcatgcttatttcccatggccattggaggctattgggcctatggccaattgattcctgcaaatggaggaatgctcactgccctataccaattccactctcgcgatgtgtcaagattcgtgctagggttaacaagtttttttgtagtggtgaatggtttgtgctcgtttcaaatctatggcatgccagcattcgatgacatggaatcagggtacactacaaggatgaagaagccatgcccgtggtggctgcgtgcatttattagggtgttctttgggttcttgtgcttcttcataggagtggctgttccgtttttgtctcaaatggctggtttgattggaggagtggcgttgccagtgacattcgcgtacccatgtttcatgtggcttaagacaaagaagccaaagaagtatagtgccatgtggtggctcaattggttcttggggacattgggagtggctttgagtgccatgttggttgcggctagtttatatgtcatcattgatactggtgttaatgtgagctttttcaatcctcagtagtctcacatatagagtgggaaaatgtactaggaaaatgatgttgggaggtaattaattagtaagagaattgctaaggttttctttctttctttttttgagaaattcaaatttgtgaccccactttgtagttctaggttgattttgcctaatagtgatatttgtataaatatcattaactgcataaggggaggggaaggtaaatcaagattgtataaattttcttgttctgcaaattgaaaaatacttaagagtttattt

SEQ ID NO: 29973 - DNA, 2440 bp, Glycine max
  Clone ID: UC-GMROPIC049H03_FLI
gtctcacacttcttacaccacacacacaaacccttctcttcatttctcactctcgggaacattttttttttttaaagaaaaggggaaaaatagaaagaaaagaaaaagggagaaggagtgagaataacatgaacaaacaactcaggctgctctgtctctttatcctcttctccttatttctctgtgtaagcacagcttttcctcactgtcactgttccaagtctcgatttttccaattgttttattcctgccattgccagttctgaaatgggtgtgtgttcattcgatgcaggtgggtttcgccggcgccggagacacggcggagaaaaacccgttcaccccaaaagccttcgcgattcggtattgggacaaagagatccgcagcgggttaccgaagccaccgtttcttgtatcaaaggcgtcgccgctgagcgcggcggaggcggcggcgttcttaaagctcgtctccgggaactcgctctccacgcggctgccggaattctgcgccgccgcgaagctcctctgcttcccggaggtggggccccgcctcgagaaacacgacaaagacgcgaactttgctgtttacagagacaataacttcaccaactacggaacgggtcgacctggtggactcgactcgtttaaaaactactccgagggagagaatattccggtgaacgatttccggcgatatagccgcgactccgccgggcataaagatggttttctgagctacggcacgaacggcaacgtggtgcagcagagcttccatacctacgccgccggagccaccggcggcaccggcgagttcaagcactacgccgacgaaaccaacgtcccgaacctcggcttcacctcctattccgacaacgccaacggcagaacccaatctttctcttcctactccgaaaacggcaatgccggcgagcagacattcacctcgtacggcaaaaatggcaacggcccgacgaacgtgttcgcctcgtacggaacagagtccaacgttgtcgggtccgggttctccaactacgctgagaccgccaacgccgccaacgacaccttcaaaggctacggcatagacatgaacaaccccaccaacacgttctccaactacgctgccggcggcaacggcgccgtcgagagattctccagctaccgcgacaaggccaacgtcggcgccgactccttcacctcgtacgccaaagccgccaacgccgcagacatcggattctcgaactacggcaagtccttcaacgagggaaccgacacgttcaccacgtacgcgaaatcctcggatggcgaaacaaaagtagggttcacttcctacggcgtaaacaacactttcaaggattacgagaaaaagggtaccactgtctcattcgccaggtacaccaacattagcacgaccctctcagtttcagcttcatcagtcagtggcagtttggtaaataagtgggtggagccgggtaagttttttcgtgagaagatgatgaaggaaggaaccgtgatgccgatgcctgacataaaagataaaatgccggaaaggtcgtttttgccccggagcattttatcgaaattaccgttttcggtttcgaagattgatgagttgaagcaagtcttcaaggcttctgataacggctccatggagaagatgatgaaggactcgttggaggagtgcgagcgtgcaccgagtagcggcgagacaaaacgctgcgttgggtcgctcgaggacatgatcgactttgcaacctctgttttgggtcgaaacgtcgccgttcggactacccagaacgtgaacgggtccaagaagagtgtggtggtggggcccgtcaggggaatcaacggtggtaaagtcacccaatcagtgtcgtgccaccagagcctgttcccttacctgctctactactgccacgcggttcctaaggttcgggtctacgaagcggatcttctcgacccgaaaacaaaagctaagattaaccgcggagttgccatctgccacttggatacatcggattggagccccacacacggagcgtttctctcgctcgggtcggtcccgggtcggatcgaggtgtgccactggatctttgagaacgacatggcgtggaccattgcggattgagaaaagagaccatcagaataaggaataagagtcacttctataggaaattaaagttaaattaaaacaaaaaaagaacttctgttctgctaagaaaatttagcagtctcgagaattatttgtttttaatttaaaaattaagtaatgtaattttattttttttggatagaaaagtttaagtcatgttttttttactacatttggaagaagaaggtatattattatttactcatgatcattgttgttattattagcttggcaagatgtatgtaaatgtctttcctaatgattggaggcaatgaatcaagatttgatgctctt

SEQ ID NO: 29974 - DNA, 417 bp, Glycine max
  Clone ID: UC-GMROPIC049H05_FLI
ccaatgtggaacctgtaagtaccatcttctatgctgaataccagaatactgggcctggagctgacgtgtcacagagggtcaaatgggctgggtataagcccactctcacggacggggaggcagggaagttcactgtgcagtcctttatccaaggccctgagtggttgcccaatgctgctgtgcagtttgattccaccttgtgatttttaatactaccggcctcatagaaagatatcaactgctaatcatatttttacatgtcttttaatcacactcttgtaacatgtattacactctacacgcatttttttgacctacttttgaatggtttgtaacattcttctagaaaatctcttcagaaagatatgtcaaaatttcaaatgaaaaaaaaaacattaaatagatttttttattcgt

SEQ ID NO: 29975 - DNA, 1393 bp, Glycine max
  Clone ID: UC-GMROPIC049H08_FLI
ataatggccgcctcagcgatggtgttggatccgccgcccttcctcccgtcgacaaagtccgcctacctccaaggcggcgacgccacggccttcgatgaggaagatctctacagccgcctcaaatccctagtgcgtcagctcgagttcgtcgacatccaggaggagtatgtgaaggacgaactgaagaatctcaggcgcgagctcctccgcgcgatggaggaggtgaagcggatccagtcggtgccgctcgtcataggccagttcatggagatgatcgaccagaacaacggcatcgttggatccaccgcaggatccaactactacgtcagaatcctcagcactatcaaccgcgaattgctcaagccttctgcttccgtcgcgctccaccgccactccaacgcgctcgtcgaggtgctgccgccggaggccgactccagcatctcgctcctcagccagtccgagaagcctgacgtcacttataatgacattggaggatgtgatatccagaaacaggaaatccgtgaggctgtggagctaccccttacacatcatgaactatacaaacaaattggtattgatcctcctcgtggtgttttactgtatggaccccctggcactggcaaaacaatgcttgccaaagctgttgctaatcataccactgccgccttcatcagggttgtaggatctgagtttgtgcaaaagtatcttggtgagggtccacgaatggttcgtgatgtatttcgtctcgctaaagagaatgcgcctgctattatatttattgatgaggttgatgcaatagccactgctagatttgatgcccaaactggagctgatagagaagtacagcgtatccttatggaacttttgaatcagatggatggttttgaccaaacagttaatgttaaagttattatggcaactaacagagcagacactttggaccctgctctgttgcgtcctggaaggcttgatcgtaaaattgagttccctttgcctgatagacgtcaaaagaggcttgtatttcaggtttgcacagccaagatgaacttgagtgatgaggtagatctggaggattatgtttctcgccctgacaaaatcagtgctgctgagatatcagctatttgtcaagaagctggaatgcatgctgttcgcaagaatagatatgtcatactgccaaaggacttcgagaagggttataggacaaacgtgaagaagcctgatactaacttcgaattttacaagtgaatttgtacgcatgttgataagttttcttaaatattacacacaatttattaagcttatacgctatacccaataaggaggttaaggaggttgagttgtgttttacgaaattttttgcgattttttttcgtaaatgaagttttgtcttatc

SEQ ID NO: 29976 - DNA, 582 bp, Glycine max
  Clone ID: UC-GMROPIC050A05_FLI
cacatatttgctactgggaaccaagacaaaacatgtcgtgtttgggatgttcggaacttgtcaaaatccgttgctgttcttaaaggcaatcttggagctatacgctcaatacgtttcacatctgatggacagttcatggcgatggccgagccagctgactttgtgcatgtgtatgacgcaaagcatggatttgagaaggagcaagagattgatttttttggggagatctctggtgtatcctttagccctgatacagaatcactctttattggtgtttgggaccgcacctatggaagccttctacagctcaatcgacgcagaaattacatgtatcttgactgcttgtaaatttgtaaccttacaccttgtaagtaccaacagcttatgttgtgttgtctagtgtttaggaattgtaccatcatagaaaaaccggtggattgcctcatcatacattgtagagcatggcttgaggatgctacagttgtttgatgtacaccttcatgctaaataacattgactgccaatgtctgttttaatctttccgaaggtaataatgtgaaggatgtttgtacagaggtctat

SEQ ID NO: 29977 - DNA, 936 bp, Glycine max
  Clone ID: UC-GMROPIC050C07_FLI
cttctctctcctctctctctctctctacaaatccttctttcttctcttcgctgctcactgtagcgtagctatggctttcagagttggaggagcgggaggaggaaatgcctcttctggcatgggtgatttttaaaattgacgagaaaaagaaagaggttgttgttgaaaaaactggaggccctgctgagagctatgatgatttcactgcatccttgcctgaaaatgattgccgatatgctatctttgactttgattttgtgacatctgagaactgccaaaagagcaaaatcttttttattgcatggtctccttcggtagcccgcattcgccctaagatgctatatgcaacatccaaggacaggttcagaagggagctgcagggcatccattatgagattcaggcaacagacccaaccgagatggatcttgaagtcctcagagagcgtgcaaactgagcacctacacaagagggttgtgtctaggtgatgtagttaagatatctgaggcctcagggaatgatgttgactgataccctttagttgttctactatgatctctgtctgtttcgcgacatatttctcataaatagctgacttatcattttatcaagtaaataacctgcacctgtgaaggctgattaggggttcctgcctaagaaaccccactgcaggggaatttatgcttttccttattgccatgatggttctcgggtgcagatttatatagtaatggctattggaaattcgacttatattctatgaatttcaaatggacgcagctggtgagtctgctttgttacatgccaatccagtataggtttgtttttgtagcgaattccagcattggaatatttgctttctgaaccaaggtatgggaactaatgtacacaaggcattgtgttaagcttattttgagttgtttaaataaaaaagaatt

SEQ ID NO: 29978 - DNA, 1838 bp, Glycine max
  Clone ID: UC-GMROPIC050D03_FLI
gccaagtgtggttgtttagatgcggcctttgatgtctttagtggaatgatggcgaagaaagatgtggtgtcttggaattcgatgattcaggggtttgccatgcatggacatggcgagaaagcgcttgagcttttttctaggatggtacccgaaggttttgagccagatacatatacatttgttggccttttgtgtgcttgcactcatgctggccttgttaatgaagggcgtaagtacttttattcgatggagaaagtgtatgggattgttcctcaagttgagcattatggttgtatgatggaccttctcggccgcggcggacacctgaaagaagctttcacgcttttgcgcagcatgcctatggaacccaatgccattatattgggtactcttttgaatgcttgtcggatgcataatgatgtagattttgcaagagctgtgtgtgaacagctgtttaaggtggagccaacagatccagggaattactcccttctgtcaaatatttatgctcaagcaggagattggatgaatgttgccaatgtaaggttacaaatgatgaatacaggaggtcaaaagccttctggggccagttccatagaggtagaagaagaagtgcatgaatttactgtatttgatcagtcgcaccctaaatcagatgatatatataagatgattgacagattggtacaggacctaaggcaggttggatatgttccgatgatacatcagtagagataaatgaatatcatttgattgcattagtatgcacagcacagcgcagctggaatgatgcttcaaggaatgaatatgattttttagttgagcacagtgcattgctggtttactaaaaacaggtaaacaaatcattgtattcatcactaccactggtttaacaacaaagttgtatgcatggctcatggctgaacctatgcttctggtgcaagcatcacagtatggatcccaaaactctgctttcagcatggcgtgatatctcttgcatgattttgcctatcacagtaattgcttggttgatactgaatgaatctcattgttggtttagtgatcccaacttggtcagaattttgcatgtagtcagctggttgctcaattttgtgtttggaagttcttttatggttttaccttttaaatctgttggggagattgaaggaaagaacggaagaaagactataatattgatgagcaatcacgaaacaaagttgtgtgcatggctgagcctatgcttctggtgcaagcatcatctgccttcctactaccgttggccggagctcttttgtaaagtcaaagaaagggaaaattgtgaagagaaaatgctctgattcttcctgtctactacttattgtaaaaataagctacacttaacatatgtatactgggtggcaattccactcttgactgtaccaatatttctgtgtgctggttgttgccatggtgccaattcagccctttttattaaactcgaaacatttacttgagcgagattattttcagagctacttgctacctctaatctacacgtcgctctacatttgtcattttttgtttttctcagtgttaacttctctcagccatgcttctttagttttatctctgttcatttctcatgatgaccaaaagatctcatgatgactaattatgccaaagtgaattgtgcaggccttcattttggatgatggaatgcaaatggatactatgtttgtttttgttgacgttgataatacttttctgcccttcatcttgttactctagacagtaagtacttggaaacctctttctttttctgcaataaatcttattctatacattgattctttttcttc

SEQ ID NO: 29979 - DNA, 1120 bp, Glycine max
  Clone ID: UC-GMROPIC050G10_FLI
atccaacagaaatcaagtgatgaagtcccaagacttgccggaaggatgcgtcgcacacatattgtcgtacatttgtactcctgaagacatagtcaggctctccctcgtttccaaggccttttattctgcagctgattacgacactgtgtgggatcgttttataccctctgatttctcctctaccatttctccactttcttcctctaactctaagaaggatctctatttcactctctccgaccgtcccaccatcatcgaccagggtagaaagagctttcaattggaaaagcgaactgcgaagaagtgctacatgctttccgctagggatatttctattacatgggctccaacgcagggagaggcttctcaatattgggagtggaaaagcctaccagagtcaaggtaaacttttatttcactctccctttttttatttttatcgatgaattgattttttcaaatgttttgcttgtctttaatttgtgccacaaataatcaaataagctatttttgagttgtcttactgtacaagtaggttccaagaagttgcgaggctttacgctgtgtgctggtttaacatcactgggcagataaagacccgcgtcttgtccccaaatactcagtacgcagcttttcttgtgttccagatgatcgatgccagtggatttcaccaccatcctgcgatgttatcagtaagtaatgttggaggcagtagaacttccaaatatgtttgtttggatcccaacttagaagataatgatcttgatgacagatttcggggtctgcaacgtcctaatgtgagaaaagataagtggttagagattgagatgggagagttcttcaactcaggcttggaagaagatgaaatctatatgaatgtcagggaaactagtgatatgtggaagcacggtttcattcttgaaggaatagaagttaggcctaaacatgtttgatccgtcaaatgattgtacttaggcctaacctgaatggatcgatggatggtggtgtttgctacagtggagggagacccggaataatacagacttgttatctgtataaattgtttttctgatttagcttttttgagataaaaaatcaacttattgtttattatttcctt

SEQ ID NO: 29980 - DNA, 710 bp, Glycine max
  Clone ID: UC-GMROPIC054C08_FLI
ctaattttctctacaggagctggcttattgacattggaggatttgcaaagaaagtgaaaagcactactctatcttcagctacatgtttatcaatgagttcatcccaacactggaaggagaccaaggaatttgctacacacatccggaaaatcttccaggtgctaagaaagatgggagttatgtccatttgtttcacagaacaatcaatgcatatgctactggtcaacgaaagcatcgaaagattcatcatcaacagggtttgactgtaaattgcccgttttaatgtataatttccacttatggcatgcagaaaaaataaaaaatgtaagtaatggagatgtagcagacgactcatatcatcggtataaggaggatattggaatcatgaagtatatgaatttggatgcttatagattttccatttcatggtctagggtactaccgaaaggaaaacttagtgcaggtgtaaaccatgaaggagtaaactactacaacaacctcatcaatgagctcatggctaatggtcataatttattgacccaaatttcataactatgtattattattattattattattattattattattattattattattattattattattgttgttgttgttgttgttgttgacgtcacaaatttcgtgtgttatcactacattcattcttattatataataattacataatcactaattattag

SEQ ID NO: 29981 - DNA, 3182 bp, Glycine max
  Clone ID: UC-GMROPIC054G10_FLI
ggcgacataacatggttgcttcttcaatgatgtttgcatggtatcctctagtgctgttttggctgacattattctgaaagagaagctacacaatcttgggatattgggctgtataatgtgcattgctggtagtatcattattgttattcatgctcctaaggaacaacctattacatctgttctggaaatatggaatatggccactcaaccaggttagaatgcactgtatttttttaaaaatgcaattcactgaagttccttgataacaaagatatcctccttgcttgcagcttttctggcatatgtgggctcagtaatagtgttggttttcattctggtcttccattttgcaccaagatgtgggcatacgaatgtgctagtttttactggaatttgttcattgatgggttccctctctgtaagtaaattaatttactgttatctctcctgcaatgtctctttgatgattgatctaaacttcaaagttttgcttactcaaagttatcaagtttaaaacatatacaaactaagggacctgatttcatgttgaaagtaatttggttttcaccattcattcctattttctattaatgaagttcatttcataaatatagtttcagcttccatataatttttatatattttttttgtgtagttatatgagacttctatggcctaaagttttttccctttcccccaattacatggataattatttctgtcataataactgatttactgaaaaatgttttctttgtagtaacactgcaataatatggtggctgatctatattgaattgctataattttgcaggtgatgagtgttaaagcccttggaacttctttgaaattaacttttgaagggaaaaatcagttaatctacccagagacatggttttttatgttagttgttgctatatgtgtcatcatgcaaatgaattatcttaataaggtttgttacctgatgtctcttaaaattagcatgctgggcctgtcgtacatatatttttatcaatgacctggaagttcaaacatttgacaaattcttaagttgaaatataacttctcgttgtaatttgtaagtacataggatgcaaattatctcttttctattttctgtttcatccattctatcttgatccaattatttcataggaactgctctttgttttgagccttttgggaggggggggggggggagaaagatttactgtaaagaggagggaataaaatactagggaggaggatatcattgggcctaagaggctcaaaaatgaaattatgcccatgaataaggatctgagagattatggagaagagataaacaagtttcacaggaggcagaagtggggaggagtgcaacatgtggatgtggttgaaggagagagagaaaataactggtggcaaggggagagagggaggagagagtgagaaggattatatgatgggtgtgataactgaatagggagaatgacaaaattggtatcaatattggctaccctgagtgaagaaaaggggttctctaatttctgctatttgtttattttgtattgttcatcttgtaagaagctagtctccacctattaccctagctttctttttcattttcttgggttgcaccactgtagcataggtttatactcaatttatagtatttggtgttttgaggaaaatataggtggtcttgttgccagactcttcctttgaattggaatgcagggaagcttagctacaacttcatatacaattgaaggaagatgacaactgaacataaaacagaatggaaaaatcttacgaactgaaactctgctaagctatttaaaagatctagaattcttttaatacctctttttaatatttcttaagttaatcttatcagacagtaagagggaaattacattccacaggaggactgtttctgataagataatcagtaattgctcctatgattttactagttgcatgttaaatcctccatacaacatacaatattacaacatgtgaattcctatgtaatgtaaattcaagatagaacaaacctcagaactcaagacagagtacccgacactaaacctcagaactaagagattacataatacagcaaaagtcaaatcaaagatacaacaaaagtaaatggttttacaacagaactagtaaaggtttggtgtttggtactctatcattgctaactgataatcttatcagaaagagtcccccactatcaattgattataagttctctatacagcatgcaacatgattttacttttatagtatttattagcctgattaggctgttacttttctgtttctttacttttgttggcttcttaatctgtttgactgtgctatcccttgatgtaatgatttgatcttttagatgtttaaaatgaaagaattgtttaatttttgaaaatgctggcatttatattgctaaactagcggtatcaagaactcctcacaatgacatagtgatccattatattttgtgaagtttattattcttttttctttatgaagtcttgtttaaaatgatgtccaatttatattcaatggaaaaagaaatcaattctagagaattcagattttctgtgtattatatacaaagttcttatatatatgaaattttggatcaattactaattactcttcactgacatgattgtattgtaattatttcaggctcttgacaccttcaacacagcaattgtatctcctatatactatgtcatgttcacaacacttacaatactagccagtgtaataatgtttaaggattgggatggacaaagtggtggaactattgtgtcagaaatatgtggcttcatcattgtgctctctggaacaataatgttgcatgcgactaaggacttcgagagaagctcttcttttagaggtagtgatcctttatcgcctacgctatctgcccgactttttaccggaaatggtgactcattacttaagcaagatgaggaaaatggatctcccgagagtaatatgcgctcaagaaggcaagaattgtattagatggttaaagatcttaatttatttaattgtagggggaagaagaagcctttccctggagaatctgaatgagatgcccatcagattatactacaccatgaagctgtaggtaccaatgaaaccataaaatgatggaagatttgtgaagccattctttt

SEQ ID NO: 29982 - DNA, 1774 bp, Glycine max
  Clone ID: UC-GMROPIC055A02_FLI
cgttgtctgataatcacattacaggaacaattccttcggagattggaaactgctctggtattgaaattcttgagcttggatcaaattctttggcaggtcacattcctgctgatatctctcgcctcacccttttgaaagtttttgatttgagtgggaacaatttaactggggatgtgcctgaagaaatctccaaatgctcgtcactaaccacgttgtttgtggatcacaaccatctttctggggccatacctgggtcgttgtcagatctatcaaacctaacaatgctagatctctctgctaataacttgagtggggtaattccgagtaatctttccatgatatctggtttggtgtacttaaatgtctcaggaaataacctagatggtgagataccaccaacgttgggatccaggttcagcaacccctctgtgttcgcaaataatcaaggtttatgtgggaagccattggataaaaaatgtgaagatataaacggtaaaaacagaaagaggttgattgtgctggttgttgtcattgcttgtggagcttttgctctagttttattttgctgcttctacgttttcagtctgttgagatggcgtaaaagactgaaacaaggagtatcgggtgaaaagaaaaagagtcccgcaagagccagttctggaacaagtggagctcgtagcagcagcactgagagtgggggaccaaaactagtgatgttcaacaccaaaattacacttgctgagaccattgaagcaacaagacaattcgacgaagagaatgtgctgagcagaacaaggcatggattagtgttcaaggcctgctacaacgatggaatggtcctttccattcgcaggctccaagatggatcattggatgagaacatgttcagaaaagaagccgaatcactaggcaaagtcaagcaccggaatttaacagttctcagaggttactatgctggtccacctgacatgagactcctagtccacgattacatgcccaatggaaaccttgcaaccctcctccaagaagcttctcaccaagatggccacgttctaaattggccaatgcgtcacctcattgcactaggcattgcccgtggtttagccttcctacaccaatcctcaatggtccatggcgacgtgaagccacaaaacgtcctattcgatgcagatttcgaagcccatttatcagattttgggttagacaagttaacagtagccactcctggcgaagcctccacttcaacttccgttggcacattgggttacgtttctccagaagcagtcttaaccggggaagcaacaaaggagagtgatgtctacagctttggcattgtgttgctggaactactgacaggaaaacgacctgtgatgttcacccaggacgaagacatagtgaagtgggtaaaaaaacaacttcaaaggggtcaaataacggagctattagaaccaggtttacttgagttggacccagaatcatcagagtgggaagagtttttactgggtgtaaaagttgggttgctttgcacagcacctgaccctcttgatcggccaaccatgtccgacatcgttttcatgcttgaaggctgcagagttggtcctgatatcccatcctccgcagatcccacatctcaaccttctccggcataacccaaaactccaaacttgttgtcatttttttgttgttttggtaaaaaaacaaacccttttttagtttgatttaagaagtgtaacaaacattggtagttcatggttattaacttgtttttttctct

SEQ ID NO: 29983 - DNA, 1590 bp, Glycine max
  Clone ID: UC-GMROPIC055A04_FLI
gcttagagctttctgcggcgccctctatcattgtcgtcgtctcggtttcttcccttctcgcggcagatgaggttggaaggtcagaaaccgaaccgtctagcccacacaaacacaacccagatactataattgatcggactagcacttttttgtttattcctaaatacatggacactgatgccactggagatcctgttgacaagctcaaggctatccagaatgatgatgtagaatatcaagacgaagatgatgattttgatgacgaagaagaagaagaagatgaccctattactcttggtttcgttgacaaacccaagaatgaatggtctcttcgccgtcaatatttcccaagcaaaactggtggagtcccggcttggcttgaccctctgaatataccatcagggagatcatctgtgtgtgacatttgtggagatcctttacaactcttgcttcaggtttatgcaccaactgacaaggaaaccacatttcaccgaatgttgtttgtttttatgtgtccctccatgaaatgtcttcttagggatcagcatgagcaatggaaacgccatccagagaagccatctagaagtgtgaaggttttccgttgtcaactaccccgcattaatccattttactcacctgaatgccctcagtataatgagagccacgaacctgctggcagtggagctgctctttgtgattggtgtggcacctggaaaggagacaagctttgtagtagttgcagacaagcacggtattgctctgagaaacaccaggctatgagttggcgcacagggcataaaactgcttgccaacagacgaaagtttcttcacctgtttttggacccaacaaaagtggaaccacctccttggagtctcataaagttggaagcaagaatctgtggcctgaatttgagatcagcattgaagatgaaagtgaatataatagggacatatctgaggaaaatagcttagctaattccttgatctctaggaacaggaatgatgacacaatgaattcacttatggataactttaagggtgatgatgacaaaaagagctgggcctccttccaggaacgcattgccgaggctcctgaacaagtgttgaggtattataggaatactaatgccaagccaatatggcctgtttcaagtggtcgaccatccaatgctgatatccctaaatgcagttactgcagtggaccaatgtcttgtgaatttcagattttgccacaactgctctattacttcggcgttgacaacgaagtggactctctggattgggcttcaattgtggtgtatgcgtgtgaagcctcttgtgaagcaagtttgccttacaaaaatgaatttgcttgggtacaaatttattcactttccacaaccttatagagaaatgtcttttttttttttttaaatttttttttataaattattatcgtttttaaattttgggctcagaagtatatgttattcttcgtttggcttggtggaagtatgaggaaggagtttctttatctacttcaactatcaattttgaggattgactgttgattgtgtaatttataggataggcttgttgcgttcttgctac

SEQ ID NO: 29984 - DNA, 206 bp, Glycine max
  Clone ID: UC-GMROPIC055C04_FLI
ggggttcattattgcctaatggttggatcacttggactctgtcttgtgtacttaaagttactgttgtgagaaaatcacaagtgcacggtggttatcgtattcacatgattatgtgtatgactttgtgattatcgttattcaataaaaaggagaaaaatgggtttttcgttcctattaaatgatcagaaatcagtttatgttcttcc

SEQ ID NO: 29985 - DNA, 1080 bp, Glycine max
  Clone ID: UC-GMROPIC055G12_FLI
attcatagagatctcaaagcaagtaatgttttacttgatgaaaagttcaatcctaaaatatcagattttggaacagcaaaagcttttggaggagaccaaatcgaaggaaacacaaaaagagtagttgggacttatggatacatggccccagaatatgctgttgctggactattttcaatcaaatcagacgttttcagctttggtattttactgttggagattgtatgtggaataaaaaataaagctctttgtgatggaaaccagattcatagccttgcatggacactttggaaagagaaaaatgctttacagttgattgactcaagcataaaggactcatgtgttatctcagaagtactgcgatgcatccatgttagtctcttgtgcttgcaacaatacccgggagataggccaaccatgacatcagtaattcaaatgttagggagtgagatggaactggttgagccaaaggagcttagtttctttcaaagcaggattttggatgaaggaaaattaagctttaatctaaacctaatgacttcaaatgatgaattaaccattacctcattaaatggccggtgaaagttattgagccagctgaacatactgcactgacgcacaatttgcattgcaagtcttaatgagctgcacttgccaaaataagattagaagaatgctttaaagacatgcgacgaaagctgaaagttgatacgacgattggagattgctgcaaagccttatcagatgattaatgtaatcagatgcaagatgctgaattgcaagtctctcaatacgtgcttcattttttactctgactctgcatccgaagttgtgttataggcttgggctgatttgtaaaaagaaataagaggactagaaaagttcaagttatctttagtataaataggataaatttttattgtcagaaagtacagcgccagagtttggttatctgatttttctcaactagtttttagttttctttgttgttcttagagttttcaattttcactctccgccatcagtggctaaactctgtaatcaatctttggattttaatatcgtttgtttgctgacttg

SEQ ID NO: 29986 - DNA, 1656 bp, Glycine max
  Clone ID: UC-GMROPIC055H06_FLI
gtctggagttactggcactatacagttttcagagatttactgataaggggttgcgtggcattgggaatggatgtaagaagttaaagaatttgactttgattgattgctatttcataagtgataagggtttggaagcaattgctaatggttgcaaggaacttacacatcttgaagtcaatggatgtcacaacattggaactttggggctagaatacattgggagatcttgccagtatctcactgagttagcattgctttactgccatagaataggtgatgttagccttcttgaggtgggaaaggggtgcaaattcttgcaagttcttcacttggtagattgctcaagcatcggagatgatgccatgtgtagtatagctaatggctgcaggaatctaaagaagcttcatattcgtcgttgttacaagattgggaacaagggactcattgctgttggcaagcattgtaagtcactaacagatcttagcattcgattctgcgatagggtgggagacggggctcttactgcaatagctgagggctgttcccttcattatctgaatgttagtggttgtcaccaaattggagatgctggagtgatagccatcgcaaggggttgtcctcaactctgttacttagacgtgagtgtactgcagaatctgggtgatatggcaatggctgagttgggagaacactgcacattgcttaaagaaattgtgctttcacactgccgtcaaattactgatgttggactgacacatcttgtgaaaagttgcacattgttggagtcttgtcaaatggtttattgctcaggtataacttcagctggggtggccaccgttgtttctagctgtcccaacatgaagaaagtcctggttgagaagtggaaggttagccaacggacaaagcgacgagctggctctgtaattgcctgcttgtgtgtggacctttagaccatatacatttatatatatatgaccttgagcctttttctgtttgatttgtgaatatacaaaaagctgccggcaactctcaatctaatcttatgggtatgaaagatgaggcaaagtagggtgcctggctttataggagttgtaacatgagtatcaagagtgcagaaagcaatggtttagataaataaatgttgtttataatagcatggtctataggtagatataaaaaaagtattaggaccctcatattgatttaacacgttagggagaaatcttattaagcaaaactactttgtttatatcttattgctccaagtaaaaagccacaattgttcgagagatcttgttctttgcttggaacttggattctttgttgaagtagggatttgtgcatggtttctgtaatgtcttccctttctgttgctcctgtcacccctccaattcctgcccccttaccccatccagacactgcagtttatcagatgacttacatgagcaagtcagttttctttctggtataacgagaaggtcaatgcaacctgagccacactgttactcgaatatagtttatcttatcatatagagattgttgcaaattgttctatgcaggtcataaatatttggtgaaaaaaacaatttgtgatgtttatttatttccttctgttctttataattcatttatccgtgtaacccatctcgcttagtg

SEQ ID NO: 29987 - DNA, 891 bp, Glycine max
  Clone ID: UC-GMROPIC056A03_FLI
tgcttccccattagagaacattttaccaattgagcactttcaaacaacgttgttgttttttgtacacaaccatcagagataaggagagtgaggtgggcatggctagttgtttaatgttactaaccaaagttagtgataccgaaaccccatcaagaaagagggttctaagtggtggtgattttaagtgcaagacttgtaacaggaaattccaatcgtttcaagcacttggggggcaccgagccagccacaagaagctaaagctcatggcttcaaacctttcgtgttcgaccgtgacacaaaagatgcaccagtgccccatttgtggaattgaatttgcgattggacaagcactgggagggcacatgagaaaacatagagcttccttaaacgatggtttgataactcatgatcatgttgtgccaacatctagtggtactaaaaggcttcgtttgtgcttggacttgaacttggcaccgtacgagaatgatctcaacctcaatttaaggacacctactttaaatttgttcgtttgatcgatttgagtgtttttagggcgaattcttgttggaaattgttttatttttattttttgtttcttactttgccgtgctttttagtttatgacgtacgcgtgattctatagggttctatgtatattcatggtgctaacttgaaagtacagggaaaattttgctgactaccgttaagcaaagcatattaagcatactatcatggctcttttcaggaacatgttttgaaaagtcactttcaatatgaaggattcagttactgttagttgagggtagtaattattggttggatctgttatgatagataccattaactgtgagattaaaaacaaaatagaattgcccacacttatctttgtct

SEQ ID NO: 29988 - DNA, 1357 bp, Glycine max
  Clone ID: UC-GMROPIC056H08_FLI
cccaccgtctacttatactatacacattatttaaggatcaccaaagcctatttctttagtccttatgttatgtctaactctacctcgttcaagatcaaacattgattcttagttgcatagcccttgtcatatctctttctatagttgaataaaatgtctgctgcaacttttgcagctcatattgctggggctggctttgtaggcttgaagtccaactcatcaaatctttgccccagtactggatccataggatggaaaaggaagattgtttcaaatggttctaaaacttactgcatgaagacatggaatcccatcaacaataagaagtttgaaacactgtcctacctgccacccctttcagatgaatccattgcaaaggagattgactacatgctcaagaagggatggatcccttgccttgaatttgatgaggttagcttcagataaatttagattattatgttgtagatttatgctttttctttaatttcctttggagaaagcaattatatttacattagaattgtttatattgattatctaaaatacgtataaaagactagcaattctcatgccatcgagaataaataaaacttacggatttgacttctgtcaagtaaaggaagtgcatctcagataataaaatacattaataaccattgattaaaaaatcagcagttaagatagtaactaaactcaaagtttatttgtacacattttattttattttttttgcaatttcaatggttgatttgttggtcaaccataataaatgcaatttattctctcaaatatatatttttttactttaaggggttggatgtaaaactttataattgttacgagctttgatctaatctaggctaggttgattctgtgtcgttgtatcatggagaattttatatatatttatgtttttccattgatgctttggttttataaagatggttgtatatcctagtaacatggaactgtgttgtttggaacatgaaattagttggggtgtgttcgtagagaaaacagccatatgccagggtactatgacggtaggtattggacattgtggaagctaccaatgtttgcttgcagtgactcttcgcaagtgctgaaggagatccatgaatgcagaagggtgtatccaaatgcatatatacgttgcttagcatttgataaccagcgtcacatgcagtccatggcttttatagttcacaaacctgatatcactactaccacttgagcctttttgctcttgttaatttatcttcatttccccaatttctctctctttaaaaaaatgtaatgtggactttgctgtttacttatctagcggtatgaataagatggaattggaagtcgc

SEQ ID NO: 29989 - DNA, 1792 bp, Glycine max
  Clone ID: UC-GMROPIC057C08_FLI
gatccgagatagtgttcttcgatgtggagaccagcgttccgacccgggcggggcagggttttgcgcttctggaattcggcgccattttggtttgccccaggacgctcaccgagctccgcgattactccactctcgtccgcccagccaacctctccgtcatcacccccttgtccgagcgctgcaacggcatcaacgccgccgctgtctccgccgcccctaccttcgccgacattgctcacctcgtttacgacctcctccacggtttctttcttcacctctctctctctctctctctctactgaaattaatcaattgttctgaattttgactgtttagggaggatttgggcggggcataacatcataagattcgactgtgttcggattagagatgcgtttgctgagattaatcagccaccgcctgaacctaaggggaccattgactcgctggttttgttgactcaaaagtttggtagaagagctggtgacatgaagatggctactcttgctacttattttgggcttggacgccagacacataggagcttggatgatgttcggatgaatcttgaagtcctcaaatactgtgcaacagttctattcttggagtcaagtctcccagatatattcactgcaaatagttgggtttcaccaaatgctactacaagaagccgcagtaatgggaaatctccatcacagtggggcttattaaatattaataaagattctgtattatcatctcctgcaactgaatccaaagacaaaaatcgcccaataatttcttttgcattgagcagcccaaaagggaatgtctcgaatattgcagaccctaacatggatcaatcagatccttttaacttgagcactcttgaggctgaaataaaaagagaatccattaagtcagatgtcgccttggaggaaaaacccatgcaagagtcaactgatttggcttcctcatcttctgtatctcagccttgcagcagctctattgctgttttggaacctgatggaatatgtataccttctattgatgcatctcttgttccatcttttcgtggcagtcaaagaatagagttactgcatgaaggtttcctgtttcagcttcattgtactgatttgaaagtgcggtttggaataaactcaaagttttttgatagtgctggccggccacgattgagttttgtggttgatccatcaccaagtctatgtaatgttcttgatgcatgtgaccgtgtagcacagaagttaaccgtggattctggtagcagctctgattggaggcctgttgttattaggaaagaaggcttcttcaactatcctactgtcagattacacatacctactgcagtagtggcagacattgctatttatgccacggaaatatatcaaagagaatcatctggaacagtgcaaagacttctcttcagtaagtttgatgctgcagaacttggttccttgttcatgcctgggacatttgttgatgccgtcttctccttagatccgtatgattatcagcagaatgcagggattaaattagttgccaaaaaattgatcattcatagcaaatagaaggaaattgataattaagtataggttagttattacatgctaaggttgatagattaaatattggttatgctgtaaagctagttccatttcatgtttgtagttcaattgatgttcatacctttaaattttctggttactcagtactcactgatttcctcaactccatctagaactacaggatgaatttcctctcctgtggcaaaaatgaataagtaagaattaag

SEQ ID NO: 29990 - DNA, 1650 bp, Glycine max
  Clone ID: UC-GMROPIC057H01_FLI
cattttttgatctattatggtgaaggggttgcacgggcagaacctccccgcccacgtggcacagctggttgatcagctggagcgccactgcttcgctcccgatggatctctcatctccaagcctctcttcaacgatctccaactcgccagagaggaaatgtgcagggaaagactgcgttacctggaagccatggctatatattctgaggctattgcaatggtggaggagtatcagcaagccatttctgtgtctaaccttggtggaatcagagatactggcaatctttatccacagcttgggttgaagaactctcctcaggtttatcagactttagagcatcaaatggttgttgctgaagcagctcaacgattgagactacctcttatctccaaagatggggaggttcatgatgaagacattgaaaagctaagtgtagtgtctcgaagctctcttgacagtactgttagtggggctaattcttctaactataacacaccaagcagctctgttagtggggctaatactgcccttgctgcttcggatccagtggaagtcggagttggtggtgttgccaatcgttttttgggaattacaccttcttatttgtggcaaactcagcatcaaaaagcaccattatccgtggatatgactgaatatcgcctgtctgtttcacgggaggtagaggctcgcttgaagatgaaatgtgaaaaattatcagaagcctttgtattggatgacaatgattcttcatcatctggaagtcatagttcaagttctcggcttccagaaagggtgaaactgttgattgaggagattgaaagagaagaaacagcgctgcgggatgacctttattctgcagatagaaagtttgctgaatattataatgtcttggagcagatacttgcagtgcttattaaacttgtcaaagatttgaagttggagcatcaacataaatatgatgagatgcagaagacttggctctgtaaaaggtgtgagaccatgagtgcgaaattgagtgttctagagcacgttctcttgctcgaaacttacactaaggactctatacctgcccttcataagataaggaaatatcttgttgaggcaacagaagaagcttctattgcatataacaaagcggttacccgcctgcgggagtatcagggtgttgatcctcactttgacaacattgcaaggcagtaccatgatattgtgcagaaattggagaacatgcaatggacaatccaccaagttgaaatggatctgaaacgtttgccagataaacccagcacatagaagttttatgctttgtctccttgttcttggtttgaattctttttgtaaatggtattaaaggcatcaccctcaattaacctaagattcaatctgtgagcttttttaaaaaaaataaaaaatatttggattattttgcattaccttacctgatagaggagaaaaaggaaactccaaaacctgctatttctgctagtttaagatgtcaaatagtattgaggtctttattcttttgtatttaatcaaagtatttttgtgtgcgtaggttctaatactcagcttctgaatgacacaaatatgggtggatgcaatgtataagtaaacatgcactaagggaattaaaaaatcgtgcttgcttc

SEQ ID NO: 29991 - DNA, 2945 bp, Glycine max
  Clone ID: UC-GMROPIC058B12_FLI
ctttccttcaccgtaccaatatttgaaccacatccaccacaatattacattcatgctatttctgattcttggcttcatgccgaggcattctacactattacttttcacaatttaccattgccagaggctcgtactgctcacacagaactccttgatttaaaaccgcttcccatgtcttcccttggcaacagtacttatgaagcattatataaattttcacattttaatcctatacaaacacagacttttcatgtcctgtatcacacggacaataatgttctgttaggagctccaactggaagtggaaaaactatatctgctgagcttgccatgcttcgtctttttaatactcagcctgatatgaaggttatttatatagctcctttgaaagctattgtcagggaaagaatgagtgattggcaaaagcgtcttgtctctcagctagggaaaaagatggttgaaatgactggagactatactcctgatttgacggctctcttgtcggccaatatcatcatatctactcctgaaaagtgggatggaataagtcgtaattggcatagccgtagctatgtcacaaaggttggacttatgatattggatgagattcacttattgggggctgatcgtggacccattcttgaggttattgtttctaggatgagatacatatcatcccaaacagaacgtgcagtacggtttgtaggtctttctacagctctggctaatgctggtgatctagctgattggttaggcgttgaggaaattggactcttcaatttcaagccaagtgtgaggcctgtacccctggaagttcatattcagggttatcctggaaaatattactgcccaaggatgaatagcatgaataaaccagcatatgctgcaatatgcacacattcacctgcaaaaccagttcttatatttgtctcatcacgacgccagacaagacttactgcacttgacctaattcagtttgctgcatcagatgaacaatccagacaattccttaatttgccagaagaaaccctacagatggttctgtctcaagtctctgacctaaacctaaggcatactttacaatttggcattggattacatcatgcaggcctgaatgacaaagacagatctctggttgaggaactttttgcaaacaacaaaattcagatattggtttgtaccagcacattggcttggggtgtgaatcttccagctcatctagtgattatcaaggggacagaatactatgatggaaaagcaaagaggtatgttgattttccaatcactgatattttgcaaatgatgggtcgtgctggacggcctcaatttgatcaacatgggaaagctgtgattcttgttcatgaacccaagaagagcttctataaaaagttcttgtatgaacccttcccggttgagagtagtttgagagagcagttgcatgatcacattaatgccgaaattatttctggaaccatttgccataaacaagatgcagtccattatcttacatggacttacttatttcgtagactgatggttaatcctgcttactatggattggaggatgctgaatctgaatttctaaatacatatttgtccagcctagtacagaccacatttgaggatttggaagacagtggatgcataaagatggatgaagacaaggtggagcccatgatgttgggtacaattgcatctcagtattacctcagctacatgactgtatcaatgtttggttcaaacataggtccagatacatcacttgaagtctttttgcatattttatctgctgcttctgaatttgatgaactacctgtgcgtcataatgaggaaaaatacaatgaagcactgtctgagaaagttaaatatccagtggataagaaccgtctagatgaccctcacatcaaagcacttcttctatttcaggctcatttttctcaattggagttaccaattagtgactatgtcacagacttgaaatcagtattagatcagagtatacgcgtaattcaggccatgattgatatttgtgcaaacagtgggtggctttcaagctcaattacttgcatgcatcttctgcaaatggtcatgcagggtttgtggtttgacaaggaatcttccttatggatgctgccatgcatgaatacagatctgataagttcactaagcagaagaggaatttctagtgtacaggaattactagacattccaaaagcagcattgcagactgtaactgcaaatttcccagcttcaagattgtaccaggatcttcagcatttccctcatgttaaaatgaaattaaaagttcagaggaaggacactgatggtgacaggtctcgcatattatctgttagattagagaagaccaattctagacgacactcttctagagcatttgtacctcgatttccaaagataaaagaggaacaatggtggttggttcttggtaatacctctacgtctgagctatatgctttgaaaagagtttctgtttcagatcacttagttacctcaatgaagttgcctctgactccagctaatcttcagggcgtaaaactgattttagtctccgattgttacattggatttgaacaagaacactccattgaagaacttgatgtatgttaagtagtggagacaccattggtcagtgccattgtacatacaacgtaaacgtaagatttcttgaagagggttggggctgcccaggttgtaccaaaaaatgtttttttttaacttgagaaaaagtcaatatgtatatccataggatttgcaatctcttgcatttaattgttttataggtaatcataatgatcttgtttttagattttctttatttattttccaagtcgtgtcgccatttgtaagtataaaggtttacagtgcaaggattgaaagatgtctgaacatttataaattgtgaaggaatggatctccgcaagcat

SEQ ID NO: 29992 - DNA, 1886 bp, Glycine max
  Clone ID: UC-GMROPIC058D02_FLI
gcttggtgaaggtaacactgctgttgtaaaatatttggatgaacatctctcactcatcatggaagaatcatatgaacacaagtatccatatgattggcgaacaaaaaaaccaacaatatttagagcaacagagcaatggtttgcttctgtggagggatttcgtcacactgctatggatgctattggccatgtaaaatgggttccacctcaggcagcaaacagaatctcatcaatgacttctattcgctccgattggtgcatatcacgacaaaggacatggggtgttcccattccagtattttatcatcttcagtctagagaacctcttatgaatgaagagactattgatcatatcaaatctatcatagcccaaaagggtagtgatgcatggtggtacatgacagtagaggatcttctcccaactaaatatcgtgataaggcagcagaatatgaaaagggaactgacactatggatgtatggtttgattcaggttcctcctgggctgcagtcttgggaaaaagagattcccttagttatcctgcagacttgtatctcgaaggaacagatcaacatcgagggtggtttcagagttcattgttaacaagtgtagctacaaaagggaaggctccatatttgagtgttttaacacatggatttgtattggatgagaaaggcttaaaaatgagcaagtctttgggtaatgttgtggatccacgtttagtgattgaaggaagtaaaaatcaaagggaatcacctgcatatggagctgatgtcctccgactctgggtttctagtgtagattatacaagtgatgtgatgattggcccacagattcttcggcaaatgtctgaggtttacagaaagttgcgaggaactttgagatacctcttggcaaatcttcatgattggaaaacagaatacactgttccataccatgaacttccgaggatcgatcaacatgcactttttcagcttgaaaatgttgtaaaagccattcaaggaaattatgaaaattaccagttttttaaaatatttcagattttgcagaggtttgttattgttgacctgtcaaatttctattttgatgttgccaaggatcgactttatgttggtggatcaacaagttatacgaggaaaagttgccaaacagttcttgcagctcatctcctttccattgtgagaataatagcaccaatattgccccatttagctgaggatgtgtggcagaatcttccttttcagtatataactcaagatggttctattgctgaatatgtatttgaatctagatggcccatctcgaatgaaagaaggcttgccctccctgttgaagaaattaatttctgggagaatattcttgagctgagaacagaagtaaatagagtcttggaagttgctcgaacaggcaaactaattggggccagtttagatgcaagggttcatatctatacatctgatgcccgcctggcatcccaattatgtgaactaagtgcagccaaaaatgatgctgatacattgaggcgtctactcataacatctcaggctgagattcttccctcattggacgacgaacaaattgtaaatataccatatagtggtgaatgcctaattcaagggaagaacaaaatctggattggcatatctcgtgctgtgggttccaagtgtgaaagatgctggaattattcagagcaggttggttcatttttggaccaccctaccctctgcagccgctgccacgatgttgttgctgttcagatgccccctcaagtagcagcagtcagttaaattttagaagcaaagtttgaattccaaaatatcattttttgttcactactgtctggcattatgtattaaaaaataaaaataacttgtatgccactgagtt

SEQ ID NO: 29993 - DNA, 700 bp, Glycine max
  Clone ID: UC-GMROPIC058H06_FLI
gggcagagggttctcagtgtccagtattccattccagacaatgttcaagtatctcctgagtgtcgccaccttatctcaaggatctttgtttttgaccctgcagagagaatcactattcctgaaatattgcaaaatgaatggtttctgaaaaatcttcctccttacttgatggatgaaaagatcatgggtaaccaatttgtagaatcagatcagcccatgcagaacattgatacgatcatgcagataatttcagaagccaccataccagctgcggggacctattctttagaccagtttatggctgataacataatagatgatgacatggatgaattagactctgactttgagcttgatgtagatagcagtggggagatagtgtatgccatataatttaatcatcgtctgcattttagagacagcataatgaatggacagcatcttaatattcaacagggcaatctcccttaatttaatcaaggaaagagaaagtgtggagatcgtatttcctgtaagattggatgatacacaaagttcatcatgttaatttgtatgttgtatacttcgtgaactgccgagggaaggaacatgattcttacactcagaagggttggtggctgagaaatcataattaccctttcctcttttcctgttgaatacttgttttatatcatatatatacactagcctttttgttgtc

SEQ ID NO: 29994 - DNA, 388 bp, Glycine max
  Clone ID: UC-GMROPIC059B01_FLI
gtggtgatgtttggttcccacagccagctccaaaggatcatccatggcgttacatgccaaaccatgccatgactcctcatatttctggcaccaccatagatgcacagttacgttatgctgctggggtcaaagacatgcttgataggcacttcaagggtgaagactttccagaacaaaactacattgtcaaggagggtcaacttgcaagccaataccggtgaagtagtgtgtgtcaatgtggcctttgaatcttccatttttaaggccaatcgatgagcaaataaatatctagaaggcactttaattatgtaatgtacttgctttgttgtgtctgaactcgtttaattgatctcagaaataaaattttaaggaacactctccatgttcc

SEQ ID NO: 29995 - DNA, 951 bp, Glycine max
  Clone ID: UC-GMROPIC059B10_FLI
atttggcatcaacaatcaacaatcaacaatcacaaatagaaactcactctttcgaaaaaaccagaatttgaatatgacgttagggtttgagggttatagttataccacaacacttggaaggaagagggtcgtgttattacacaatgaagcttcttctctcaactctaattcggcggtgaatccattgaagagaatgtgcagcggaaaattcacttttgactctgaaaggtctcgccttgaggcccttcctcttgatgttctgattagggtgttgtgtggtgtcgatcatgaagatttggagcaacttgttcgtgtctcaaaaactgttagagaagcggctgagattgctaggagaatgcattttgagtatagcactccaaagaagaaaacttttgctcttcctaaaccgtttgatatagagggtgctggtgggtttgaggaaattgatactccaaatgccccattgaggaaacctaagtcaaagctgattggaaagaatctggctagcatctcagtggcattgttcgcttccgctaattaagaagaacagtgactggacaaggaaaaagaagcaacttgtgatggcacggacaatttctcttgttttgggtagttctgtgaacagatagtattaatttgttatgtgtatattagttggtacttggtagattagagagggacttgatacatacttagaagatctcactagctgatttcacacgttttgaaatagtctttacaagctaaatcttcttcaattccttcattgaagattgctttgacttgtttgcaatctttctgtatatctataggacaagtagaaagtgggataggttatagatgattatttggagggaaatccttggcccttctagtgtgataaatttaactgtgcacagtccattaagcatagttttgtgcttctctaataaaatgagtaaagtttccgct

SEQ ID NO: 29996 - DNA, 1247 bp, Glycine max
  Clone ID: UC-GMROPIC059D01_FLI
aaaccctactcattctccatacctcaacgaagaggttaaagagacggcaacactttgctgtccgccttgaccgagcagagcttcgtcttggccctcgattttgccctaaagtactcccagtcacaacagacaccgtcgtcgtcgtcgtcatcatcaatggcaccgaagcagaccaaggctgagaagaagatcgcttacgatgcgaagctgtgcgacctaacggaggagtacggccagatcctcgttgtgaactccgataacgtgggatcgaaccagctccagaacattcgcaagggtctccgtggcgactccgtcgtcctcatggggaagaacaccatgatgaagcgctcagtcaggatgcacgctgagaaaaccggaaacaacgcctatctcaaccttatcccgctccttgttggcaatgtgggattgattttcaccaaaggtgacctgaaggaggtcagtgaggaggttgccaagtacaaggttggagctcctgctcgtgttggtttggttgccccaattgatgttgttgttcctcttggcaacacagggctcgatccctcccagacctctttcttccaggtgctcaacattcctaccaagattaacaagggtactgttgaaatcattacccctgtggagctcattaagaagggagacaaggttggatcttctgaagctgcattgcttgccaagctagggataaggcccttctcgtatgggcttgtggttctttctgtttatgataatggttcagtgttcagccctgaggttcttgatcttactgaggatgaccttattgagaagtttgctgctggtgtctcaatggttacttcactttcattagctatctcatacccaacacttgctgctgcaccacacatgtttgtcaatgcctacaagaatgttcttgctgttgcggttgagacagattattctttccctgaggcagacaaggtcaaggagtatctgaaggatccaagtaaatttgctgtcgctgctgttgcggctcctgctgctgagtctggtgctcctgctgcagccaaggaagaggaaaagaaggaagaaccagctgaagaatctgatgatgacatgggtttcagtctgtttgactaatttatgtaatgcttttgttgagtttatttggttagaattgaagttgtgtttgcctttcatttcaggtgttattttagtgtattcatgttacattgcaactacttttaatttccatagttaattaaagcttc

SEQ ID NO: 29997 - DNA, 1820 bp, Glycine max
  Clone ID: UC-GMROPIC059E01_FLI
aacactgacagacagcatagtctctggtgcaagaatcaattgagcaagcatgggaatgttgttggtggtggtgtcatacgctgtccttttcctggttctattcctcggcgtgaagtttgttttccaaagcagaaaattgagaaacataccaccaggtcctcctcctcttcccataataggaaaccttaacctcctcgaacagccaatccaccgtttcttccaacgcatgtcgaaacagtacggcaacgtggtttccctctggttcggttcacgtctggccgttgtcatctcctctccaacagcataccaagaatgcttcaccaaacacgacgttgccttggccaaccggctaccttctctctcgggaaaatacatcttctacaacaacaccaccgtaggctcctgctcccacggcgagcactggcgcaacctccgccgcatcaccgccctggacgtcctctccacgcagcgcgtccactccttctccggaatccggagcgacgagacgaagcgtctgatgcagaggttggtgctggccaagaactcgaacgaggaagagtttgcgcgagtggagattagttcgatgttcaacgacttaacttacaacaacataatgaggatgatatcggggaagaggttttacggagaggagagtgagatgaagaacgttgaggaagcgagggagttcagagagactgtgacagaaatgttggaactcatgggcttggctaacaagggagatcacttgcctttcctcaggtggttcgattttcagaatgtggagaagcgcttgaagagtatcagtaagaggtacgattccatcttgaataagatccttcatgagaaccgtgccagcaatgaccgccagaattccatgatcgatcatctcctcaaactgcaagagacccagcctcagtactacactgaccaaatcatcaaaggccttgctctggccatgctttttggtggaactgactcatcaactgggactttagagtggtcattatctaatttattgaatcacccagaggtgttgaagaaggcaagagatgaattggacactcaagtgggacaagaccgcttgttaaatgagtcagaccttccaaaacttccatatcttaggaagatcatccttgagacacttaggttgtaccccccggccccaattctaatacctcatgtgtcttcagaagatattacaattgaaggattcaatatcccacgagacacaattgtgatcattaatggttggggcatgcagagagatcctcagttgtggaatgatgccacatgctttaaacctgagaggtttgatgtggaaggagaggagaaaaagttggtagcatttggcatgggaagaagggcttgcccaggagaacccatggctatgcaaagtgtcagctttactttgggattgttgattcaatgttttgactggaaacgagtaagtgaggaaaagcttgatatgacagagaacaattggatcaccttgtcaaggttaattccattggaggccatgtgcaaggctcgcccacttgccactaaaattggaatttaattattaatagtatttttatttggtaaacttgggtgattcagaatctaatacttataattttagtgtgtaagagtggtgatcatatatacatttcaaaattaataatctttgtccaaaaatcatccatggacaactatatgtcaattgacatctagagagaaatatagatataagaatatttatattttattactcttctttatcttatgtgtcaaggcccattgtagaattgggtgagcattaacatatatcaatattgtat

SEQ ID NO: 29998 - DNA, 1744 bp, Glycine max
  Clone ID: UC-GMROPIC060A12_FLI
taaaaataaaaatcattgtaactcatgtctaataatgcactaataactctgtaacaccaccttcataattccgattccagttcaaagcgactcaagcacttgttcgactcttttatcctacgcactcctccctgcttatcctgcgcatctttcacctagatcctccccttcactccttcactttcctatttcagtgggaaagaatcatgagttgtttcagctgttgcgaagaggatgacctccataaggctgctgaaagtggaggaccctatgttgtaaaaaatccagcagggaatgatggaaattatcatgcttctcaaactgcaaagcagggcactcagcctgttaaacctcagcccattgaagttcctaatatatcagcagatgaactgaaagaagttacggataactttggtcaagattctctgattggagagggatcctatggaagagtatattatggtgttcttaaaagtgggcaggctgcagcaatcaagaatttggatgccagtaaacagcctgatgaggaatttttagcccaggtttcaatggtatcaaggctgaagcatgaaaattttgttcagttgcttggatattgcattgatggaacctcccgtattcttgcttatcagtttgcatctaatgggtctcttcatgatattttacacggcagaaaaggtgttaaaggagcacagcctggtccagttttgacatgggcacaaagagtaaaaattgctgtaggggctgcaagaggacttgaatacttgcatgagaaggctgatccacacattattcaccgggacatcaagtcaagcaatgtgctaatctttgatgatgatgttgctaaaattgcagattttgatttatcaaatcaggctcccgacatggctgcacgtcttcattctactcgtgtccttggaacctttggttatcatgctccggaatatgcaatgactggacaattgaatgctaagagtgatgtatacagttttggcgttgtccttctggaacttctgactggaaggaaacccgttgatcatacactaccacgtggacaacagagtctggttacttgggctacaccaaaactcagtgaggataaagtcaggcagtgtgttgatacaagactaggaggagaatacccacccaaagctgttgctaagatggccgctgttgctgcactgtgtgtgcaatatgaagctgatttcagaccaaacatgagcattgtagtcaaagctcttcaacctttgttgactgcacgacctggacctgccggtgaaacaccaaattaatctttgtatcactttctctctatatttgtgagtatgtgcacaagtgtgcatgcaaaatataagagactgcttcagaagctggtggtaaattgctcagacatgactctatatcccattgtttacactgcattcattttgttcataatccatgaggttctttgcggttttcttgcttttattcattttattgtatttgctttctctattttttcccccttctatccttttacttctgggatgattgtcatctttacgatgaagtgttgggaaaaactacaaaacagaattgtgtatactcaaagctaagagcaagtcaatggactatctctactggaaacagttattcaccaagagccgttcttatcagattgattcttttaattttttcttaaactgtttgtcaaattgagacttgtataaattactcataatttcaattccaatgttttagg

SEQ ID NO: 29999 - DNA, 1122 bp, Glycine max
  Clone ID: UC-GMROPIC061A01_FLI
tctcttcttcccccaacaaactaaaccaaaccaaaccataccattaagaaacaacacatctatctcagtccccaaaccaagaaaccctaaattaaattcatgtgctcctccgggtctaccagtgctgcaccaacaagaccttgttacttggaacaaggccacggcttggcttccttaaaacacatggatgcgtgtcataatcgtgccaacaactttgtctctaggtccatgaccatgggttacggcacttcctaccacagaactagtttaaggaacaacaacaacaacaacaacaacaacgtttctgtttcttcaccaagatctgcgagattctacgacgccagattcgaagatcaacaccacccccacttcctctccgcttgtttcctctgcaaaaaatctctcggggacaatagagacatcttcatgtatagaggggacacaccgttttgtagcgaagagtgcaggcaagagcagattgagatagacgaagccaaagagaagaataggaacctttcttcatcgatgaaagctttaaggaacaaggagcagagaaataataataataaatccacgtcgccaaacaaggcgcaacaagactactcgttccgtacgggggcagttgcggcggcgtagggtacaagtacaacgtaggattcctcgagagaggaaccaacaaatgaacgaacggaactgagggcagtgttcccggaaaaggaaagaaaacatttttagaaaagaagaaaaaaaaaagtgtgactgaaaaggaaagtaaacaaagggaagttaagttgcgagctttggtttacttctcttcttttttttctttctttctttctttccacgaacaaagggtctcaaagagaaaggggaattttgtgagctgtgaatggtatacgtgtggcaaagtgtgtgtgcttacaacagtgggagattctctctgccaaatgactcaaaattttcgggtttgcttttttttttctttttcttttattttttatggggatcaaatttggttttgtttccttttgtatatcaccctacctcgttgagttatagtggttgtgctaatagtttcagtttttcaaaaaacggaaactgaatacaatggaaattttctct

SEQ ID NO: 30000 - DNA, 961 bp, Glycine max
  Clone ID: UC-GMROPIC061B05_FLI
gagagctagtatggtggctgcttgtcttcagcaagttttgggtatggggaagaagaggcagctagggaaagacatgcctaatggttttctacatagccttctctatggaaagaaaattttggtggttgatgacaatggggtaaaccggagggttgcagcaggtgcactaaagaagtttggagctgatgtgaagtgtgctgaaagtggcaaagtctcttgaaatgctgcaattgcctcacaattttgatgcttgcttcatggacatccaaatgccagaaatggacggatttgaagcaactagtagaattcggatgatggagagcaaggcaaatgaggagatgaatggcagtgagtggcatgtacctatactggccatgacagctgatgtgatccttgctacgtacgacaagtgcgtgaaatgtggcatggatggatacgtctcaaagccatttgaggaagagaatctgtatcaggaagttgcaaagtttttcaaatccaagaccatctcagactcatgacaatgtgctttgaacttggcaaccaactagaagattgattggagacaacacattttagtttttttattttatcattactagcactttcacatgtcacttgtaactagttacttatgcatgctctcatgcctagagtaatgcttgttttcctaacatctttgagttgagttcgttgagggatccttacaattaccaaccggctgcgtttggcattattagagtaaatggtataccacgctacaccccccaattgtgtacagattttgggtaagggatgagtgaaattatgtaaattcaatgtttttccccatctcgttacttccccatcagaaggtttttatagcaatagctttttgtgtaaaggcatcttgtattgtaatagatttggtcattatgttaaaaaatgcatgcttatgtgtagtgtagcatatctttggtgcatg

SEQ ID NO: 30001 - DNA, 1234 bp, Glycine max
  Clone ID: UC-GMROPIC061C09_FLI
atcatggtgtttttttttcccctaaaaattaattgtcaggttctttccatgttgttggacaggaatatgaacgttgacatagtgaatcacaataatcagaccccgttgatgtatgctgcaaagcagggaaagattgattgtgttaaaaagcttatccaggctggagcaaatgtattcatgattgattctgtacatggaggaggttgcttgcacgatgcagcttctcatggccacgtagattgccttaaagccattctttttgctgctcatttcacagcttttgaagattctcggggatatttaagatttgtcgactcgagagattttaacggttttgccccactgcatcttgcagccctcaaaggacaatctgaatgtgttgatgcccttttagacaatgatgctattctttgtgctagaactagtaactgtggaggcacagcacttcatttggctgcccgcagtggttccttggactgtatccggattttgcttgctcggggagctgatagacttcaatttgattatcatgggaatacaccatacacaattgccctggagcacgggcaggaggaatgtgctgccctgctaggttctacgtcgggatcatcacttgtttggccaaaccatttaaggttcatcagagagcttgataagaaaacaaaggccttactggaaaaggccttggtagaacttaacaaggagaggcagaaagccaaaaataagccacgatcatcacggaattcggagagaaataacaataatattgcctctatggccggcaaaaaggagttatgttccatttgctatgaccgagtgtgcacatttgtggtcagaccctgtggccatgaaatgtgtgctcattgtatcatgaggctatgccaaaagaaaagtgatattgatgcacctcgctcttctaattctaaaccagtttgtccattttgccgtggtgacattgttcggttacttgctaagactaagtaacaagagcagtgaatcaagggaggagtgaggaaccttgaagactaattaactactgtattttttcatgaaggcatcaaggtttcttaataggtggagatttagaatgatacacatgctatgtatttctgctgagagattattaggtcgtatattgaaataaaatttaaatgttatataagcattggctgtgactattaatatagagaacctaacagtattttcttttgtcacatcaatttatattttcaac

SEQ ID NO: 30002 - DNA, 1203 bp, Glycine max
  Clone ID: UC-GMROPIC061G02_FLI
taacttagccaacatggagtttctcccacctggttttcgattctacccaacagaggaagaattagttgtcttctatctacacaaccagctagaaggccaaatacacgacacaagcagagtcattccagtcactgacatcaatggcgtagagccatggaaccttccaagtactaccaccactttaattttgttactattcattctttgctgctaaaatatatagtttggtttgtgttgttgtaatcagcacttgcaggggagttttgtcgtggagacacggagcaatggtttttcttttcacctagacaagagagagaggccagaggaggcagacccaacagaaccacggcaagtgggtattggaaggccacgggttcccctggccatgtttactcttctgacaacaaagtcattgggatgaagaaaaccatggtgttttacaaagggaaagctcccaccggaaggaaaaccaaatggaagatgcatcaatacaaagccattgaacactctcaccaatccaacactgcccctcccaagttgaggcacgaattcagcttgtgtcgtgtgtacgtgatatcgggaagctttcgatcgtttgatcgacgcccactggagatgccaagaattgagctacgagttgatggggacagaggtgctgcttcaacaagtactcaacagagagcagcagtggtggatggattaagttcttctgatacttcttcccactctggaggaggaagagggggttctcatatctcagaggctggagcagggtcaagtggaaccaattggaatgcaagtaatagtagggttgaggaaccactttgggaatgggaacaacttaattggccatgacccaaaagtcaagaacatgcttcaacctagcaagactttattaattgagaaacatatcgtttacatcaatttaatctaagttggaaaaagcagggcgagaaattgattaattaatcatctaaattgtaggcgtagttgggtataacttccttcacctttaaggggcaagcaatgtaatgtaacataatctttactatttgttgtttagcataggattgatttttcccaggaaaataagttgggaataagatccaaacataaaaaggaaggtggcgtggatcttgtaattttgttttagtgacttgttgtcttgtaacgataatcaatcaatctccttttcaccccttg

SEQ ID NO: 30003 - DNA, 238 bp, Glycine max
  Clone ID: UC-GMROPIC062G04_FLI
attgccctttctcatcatggcaatggaggaattggcaggcgaaccatgaggagcacgctcaatttcagagatgcttttggaattatagaccatgggtccgattaagttattgtaccttaaataattattacttgatgataaaattttgaacaacgaaaactttggtaactatagacatcaggctactcatgatgtctatagttaccaaagtttgcttttatgaatagacccatggctc

SEQ ID NO: 30004 - DNA, 940 bp, Glycine max
  Clone ID: UC-GMROPIC062G11_FLI
cgtcatcataaattcatatatcatcagcctcagccatgtcttcttcgctcttgcacctcctcttccttccacaactacgatcttcgatagtgctttctcagattcttccttcgtggtaaccggtcgaatcatggagcccatggacattgttggcaagtcaaaggaagacgcttcgcttcctaaagcaacaatgacaaaaattattaaagagatgttacccccagatgtacgtgttgcaagagatgcccaagatctattgattgagtgttgtgtagagtttataaaccttgtctcgtcagaatccaatgaagtttgtaacagagaggataaacggacaattgcacctgagcatgtattgaaggctctacaggttcttggatttggtgagtatgttgaagaagtttatgcagcatatgaacagcacaagctggagaccatgcaggactctttaaggggtggtggtaaatggagcaatggagctgagatgactgaggaagaagcattagcagagcagcaaaggatgtttgcagaggcgcgtgctaggatgaacggtggagccattgcttccaagcagccagatgctgaccaaagtttagatagctaactttaggatcttcattgaagcatagacaaagcaccaccctgactcctgtctgtgcttccaatgagctcgatggtgtacaaaaaccattcactagtttgctggcccatgtggatgtgctcatttgtattctttcgataaatccatatttgtaagtcaatgtaattagtgagagatcatgaaaaccctcccgtttagcatttacttgtaattatttaatttacgtttttgtatcttctacatactaacaactcctagcttgattctgacagtagctactatgttagattgtaacaaattattaaatatgtagaagcaatagtgctctgtttatttgtt

SEQ ID NO: 30005 - DNA, 517 bp, Glycine max
  Clone ID: UC-GMROPIC063E04_FLI
accaagcacaaactccttctagcccttctccagccggtgctgtcactcctcccccacagaactctggtgctgcatctcttggagttgttggagtatttgccaccctgctttcagttgccgaacccaggtatcaaactggttcattaatgccagggttcggttgtggaaacccatggtggaagaaatgtaccaacaagaacttaaagaagcagagagtgcagaagacagagaaaacaacaacagcaacattagtggcaaccaagcacaaactccttctagcccttctccagccggtgctgtcactcctcccccacagaactctggtgctgcatctcttggagttgttggagtatttgccaccctgctttcagttgccgccacttttttctattagatactccacgagattattctagtcaggagcttgcgagtcatcatcatcgctctttgattgtgtttcatgaattcagtttttttcttatttttttgaggatgacaataaagttagctttaattt

SEQ ID NO: 30006 - DNA, 1219 bp, Glycine max
  Clone ID: UC-GMROPIC063E09_FLI
agaaaatctgaagaaaaggaaaggggaaaaagatgaaaatgctctgataatctcttagtcttgccaggctagtaaagtctcaatcatttcccagtttttaatttcaaatgttttccccaaaacataaggatttctagtctctgattttctgactgatgagttgctgttgaaatatcaggaggttgctgtgaagaaatttttggatcaggatttttcaggcgctgcattatcagaattcaaaagagaagtgcggataatgcgtaggctacgtcatccaaatattgttctttttatgggtgctgttactcgtcctcccaatctgtcaatcatttcagagtatctaccaagaggaagcttgtaccgaattcttcatcgccctaattgtcagattgatgagaaacgaagaataaaaatggctctggatgtggctaggggcatgaattgcttacacaccagcacacctacaattgttcatcgagatctaaagtctccaaatcttttggttgataagaactggaatgttaaggtatgtgattttgggttgtcacggttgaagcacaacacttttttgtcatccaagtcaactgctggaacgccggaatggatggctcctgaagttctccgcaatgagccctcaaatgagaaatgcgatgtttatagttttggagtcatcttatgggagcttgccactctaaggttgccgtggagtggaatgaatcctatgcaagttgttggtgccgttggtttccaaaaccgcagacttgatattcctaaggaagtcgatcctatagttgcaagaataatctgggagtgttggcaacaggatccaaatttgcggccctcgtttgcgcaactcacagtggctctaaagcctctacagcgtctggttatcccatcttatcaagatcagttagctccacctatgccgcaggagatttctgtaaattccaccccctgaaatgtctcgcttcaagtgtgaataattagaggcattttgcatagttatgtgcgtataaaggtaacatgaacacaataaaaggggaaaaaaaatatcaaaacttgtaacggcaaatgtttgtgttgaggaaaatatcaactgctactgcaaccaaacaactgcagagccattttgtatttgtgatgataggttgtccgaggaaccaaaactcggtaatgtgtaaattactgtacttgaaagcaaaaaagtatatacttttgc

SEQ ID NO: 30007 - DNA, 2777 bp, Glycine max
  Clone ID: UC-GMROPIC063F04_FLI
gctgattcgcaaaaattttgatatagagaatgagacaaatgttgctgagaaaccactggtactgcctatatacaatatcagcattacaaataatgtcttggagattcggttctactgggctggaaaaggaactactagaattccggatgttggagtttatggtctccttgtatcagctttttctgtggtttcaagtgagtactaccccccattgcaagatgagtgtaaatttattttgttaaatttgaagtgtttcaccatcatgttactattaagtacagctgcatatacaaatacaactgctactattaaaaaaagaatgctcttaaagaaagagaacctcatgaaatagtagttctattctcattttctatttggtatgtttgtttttgtttcttgaatagcacttttcatatgcctttcttgatcttgttagcaggatcagatgcagtgtctatttcttatcactttttagttagcattccttatactcaatatcatttatacagatgttaattgcagatgagatttaatagttttgacgccaatctttattatggctggtgctgtataaaaatcagtgtgattccttgctgtgctttgtacagattctagagtttgctcaaatggagaaaagaaagtttctgtttctataataattgcaattgtagttggtgctctatgcttagtgctgtttacatctggattcatttggtggaagtggaaaggctttttcagagggaaactgcgaagggcaggtgaagtcattttattatactttgaaagttgtacacagcaaagtttccattcgggagtgagaataaaagtttgcactgcctaattatatcgttttcaagcaatattttctgcagatctgatcagatttgaggcttttgtttatagttggaacttagataactgttgattaatacaaatttctcttggcttacatggacaggtacaaaagatagagatactcaggcaggcaattttagcttggagcagatcagagttgctactgatgacttctcttctgctaataagattggggaaggtggttttggtcctgtatacaagggtcaattgctagatggtacttttatagcggtcaagcaactgtcatcaaaatcacggcagggaaatcgtgaatttataaatgaaataggcttgatatcttgtgtgcaacaccctaaccttgtaaagctttatggatactgtgctgaaggagaacaactcttgctggtatatgagtacttggaaaataacagccttgcccgagttttatttggtgcgtcattacttgtccatgaatttcttcatatctcatgtgtgaagtggtcatatgagaaactcaaaaagaataaatcagatattagtggtttaacttgattttttttttttgttaattttctcaaacaacttgacaagatgaaaatagtttttttatcctttttttaacaaccctataattgctctaaaatggattgccctggtataatcctctaaaatggattgtcaatgctcatgccctgatataatttcatttcttgattgttagaagggtgagtaaaagtttttaatatgatttgaatcaaataagcagctgtaatggcccttgatgtttataggtagtgaaaacaagcagcttaaattggactggcccacgaggtttaggatttgcattggcatagcaaaaggtttagcatttctacatgatgagtcaagattcaagatagttcacagagatatcaaggcttctaatgtgttactcgatgacaaattgaatccaaagatatctgactttggcttggctaagcttgatgaagcagagaagacgcatatcagcacccgagttgctgggactataggatatatggcaccagaatatgcattatggggctaccttactgacaaggctgatgtttacagttttggagttgtggcattagaaattgttagtgggaaaagcaataacaattatttaccagatgatggaagtgtttgtcttttggatcgggcatgtcagttaaaccaaactcggaacttgatggagctgattgatgaaaggttggggccagaccttaataaaatggaagtagaaaaggtggtcaaaataggtctcctgtgctcaaatgcttctccaacacttaggcctacaatgtctgaagtagtgaatatgcttgaaggacatgcagatattcctgatgtaatcccagaaccaagtacctacaatgatgatttaaggttcaaagccttaaggaatctccatcaatatcaatcaaaacagagtttgagtggaaaccagagccagagttcaatgacacatacattcacctcagcatctggtggtaatactcacactactagttatattgaggatcatagttcagttgacagtagttagttttctcctttcaccaacttgacgcactttaccagatagcagtggtagctccagatcttagggcttgaaaattttgaccagcatggaaccttctattttcacttgtgtagttttctgctttctgaagaggtctccaaaggagtatgagaagatttttcctttcttccttatgtcacccttatttgatttgattttactttttttgtttctttaatgtacaaatatattgctacaaataaagcaatctctaaatcataaatttaggttacttctttatttatttctatgtgtatccatataacggaagttcaattcatacctgatgtaaaatattataataaattataaattagattgtgtatgtttcaaacgg

SEQ ID NO: 30008 - DNA, 925 bp, Glycine max
  Clone ID: UC-GMROPIC063F07_FLI
gaaacatggcttccttaagctccttagtgctgctccttgcagctctaattctatcccctcaagttcttgcaaactatgagaatcccccagtgtacaagcctcccactgagaaaccaccagtttataagcccccagttgagaagcctcctgtttacaaacctccagttgaaaaccccccaatttataagcctccagtagagaagccaccagtgtacaagcccccagttgagaaacccccagtgtacaagcccccagttgaaaaaccaccagtgtacaagcccccagttgagaaaccaccagtgtacaagcccccagttgagaagcccccagtttacaagcccccagttgaaaaacccccagtgtacaagcccccagttgaaaaaccaccagtgtacaagcccccagttgagaagcccccagtttacaagcccccagttgagaagccaccagtttacaagcccccagttgagaagccaccagtatacaagcccccagttgagaagcctccagtgtacaagccaccagtagagaagcctccagtttacaagccaccagtagagaaacctccagtttacaagcccccagtggagaaacctcctatttacaagccccctgttgagaagcctccggtctacaagcccccatatggaaagcccccatacccaaagtaccctccaactgatgacacccatttctgaaggatgtcaagaggtgtattgagtatatgctaaataagaggtgctcaaaatgtagttatagattacaaattattgcaagggttgctcttagcttcttcatttcaagcttttgtttacactttgcagtgctatggcaaagataagagtatcatggatggaaaaagggggggaaaaatgttgctttgtactccaaattatgaataatagaactttatattatttatcag

SEQ ID NO: 30009 - DNA, 1191 bp, Glycine max
  Clone ID: UC-GMROPIC064A01_FLI
cttatgttggccatccaaatccgttaaaagaaggtcaagatctattcagaaaaggacttttaagtgaagcagttctagcattggaagctgaagtcctaaaaaaccctgagaatgctgaagggtggagactgcttggaatagcacatgcagagaatgatgatgatcaacaggctattgcagcaatgatgcgtgcacaagaggctgacccgacaaacctggaagtgcttcttgctcttggtgttagtcatacaaatgaactggagcaaacagctgctctgaagtatctatatggatggttgcgccatcacccaaaatatggaacacttgccccgcctgagatggctgattctttgtactatgccgatgtagctaggttattcaatgatgcagctgaactctcacctgatgatgcagatgtccacatagttctaggggtcatgtacaacttatccagagaatatgacaaagccattgcatcttttgaaagagcactgaaacttaagccacaggattactctctatggaacaagctgggtgcaacacaagcaaacagtgttcaaagtgctgatgcaataatggcttatcaacaggcgctggatttaaagcctaattatgtccgtgcttgggcaaatatgggcatcagttatgcaaaccagggtatgtatgacgagtccgttcgttattatgttcgagcacttgccatgaatccaaaagcagagaatgcatggcaatatttgagaatttcgttgagctgtgcttctaggaatgacatgttggaagcttgtgatagtcgtaatttggaccttctccagaaggagttccactacagtaaggcttgcagtagatgcctgcttctatagaaatttcttggagaactaaaaggccgatcaagtgattaagcctgctggtgaatacgaggcattattctatcaatcttggaacatatggtgtatatcatgaagtacatcaacctacactggttttaggcactgttacagactccatttcttgatgttacaaaagctatttatcatagaacagctgcagtagtaaagttaagggattgtggctttccattataaagttgagtttattgtgtatgtacatatatatacaagtatacaagattagtcgcatatcatgtatctaatttgctatattattacttgataatatattatcctataactt

SEQ ID NO: 30010 - DNA, 2654 bp, Glycine max
  Clone ID: UC-GMROPIC064A05_FLI
ccagttttctggttctgttccctctagggtttggtctttgagtgctctcaggtctctggatttgtctgataacttgttggagggagagattcctaaggggattgaggcgatgaagaatttaaggagtgttagcgtggcgaggaaccggttgactgggaatgttccttatgggtttggaagttgtttgcttttgaggtccattgatttaggggacaattctttttctgggagtattcctggtgattttaaggaacttacattgtgtggttacattagcttgcgcgggaatgctttctcgggaggggttcctcagtggattggggagatgagagggcttgagacgttggacctttcaaacaatgggtttaccggtcaggtgccaagctctattggaaatcttcagtcgttgaagatgctgaatttttctggaaatggtctcactggtagtctgccggagtctatggcaaattgtacgaaacttttggtgttggatgtcagccggaactcaatgtcggggtggcttccgttgtgggttttcaagtcagatttggacaaggttttggtgtcagaaaatgtacagagtgggagcaagaaaagccctttgtttgccatggctgaacttgccgttcaaagtcttcaagttttggatttgtctcacaatgcattttctggtgaaatcacgtctgctgttggagggttaagcagcttgcaggttttgaatttggcaaataactctctgggaggtcctataccacctgccgttggtgagttgaaaacatgttcgagtcttgatttgagctataataagctgaatggaagcataccctgggaaataggaggagctgtgtccttgaaagaacttgtactggaaaagaacttcctaaatgggaaaattccaacgtcaattgagaactgctctttgctaacaactttgattctgtcacagaacaagctgagtggtccaatacctgcagcagttgcaaaacttaccaacctacaaactgtggatgtatcgtttaacaatcttactggagcccttcctaagcaattggctaaccttgccaatcttcttaccttcaatttatctcataacaaccttcagggtgaactgccggctggtggttttttcaacaccattacgccttcctctgtttctggcaatccatctctttgtggcgctgcagtaaacaaatcatgccctgctgttctcccaaagcctattgttctaaatcccaacacttctactgacaccggccctagttcattgcctccaaatttgggtcacaaaagaatcattctcagcatttctgcactcattgccattggtgcagcagctgtcattgtaattggtgttataagcatcacagttctcaatctccgtgttcgctcctctacatctcgtgatgcagctgccctcacattttctgcaggggacgaattcagccattccccaactacagatgctaactctggcaagcttgtcatgttttcaggtgagcctgatttcagttctggtgctcatgctttgcttaataaggattgtgagcttggacgtggaggatttggagcagtgtaccaaacagttcttagagatggacattcagttgccataaagaagctcacagtatcaagccttgtcaagtctcaagaagattttgaaagagaagtgaagaaattaggaaaaatcagacaccaaaacctcgttgaacttgagggttattattggactccatcactgcagctcctcatatatgagtatctctctggtggtagtctctataagcatctccatgaaggatctggtggaaatttcctctcatggaacgagaggtttaatgtgattctcggaaccgcaaaggccttggcacacttgcaccattccaacattattcactataacattaagtcaaccaacgtccttcttgatagttatggtgaaccaaaagtaggggactttggcctggcaagactgctgccaatgcttgatcgatacgttttgagcagcaaaattcaaagcgcactcggctacatggcaccagagtttgcctgcaagacggtgaaaatcaccgagaaatgtgatgtatatgggttcggtgtcttggtcttggagattgttacagggaagaggccggttgaatacatggaggatgatgtggtggtactttgcgacatggtgagaggggctttggaagagggcagggtggaggaatgcattgatgagaggctccaagggaagttcccagcagaagaagctattcctgtgatgaagttaggcttaatatgtacttctcaggtgccatctaacaggcctgacatgggagaggtagttaacatattggagctgataagatgtccctctgaaggacaagaagaattggcatgaattaacttgcgattttctttattaggaggatagacaatgggttgtccggggaagaagaatccggttttatttattataagagagagaggaattattttgttgcaaaatgtttactttttcattgtattttttcccttgttaattagtctctagttgtttgttttaagatttctcgtgttatgctactacacctaggatgccggattccttttcaccgggttccgttttggacccccccttgaaaattgttgctgaattactgatctttcat

SEQ ID NO: 30011 - DNA, 1406 bp, Glycine max
  Clone ID: UC-GMROPIC064C11_FLI
tctgttcaggggtaaaagtgaacttgaacaacttgataagatttttcgaaccctgggtacgcctgatgagaaaatttggccaggattatccaaattacctggggctaaagcaaattttgttaagcaactgtttaatacactaaggaagaagtttccagctgcgtcgtttattggtttgccagttttatctgagcttggatttgacttgttgcagcagctgctaacttatgaccctgaaaagaggataacagcagaagatgctctccttcatgattggttccatgaagcccctcttcccaaatctgatttcaagccaatttttccttcttggcagtgataggacaggactatttagtaatagatgatggatttttgctctggaaatgctcctgaaaattttggcttcattgatgcacaagcattggtagctgttggatgtgtagaaaaataaatcaattgcaaggaatattcattttgagcatggtcagcaggtaatgatgttaggtttctcaatttgaaagtggttccctgaaataaaatgatagtgttgttggcttttattaataatgtctcttttttcacacttccatattatgttgctcaacaaaataaaaggatctaaattcttttttactgtacaagttcaatttgaaacttttgatatacagtaactgtcagcaagataacgtgatgtaatcttcatggttatgctatcgagttttgttccttttttgcctacatttaatttttacaccaggaaatgctcttttaaaaattttgggtgcattgatgtgccaagcattgatagttgttggacttgtagaaaaataaatcaattgcaagcaatactcattttcaacatggtcaacaggtaaacaatcgtaggtttttcattttgaaagttggtccttgaaataaaatgatgtatgcccctttaccgaaatatgaatttttaaattaaccagaggtggaattatgagtttaggcagtggattgcatgttgaactatggtgaagcagggtttagaagcgcttgtggagctgctgagaaaagagacacaggctgttacatagatggcgaagtccaccaagggtgctgaagtgaaatttgcgctcaatttgtgccttcttaacactgcaattggtgtaataatttgatgaagttcaagggaagtagcctcttgtaatgaggagatttttgttttttgtattgaaaatcctgtggtgatgaataatttatatcccttaattacagtggggtcttgtggaggctggtgaagaaatattgaagctatggagtactattttgttcgtttgaacaagacgtatatgatttgattttgtgtataattctaataattcagaatccaacagaaatctaccatccccccatggataacctaaaac

SEQ ID NO: 30012 - DNA, 1612 bp, Glycine max
  Clone ID: UC-GMROPIC064G01_FLI
gactcagtcgggcgagcctgatcgatttctgaaagaacaaagatgacggcggatattgggctgattggattggcggtgatgggtgagaaccttgttctcaacatcgagagccgagggttcactgtggcggtcttcaaccgcacgacctcggtggtggacaagttcttggaagcacgagccaagggcaagaagatcattggcactcattccctcgaggagttggtgagcaagctcaagagaccgcgcaagatcatgctgatgatccgagctggctccccggtcgaccaacagatcaacgcgctgcttcccttccttgaagctggagacatcgtcatcgatggaggcaactcccactatcccgactccaaccgcagaaccaagttcttgaaggagaagggcatctctttcatcggaactggtgtcagcggtggagaggagggagctttgaccggtccttccatcatgcccggaggagaccccgctgcttgggagcacgtcaaacccatcttccaggccatttccgcgaaggtcgaagacggcactccctgctgcgactgggtcggagaggatggtgctggccatttcgtcaagatggtgcacaatggaattgagtacggagacatgcaactgattgctgaggcctaccacctcctttccggcgtccttggactctcgaacgacgagctcgctaaggtcttcgccgaatggaacaagggagaccttgacagctacctcattgagatcacctctcatatcctcggcaagaaggacgaagagactggcaagcacgtcgtggatctcattctcgatgcagctggacagaagggaactggcaagtggactgctacctccgctcttgacttcggcattcctgtgaccctcattggagaggccgtcttcgctcgctgcttgagctcgctgaaggatgagcgagtgcaagccagcaaagtgatccctggacccaaagccaacttcaccggagatcgggaagtcttcattgctcaagtccgagatgctctcttcgccgcgaaggtggtttcctatgctcaaggctttcttttgatgcgctctgccgcccaggagttcaaatggaatcttaactacggtggcatcgctctcatgtggagaggaggttgcatcattcgctccactttcttgggcaagattaaggaggcctacaacaacaacccgagcctgccaaacctgctgctcgacccttacttccaggctaagatcgagtcggtccagagcgcgtggcgcacagtggtttccaccgccttcttgaatggcattcccattcccgctctttccagcgctctggcctacttcgacggtttccgaaccgagcgcttgccagccaacctcattcaagcccagcgtgattacttcggtgcccacacctacgagagagtcgacaagccccgtggagagtacttccacaccaactggaccggtcatggtggcacaacctcctcccgtacctacaacgtctaaaatcaatccctcccttcctctgtccatcccaatcctgttcccccaacgaacaacattgcaatcgacaacgttcccaccgttccgtcacccattccttagtggaactgattgaccaacg

SEQ ID NO: 30013 - DNA, 1881 bp, Glycine max
  Clone ID: UC-GMROPIC065C08_FLI
gtattagtaaagaagagaaatacatgctgcggaggattggcttgatgatgaagcccttcctgttactaggtagacgaggggtttttgatggaacggttgaaaatatgcatcttcattggaagtatcgggaacttgtgaagataatatgtaatggaagcctggaagaagtccatcagatagctctgaccttagaggcagaaagtggtggaatattagtggcagtagagagagtgagaaagggatttgcaatcattgtgtatcgtggaaagaattatagtgtccctgtttgtttgaggcctcaaacgcttttaaataaaaggcaagctttgaagcgttctatagaggcacagcgccgtgagtcattgaaacttcgtattttgacgctagataaggaaataaatgaattgaagcttcaaattgttgaagatgaggaggctaacagtaagcaaatggctgaagcgtcgagacttgacatggctacagacgaacatgaagcttgttcaaatttcataaattggcattctcctaaagaagcttctggtgacaatcaacaagcaatacaggaggagccagttgagctgattgatagtggtggagctcatcaaggtgaaccagaaaattccataagttggaattcttctatagaagcttccattgacaatcaacaagcaatacaggagcatcctgttgagctgattgatggtggtgcaactcatcaagatgaaccagaatcctggcctagtttgattcataaagaaacacagtcggatgaagtgagtgattctgtgactgataccgagcttcacatctctaatagaaagggaatggaatcatcgaactcattgtcaaaaaatgatcgtgaaccattagctccagtgatatatatgagtttgccttctaggtctgtgcatctttcaaccaaagagagacttcttctgcggaagcaagccctaaagataaagcaacctgtccttgccataggaaagagcaatattgtgtccggtgttgtgcaaacaattaaagctcactttgaaaagcaccctcttgctgtagttaatgtcaaaggaagggcaaaagggacctcagttcaggagttggtgttcaagctagagcaagaaacaggtgcccttctagtctctcgggagcctagcaatatcatactttacaggggttggccatcagagagacgtagccgccctgcaatgcatgttaataaagtgagaaatgaggaagggacagagcccagtgtctcccctgcctatgcacacaggatcaggatcaggaacaggaacaggaaaataagaataagtatgatagggaaaagaagaatagatagaacaggctcaaggccaaattttaattttaggagagattctacccccatctttagcactagttcgtaacatcatacttcagcactgtgaactcagagagaagtaatttggggtgacatgggaacattgaaattttttagtgggaagaacaccaaacaggaactggaaaagaaagaagaaagacagcaaagagcctttactaattttgaagcctttcttcactcctcaagtgcccagtttttgtttctctgggactgaacttacatgtctagtaatatcttcctggtacttaagacaaggtcatcatgttttccctaccaagcaccttgtttcttaacactcaaggttatcaactcatcatgcacgatatgcttgaatcatatttgagcagaaagtaatttagatacaggcatacagcatacggataccagcggaagaagaagaaaaaattgtattacaacaaaacatttaaatggaaaagaataccacatgtttgaatgtttagaaaggaaaaaaataaaataataaagttgtctttgttgattat

SEQ ID NO: 30014 - DNA, 981 bp, Glycine max
  Clone ID: UC-GMROPIC065C11_FLI
ctgtatcttgtgctggattttgtaaatgggggccatctgttcttccagctgtatcaccaaggccttttcagagaggatctagcacgcatatacactgctgagattgtttgtgcagtttcccatctccattcaaatggaataatgcacagggatctaaaacctgaaaatatcctactagacgctgatggccatgttatgttgactgattttggcttagctaaacaatttgaagagagtactagatcaaattcgatgtgtggtacattagagtacatggcacctgaaattattcttggcaaaggccatgataaggctgctgattggtggagcgtaggtattctactgtttgagatgcttactggaaagccgcctttctgtggcggaaaccgtgacaaaattcagcagaagatagttaaagacaagattaagctgccagcatttttgtcaagtgaagcacattcactgttgaaagggctgctacagaaggaaccaggtaggcgcttaggttgtggaccccggggtgttgaggaaattaaaagccacaagtggtttaaaccaatcaattggagaaagttggaagcacgagaaatccaaccaagctttaggccagaagtagctggtgtgcagtgtgttgccaactttgagaagcgctggactgatatgcctgttgttgactcacctgctgccagcccaaatggcggaaacccctttaaggatttctcttatgtgaggcctgcagcctcttttcttcaaaggaatagccctgcttactaactagacagcttgatatggcgttggctcaagatgccaacattaaacattttcttgtgcccttaggaattgtgtcaactttgcaggttgtgggttcagtcacttatttatgtgccttgcgactctctacaatttacaaatgtattgagctgtcatgtatgcagaaaataaattactttatttataagtggtatattctatttgggacat

SEQ ID NO: 30015 - DNA, 2182 bp, Glycine max
  Clone ID: UC-GMROPIC065E09_FLI
gttttggtttcaaccaaggaaacccactgaggcttacttatggacttgactacaaagggaatgtgtgtggggacaagcatgcacaccctggccttagtgaattagagctcagatattggcaaaatcctaatcaggtttatcagagtggattgaaggatagccaattcaaactggctgatgcccgcagtatatgcttgtcggagtgccctatgccttcagaagattcccttaattgggtgtgtgattatcctgaaggagatattcgtctttcgatgaaagattggattaataggaactatgattattttgagttccttacaccagaaatgagaaactcgtctcttcaactacagggtccttgttatcctgtcatatttcccactgtaaatgtttactggagttgccaatttattgctcgggcgtcaaatacatctttgaagcattggcagcagatgggtggagttaacatcaacgaagacattgttattgacaagtcaattcacaagtctattaattctcggtcagctgtcttagagagatacatggcagacataggaaaggcatggcctgtgctgattgtctgcggagggattttgcctctttttctgtctgtgatttggctgatgatgattcgacattttgttgctgctatgccttggataacagttgttctctttaatgttctaataatatctgtcacaatgttctactacctaaaagctggatggattggaaatgatgcgatttctcccatcattggtgagcatgacccatacattagtgtatatgggagggagctgactcatatacgagttgtcactatacttatgacctttatcatggttgttgccattcttacatcaattgccattgttcgccgcatccttatggcaacatctgtcctgaaagttgctgcaaaagtgataggagaagttcaagccctcattattttccctctcataccatatactgtccttgcagtcttttacatgttctggatttcagctgctctccatttgttcagctctggccaggttgttcagaataattgcaactctaactgctgcacatatgatcttattgcaaaacgggtaaactgtgatcgttgttgtggttatagcattcattacacaccacatattggagttgccatccttttccacctatttgggtgttattgggctacacaatttttcatagcttgctcctcaacagtgattgctgggtctgtcgcctcgtattactgggcacgcggtgaaacatctccagaaattccttttctttctgtcttttcctccatgaagaggcttatgcgttacagtcttgggtctgtggctcttggctctctgattgtatcattcgtagaatcaatccgctttctgcttgaagctattcgtcgtaaactgaaagtctcaagtcatgggcatgacagctgcttaggcaaggctgcataccaattttctcaatgttttctcaggtgtattgaatggaccatcaagtcagtaaaccgaaatggttacatcatgattgctataactggcaaaagtttctttagcgcttcttttattgcaacagaactgatcatgaataacattctaaagattggccggcttaacgtgataggagatgtcattttgttccttggaaaactgtgtgtcagcctctcatgtgctttgtttgcgttcctcatgttggacacacacaagtacaactctgctcataacaagacctcatctccactcttacctgttgtggtttgctgggctcttggatacattgttgcaacccttttctttgcagttgtggagatgtcaattgataccatagttctctcattctgccaggattctgaagagcaccaagggacagcacagtatgctccaccccttctcgttgagacactcagtgaccaaaatgagatgcagagactcacacaaggaccctaatgaaacttgtccttgtgtaattttcgctaaatattacaacatttatatatttttattaaggtgcatatttttgccaccgtagttctgttcttacatcacttgtatatatattatactgttacaatgatggactaaggtgggttggcgaggttaccttttgacaaatgggttatcatgggcgcaaagatagcacattcattattatcctttccttatattattaaaatatttttctc

SEQ ID NO: 30016 - DNA, 2147 bp, Glycine max
  Clone ID: UC-GMROPIC065G01_FLI
gagtcctctctctgctgcgaacaattgccagatggggaatgcattgaggtggttcagaaagacaaagaagacgatacactgattgaattggactgtcaaaatggttttcctgaaggaagaaaggagtttgttgcacctgctgttggaatggagtttgagtcgtacgacgacgcttacaattattacatctgctatgccaaggaggtggggtttcgcgtgagggtgaagaattcgtggttcaagcggaacagccgggaaaaatatggtgcggtgctttgctgtagcagccagggtttcaagagaataaaggtcgttaatcatttgaggaaagagacgagaactggttgtcccgcgatgataaggatgaggttggtggagtctcagaggtggagggtgcttgaggttacgcttgaacataaccacatgttaggtgctaagatactcaggtcggttaagaagatgggaaatggaacaaagaggaagccgttgccttgctctgaagctgaggggcagacggttaagttatatcgtgcacttgtgatagatgctggaggtaatggaaattcaaactgcggtgcaattgaggacagaactttctctgagtcttctaataagttgaaccttagaaaaggtgacacacaggccatttataatttcctctgccggatgcagttgactattccaaacttcttttacttgatggatttcaatgatgatggccatttgaggaatgcattctgggttgatgctaggtccagggcttcttgtggttactttggcgatgttatttattttgacaacacttatttgtcaaacaaatttgaaatccctctcgtgacctttgttggaataaatcaccatggtcaatcagtgttattagggtgtggcctgcttgcaagtgaaactacagagtcttatctttggttgttaaggacatggcttaaatgtatgtcaggatgttctccccaaactattattactgataggtgcaaggctttgcagagtgcaattgtagaggtttttcctaaatctcatcattgttttggcttgtcattaattatgaaaaaagtacctgaaaaattaggagggttgcacaactatgatgcaatcaggaaagcactgattaaagcagtttatgagacattgaaagtgatcgagtttgaagcggcatggggatttatgattcaacgtttcggagttagtgatcacgagtggcttcgttctctatatgaagatcgagttcgttgggctccagtatatttgaaggacatattttttgctggaatgtctgcagctcgccctggtgagagcattaaccctttttttgatagatatgtgcacaaacagactccgctgaaggagtttcttgataagtatgaattagcttttcacaagaagcacaaggaagaatctttttcagatattgaatcaaggagctcaagccccttgctgaaaaccagatgttcctttgaattgcagctctccagaatgtacacaagagaaatgtttatgaaattccagttagaagtggaagaggtgtattcttgttttggtacaacacaattgcatgtggatggccccatcataattttcttggtcaaggagcgtgttttgattgagggaaaccgacgggagattagggattttgaagttttgtacagtaggacagctggtgaagttcgttgcatctgtagttgctttaatttttatggatatctatgtaggcatgcattgtgtgtgctcaattttaatggggttgaagagatacctcacaaatacattctttcacgatggaagaaagattacaagcatcctaatcacagctctggtggtgctaatgatactgactgcactaatgataccgaccgcattcaatggtctaatcagttatttagaagtgccttacaagttgtggaggaggggatactttctctagaccattacaatgtagcgttacaatctttagaagaatcactgagtaaggttcatgatgtagaacggagacaggagtaaccttcaatgtactctaaaagttacttgtatttttctacctgctgcttagcgctgtttaactttgttctttttacattgtccataacttgtatagctaaagatatttttgagttaaaccataagtagctcctccc

SEQ ID NO: 30017 - DNA, 1775 bp, Glycine max
  Clone ID: UC-GMROPIC065H01_FLI
ctggagctaacatctcttccccgtctaacaactcttctgcttgatcataaccagctcacagggccacttccatcagatataatatcatggaagtccctaataactctagatttgtgccacaatcaactctctggagtaatcccagacgcaattgctcagttacctggccttaatattttggatttgtcagaaaacaaaatctctggtcaaattccacttcaactagcccttaagagactcacaaatctcaatctgtcgtccaatcttttgacagggaggattccaagtgaactagaaaaccttgcttatgccacaagctttttaaacaattccggtctctgtgctgatagtaaagtactaaaccttaccttgtgtaattctaggcctcaaagggcaagaattgaaagaagatctgcatctcatgctataatcataagcctggtggtagcagcctccttactggctttgttgtcatcattcttgatgatcagagtttacagaaaaagaaagcaagaattgaaaaggtcatggaagctcacttcctttcagaggctgagtttcacaaaaaaaatattgtgtcttcaatgtcagaacacaatattattggcagtggtgggtatggtgcagtatatcgtgtcgctgttgatgatttaaattatgttgcagtgaaaaagatatggagtagcagaaagttagaggagaagcttgtaagttcatttcttgcagaggttgaaatactgagcaatattcgtcataacaacattgtaaagttgctatgctgcatctccaaagaggattctctgctccttgtctatgagtatctggaaaaccatagccttgataggtggctacaaaagaaaagtaagccagcagctgtgtcaggttcagtccttgattggccaaagagattgcatatagccattggagcagcacaaggtttgtgctacatgcatcatgactgcttaccaccggttgttcatcgcgatgtgaaaacaagtaacattctgttggattctcaattcaatgcaaaagttgctgattttggtctggccaagatgttgatgaagccagaagaacttgctaccatgtcagcggtggcaggcacattcggctatattgctccagaatatgctcaaacgactagagtcaatgagaagatagatgtctatagctttggagttgtcctattggaactgacaactggaaaagaagccaatcgtggagatgaatattcatgtctcgcggaatgggcgtggcgccacattcagatagggactgatgtagaagacattttggatgaagaaattaaggaagcttgttacatggaagaaatctgcaacatcttcagacttggggttatgtgcactgctaccctgccagccagtagaccttccatgaaggaagttcttaaaatattgctcacctgcagcaatctacttaccaatggagagaagaatgctggtttctatgattctattccacttcttaagaattcaaaatgggaaaaccaggtggaatattatactgatgatgattgatgatagctaggtagtttgcatcacagtttgagtatcctatctggtaataatacagaaaggtgaaaaacttttaacaaaagggctagtcttgaagtcagaatagtagacaataaaactcacagtttagctactgtataattagatagagtagaacataaatcgactcacagtttagaagtgctttgctaagtgcaaatggcatctaggctcagttgtattgaggagaattgcctcttt

SEQ ID NO: 30018 - DNA, 806 bp, Glycine max
  Clone ID: UC-GMROPIC066B05_FLI
aattcatgtcaaatggttccctctttgatgttcttcatggaagcatggaaaactctttagattgggctagcagatacagtatagcggttggggtggctcaaggactttcttttcttcacggattcacctctagtccaatactactccttgacctgtcaagtaaaagtattatgctgaagtcccttaaggagcctctagttggggacatcgaacactacaaggtgattgatccctcaaagagtacaggaaatttttctgcagttgctggttcagttggttatattcctccagagtatgcatacacaatgacagtaacaatggctgggaatgtgtacagctttggtgtcattctgcttgaactgctgacaggaaaacctgcagtgacagagggaacggaattggtcaagtgggttgtgcgtaattcaacaaaccaggattacattcttgattttaatgtcagtagaacatcacaagcagtcagaaaccagatgcttgcaattctcgagattgctcgtgtttgtgttagtacatccccagaatcaagaccaaagatgaagagtgttctacgaatgctcttaaatgctagatgaagtcggatttttcaaggttgcactgcatatttaaggaattttttgttttgttttgggtaatgctttaattctagaaaatatgaaaggtagaattaatgataggattggatttgctcaatacttctatggtgtgtcaacagtgtatagtaaatcagtttactagtggtagacatatagctcacagatataataatggatggatgtcttattcttatg

SEQ ID NO: 30019 - DNA, 1463 bp, Glycine max
  Clone ID: UC-GMROPIC066E04_FLI
gaaacggacgcttttgttattcttcgtgtcttgttgtgtttttcatctgagatgtgtggaggagctatcatctctgatttcattccggcggcggcgatcgccgggtctcgccgcctgaccgccgattacctgtggccggatttgaagaagcggaagtctgacttggacgttgacttcgaggctgatttcagggattttaaagacgattctgatatcgacgacgacgacgacgatcaccaagtcaagccctttgctttcgccgcctcttctcgtctgtctacggcagcgaaatctgtggcattccaaggtcgggctgagatatctgcaaatagaaagaggaagaatcagtataggggaatccgtcaacgcccttggggaaaatgggcagctgagattcgggatccaagaaagggggttcgtgtctggcttggaaccttcaacactgctgaagaagctgcaagagcttatgatgctgaagcacggaggattcgtggcaagaaagccaaggtgaattttcctgaggcaccaggtacttcttctgtaaaacgttccaaggtaaatccacaggaaaatcttaagactgttcagcccaatctgggtcacaagttcagtgctggcaacaatcacatggatctggtggaacagaaacccctagttagccagtatgctaacatggcttccttccctggcagtggaaatgggctaagatcccttccttcgtctgatgatgcaaccctttacttcagttcagatcaagggagtaattcatttgattatgctcctgagatctcatccatgctttctgctcctttggattgtgaatctcattttgtgcaaaatgccaaccagcagcagcctaactctcagaatgtggtatctattgaagatgattctgcaaagacactctctgaggagcttgtggatattgaatctgagttgaagttctttcagatgccttatcttgaagggagctggggcgatacttcattggaatccttgctatctggtgacacaactcaggatggtggaaacctcatgaacctttggtgctttgatgacattccttccatggctggtggagttttctgaaccgctttttctttggtctccctgtgtgtaaataaagctacaagttgtttttctctgtttttgatttttgttgcatttgttgttctcttgttggacacatccccccatgtgtctgaaaaaaaaaatgtaatttccatttttgttgctttctggaatggttgtcatccgtgttgaagatggagttaaaacaattaactcgctcaagcatctcttgtatctaaagtatggggctatatagttatttaggtgtcctttgccttgtcaaaggccttagttttggggaaatctcgattgttgttcgagggtgattatatatgatctgtgaaacaatcttggctgctgataatttttaactgggttgtttctctatggtt

SEQ ID NO: 30020 - DNA, 1490 bp, Glycine max
  Clone ID: UC-GMROPIC066F10_FLI
ggcaacaaggttttcacataaaagcatattcctccaaacaccaaatgaatcaaagataaaaacaaaaataatgaaaaatcatgccatgtcatgtcgatatcattgttcacatacatacatacatgccacatgacgcaaccccttacatccccttacatgagtgtgtctcatccttactccctcgactcttcctctctttataaagcattccttccattttcttgttcctcaaaacacaaaaacaccataacatgggagagaaaaaagaagcggcgaagaatgaagcagataagaagcctgaatcaggagcaaagcaaaacgacgaaccagtacctgtcgttttgaaactcgacatgcattgcgagggatgtgtcaagaagatcaaccgcgccgttcgccatttcgaaggtgttgaagacgttaaggccgatctatcaagtaacaaactaacggttattggaaaactcgaccctgccgaagtgcgagataaactagcggagaaaactaggaagaaggtcgaactcgtttctcctcagcctaagaaggattccgccggcgataagccgccggagaagaagaccgaagagaaaaaaaccgaagagaagaaatcggaagataaaaaggcagaagagaaagctccgaaagagagcacggtggtgttgaagatcagattgcactgtgacggttgcgttcagaagattcgaaagattatcctcaaaggagttgaatcggtgaacattgagggagggaaggatttggtgagcgtaaaggggacgatggacgtgaaggaaatagtaccgtatttgaacgacaagttgaagcggaacgttgaagtggtcccgcccaagaaagagggtggtgataataagaaagagaacaaggaaggtggtggtggagatagtaagaaagagggtggaaaaaaacaagaaggtgaagacggtgcagcgaaggtggaggttaacaaaatggagcactacgggtacgggtacgggtacccacctccccctatgtactggtacggtcacggtggatacgcacctggtgaaagtagtagctacgaggcagaggttcaaccagggtataattcgtattcgaatcaagggtatgatggtaattacgggaattaccattaccaagggtataataataattacatgatggcacaaccaccacccccgttctacttgaatcctcaccatcctcctccacagatgttcagcgatgagaatcccaatgcgtgttccgtgatgtgagccaacgtcttgtttctcaatatttttcatgtatagacaggctgtaaataacaatttttatataaaattcgtaaagagagttttgtattaacgcatggttaatgacgtagagagcggtacggccggctggcttgacaaatccggttcatgtaactttttgttgtagcctctttttgtttgttctgcttcctttttgtgttctataattttatttattattatgaaaatttgataact

SEQ ID NO: 30021 - DNA, 1073 bp, Glycine max
  Clone ID: UC-GMROPIC067C06_FLI
gtttagctctcacaaacttcgtacagtgacaatatgaagaaagttgtgttgaaggtggaaatacatgatgacaaaatcaagaaaaaagctatgaaggctgtctctggcattttaggggttgagttagtttctgcagacacgaaagacaagaaattgaccataattggggacattgatccagtaaaagtagtagccaagctaaggaagcagctttgtcacgcagacatagtttttgttggaccaacaaaagaggagaagaaggaagaacctaaaaaagattcagcaaaagaaattgttgtaacaataacttatggcaaaccgagaaaattattggctgagtcgcggacaatgttttttttaagacgtttcgtggcactgccaaaaattgtgcaagtagactatctaccacgaagtccccaagataaaacagcccagattactgtataagattcccactgcactgagagaaccttttctagaattacactctcttgtatttgagaagtcactctaaagccacccgaaaatatgacttgaaaaatcactttaacagccaaccaaaaatatgacttgaaaagtcactctaatagccaaccgaaaaatatgacttgaaaagtcactattataaccaatcgaaaatatgacttaaaaagtcactcttatagccaaccaaaaaatatggcttgaaaagtcactattatagccaaccgaaaattttagagcgacaaaaagagggagaagtttgtcgaaaatgcatcgactcaaatatgagagggagaaagaaaagttgaggaaatacttctcaactggagtaaggaaaaaagaagaaagaagctctctatatatagagagtgaaacattattcaagtgtttatcctgagcgatgtgagacttgaagcctttttttctttctttttttcaaactttcatccacattctcctttgttctaacagaaattgtgccatctgatctactcaagttccatcaaccctattatgtctattgttattatccgtcgaaaccacactacaatccatattacagtgccatcagtatggaagaggatcctaat

SEQ ID NO: 30022 - DNA, 1286 bp, Glycine max
  Clone ID: UC-GMROPIC067E08_FLI
actaccaatactcctcgcacaacataaccacaatggccgcgaagaagaagaatggcggcggaaacggcaacaacaaggagaacgaagacagcaccatcaccgtcgtcttgaaggtcgaaatgcactgcgacggttgcgcttccaaaatcatcaaacacctccgctgtttccaaggtgtggagacggtgaaggctgatagcgacgccgggaaggtgaccgtgaccggaaaagtggaccccacgaaagtgagggataacctggcggagaagataaggaagaaggtggaactggtgtctccgcagcccaagaaggagcaggagaacgagaaagagaacaaggatgctaaggcaaacaacaaatccgagaataacaaaacccaggacaaaaaaaccaaggacaaagaggtggtaaccaccgctgttctgaagctggcattgcattgccagggttgcctagacaggattggcaaaactgtgttgaaaaccaaaggagtgcaagaaatggccattgacaaggaaaaggaaatggtgactgtgaaagggacaatggatgttaaggctctggcagagaatctcatggagaagctgaagaggagggttgaggtggttcctccaaagaaagacaaggaaggtggtggtggtgatgatgagaaggaagtatcagggaagaagaagaacaagggtggtggtggaggagacaagaatgagaatattgaagatggaatagagaaaatagagtataacagaatggagtatttggcaccacctgcttttggctttggttatggaccttatggtggtggttatggacatggacatgggcatgggcatggcaacattggtgggtatagctatgtgccagtgtacccggagcagatgcactttcacttgcatgcaccaccaccacaaattttcagtgatgaaaacccgaatgcttgttctgtcatgtgagtgaggttgtttctttccatttaactgggtgatggatggtgataatgatggtgtgcttagagaactagatactagagtctagagtgtttctttccattcttttttttttttctttcaatttttggttcttagaattccacgggaacttttgagatgtttttgtgtttagggaagaaaaggggggttttgaattttgatgtgattagataaccaataccgctgatatattattattaaatgggaatgccaatttcagaatttgttattactagttgatgcataatgtaaatgatggagtaatatggagttggaaatggaatagatctcaattctgac

SEQ ID NO: 30023 - DNA, 1398 bp, Glycine max
  Clone ID: UC-GMROPIC068C07_FLI
accaaatacagtttgctttagaaagaggaattccggcatatcttggtgtcttggggacactaagactcccttaccctagtagatcttttgagcttgcccattgttctcgctgtagaattgattggcttcagagagatggcatacttcttcttgagctagataggatactcaggccgggaggctactttgcctactcatctcctgaagcctatgctcaggatgaagaggatcagagaatatggaaagaaatgagtgctcttgtagggaggatgtgttggaaaatagcttctaagaggaaccagactgtcatatgggtcaagcctcttacaaatgactgttacttgaaaagagagcctgatactcgccctccgctctgcagtcctaatgatgatcctgatgctgtttggggagttaaaatgaaagcttgcatctcacgctactctgatcagatgcacagagcaaaaggagctggtttggctccttggccagctcgattgaccactccacctcctcgtcttgctgactttaactattccactgaaatgtttgaaaaggacacggaatattggcaacaagaagttactaattactggaaaatgctaggcaataaaattaagcctgacacaattcggaatgtgatggacatgaaagcaaacttgggttcatttgcagctgctttgaaggacaaagatgtttgggttatgaatgtggtgccagaaaatggggcaaacactctcaagatcatatatgacagagggctgttaggaacagttcacaactggtgtgaagcattttcgacctaccctcgtacttatgatctgctccatgcatggactatattttctgatattattgagaaggagtgcagtccagaggatttattgattgagatggatagaatcctgaggccgaaaggtttcatcattgtccatgataagcgatcggtggtgttgtctataaagaagttcttgccagcattgcactgggttgcagtggtcacatctaatgtagagcaagattcaaaccaaggcaaagatgatgcagtgttgataattcagaagaagatgtggctgacaagtgagagcatccgcatttcagaataacagcatgctccctctaatggatgccaccattctttccattcacttgcaagttcaaaatctcagcaatacacccttgtggaaaattgatcttgtagcttttatctcgtgctgtaggtgctcttttatattttagtcatattctctacactatatataggtagaagtgctagtgaaagatcatcccaaatcatcttggttgaatttatttaattttggacacaagtagtcaccctgctattgtgatcaagatattttagatgattttgagtctaaattaatttgaacatattacagg

SEQ ID NO: 30024 - DNA, 968 bp, Glycine max
  Clone ID: UC-GMROPIC068G01_FLI
attctgaggttgagattagaaggaagaatagtaattgcaatagtactagtaatggtaattcgttgccgaggcctgcgagtttgaatgcgtttgacataatatcgttttctcaaggctttgatctatcagggttgtttgaggagaagggtgatgaggcgaggtttgtgtcttctgctccggtgtcgaagattatatcgaaattggaggaggttgctcagttggttagcttcactgtgaggaagaaagattgcagggtgagcttggaggggtgtagagaaggtgtgaaagggcctttgactattgctgctgagatttttgagttgacaccttccttggtggtggtggaggtgaagaaaaaaggaggggataaggcagagtatgagaagttttgtaactctgagctgaaacccgcgttggagaatttggggatggaggattctgcttcttcttcttcttcttgtcatcaatctacacacactcaatctgaattccaacaacaacatcgaacattttctgactctgcccttaacagacattcagataataatgaatgcttatatgaacaagagttgggtctagcagaagagactagtatcccacaacttggtgaaccaaagttcgaatttcaacaggaaaatgtgcccatgtttactatttgactgtgtctacaacactattgttttcaaagaatgaaacatgtggaaaaccaaaaaaagataatgaatgtttgcattaattaaggtaccaggagaatgacagaagatgacaacatactatttctctcttgttatttttaggctgtgtgtaagttaaattttactttctttttccctcaagaattttccggcatttttaggtttgctccttgactggagcattagatgctactgtatttctttgtccaaatgttgtattattgtaaggctaatttaattttaaatatagtgaatgaagaagtttatatgtgt

SEQ ID NO: 30025 - DNA, 1041 bp, Glycine max
  Clone ID: UC-GMROPIC068G10_FLI
cttgcactaaagagcagctgcagacaaacaaggttggattagctagtgagatcctccatggaagatatcggtccgaactcatgcacgaggcaagtggcagagaagaaagcaagacctcaagagcaattgaattgtccaaggtgcaattcaaccaacacaaagttctgttattacaacaactatagcctcacacagcccagatacatctgcaagacttgtagaaggtattggacagaaggagggtctctcagaaacgttcccgttggaggtggctctaggaagaacaagagggtcacctcatcaaaggttcctcctgacttgaatccaccaagcctctcatcagtctcagctatttcttcccaaaaccctaaaatgcaaggagtccatgaccttaatctagcttttcctacagctatagacaattatcatggcatgtctccatatgttgagatgccaaaacttgaaattggtggtgatcacagtactagtcatagtcaccaccatagcccttctgctgttgagctactacggtctggcatggcttctaggggtttgaatccttatgctcctaattccatgatgtcaacctcagatcattccctttatacaactggctatcccatgcaggaaattaaaccaaaccttagcttttcagttgatgatgggtttggaaatagatcatatggggttcaagagaatggtggtgggaggcttttgttcccttttggagacatcaagcacctttctgcgggtgttgaagtggaacacaataaagaacgaggaaacaattcaactggatattggactggttggtgaagggtcttcatggcaaggaaattatgagaagaaatattgagaggacatataaaccttcactgttttctttatcttcactgtttcgatctatcctttctcacatggatcattatgatctatctgcttgaagttgttcagatcactaacaatagggttactctgttttgtatacattattattattactacatttctattcgaacaatagcaatgtgagggttttac

SEQ ID NO: 30026 - DNA, 2095 bp, Glycine max
  Clone ID: UC-GMROPIC068G11_FLI
ctctgccaggggaacaaactggagcatctcatcacgttcgcgaatcgcttctctggaacgctccctgaccaatacggcgagtgtgtttcacttcaatatgttagaatccagaacaaccagttctcgggcccggtgccgccatcgttttgggcccttgctgggcttcagtttctggaaatgtccaacaacaggttccaaggttctgtctctgcttccatctctaggggactcaccaaactcattttgtccggtaacagcttttctggccaattcccaatggaaatatgtgaacttcataatctcatggagattgacttcagcaagaaccgcttcaccggtgaagttcccacgtgcgtaactaagttgacaaaattacagaaacttagactgcaagagaacatgttcaccggcgaaattcccagtaacgtgacccactggactgacatgacagagttggatttgtcgtttaaccggttcaccggttcaatcccatcagaacttggaaatttaccggatttgacataccttgatctcgccgttaattctttaacgggggagattccggtggagttgacgaacctaagactcaaccagttcaacgtctctggtaacaagttgcacggagtggttcctttaggtttcaaccgccaggtgtacttaacgggtctaatgggaaaccctggtctctgtagccccgttatgaaaaccctgcctccttgttccaaacgcaggccgttttctctgcttgctattgtcgttttagtttgctgcgtttcgctccttgtggggtcgacgttgtggttcctgaagagcaagacgcggggttgtggtggcaaatccaagagctcctatatgtcaaccgcgtttcagagagtggggttcaatgaagaagacatagttccgaacttaatcagtaacaacgtgattgccacagggagttcgggtcgggtttacaaggtgaggctcaagacggggcagacggtggccgtgaagaaactgtttggtggcgcgcaaaagcctgacgtggaaatggtgttcagggcggagattgagactctgggaaggattcggcatgcgaatattgtgaaactgttgtttagttgcagtggtgatgagtttaggatattggtgtatgagtacatggagaatgggagcttaggggatgtgttgcatggtgaggacaagtgtggggagttaatggattggcctaggaggttcgcaattgctgtgggtgcggctcaggggttggcttatttgcaccatgattctgtgcctgctattgttcacagggacgtcaagagtaataacattttgttggaccatgagtttgtgccaagagtagcagattttggtcttgctaagacattgcaacgtgaggccacccagggtgctatgtccagggttgctggatcatatggttacattgctcctgagtatgcttatacaatgaaagtgactgagaagagcgatgtgtatagttttggggtggtgctgatggaattgatcacaggcaagaggcctaatgactcttcatttggtgagaacaaggatatagtgaagtggatcactgagactgttttatcaccatctcctgaaagaggaagtggcgatattggaggaggaaaagattatattatgagccagattgtggacccgagattgaacccagccacttgtgattatgaagagatagagaaggtcttaaatgtggccctactctgcacctcagcgtttcccattaatagaccctcaatgagaagggtggttgaattgctcaaggaccataaactgtcatgatgctgtattgagcttcccaagctctgtccacaaaaggacccaaattttgcattgccgtggcggtaggcaccaaatgaaagcgattgatggctgtgtatgcaagaaaacaaactttcgagcaaatttattattaaggaatgaacagctatatgagtgattatttagttactcattgtacgtaaatcttgttgtatatatgatggctcgtgaatcctgtctttgatcaaagtaaaagtaagtagtgaattggaaagtcatgtcacatccataccatactgaaaaagaaaaaccttcctgc

SEQ ID NO: 30027 - DNA, 1022 bp, Glycine max
  Clone ID: UC-GMROPIC069C12_FLI
gaaagagtgaacttactcagatatgatggtctggcaaaagttggaggaactattatctgtgtctctggtgccatatttatggttttgtatcgtggtccagctttgataggatatgccgaactcggtcatgtaacacaaaatgaaataagtgccagaggtcagccagagccatctggatggttaattggtggcttacagaaccttgggtttgacaattttcatcttggagttttgtgcttgatagggaactgcatttgcatggctgcatttctagccattcaggcatcggtattaaaaaaatatcctgcaaacctatctgtcacagcgtgttcatacttctttggagctttactgatggtgacagtatcattattcatgactactgagtcaactgactggagtttgacgtcatcagaaatacttgctgttatttatgctggaagtattgcatctgcccttaactatggactcattacatggtgcaacaagatcatagggccagccatggttgccctttacaatccgcttcaacctgcgttttctgccatcctgtcccaaattttccttggaagtccaatttacttgggaagcatcataggaggatcttttatcattgccggtctatatatggttacttgggcatcttctagagaaagacaggcaactgttggagttactcctcatagctcttgggtctctgaaccacttattcatgaaagaagtgcacaccagagaggtcttgttttttcggtgtccgctagcgtatccccaaaatcatcatcagattaaggaaatgagttattagatgccattcaattgtaaaaattggtctcatgattctcaaatctgtttcttctatactttcaataggtaaatctgtatttgtgtttgatcatgtcaatgtatttcgggacaaactctgaatgttgtcatgttatatctgaatttttaaatacattgtgttgtatctgaatttggagagcaattttgtaatgtgagtctatatattttatgttccttct

SEQ ID NO: 30028 - DNA, 802 bp, Glycine max
  Clone ID: UC-GMROPIC070D05_FLI
ttagctgccactacggaatcaagaaaagatccaggggaatattggaaaatgatcatgaaagatcaggaaatgccagaaggacttcaaggtcttgtttcatttcaatctgaaaataaccctaagactcaagagcagcttggtaagggttccaaaaaccattgtgaagagtctctagttacaaagtcactgttaacttgtgtatttgtaactagagactcttcacaagttaacagtgactttgaacccataccaagtgttaccaaatatgatgatttggaattcaagtcaagcattatcaagaacgatgattttgaatcgagaccaagtgttactaagtatgatgattttgaactcaagtcaagcgttaccaagaacaatgattttgaaccgagaccaagtgttaccaaatatgatgattttgaactcaggtcaagcgttaccgagaatgatgattttgaaccgagaccaaatattagcaagtatgatgactttgaactcaggtcaagcgttaccgagaatgatgattttgaatcgagaccaagtgttaccaaatatgatgatttagaactcaaatcaagcattaccaaaaacgatgattttgaaccgagaccaaatattagcaagtatgatgactttgcatccaggtcaaataccaagtacgattctgaacctaaagcaagtgctaccaagtatagtgattaaatgaaaatcaagtaattgtataatacagtcgaagaaaatcgtgctccatatcaatgtatcctatgaataaatagggtgtgaagtattatagattttgaat

SEQ ID NO: 30029 - DNA, 1179 bp, Glycine max
  Clone ID: UC-GMROPIC070G01_FLI
cacgtgaacctccacaaccgttcctccttccacctcctcctcaagccatggaagaaaaacgggtccaagaagctttctcacaatacggtcttcctctggaacctctccaacgcgaggttcgagtctggactcgaacctcgctctagattctacctcgccatcgaggtagaacatggcctcagcctactcattggggacttatcccccaggagtagtaaggccaagaagcccagcaaaacaaaccaattactcgtcctgaagcgggacaacgtccacgtggcgccacaccgcagccgggtgtaccaaaccaaagcgaaactcggaggtaaggttagggaaatcgaaatagattgcgacgtttacaactgttgcggatacgggtacgagaacgagaatagttcgaggttgttgttcagtgtggatggagagaaggttcttgaagtggcgaggctgaagtggaagttcagagggagcgagcgtgtggagatcgacggggtgcacgtgcagatctcgtgggacgtgcacgattggctttttgagaaggataaggatattgttaatcatcgtagtagtaacaacaacaatagtaataataatggtatcgagggtcacgcggttttcatgtttaagttcgaggaggacgaggtacgaggtagtggtggtgggaaagaggaggagcaacagtggagtatggggagtggtggggagtggaggaatggcaagagttggtcttcttcgtctttgtcggtgtcttctacttctggtggatcttttgggggaagttcttcggttatggaatggtccagtgtggaggagaatgagttggtggttcctcttgggttttctttggtggtttatgcttggagaaggtgaacactaatttgggtggttaaattttttgtttatttgttttcccttagagtaaaagtttagggggagaaagaatgaatttagatatccatgtgtatagaaaagtatatgttcttaatactctaagagtttagtctttaattagggcaaaagatagtttaatttacccaaaaccaattgaattcaagttcttgtaatgcttgaatatttgcatgtatggaagcctgtttgtcgagagaagtcaaaagatcacgatgtacatggaataacacatctgttaagagaagtcaattgaaactccttattaac

SEQ ID NO: 30030 - DNA, 1347 bp, Glycine max
  Clone ID: UC-GMROPIC071B06_FLI
aacaatcagaatctgaacgggacttttatgaagccctgtttgagagatctaaagttcaatttgatcagtatgtcgcacaaggaaaggttcttcaccattatgcaaatatccttgacctactaatgcagttgaggcggtgttgtaaccatccatttttagttatgtgcggaagcgatacccagaaacgtgcagatttaagcagactcgcaagaaaattctttcagactaatactgaattccccgatgaaagcaatcaaaatgatccacggcagcaagcagagttgaacaaacttgcaagtagattacttctaaaatctgcttcttctttgcactcggttcaacctcatgcatacattgccgaggttttggagaatattcaaaagggtgacatcatagaatgctctatatgtatggaatctccagaagatcctgtgtttacaccatgtgcgcataagttttgtagagaatgtctatttagttgctggggcacctcagtgggtggcaaatgtccaatctgtcgtcaattgctccagaaagacgatctgattacttattcatctgaaagcccattcaaggtcgatattaagaacaatgtgacagagtcttcaaaggtttcgaagctatttgaattcctgcaacgtattctgaacacatcaagtgaaaagagtatcgtcttcagtcagtggacatcattttttgatctgttggagaatccattgaggaggagaggaattggtttttttgagatatgatgggaagttgactcagaagcagagggagaaagttctggatgaattcaatgagacaagagagaaaagggttttgttaatgtcactaaaagctggtggtgtgggtttgaacttaactgcagcctcaaatgttttcattatggatccatggtggaaccctgcagttgaggagcaagcaataatgagaattcatcgcataggacaaaaccgaagagttgtagtgagaagattcatcgttaaggacacagtggaagatcgattgcaacaagttcaagctaggaaacaaaggatgatatctggtaccctcaccgacgatgaggttcggactgctaggattcaagacctcaaaatgcttttcacatgagatatgagataatttatttatttagaagctgatttatttctctagattcttagacctgggaagccaattttgtataggttgtcggatcctttctacaagctaaaggcttccttttcttttgtgtacatacatgaaatgatgatatgatcattctgaactctaaaaggaagcccactgttttgtaaatcatgaggctttagtggttatggtaaaagggttaatttcattttggtc

SEQ ID NO: 30031 - DNA, 1646 bp, Glycine max
  Clone ID: UC-GMROPIC071E08_FLI
tgcatcttgaaatgaggtcaagtttgctgagcttacattggacatctatagaatgatacaatgtttagaatgggagcctagtggagtattctaccaaaaacatacagttaaacctaaggagaatggtgacataattgatcattcaggagcttccgggataatagacatgaatcttactgcagatatgaccgatccaactgtacctcctaatcctagaaaggcttccctgtaccgtccatctgtgacacatgtgatagcagttttggctactatttgtgaggagctgccaccagactgtgttgtgctagtatatctttcagcctcagggaaggctggtcttaataatgtctctcaggtggagaattttagcggttcatccaaatattcaagacacaaagtcctttcccagacttcccaaggacagaattctgaaccttccgaaactcaaaataatggcaagagagaactgagctattatgacaattatctgtggtttggtcccaagggaaatagtggttcaaataatctctaccctggtgatcttatccccttcactaggaaacctcttttcctgattattgacagtgataacagccatgcattcaaggttttacatggggctgaaaggggtgaaacggctgctctatttctttcacctttaagaccgattttcaagaatccctctgatgtaaattcaaataatggaagccaatttaccttttttttgactgctcctttgtcagcattttgccaaatgattggtctctcccccaacgagtctgatacagatgtctacaatgaagcagagaacataattgctaatgctttgactgagtgggaaataattctttgctcatcaactaccatggatttagtatgggcgcaggttataagtgatccatttctaaggcggcttattctaagattcatattctgccgatccgtgatatcttttttctgcccacctgaggaaagtgaactgtacctgccactttgtttaccccatctaccgtcttctgttgcaccaacgtctgaagctgtgcgttctgctgttgtgcaacttgccatgcactttgacgttgctgactcctttcactttactgaaacataagattttgggactttaaaaagtaacgagtaaaatgttaggcttacatgcaggctttggaagctaaggattctcagatcaaaggaatacaaaacattatatgagttgacctttcgggcgacaggacaagagtatttgctgtggggcatgggctgtctggtggaaaaagagattgtttgcctctgcttgttgtgttgctttattcgaccccacctgcttcattgatctatatgctgtatttggtggtttgctctgtaatgttaaggttaggtcatgatgggtgcatggtgacttttcatgtgtttggtcgtggcaagataattttgtttttgtaacgtggcaagatagttgttagtttaaatatttgttcatacttcatagctttgaaaagggaaaaaaaaaaaaggaattcattgtcaattttacctttttttagcagaattggacggtattgaatcaacattgattgaggaggatgtattctgggaagaactaattccgtcaaaacccaaaagtaaattacttaccctgtatattc

SEQ ID NO: 30032 - DNA, 1650 bp, Glycine max
  Clone ID: UC-GMROPIC073D10_FLI
tctacaccacccctaggctcttcgctccaaactccgaaccctaacctaacccaaccatcttcttcgcctcgagcacatcttaccctaattcgattattccccaatttcatcgaaccaatcaataaatcatatacacattttttgtttaatttttgatgccgataaaaaatgccgccgaagcagcagcaatcgaaagctgatttagcgaagaagcagaagattgtagaggacaaaaccttcggtctcaagaacaagaacaagagcaaaaatgttcagaagtatgtccagaacctcaagcaatccgtgcagcccaggcccgatgccgccaaagtcgatgccaagaaaaagaaggaggaagataaggccaaggagaaggagctgaatgagttgttcaaaatcgctgttactcagcccaaagtgccagttggtgttgatcccaagtccatattatgtgagttttttaaagtggggcagtgtgccaagggcttcaaatgcaagttctcgcatgatttgaatgttcagaggaaaggggagaagattgacatttacagtgataagcgtgacgaggaaacaatggaggattgggatcaggagaccttggagaaggtggtggagtcgaagaaaaccgagtataatcagaataaaccaactgacattgtctgtaaatactttttggatgcagtagaaaagaagcaatatggttggttttgggcctgccccaatggtggtaagaattgccattatagacatgctcttccacctggttatgttttgaaatctcaaatgaaggctttgttagaggaagaaagtgaaaaaatatcaattgaagaggagattgaaaaccagcgtgccaaagtggcaactacaactcctatgactcctgagttattctttgaatggaagaagaagaagatagaagagagagatgccaatatagctgcacaacaggcagagagggctaagaatgatcgcatgagtggtcgggagctatttttgtcaaatgctagcttgtttgtggatgatgcagaagcatatgacgtgtaccagagagaaccagaatcttatgaaactgaacagaatgggaataggaatgctgctgaagatggcccctgctcctcagcaacagctgcttctgatggtgaagatcttgatgacatagatgacgatgatgagttagacatggatgagttagatgaattggaagcaagcttatccaagacatcaatccaaataaaggaaacaggagctgaagcttaatccggagaatttttcgcaatcttcatgtgatatttttatgcctctgctgaacaatagagcattttcctgtggccactcgctctccttgcttccaggcagggtttttgaatgaaggctgtggtgataatgatattactatttgctgcatcgcatttggtatgaataatggcagtttggtataatccactttccttttttgttagacctcttattggaccttagacagacatttttgttgtttgaaatgagtagtcttgtgtagactgtacctgatttgaacatgagtttcctctatatgtcgaaaggggtctttaattgttcttgtgcttgtgattttcttgaaaccatcaaagcataaagtggtatttgttatgttatggatgttatagctag

SEQ ID NO: 30033 - DNA, 2584 bp, Glycine max
  Clone ID: UC-GMROPIC073G03_FLI
ggaacattcatctaagtcttgtcctccctccttcttcttctctcccctgcttctctttctccttccaaatcactcctataattttcaattcaaaggtggtatttgtgaaggaaccctaaaatataattttttgaccaaagatggggagaggtaagattgcgattcgaaggatcgacaactccactagccggcaagtgactttctcaaagagaagaaatggattgctgaagaaagctagagaattatcaattctttgtgatgctgaagttggattgatggtgttctccagcactgggaagctttatgactatgcaagcacaaggtaattaattaattaagatcaatttatttttagacaaatttattagtcctttcgctttaaatgatggaaatcgatctaaaattttgggtgcaatattattgtctcagcttttctttgctaatataaaatctgtactatataaagtgaataaaataattacatagatagtactaaaatacaagatgattgtgattctcgtatacttcgtggttggtgtcatgccgtgctgtacgaaacattttatatatgtccacttgcattaggaatatatctgtgactgtgacttcaatttctttaatggttgccaagctataattaaccctctcccccatttgatattgcctaggttgagtgtatataataagaaatgtgcatgcgcgtttgcatggtacggtgttaatcttcatgacactttagcatttctgatagcagaataactctgagaaatggttttctcttctgcctcctcaatcttcccaatctttcttggtcttttcctttttgtctccagctagcgcctccagttttgtgttattaattggctccaagttacaacacagtatgatactcctagctaattaattaataaagttatgatgaaaaggacacaaacgtaaccttccactttcactctattaatctaagaactcatattagttttgattgtaggactatttttatgtaggtattttaaactggtaaaacctcatactataagatagaatattacagattaaggcatattgtggtataatatttgggtaatctataacttacctacttgatcgagcatggatacgggaatgcatataacttatattctcgaagcagtaattgagtttattattttttcttttacatcgagtttattatgaattagtactaatctataaaatactctcgtaaaattacttttaacataaattactgaaagaattgttcttctggataagtgagctgccttatattacaatatgattcacgcatgcatgcgacgatgattgtttcacacatgcgatgtacaaagtgaagacacacaacaaaaggaaacaatagatttagctacaatatatatatatatatatatatatatattggaatatgttaaagctatgatgcaaacctaaagttatcaaattaattaacaatcctagttgtttcaaatgtatcggaaatgtctcaaatttcaaaatgtgttggaaatgtctcacaattcactttggatactctgtgtacaatctttagcaataaagtgataacatttgtttcccatactcccattattactattgaattgtgcacctctcattgtattaaaaaactcattttgaaatacaaataggcatattcctaaatgcaatgagagatgtagaatttaaataagagagtgctggattcaaatgcctaaagtgatttaatccaacaccttggatgaatcatgatgagagcttaaatttaagaataggttaacccaatccaactttcagttcagatttaaatactgtctaaatcggttttatctataaggttggtaagttaaatgatttgggtcattaaagtccagaactacaaaaaaaattacattcaaaaaataccaaaaaattaagtgatttagatttttgacaatgtatatcagaaaatgacaaggatgaagctcgtgggtagagttttcaaaatggatcaacctggccaggtcacaggttattagtgaattaaacagattggtccatttagactaaaaaaattagaaatgcattacagaattgtattttaaaaagtcttgcttcaactaggtgcaattgatgttaactagcacgctagccctattgaaatggtatctcgttagacatggtgtgacaatgctgcctgagcaccaagtcaaagaagaaaacattttgtagtggagagaattccccttcaatgttgctggtaaaccttaaatgctcaatccttgaaggtcccgcgctctctctttttggaaagaaggttggagaagattaattaaaagaagaggttaaacccaattcctaagtttaacttgtgagttaagtgagctataggttaatctaacttgaggtgaggattgtttggattaatgaggattttggggccggcatctgtgggagttttctgtcaatttttttttttgggttgatttagatgtatatatgactctacgtaccatgctattctgggtacttattgtgctcaaagcttagctcttttattcttcaataaatacatttttgcttataaaaaaat

SEQ ID NO: 30034 - DNA, 1296 bp, Glycine max
  Clone ID: UC-GMROPIC073G04_FLI
aaacaacatttatcagttgagtactgacccaaaagcataaccattggtttggcatcaaagtcactatttgtcagtaatggggatacaaaatcattaaaacggtaagtaacttctaatggttatgcttttgggtcagtactcaactggtaaaacaacatttatcaaacatctgcttaaaagtagttatccaggagcacatattggacctgagccaacaactgataggtttgttgttgtcatgtctggatctgatgagagaagcgttcctggaaatactgttgctgtccaagcagacatgccatttagtggtcttacaacttttggcacagcatttttgtcaaaatttgtgtgttcacagatgcctcatcctctactggaacacatcacatttgttgacactccgggagttctatctggagaaaagcaacgcacacaacgagcatatgattttacgggtgtaacatcttggtttgctgctaagtgtgatttgattctccttctgtttgatcctcacaaacttgacatcagtgatgagttcaatcgtgtgatatcatccttacgggggcatgatgacaaaatccgagtggttttgaacaaggcagaccaagttgatacccaacaattgatgagggtttatggagccttaatgtggtcacttgggaaggtgctgaagacacctgaagtaatgcgagtgtatattggctccttcaatgacaagcctgtaaatgatgctgccactggtccacttgggaaggaactctttgaaaaggaacaggatgatctactctcggatctgaaagatgtaccaaaagcagcttgtgatcgaagaatcaatgagtttgtaaaacgggcccgagcagccaagatacatgcttacattatcagccatcttaaaaaggagatgcctgctatgataggcaaagctaaagctcaacaaaagctcatcgataatttggcagctgaatttggaaaggtacaaagggagttccatttacctcctggcgattttccaaatgtagagtttttcagagagagattgagtggttacaatattgataagtttgaaaaattgaaaccaaaaatgacacaagcagttgatgacatgttagcttacgacattcctaatctcttgaagaattttaggaatccctatgattaaatttctgagcaattgagtcggtgctataattagattagttaagagtgacatttgtagcgtacaaattttacgggatctttatgcaatgtatgtgtgtcatgagatctttatgtgccatccggtggcctttcttttct

SEQ ID NO: 30035 - DNA, 2447 bp, Glycine max
  Clone ID: UC-GMROPIC073H01_FLI
atcctccaacgatgtcctcttcaacacggcacctaacccttccaaccccgaaacttttcttatttttaaggatcaatacctgcagctctcttcctctcttccatcacaaagagcctctctattcggcctcggggaacacaccaagagctccttcaagctgcgaccgaaccagacccttacactgtggaatgcagacattggaagtgacaacttggacgtgaacctttatggctctcaccctttttacttggacgtgagatcaccctccgctgatggaacagtcaaggctggcaccacacacggggtgttgctactcaacagcaatggaatggatattgtgtacggcggtgatcgcattacttataaggtcattggtggagtttttgatctgtactttttctctggatcctctccagaactggtgttggagcagtacaccgaactcattggcaggcctgctcccatgccttattggtcctttggttttcatcagtgtcgatggggctacaagaatgtaagtgatcttgagggtgtggttgacaactatgcaaaagcaggtataccccttgaagttatgtggacagatattgattacatggatgcatacaaggatttcacattagatcccatcaactttccgctggataagatgataagttttgttgatgctcttcacaaaaatggtcagaaatatgtgcttatcttggatccaggtatcagtgtaaataagacggatgcaacctatgttagaggtttgaaggctgatgtctacataaagagaaatgaagtcaattatcttggtgaagtttggcctggaccagtttattacccggattttctaaaccctcgcagccaagcattttggggtggggaaatcaaattatttagggaccttctttcttttgatggtctttggcttgacatgaacgagttatctaatttcattacttctcctcccaatccatcttctaatcttgataacccaccctacaaaattaacaatggtgaagttcaacaatccattaattacagaacagtcccagcaacatctttacactttggtaatatcactgagtataatgcccacaatttgtatggactactagaatccaaagtcactaacaaggcattggtggatataactggtaaaaggccattcatcctaagtagatcaacttttgtaagttctggtaagtatgcgtctcactggacaggagataatgctgctacatggaatgatttggcatactcaattccatcgatattaaattcaggaatctttggaattccaatggttggagcagatatatgtggttttggaggaaatacaactgaagaactttgccggcgttggatccagttgggggcattttacccctttgcgagagatcattcagagaaaaactccatcaggcaagagctttacatttgggattcagtagcttcatcagctaggaaagtgctaggcctccgatacagtcttctcccttatttctacacactaatgtatgaagcacatacaaaagggactcccattgcaagaccccttttcttttcattccctgaggatgtcacaacatataaaataaactcacagtttctagtaggtaaaggggttctggtgtcacctgtactacaatctggggctaccactgttaatgcatactttcctaaaggaagctggtttgacctctttaatgtctcaaattcagtgaatgcagaatcaggaaagtatgtcactcttgatgctccatctgatcacataaatgtgcatgttggggaaggtaatattttggccttacaaggagaagcaatgacaactgatgctgcccgaaaaactgcatttcaacttgtggtggttatcagtagcagcagagatagttatggacaagtgtatctggatgatggggaggcacttgacatagcaggggagaatgatcagtggacattggtaagcttttatggcacattacacaacagcagtgttatcgtaacatctaaggtcactaatggaatatttgctctggaccaaaggtggatcatagacaatataatattcttggggatacctaagtatcagagatttaatggaatggatttggcagggaatgagttgaatattgtgaaaggcacggattcaatgaggacggcagttgtgaagtcagaatctgatagctcctctcaatttcttaatgtacaagtttcaaaattgtcactccttattggagaggaattcaagctggagattgaaatcaagtagaagggtatttaagatagcaaattcccaccaagaatttgtgttctctttatagttgcatcgttttggcttttctttttaccactgctaaggttattatataagcatgtcgttttcccaaaccacggcagcaacattcataaaatgtcatactactttgtatcatgaataaattttacagaatattgtc

SEQ ID NO: 30036 - DNA, 877 bp, Glycine max
  Clone ID: UC-GMROPIC074B03_FLI
aggatatcttcaacagtgcatacagcaatggaagaagcacttgttcgtattttaacccctaggcgttccattgacatattgagggatgttcatgctgccaaggagcaaaggaagccatatgttgttgtgtttgttggagttaatggagttggaaaatctactaatctagctaaggttgcttactggcttctgcaacacaacgtcagtgtcatgatggctgcttgtgatacatttcgatctggagctgttgagcagctgcggacccatgcacgcagacttcagattcctatatttgagaagggttatgaaaaagatcctgccattgtagcaaaagaagcaattcaggaagctgcgcgcaatggttcagatgtggttctagttgatacagctggccgtatgcaggataatgaaccattgatgagagcactgtcaaagctcgtctacctcaacaatcctgaccttatcttatttgttggagaagcactggttggtaatgatgcagttgatcagctttcgaaattcaaccagaaattagccgacctctcaacatctcccacacccagattgatcgatgggatcttgctcacgaagtttgacactatcgatgataaggtgggagctgcactctcaatggtttacgtatctggagctccagtaatgtttgtgggctgcggacagtcctatactgacctcaagaaactcaacgtcaagtcaattgcgaagactctccttaaatgagggaacaacataaacctgtcatgaatgtttctgttttatgagtaacttgattatccccgtagatccccattacatcgtaagacaacattgacgcaatttggtttgtttaatttatattggtaagcttctttcctctgtt

SEQ ID NO: 30037 - DNA, 924 bp, Glycine max
  Clone ID: UC-GMROPIC074E10_FLI
agaaacatggcttccttaagctccttagtgctgctccttgcagctctaattctatcccctcaagttcttgcaaactatgagaatcccccagtgtacaagcctcccactgagaaaccaccagtttataagcccccagttgagaagcctcctgtttacaaacctccagttgaaaaccccccaatttataagcctccagtagagaagccaccagtgtacaagcccccagttgagaaacccccagtgtacaagcccccagttgaaaaaccaccagtgtacaagcccccagttgagaaaccaccagtgtacaagcccccagttgagaagcccccagtttacaagcccccagttgaaaaacccccagtgtacaagcccccagttgaaaaaccaccagtgtacaagcccccagttgagaagcccccagtttacaagcccccagttgagaagccaccagtttacaagcccccagttgagaagccaccagtatacaagcccccagttgagaagcctccagtgtacaagccaccagtagagaagcctccagtttacaagccaccagtagagaaacctccagtttacaagcccccagtggagaaacctcctatttacaagccacctgttgagaagcctccggtctacaagccaccatatggaaagccaccatacccaaagtaccctccaactgatgacacccatttctgaaggatgtcaagaggtgtattgagtatatgctaaataagaggtgctcaaaatgtagttatagattacaaattattgcaagggttgctcttagcttcttcatttcaagcttttgtttacactttgcagtgctatggcaaagataagagtatcatggatggaaaaagggggggaaaaatgttgctttgtactccaaattatgaataatagaactttatattatttatc

SEQ ID NO: 30038 - DNA, 476 bp, Glycine max
  Clone ID: UC-GMROPIC074F03_FLI
catagctcccacacggcttacaattttgcagataatcaggtgctcaagctctatgggttcaggcaccgtggtctcttgagtcctaagatcaagaggatcagaaatgagacagttagtcctttggagtttgtagaccagtttgatattcgaagacattctacggaaaacacggaatcaaagagctagtgagaaagttgttgttcaatggtggtattgtagagagtaattatttagaagtggagtttcatttggggacggttcgcatgtaattctgcttcttctgttgtcttggtacttctttgagaatgttaggatagaattctttcgtaagttatcttctttcttccaggtttgagcaaatcagcaaacaaaatttatttactcatctgctgtatactgagcttcctttgtatttggacttttgtgacatgaaatgagttcaccaacttaattaatatacttccctgtcctctttg

SEQ ID NO: 30039 - DNA, 1491 bp, Glycine max
  Clone ID: UC-GMROPIC074H03_FLI
gaaggaaagttaagtggaggtataaatcaagaaggaatcgattattacaacaaccttatcaatgagctactagcaaatggtttgaaaccatttgtgactctttttcattgggatcttccccaatctttagaagatgagtatggtggctttttaagccctcgcattgtgaaagattttcaagactatgcagacctttgcttcaaggaatttggagatagagtaaaacattggataactttgaatgaaccatggagttatagccaacatggttatgcaacaggggaaatggcaccaggtcgatgttctgcttgggcgaatcctaattgcaatggtggtgattccgcaagtgaaccttatttggtctcacatcaccaacttcttgctcatgcggcaagtgttcatgtgtacaagaccaagtatcagacatttcaaaatggtttgataggcataaccttgaatgttaattggtacgtgccgttctcggataacaaacttgatcacaaggctactgaacgagctattgacttccagtatggatggtttatggatccactaacaacgggagattatccaaaaagcatgcgattcttagtgagaacacgtttaccaaagtttacaaaggaacaatccaaattacttattgattcttttgattttattggcataaactactattccacttcttatgcctccgatgcacctcaactaaaaagcaatgccaaaatcagctacctaacagattcccttgctaatttttcatttgtgcgtgatggaaaacccattggtttaaatgttgcttcaaattggttgtacgtttatccaagaggatttcgagaccttttgttatacactaaagagaaatacaacaaccctttaatttatattacagaaaatggtataaatgagtatgatgattcatcattatcacttgaggaatctcttcttgatatttatagagttgactatcattatcgtcatctcttttatcttcgagaatcaattaagaatggtgtgaatgtaaaaggatattttgcatggtctttgctcgacaattttgaatggcacttaggttacactgtacgatttggaatgaattttgtagattacaaaaatggcttggaaagatacccaaaactttcagcattatggttcaaggattttctcaaaattgaaatcaaacttcatgaagattccatgcaataatactagttactatttgagattccttaaattgtaaatatatatatatatatatatatatatatatagttgctaggtttatttaattcttaggctattccttatgaatttgtagttcttaaaaatattcttgtgaatttatagttcttggaatttaaaatatatacataacacagtgtaagcttgttttaaagttatatgctctgaaagttattaaagtcaagcaatcctaagaatgtaatacctcttaactttgtgaaaatgtaaatatttattataggacttgatttt

SEQ ID NO: 30040 - DNA, 3007 bp, Glycine max
  Clone ID: UC-GMROPIC074H08_FLI
acaaacaaacactgctcagaggttgaatgaacgcacgcacgcacgctcgcagagttgatcatagtactgaaagtgattcaattcagggccgagttgcatgagtggaatcggtggaaatgggagcgagtcgaaaactccaaggcgagattgatcgcgttcttaagaaggttcaggaaggcgtcgaagtcttcgatagcatctggaacaaggtttacgacaccgataatgcgaaccagaaggagaagttcgaggcggacctgaagaaggagattaagaagctgcagaggtacagggaccagattaagacatggattcagtccagtgagatcaaagacaagaaggttagtgcctcatatgagcaggctctggtggatgcacgcaagcttattgagcgtgaaatggaaagattcaagatctgtgagaaggagacaaagacaaaagcattctccaaagaaggcttaggtcaacagcctaaaactgatcctagagagaaggctaaatcagagacaagggattggttgaacaatgtggttggggagttagaaaatcagattgataactttgaagctgagcttgaaggactttctgtcaagaaaggaaagaacaggcctcccagattgacacatctagaaacatcaattactcggcacaaggctcatataaagaaatgtgaatttatcttgaggctactagataatgatgaactaagtccagagcaggttaatgatgtcaaagatttcctggatgactatgtagaccgtaatcaggacgactttgaagaatttagtgatgttgatgagttatatagttcattacccttagacaaggtggagtcacttgaagatattgttacaattccccctggtcctgctaaggtgacacctgtgcttagcttgaagccttctgtggcagcttcagcttcagcatcacaaacatctgagcaagctgatgatacagcttcccaggatagcaattctgattttgtcgcaagaactccacctcctaaaagtagtatagttagtcctactgctacaacaccagcagggaattttgctactcctgtttctatgaatgttcctgtgcctaacttgtcgagtccaccagccattgcatcagtcatgcctggttcaaattctgttcagagttccttggagattagtagtcttgtggatgcttcatcttttgttaatcagtctagcactatgaaggaggaagagattaatagtttccctggtcaaagaccatctccatcgctttctgatgttacactcataaggaacatcagcagaaacagcgtatcaaatcaagcaacaaatagcatacctcttgcttctggcaatatggtttccagcaatgggccccttggttcagtgccttctgcacctgaaataaccaagagaaacatattggtaggtgatgatagactcggaagcaatgggatggtgcagcctcttgtatcccctttaagtaatagaatgatcatgcctcaggttgctaggcctaatgatggaacttcctcagttgactctagtagtgtcaacgaagctgcaactgtatctgggagagtgttctccccttctgctgttcctggcatgcaatggagatctggaagccccttccagaatcagaatgatgtggttcaggttcgtggaagaactgaaatagctcctgatcaaagggaaaggtatttgcagaagttgcagcaagtgcagcaacaagggcaaagtgccattcttaatatgccatcttttgtagcagggaatcctaagcagttttctgctcagcaacaaaatcctctcttacagcagttcaattctcaaggctcatctgttgcatctcaatctggtgtgggacttggagtccagtcaccaggtcttagtggtattgcttccacctcattaccgcagccaccaaattctgtccattccccatctagtcaacagtcattgctattagttgtttccaaagatgcagatgttggcaattctaagggtgacgagccacaacaacagatttttcctgatgattcagggactgaatctactgctagtaatgggattggcaagaattttgtgaatgaagatgaattgaaatccacatatgctgtagattctcctgctggagtacctgcctctcttcctgagcctgctcagacttctagagatattgatttgtctcctggcctacctttacaatcaaatcagcgtactggtaaccttggtgttataggaagaagttcaactgaccttggagctcttggtgacaacttcagtgcatcaactgctaattctggcggagttcgtgatcaattatattatttacagatgcttgaggcagcccacctcaaacttccacaacctaaggactcagaacgtcctaggacctatactcctaaacaccctacgataacacctcctagttttcctcaagtacaggcacctattgttaataatcctgctttttgggagagagtaggtatcgaacaatatggcactgataccctgttctttgcattttactatcaacagaacacttaccaacagtatatggctgcaaaagagctaaagaagcagtcttggagatatcaccggaagtataacacatggtttcaacggcatgaagagccaaaagttgcaacagatgaatatgagcagggaacgtatgtgtactttgatttccatattgcaaatgatgatctgcagcatggctggtgtcaaagaatcaagaccgacttcacctttgaatataactatcttgaagatgagcctattgtctagaagattcttagaaagatgtttcctggtaaatatgtagcatcttggttcttattagtgttttagttttcacaagcattttattgcatcggtaaacgacttttaccttccaaagaaggaaaaatgtcttgtgtaaagagaacagcacagatatgttgaataagtttccatgcacaatctttcttttccgcaaagtttttcttaatgatgaatgatgatgctaagaaattgcc

SEQ ID NO: 30041 - DNA, 1580 bp, Glycine max
  Clone ID: UC-GMROPIC074H10_FLI
ttccacaccaaaattcagtgaggagttgaagtttgcttcttgtatgagaaaattcacattcaatggacttaaggtggcaactaggaatttcagaccagagagtcttcttggtgagggagggtttggttgtgtcttcaagggttggatcgaggaaaatggaactgcacctgtgaaaccaggtactggactcacggttgcggtcaagactcttaaccacaatggacatcagggtcacaaagagtggcttgctgaattaaattatcttggtgatcttgtccatcctaatcttgttaagttgattggtttctgtattgaagatgaccaaagattactggtttatgagtttatgccccgaggcagtttggagaaccacctctttagaaggcccctgcctcttccttggtctatcagaatgaaaattgcacttggtgcagcaaaaggtcttgcttttctccatgaagaggctcagaggcccataatatatcgtgatttcaaaacatctaatatactattagatgcggaatacaatgccaagctttctgattttggacttgccaaagatggtcctgagggggagaagacacatgtatctacaagagttatgggaacatatggttatgctgctcctgagtatgtgatgactggacatttgacatcaaaaagtgatgtatacagctttggagtagtgctacttgaaatgctcacaggccggcgatccattgataagaaaagaccaaatggggaacacaatctggtagagtgggcaagacctgtactgggagaccggaggatgttctaccggataatcgatccccgccttgaaggccacttctcggtcaaaggggcgcagaaagctgccctgctggctgctcaatgccttagccgtgatccaaaatctagacccttgatgagtgaagttgttcgagctttaaagcctctgccaagcctcaaggacatggcaatctcatcttatcacttccagattgcgcgcgtagatcgaaccatgtccatgccgaatcataaaaacggtattagaacacagttagtatctgtgccaaggaagggtcaacctgtaaggacattgtctagtccaaatgttccacatggttctccataccttcatcataccaagtctccaaaacctattgggtaagaataactgttcactgtctttaatttgattgtctattcgttcagttcccacaaattaggccaccagctctacatacagcaactgttgtgtgtctgggagagtttatctgaaacctgatggaattattaaagtcttagtttcattatataatctcaaataaggtaagtgcatgagacagtttaatgttacatagtaatagtagggacatgtcatatacagttttcaagtatgaaactgttattcactgaaattgtttaactcttccaccttgtcttgggtttcgttccttctagaatgtattttttgtaaagaggaaaaaaaatgtggtgttaactcatgttagacatagatttttacacactcattggacaatatacatttcagtaaatgctgattgatgcaatcgaatgttgtacttgtactagag

SEQ ID NO: 30042 - DNA, 1603 bp, Glycine max
  Clone ID: UC-GMROPIC075B10_FLI
gttgttggtagaagaatttctctgggattgactttgattgaatgattgttcactgttcatgctaaacaacacaaaccaaacggctattctgactactttttgatcctgtttctaatcttgtttctaggatcctgtctgtctctcttggtttggtttattagacttgtgctgtgtctaagtctttctttcagggctctgtgagttgaattcaggtgtcacatccaaggcaacaaaacaagatgatgagtccaaaccttgcaaaacaagttggggacacaacctataccaagatctttgttggaggattagcttgggagactaagagagatactttaaaacgctatttcgatcagtttggggagatcttagaggccgtcgtcatcactgacagaatcacaggaagatcaaaaggatatggctttgtgatcttcagggacccaaattctgcaataagagcttgtcataatccctatcctgtgattgatggaaggagagctaactgtaatcttgcagctcttggtgcacagaaatttgatccatctataacaacaggttaggtctttcactttctttgttttaattctcagtttactttatggtgattatgtaaatcagatcaatattccttgcatgcaaaccatcatagtggctaatatggttgcacattttttttactcctcctactgtggcctattcccactttgaaatgtttcaggaaggcaaaaattcagtagcccttcatggaatatggcaccaattccattgcaaggaacttccactcattacaatcagcacataccacactacccatttccgcatccagtctacaggtatcctggttatcctcacccacaagacttgtatgaaatgaactacaataatgcttatggtggacagcagcttccactctgttggtttccagcatattgccaacccttttatggccttagtagacagtttattccaacagcatatgtgaaaaaggcacaaacccctgacgtgtcacctcaggagttcacggttgttggcttctcagaacctatttcagcttctccctcaatttgcagcactggattagacacaggaacagtaccagctacaggagtgctagaatcccaccaagaacagaagtcttcaacttaaagctatgatgtcaatttactagaatagagaaagtaaaaaagaaaaatgacactgctgaataaaccaggaagctctaagtacattcccattgaggtggtctagcaaaggaactaaatcaagcaataacgtattgagatctcccatcgatggaacagctgatcctagagacctgacacttatgaagtgaatcctggatttgttcattgtctttgaacatttttttacttttcagcattctggtgcacagtattcattcttcggttttcctttttttttcattttagttttcttttttaaaattggattcctgctaagctatagttaaaaaagaaaaagaaaaaaaaacgaaaaaaattgcttgttattattcttttattcttacacctatactttgcattcctattttgtgttagttagctgaactaaaattgcaagattaattaataccagtatttctttc

SEQ ID NO: 30043 - DNA, 940 bp, Glycine max
  Clone ID: UC-GMROPIC078B12_FLI
gtccgggtccatgcaatggaagcagtaatggcttgttgggagttagagcaatcattgcagagtctaacaggagtttcacctggagaaggtacaggggcaacaatgtctgatgatgagaatgaccaagtagatagtgatgccaatctcttcgattgtagttttgatggggcagatagcatggggtttggtcctcttgttcctacagagagcgagaggtccctcatggagcgagtaagacaagaattaaagcatgaactgaaacagggttataaggagaaaattgttgacataagagaggaaattttgcgcaagagaagagcagggaaacttcctggtgacacaacttctgttcttaaagcttggtggcaatcacattccaagtggccttaccctaccgaagaggataaggcaaggttggtgcaagaaactgggttgcaattaaagcagattaataactggtttatcaatcaaaggaagaggaattggcacagcaatccttcaacttctactgccttgaagagcaagcgcaaaagaagcaatgcaggtgataactgatgatcgttgcatgaaattcaactctttgtcctttggtcaatcatggaaagacaatgagaaagaaccacattttgtttctgatgggccagggttaaagcagatcaaggagctaatattggtttacttatgcttaaaggccagcaaatagttcatatagtacttgtgatgctacataattaggaagttcaattaagaatcatataccaacagagaattatgatttttgttcatgttttattgctttgtgaaatatagtatatggtagcgaagggggttatgggtgtacagtaataagctgtgcattttttttcccttacaatcatactcttgtttttgttcttggtctttcaattggtatttggtaatgtagagagtaatttgttgt

SEQ ID NO: 30044 - DNA, 3982 bp, Glycine max
  Clone ID: UC-GMROPIC078C11_FLI
aatatttacaggagcgacctgcactcattgtaacttttgtggacctcgactgggaccatcccgcctggttggaaatgcgcgcagaatgtgaagccaaaatcaacgcaatgagacagaaaattggtcagcgggagacaaagttagcactggtgttgatccaacctccaaaggcaacatccatggacgacccaatagcgaatgaaaaagcgcttgaattgtgccagcattgtcgtttgaactcacgtcttttgttcgtttttccccgcctatctgatgatcgggctctaattgagcgagtcaatcgcttagagaaggcttttcacaatattgcacaagagttttatcatgcttgtttcaaaagaattcggtctcggaatgtgccgaataatgatgcccattttctagtcagacaacagtacaaactggcattcatttcggagctccgtgaggaccggcattctgctcttcggtacatttgtctgctgagctatttgccatgagtttgacgtgtcggatgttgatgtttacgagcagtgttcagtcgcgagtctgctcaatttcaaaatatgcgaactgaactttgtgctaaacagcgccgttgaagccatcaatcagttcaggcgacaccacaacttctttttcaagcgcgagtcggccttttacccaagccgagagttggctgctattgaactgacttggtggaaggcacaacagtgtcgactttttgctgaactgttcagccgtgcggtttccaatggactcgcggcctatccttcacaaaatccaggccgtttcctcggcgaggcggcgacccattacaaaaaggccaactctttgattagaatattaaagtcgaaattggccgcagcaccgcaacaaagacagaaatcgctgttggccggcgaccctctccaatcattcgacttttccatgacaaccacatattacgggcaaaggccatggcgaatgacaacgcagttgagtgattcaacagcacaaaatgtgacaaaattaccactgttgagcagtgtgaaccttcaactattggaacacggtgccaagctgtttctggagaacaacattcatgaaaactatgcccattctctgcaattgctttccgcggctgttgctcaatgtaagcgctacggttgcgaaaggtttgccaatttgtcgctgtttgacatggccgaggagtgtgttgcctcgcaacagttttcaaaggctcttcaaattctccatcgtttatgcattgaggacacaagtgtgttattttatccatttttacgtgaagcattggtttcatttgccaatgccgctttttgttcgctaagtctcaacgaatggacgtgggcattgctccaacttctccacccgcaattggccaataaatccgtaactttgcgtgttttttctgtcggcgaaaatgaccaaagcatttggatggaaaatcttcggcgttttctattaggtgatctgaactttctaccgtttcccttaacgagttctgcaaacgatcatcgctcaattttctccatagaacagctgaattcattccaaagtcaatggcgccaattggttgcccaatcgtcttcacctctgcagttccaattggaaatgtccaacctgaactactcgcccattaagttcaacgctcgttttctcgttataaattcgtctgctaacaataagcgacaaacaaatgaaaaatttgcttttgacgaagaaatagccgacgggtttcaaattgcaactgccgatgactctcttctgatagaagttgtgctgtataatatttccaatgttccattgcgctttgaatattgttcattgactctggatgaaattttaaattcatccggtgccaaaaagtcgaaaacactgtccgaatggtctacggcgggaaattcgtcaaaaaattctacgttggtattggttcccaaaagaccaagccgcgttttctttatctacaaaactacatttgcaacatctcttaaacaattgatgcaattgccagcctcaaaggcaccgactagcagatgccaaagtccgttgatggatgaacagaatgccaaggaaattttaataacggtccgacacttttcattgcgtacatcgtccggatcactcagctgggacatcgatcaccgatcgacgagtaatagacatcaccaaaattcaattgaggagatggacaagaacaactatgcagtgaaggtgcgaccacaacggtgcaatgtgttactgacctgtccaattttggctgatagcaccgaattggaattatttgttgacgaatgcgttcaattgactttaaccctttgtaatgcggagcgcaacggaacactgctgaagaacatttggtgagcctggtacactttttccgatggcgcttaacttcacctaagataaattgatttcgttaaattttatgagaattgatcatttttttatcaaattgaaaaaaactattttcaaattgaactagtaattactctttacacttctataaagggtaatctgccacaaagtctgccgtgaggatgaagagttcgccaaccagcagcagaattcgcacacactaaactcattggcagcaacaaaatcaccaatccctggcgtcattcgacggacttttgttcttccgtcttgtaaaggccataagcaacagcagcaggtgtccataggcgacgaaaaggacggaaagacaacgacacttttggtgccaatgtttagccaggagctcgcttcattgcttgcgcctgaacaatcgactgacttctccattcggcttcaatccaaatctaacaattgcatttcccttcgcgttcaagtttgttgtacccttccttcaaaatcagaaaatgaaggtcaaccgttggaagagcctgccgaattggtgcagcactttcccatccgttgcgttgatcccttcgaaccgaaaatcgcaattttttgtgaaaatgcgagaaatcgaatttcatcggttacgtttggtctttgcattttagggaggaaaggcacaatgtttggtctttgggcaaaagtttcgggtgcaattacaactcaaatgcaacggaagagtggcagtgcataatgtacattggaaattgaatgacgcatttgaacatttcgacgctattcctttggattctttgataaagcaacacttcgaaaaactcaaaatttcatctgttgactcaagcgaattcctcaacacgcattctgtttgggtgaaagtaacaaatggcgacggccaatcgccaatgagagagacgggacaaagcaatggaggggacgacgagcaccagacacagctcggagacgtggtggtggagtggagcagcactctttcctttgaacatgttcgttccgtgttggcattgcccacaatgccacccattttggtcattccgatgacactaaatgtggaattggccaacgagaacgacggggaagagactaatgaagcgattagtggatgttgtttcagaattctgaaaccattccgcatcagatattacttgaggaacacttctgggggaccattggctgtgcatttaaatttcgagcagtctgctggcacttctatagatggaattttggaagatagttttttgtttttccccaatgatgagcgtgtcattgagcagtgcgttgtcccaatttcgctcggcttcgtcaatttcccaaaacctaccattcgctgtgtctcttccattcctgactatgctgatttggaattcggcagtgaggatttggaacaacttaatcatttgattatgaagcacactttcaattctgtgccgaaaagcttgttcattttgcctaggtgactgacaaatcgacaagttcccgatgttacaaataaaagggtgaccgtatcacgcccagattcagtgagacatgtgattaatgttgatagattgctacattatttatgttaaggtatttattttcatttatttgataaaagttttgaggt

SEQ ID NO: 30045 - DNA, 964 bp, Glycine max
  Clone ID: UC-GMROPIC080D11_FLI
cttactttgggatacatgataccccttgttctgaactttgaggcacttattgctcaaaatcctaacaacaaaaactttgtgtttggaaatgttgtgtggcttgaagtgaatgaaatagctgtgaggctaatcaccatggtggctttcttgttgcaattccgactccttcagctaacttggtcatcaagaaagagtgatgaaagcaataaaggcctttggattgctgagagaaaggctacttgtgtcactttagccttgtacgctgctggtttattgattgcattgctgttgaagttgaagaaagatggagatgcggttcctgtcattactccattgaaccaacaccattcatcttgggagaacataaaatcttatggcggtttggtattggatggttttctcttgccacaaatcattctaaacctgttctcgaacatgaggggcaacgttctttcatgttctttttactttggaaccacttttgtgagactgttgccacatgcttatgatctttacaggactcataattatgctcgcgtagatagtggatcatacttctatgcagatccaagtgcagatttttactccactgcttgggatattgtgattccattgggaggtgtcctgcttgctatcattatctacttgcagcaacgttttggcgctcattgtattcttcctcaaagattcaaagggtctaaggtatatgaaaaggttcctgtggttgctgaatcagaagctgaagtagagaccgccaacttgtaaaattcactttttgatacctaagttcaaatggtataatcatggtgaatcaaaattaggccatttctaatctcatgcattctagctataaagttgtgttgttgcaatatatgtagtgtaagcaaaataaattttgttgcagtaaagaactgttcatgtggctgattaagcgaagcattgtctgctaagaaaattttaattc

SEQ ID NO: 30046 - DNA, 1685 bp, Glycine max
  Clone ID: UC-GMROPIC087G02_FLI
tctttttcttctaagctatttgattggatgataaaaagatccaagtatcaatatcaattgatttgattagtggcagttccaacaatggaggttgtggtaactccaactctagagaatgacacaataacaacactctatgaagcatcactaaatggctctgtaagtaccttaaacaccctgatccaaaggaaccctctgattctgcatagagtttcactctctccattcagtgaaaccccattacacatagcctctttgctaggacatttggaattctgtgaggcacttcttaaaaggaaaccaagtctagcaagtgaagttgactctgaaagacgttcccctcttcatttggcttgtgctgaagggcacactgaggttgtgaaagctcttttgcatacaaaccctgatgtttgcttggctatggacaaagatgaaatgcttcctctccacttggctgtgatgagaggacacactggagttattaaggagttgaccagagccagaccaggctcaattcaacagaacactattgatgatggttctgttttgcacttgtgtgttaggtataatcatttggaggccttgatattccttgtgcaatcagcaacaaggaaccaacaacagttcctgcttgccaaagacaaagagggtgacacagttctgcatttagcagtgaggctcaaacaaattaagaccataaaacacctacttatgctacctgaaatgagaacagcgattagtgctttaaacaaggcaggtttaacagctttggagatgttggagcgctgtccaagagattttataagcctaaaaattgaaaagatgctacttgaagctgaagttcaaactggcactgcacaacaagggtcaccatcaccaagaatagctactcaaccatcaaatcaatccaagaggagcaagatatgggaaacattatggttaaaatacttacaataccaaagtaattggatagaagagaaaagaggaacattgatggtagtagccactgtaattgccaccatgacttttcagtcagcaataagtccaccaggtggggtttggcaagaagatacaataactggtggacacaactgcactacttatggcatttgtaaagcaggcactgcagttttagcatatgattggccacatgggtttctgaaattcatgaccttcaacaccacctctttcttctcctctcttgctgtggtgctgcttctcataagcggttttcgccttgagaacaagctcatgatgtggatcttgaccatgggtatgactttggcactcacattcatgggactcacatacttttgggcacagagcttggtcacccctgatcacattgttgataaagttaataggatgggaattcctttgtccatagtttgggtgatcatgcttctagtggctgttttggttcatggggttaacttgttcttgtgggtaaagaagtatgtaaagaagtggaagaagcagaagctgctgcagagctaaaagtcattgctcgcgagagttagtccagtgaatgagaattacaattacccctttgaagtttgcaatataaaataataattcttgcatatccagttgttagttagagaaataggattgtgacaacaactaagataaaataattgtgattggatataatcatcacatggaatctaaaaaaattatgtgtt

SEQ ID NO: 30047 - DNA, 2075 bp, Glycine max
  Clone ID: UC-GMROPIC087H10_FLI
gtcagagttcttaaaagcattgtcagatatgtggaaagattttgattcacgtgtattgcgatacaaggtccttccaccactttgtgcagagcttaggaatgtggtgatacagccaatgattctaccaatggttctaaccattgccgagtctcaggacaagaatgattttgagcaatcaacacttccagcacttgtccctgtctttagttctgctgctggtgagacactattactgcttgtgaagcatgctgagtttataataaacaagactagtcaagaacatttagtttcacatgttcttccaatgattgttcgggcctatgatgatactgatgctcgtttgcaagaagaggtcctgaaaaaatctgtatcccttgccaaacaactagatgcccagctcgtgaaacaagtggttttgccccgtgttcatggattagcacttaaaacaacagttgcggcggttagagtcaatgcattgttgtgccttggggacatggttagccgacttgataaacatgctgtcttggacatcttgcaaactattcaacgctgtactgctgttgatcgctcccctccaacccttatgtgtaccctaggggttgcaaattctattttcaagcagtatggagtagaatttgtagctgagcatcttcttccattgcttatgcccctgctgactgctccacaattgaatgttcaacagtttgccaaatatatgctctttgtcaaggatatgctccacaaaatagaagagaaacgaggagtggctgtgactgattctggaacgccagagataaaacttgctcccatggttaatggccatcaatccgaagccatgcggacaagcagcagctctatacctgcttcaactaaaagcagctcttgggatgatgaagattggggtcccaaaccaaagggcactgcctcttctatccagaattctattgatgtaaccagtcaatctatggcaggcaaccctgtgggtcaagtaacatctttacaaaagcatttgtccttagcggctttatctgctaagcaaacaaccaagccatgtccctcagtggatgtagaatggccacctcgtgcatcttctggtgttaccctacaatttggtgatactgaaacgcagacaatagcagcaggaacttcatccccatctaatcttgaatctgatgatccttttgctgattggcctccacgtcctaatggctcagtatcaggtggatctggaatatccaacaatgctactttaggaatgccactgaacaaagttgggtttaattcaatgagaagcacttcaagcaatatgggtccccaaactagcaacagttggcctgttaattcccaaagttctgcagagtccattagtttgaactcaaggaatcctatttcaacaatgggtagcctgaatagtggtggccttggacaacagaaatctcttgggtttgtaaaacaaggccaagctttcccagcatcaattgtttcatataataatgttcagtcaacagcaacagatcttggatcaatattttcttccaacaggaatgaacaaattgcacctaaacttgcaccacccccttcaaccactgtgggtagaggacggggaagagggaggggagctgcttcaaccactggttcctctcataccaagtcacacgctgagcagccaccccttttggatttgttggggtagcttgcttctattattgttcacgtattagggtgagttactgttgagattgtacattttatgcaacatcctatgttgagtgcttggagacatttattgtgaagggagatttcagaaaatcttgccaggtaacatgttttaagggacggctactctttgtaaaggttttgttgtatgttgcttagtctatagtgattttgcaaaatttggcttaatattttttatttttttgtcctcgcttcatacttcattcttagggcatcaggcaaagtgtattaaaagaagtcctgattactgtgactgggttgaaaataataaaggctgtcatgaagtatcttctgtaacaaggatttgaattccgttatgtacgactagcataatacag

SEQ ID NO: 30048 - DNA, 678 bp, Glycine max
  Clone ID: UC-GMROPIC088B08_FLI
gttcttaaacaaaatttaaattttatatactatgctaattgctggtgaataatgccttgtgcaatcattggtctttctttaatgctaattatcatttatagttagtagcattagatggctggactctgtttagttgttagtgaaaaggcctgttattttgtaagttggtagtaatttcctgctctttaaatacctaaaaaatttattttgtaagttgtttgctcgtggtaccaaaggactgttattgttgagtgtaggtacgtacagaggatgatctgactgaagcaattgcaaaagctactggaccacagaaagattcactatgttttatagaagtttttgtacacaaggatgacaccagcaaagaattgctggaatggggatctcgtgttgctgctgctaacagtcgtcctcctaatcctcaatagaaaatcatttcctaattattgacctgttttgtgtattttgttgaatagagttccactactggatatttacaagagaaaaacgacaaaaatgaaaaataagttgaaataaatgtttgcttttccagatttgtatctggtctcgtgttgctgacttgttgacttgttgtaatcatgaactattattgctttataataatgtcttgtataatggaattgttaatgaatcaaagaggatatagccattgtatgt

SEQ ID NO: 30049 - DNA, 879 bp, Glycine max
  Clone ID: UC-GMROPIC088G01_FLI
ctgatgatgcgtatccactgggacctccattgtttatggagacaccagggaagtcttctccacttgctcagattgagttcccagattttgacgagattgtggctccattagctttgatggatgaagagacatggcccaaatcaagtggaagtcagtcagatcataaatcatcactatctagcaatagcccggacattctaagtgttaatcaactcttacaatcggttttggaaaccgcacgacaagtggcaagtttccccatttcctcaactcctgtatcttatgatcaaatgaagaaccagtgtgaggcacttgtaactgggaaacaacagaaaatgtcgattcttcacagtttcaagcaccagcaggagactggggcaatagttctttcaagtgaaaatgaaataaaagtttcccctctgccaattaagacactggagtattcagaaggtgatctgaagttagtgcatcacgagcaatttcaagcacaatatcaagttcgcctctgctcatatgactttggacagcaacattctttgaaactaccacctgcaagcccctttgataaattcttgaaagctgctggatgctaatggtacaagattggcataatagatgcgtatgtaactttatatagagatgaacaaccccattgttttttttttggttagttgttgcctctttaccaatcagtcggtcttattttcattctttttgtagtggtaaacttggttttttttagctgccttccaccctacatgcccaaagtgagtaaaatctgctccatagtgccacaatgtatgcctttctcttttctttttgttaggggaggaccatgtttcttccggcaaatgtatgattttgtgggtaatttttcgt

SEQ ID NO: 30050 - DNA, 693 bp, Glycine max
  Clone ID: UC-GMROPIC088G05_FLI
cgttctttctgccctacgccaattttgtttttcgccttgtatctctcccaattcctcagtttccttctttcttcatctttgtgtcatggccagaggttcttcccagtctcagtcctccacttcaacagccacgcgaccaggaccagcaggcatggctccccgcggttccgccgccgccaccgccggcatgcgccgccgccgtctcggcggcggaaacagctccgccagcaccggcgttggaggcggcagcagcaacatgctgaggttctacacggacgacgccccggggctgaagatttcgccgacggtggtgctcgtgatgagcctctgcttcatcggcttcgtcaccgcgctccacgtgttcggcaaactctaccgctccaaatctggtggcgccgtttgatcttttggagatgtagttccgatccgtacccgatcgctttgttttctgtttttaattccgtaatttagttaacacttgctattttgtagttgtgaaatcaaatcgttgactatcttcttactgtggttaatggaaagtcgcttttgtttttgctttggccttaaacgtggatctgttgttttgcttaatcatgtatcttaatgagttaggtttgccattcttcctttttctcaaaggaatttgatggtttcctttggacaagttatatttgatcaaagtttatcaatgct

SEQ ID NO: 30051 - DNA, 1887 bp, Glycine max
  Clone ID: UC-GMROPIC089B11_FLI
ctttcttttttgcatcttctcttaactcctttcttaaactgtgcaattattgtggttttggccattgctttcacttcattgcctaaagagagtccccagctcagctcagagatagaaagagaaggaaaaaagggttattatggcaggaggaggagctccagctaaagcagatgagccacagccacatccaccaaaggatcagttaccaaatatttcttactgcattactagtcctcctccatggcctgaggccatacttcttggttttcaacattttcttgtgatgcttggcacaactgtgttgattcccactgctcttgttccccagatgggaggtggcaataatgagaaggcaagagttatcgaaaccctgctttttgtagccggtattaacacattgttgcaaacaatgtttggaactcgactgcctgcagtaattggagggtcttacacctttgttccaaccacaatctcaattatccttgctggccgattcagtgatgaaccagatcctatagagaaattcaagaggataatgagatcaatccaaggtgctcttattgttgcttcaactcttcaaatagtactgggcttcagtggtctctggcgtaatgttgcaaggttcttaagtccactttcgtcagttcctttggtatctcttgttggttttgggctgtatgagttagggttccctggggttgctaaatgtgtagagatcggcctgcctcagcttatattgctagtatttgtttcacagtatgtgccccatgtgctacattcggggaaacatatcttcgaccgttttgccgtgttatttacaattgtaattgtgtggatatatgctcatctacttactgttggaggggcctataatgatgctccacataaaactcagatatcatgccgcactgatcgtgctggacttattgatgctgctccttggataagaattccatatccctttcaatggggagcaccttcatttgatgcaggtgaagcctttgccatgatgatggcatcttttgtttctcttgtagagtccagtggagctttcattgctgtatataggtatgcaagtgcaacaccattgccaccatctattctcagtcggggtattagttggcagggagttggcattctgttatcaggattatttggaacagtcaatggatcctctgtatctgtagaaaatgcaggtcttttggctttgacacgtgttggaagtagaagggtggtgcaaatctctgccggatttatgattttcttttcaattcttggaaaatttggagcagtttttgcctctatcccacctcccattattgctgccttgtactgcttgttctttgcttatgttggtgctggtggtcttagttttcttcagttctgcaacctcaacagttttagaacaaagttcattttaggcttctcaatcttcataggcttgtctgtgccacagtacttcaacgagtacacagcaattaatggctatggtccagttcacacaggcgcaagatggttcaatgatataatcaacgtcccattccaatcaaaaccatttgttgcgggtgttgtggcatattttctagacaacactttgtttaagagagcagctgatattaggaaggacagaggtaaacattggtgggacaagtacaagtccttcaagggtgacacaagaagtgaggagttctattcacttcctttcaatctaaacaagtactttccctctgtttaattgtgcacaagagctcaatcaaatatataaggtggtctcatcatgttcaccacggtctagttctaatatttaattgaattttcttacacgccatagctctatgaatagtccaccctattatattttatagcattttgtaatacatttatttt

SEQ ID NO: 30052 - DNA, 2117 bp, Glycine max
  Clone ID: UC-GMROPIC089D05_FLI
gttacaatcagctggtaaagaattatccaccacttgttcccattgaaacaaatctcaaagatgggattaacttcagttcttccaatttcactggattttcaaacattagaaacatgtacataactggacacagcaatggagccataaatttttgggatgcaacatgtccctttttcaccccaattttgcaattaaagcaacagagtgaaaatgatttttctttaagtggtatacccttgacggaattatattttgatagcaactctccactccttttttctggtgaccaaagtggaatggttcgtatctatagattcaaacctgaaccatatgcctcgaatagcttcatgtcccttacaggaggtacaaagaaagggaccgatcacgtaatccacagtatgaaacttataaagactagtggtactgtaatttgtatgaacatagatcacagctcaaggcatcttgctgttggttctgaccaaggaaatgtttcagttatcaacatagatggaccatctttgttatatcggaaacatattgcaagtgaaatttccaccggtatcatctccctgcagttcaaaacctgcagtttgcatggttttgagaaaaacattttagcagttggaacaaaggactcgtctgttctaacactagatggtgaaactggaaacacattgagcattggaactattcatcctaagaagccctctaaagctatatttatgcaggtgttggatggacaaggagaacaaaccgcaggatcagttacaaaagatggcttagagttgaaagaagggattcatattgaagatgcaacagcaaagcagttgtacattctgctgtgttctgagaaggctttgtatgtctattcttttgcacatgctgtacagggtgttaaaaaggtgctttacaaaaagaagtttcattcctcttcctgttgctgggcatcaacaatttacagcctctctgatattcgtcttatactccttttcgccagtggaaaagtagaattaaggtctttcccagagttaactctaatagtggagacttcagttagaggtttcacttattcacctccaaaattgaagtcattttctgatagccagatatgttgttcatccaaaggagatcttgttttggtgaatggtgaccaggaaatttttgtggtctcattgttggcccagaggaatattttcaggcttttggactctgttagctgcatctacaggaaggaaaggatgccatcacaagaagagcttgttcctggccctgtcatccataaggaaaagaaaaggggtatattcagctctgttatcaaagattttactagcagtaaagaaaagcatgcacccctcttggaaaagaaagatcccaaagaaagtatacgggaactctcagcaatattctcaaatgcaaactttgcatgtaatgataatgttgataagccaacaatggatgaaaatcagcttgaattaaacatagatgatattgacctagaggatcatgtagaaaaacgcaaagaacaaagcatattgggagctcttaataagaagaaattggctggcacatttcaatctctgaaaggaagattgaaagagatgaagggaaacaaccaaaaaacatcagataaggaagggcaacaggatcaaaaagatggtgcgcttgatcaaattaagaagaaatatgggttttcttcttcctccaatgtatgaatatatctatcacatgcattctcatcatgcttgacttttctaccacataacaattcacaagcatggcattttatgtgcttatttacaagcgaaaggtgttgcctaggccatagtgctaatttctattttggagttgtcaagtgtatttgttaatgcaaacatagtttgacaatcgagattgatcattaccaagtatctctaatctacgatttattacctacccattagaggttttaatcggttgtactttgtgccagtgttctttttattcttctgcgaagaaagtagcacttgatttaattcgttcctttcacttttatactctagcatgctaaacgttgtacaaatttcaaaatagtctttagttaattttgaatgaggcagtacaaaaagagataacttttc

SEQ ID NO: 30053 - DNA, 1161 bp, Glycine max
  Clone ID: UC-GMROPIC089F01_FLI
ctcttttcaactcaactcaactctctaagctgaaatctgaagctaacttaagggaaatgagatggccaatggcaacactagtcatcgcttcaagctcttgcttttccttctaactctgcactcttcattcgctgagattttcttcgaagagagattcgaagatggatggaagagccgttgggtgctatccgattggaaaaggagtgaaggaaaagcgggtaccttcaagcacacagcaggaaaatggtctggggatcctgatgacaaaggtcttcagacatataatgacgccaagcattttgccatatctgcaaagatacccgagctaagcaacaaggacagaaccctggtgctgcagtattctattaggtttgagcaggacattgaatgcggtggcggttacatcaaacttctttctggttatgtcaatcagaagaagtttggtggtgataccccttatagtttgatgtttggaccagatatatgtggttcacagacaaagaagctccatcttatactatcataccaggggcagaattaccccattagaaaagatctgcaatgtgaaacggataagttgactcatttctatacatttattctaaggcctgatgcctcttatagtatccttgttgataatcgggaaagagattctggaagcatgtacacagattgggacatccttcctccaaggaaaatcaaggatgtcaaagcaaaaaagccggctgactgggatgatagagagtacattgaagaccctaatgatgtcaaaccagagggatatgattcaattccagctgaaatccctgatccaaaagccaagaagcctgttgaatgggatgatgaagatgatggactatggaagcccccgaagattcccaatccagcatacaaaggaccatggaaacgcaagaaaatcaagaaccccaactacaaaggaaagtggaagattccatggattgataacccagaatttgaggatgatcctgatctttatgttctcaaaccaataaagtatgtgggcattgaagtgtggcaggtgaaggcaggttcagtttacgacaatatcttaatttgtgatgacccacagtatgcaaagcaaattgtggatgaatttatggctaataatagagaggctgaaaaagaagcttttgaagaagc

SEQ ID NO: 30054 - DNA, 2394 bp, Glycine max
  Clone ID: UC-GMROPIC089G02_FLI
tgggaaattcacgttcgcgcttcttttttctcttggcattgcgttaacgttgcgtttgtgtgtgcaattaatatcacacaacaaaaccttgttcgttcttctctgaactctctcattagtgtgagccgagagtcatgacggacggtcatctcttcaacaacatcaccctcggaggccgtggaggcaccaatccagggcagataaaaatatatcctggaggaattatatggaagagacagggtggtggtaaattaattgaagttgataaatctgacataatgggggtgacatggatgaaggtgccaaggagtaaccaacttggtgttcaaatcaaagatgggttgtactataagttcacgggatttcgtgaccaggatgttgtaagtttgaccaattttttccaaaacacctgtggaatatcagtagaagagaagcagctttctgttagcggacggaattggggagaagttgatctaaatggaaatatgctggctttcacggttggttcaaagcaagcttttgaagtgtctttagcagatgtctctcaaacgcagcttcaagggaagaatgatgtgatcttggagtttcatgtggatgacacaactggagcaaatgagaaagattcactaatggagataagtttccatataccaaattccaacacccagtttgttggtgatgaaaatcgtccccctgctcaggttttccgtgacaaaattatgtctatggctgatgttggcgctggaggtgaagatgctattgttacatttgagggtattgcgatccttacaccaagaggacgatacagtgttgagttacacatgtcattcttgcggcttcaaggacaggctaatgatttcaaaatccaatatagcagtgtggttcgcctatttttacttcctaagtctaatcaaccacataccttcgtcattattagtcttgatccccctattcgaaagggacaaacattgtaccctcatattgtgatgcagtttgaaactgattatgttgttgaaagtgaattggcaataaatgaagatctttataacacaaagtacaaggacaagttggatctgtcttataaggggcttattcatgaagtgttcaccacaatattacgtggtttgtctggtgccaaagtgaccaagcctggaaaatttaggagttgtcaagatggctatgcagtgaaatcatctttgaaagctgaagatggaattctgtatccccttgagaagagcttcttctttctacctaaacctcccactcttattcttcatgaagagattgactatgtggaatttgagcgacatgctgctggtgggtccaatatgcattattttgaccttcttatcagactaaaatctgaacaagagcatctcttccgtaatattcagagaaatgagtaccacaatttgtatgaatttatcagttcaaagggcttgaaaattttgaacttaggagatgcacaacctactgttggtataaagaaggttcttgagaatgatgatgatgatgctgttgatccacatcttgaacgcataaaaaatgaagctggtggagatgaaagtgatgaggaggattccgattttgttgctgacaaggatgatgaaggttctcctactgatgattctggggcagatgattctgatgccactgatagtggtgatgagaaagagaagcctgccaaaaaggaatcaaagaaggatctgccttctaaggcatctacttctaaaaagaaatcaaaagatgatgaagatggaaagaagagaaaacagaagaagagaaaggacccaaatgcacccaagagggcaatgtctgggttcatgttcttttctaaattggaaagagagaatctaaagaaaactaatcctggaatttcatttacggatgtgtcaagagtacttggagagaaatggaaaaagttgtcagtggaagagaaggaaccatacgaggcaaaggcacgtgaagataaaaaacgttacaaggatgagattagtggctacaagaatccgcaacccatgaatattgattcaggaaatgaatccgacagtgcctaagctccgtatatttcttactggagtggtgatggcatctactctcatgctccataagttggctcatttatgctcttggaaatggcttgataacttgtgaacatgctcaagagttttgtgctctgttggtttgcatggctatagggaaggcagggacggtagagcttgatgtgttgagtaggttcctatgcttaattgaattattggtctttgtgaattgtgacccaattttcgctaaatgacagtgcctctttttagagtttatgaccggcaggtgtaggatctgtaacaatttttttgcttcaactctttgcacgaataggatttaaaatattagatc

SEQ ID NO: 30055 - DNA, 1515 bp, Glycine max
  Clone ID: UC-GMROPIC089G06_FLI
cacatagtaaaattgtatactctctataatttgagattattacatatttctagcataaatcttgagagaacatttttttttgtttcatcatataaaatatatatgttctgaaagaacacatacaagtacacaaaaaaaagggggaaattcataaaaaaatacagaaaaaaaaaaaaacagaattgagtaagagggaaggaaacatagagaaaattttagcaatcagataataagaagccagtagtagtgcaaaagtcccttgccaagagtgttggaaccccttttagttaagcaggtaccttctcccccttgagtggcttcaccacttcccatgtgaagtcagggtcatctctgccaaagtgtccatatgcagcagtcttcaagaacctgccatttccacccctcttgagatcaaggttgatggagatcatgccaggcctgaagtcaaaactctccttcacaatgctgaggatttccttgtcagggatcttcccagtgccataagtgtcaacaaacacagacaagggctcaggcacaccaatggcataggaaacttgcacaattgccctcctagcaagtccatttgcaacaatgctctttgcagcttgcctcacaatgtaggcaccactcctatcaaccttggtaggatccttcccagagaaggcaccaccaccatgtgcaccccatcctccataggtgtcgatgatgatcttgcggccggtgagaccagcatcgccatgcggccctccaatgacaaacctgccagaagggttcaaatggaaaatggtcttctcatcaaggtacttctcaggaatcacaggcttaatcacgtgttctttaagatcagctgcaatctcatcatttgtgacagtctcatcatgctgtgtggagatgagcacagtgtggacgcggattggaaccatggcacccttgtcattgtagtactcaacagtgacttgggtcttgccatcaggtctcagccaagggcatgtcccgttcttccgaacctcggtgagcttggcaccgagcttcgtggcaaggacatggctcaagggcatgagctcgggagtctcgtcagtggcatagccgaacatatgaccttggtcaccagcaccaatctcctcaggcctctttgtgaggtggccgtgcacaccttgagcaatatcaggactctgttgctcaatgttgacgaggaccttgcagttgtcagcatcaagaccaacatcatcagagacaaaaccaatgttcctgcatgtgtcacgcacaatcttctcatagtccacgttggccttggttgtgatctctccgaaaaccatcaccatgttggtcttggtgcaggtttcacaggcaaccttgctgtcagggtcctgctccaagcatgcatcgagcacagcatcggagatctggcccaagaaactttcctattcacatctgaatcagtgaacgaggggcaccctgacaagctctgtgaccagatctccgatgctgtgctcgatgctgtgctccaagcatgca

SEQ ID NO: 30056 - DNA, 2058 bp, Glycine max
  Clone ID: UC-GMROPIC090B01_FLI
tgaaaactcactactttcctctcttttcattctttttcttcttcttcttaatctccatcaacgccaaacttgatctctacccttcagaaacggagggcgtgctctgcgagcggaggcggctctccggcaaggaaacctacgcgctccgaatcaccagactcgtcttcaaatcgaacaacctaaatggtgttttgtctccttccatcggacgcctcacggagctcaaggaactctctctctccgacaaccaactcgttgaccgagtccctccccaaatcgttgactgccgaaagctcgaaatcctcgacctcgccaacaacatcttctccggcgaggtcccctccgagctctcctccctcacgcgcctccgcgtgctggacctctccaccaacaggctctccggcaaccttaattttctcaaatactttcccaatttggaaactctttcagtagccgacaacctcttcaccggaagagtccctccctcggtccgctccttccggaacctacgacactttaatttctccggcaaccgcttcctcgacccctctctacaatcatcctcaccagacacaattctctctagacgttttctatctgaagacggtgatggtgatgttcctgcacctgctcctgcacctaataactcacagaagaagaaatccaatgcttctactcatgctgctgctgctgcatctggtcctgcacctaaccataccaataagcacaagcacagtaagagaaaactcttggggtggattctggggtttgtagcaggggcactggggggaaccttatcaggattcgtgttttctttgatgttcaagctcgctctcgcgttgatcaaaggaagaggaaggaaagcggggcctgatatctatagtccattgatcaagaaagcagaagatttggccttcttggaaaaagaagaaggaatcgcgtcgttggagatcatcgggcgcggtggctgtggagaggtctacaaggcagagttaccgggaagcaacgggaaaatgatcgctataaagaaaatcgttcagcctccgaaagacggtgctgagttagcagaagaggacagcaaggttctgaacaagaaaatgaggcaaattcgatcggagatcaacaccgtgggacaaattagacacagaaaccttctgcctctgctggcgcacgtgtctagaccggaatgtcactaccttgtgtacgagttcatgaaaaatggaagcttgcaagacactctgagcaaggtcgagaggggcgagagcgagttggattggttgtcaaggcacaagatctccctcggtgtggctgctgggcttgaataccttcacatgaatcacaacccacgaatcattcatagagatctcaagcctgctaatatccttcttgacgatgacatggaggcaagaattgctgattttggactcgccaaggctatgcccgattacaagactcacataacaacctccaatgtggctggcactgtgggctatattgctcctgagtatcatcagatactcaagttcactgataagtgtgatatttacagttatggagtgattcttggtgtattggtcattggtaagcttccttctgatgatttctttcagcacactgaagagatgagtttggtcaagtggatgaggaagactttaagctccgagaatcccaaggaggcaattaattcaaagctgctggggaatgggtatgaggagcagatgcttcttgttttgaagattgcatgcttttgcactatggatgatcccaaggagaggcctaacagtaaggatgttaggtgcatgctgtcacagatcaaacactgaatctgctgtatgtttaagtatgtgaaatattgtgtaccatatttgtgccaaagtgtgcttgtttaagaatatagttgataactagaggatcaatgttggttcatagggtaaataatgaaccgatgtaatcttgtttcctttatcacggattgctgaatttctttggaaaaagaaaaattcagcactgcgatgatctatgtataatctagtctgtcacaactagtttccactttac

SEQ ID NO: 30057 - DNA, 2921 bp, Glycine max
  Clone ID: UC-GMROPIC090C06_FLI
gttttaatccctctgttgacatcatttgctgtttgccaacttgaagaatttgttagcattgattgtggagggacaagtaattacactgataccagcacggggttggcatggatctcagattctaggatcatgcaacatggcatttcagtggaagtagaaagtccaaatagaagcatggtgcagtatcaaaagcgaagagactttcccatagagagcaagaagtactgttacacactaagcacagaagagagaagaagatatttggtgagagcaacgtttcagtatggaagcttggacagtggagacacttaccctcagtttcagctctacttggatgcaacaaaatgggccacagtgtcaatatatgatgcctcaaggatatatgttaaggaaatgatcatcagagcaccctcaaattctattgatgtttgcatgtgctgtgctacaactggttctccttttatatctacccttgagttgcggcccttgaatctttccatgtatgccacggattttgaggacaatttcttcttggaagttgctgcaagaataaactttggtgctccaactgaggatgctgtcaggtacccggatgacccgtatgatagaatttgggattctgatcttattaaaaggcaaaattatcttgttggagtggcaccaggcacagaaagaattagcacaacaaggaacatagatatagagacaagagaatacccgcctgttaaagttatgcaaactgcagttgttggcacaaaaggagtactcagctacagattgaacctggaagacttccctgccaatgctcgagcttatgcatatttcgcagagattgaagatttgggtcagaacgagagtcgaaaattcaaattaaagcaaccttatatagctgactatagcaatgcagtagttaacattgccgagaatgccaatgggagctacactttatatgaaccaagttacatgaatgtgactctggagtttgttttatcattctcctttgttatgaccccggattctactcgaggacctcttctaaatgcactggaaataagtaaatatgtacagattgcttcaaaaacagacaagcaagacacaactgttgtaaatgcttttcgattattgtctgctcaaagttcccagacaaacgaaggcgatccttgtgttccaactccctgggaatgggtgaattgtagtaccaccacacctccaagaattactaaaataattctttcgagaaggaatgtgaagggtgaaatcccatctgagcttagcaatatggaagcattgacagagttgtggttagatggcaacttgcttactggacagttacctgacatgagcaaacttataaatctaaagattgtgcatttagagaacaacaagttgacaggtcgactaccatctgacatgggtagtttgccaagcttacaggcattgttcatacagaacaactcatttagcggggaaataccagccggattaatatctaaaaaaatcatttttaactatgatggtaatgctgaactacacagaggaaagaagaagcattttaagatggttttgggaatttcaattggagtactagtgattctattaatattattcttagtaagtttggtactattgcttaatacacggagaaaggcgtctaaaaagaaacgtgaggaaaaaggaatttctggacgcactaacagtaaacctggatactcgtttcttcggggtggaaatttaatggatgaaaatactacttgctatattacactctcggagttgaaagaagctactgacaatttttcaaagaaaattggcaaaggaagctttggatctgtctattatgggaaaatgagagatggaaaagaaatagcagttaaaagtatgaatgaatcatcttgtcacgggaaccagcaatttgttaacgaggtggccctcctatccagaattcatcacagaaatttggttcccttgattggatattgtgaagaagaatgtcagcatattctggtttacgagtatatgcacaatggcactttacgggatcacattcatgagagtttcaagaagcagaagttagactggttagctcgtcttcgtattgcagaagatgcagccaaaggtcttgaatacctacacacaggatgcaatcctagtatcattcaccgtgacataaagacaggaaatattctcctagacatcaatatgagagcaaaagtatcagactttggactctccagattagctgaagaagatttaacccatatatctagcattgcacgaggaactgtaggctacttggatcctgagtactatgcaagtcagcaattgacagaaaagagtgatgtatacagttttggagttgttctgctagaactgattgctggaaaaaagcctgtgtcatctgaagattacagtgacgaaatgaacattgttcactgggcaagatccttaactcataaaggagatgcaatgagcatcattgacccttctctagaaggaaatgccaaaactgagtccatttggagggtggttgaaattgccatgcaatgtgttgaacaacatggtgcctccaggccaaggatgcaagaaatcattttggctatacaagatgctatcaagattgaaaaaggaacagagaataagctaaagtcttcatcatcattttcaggtagtagtagttcaaagccacattcttcccggaaaactttactcacaagctttcttgaaattgagagccctgacgtatcaaatggttgccttccatcagcaagataattaaattggacatgccttacattccatgtgttgattttgtttctatatttacttctttttaaccattattattctaccaatatgtacttttcaccagtaacagtttgacactgactagtgacaacattccaaatttggaaccaattgtt

SEQ ID NO: 30058 - DNA, 1209 bp, Glycine max
  Clone ID: UC-GMROPIC090F10_FLI
ctgctatactgagattggttatggacgatatctgaattgcttgaatgcattctggcatcctgaatgcttccgctgccgtgcttgcaacctaccaatctctgattacgagttttccacatctgggaattacccttatcataaatcatgctataaggaaagctaccatccaaaatgtgatgtctgcaagcacttcggcacatccattctggatccagaaatattgccctactcacgaacatgatggtactacacgctgttgcagctgcgagcgaatggagtcccaagaggcaggatatattgctcttaaggatggccggaagctctgcttagagtgtcttgattctgctatcatggatactaatgaatgccaaccccttcatgctgatatacaaagattttatgaaagcctaaatatgaaactggaccaacaaattccacttctattggttgaaagacaagcactgaatgaagcaagagaaggagagaagaatggccactatcacatgccggaaaccagagggctctgcctctcagaggagctcagcactttctcgagacgacctagacttgggacaacaatggacatgagagcacagccatacagaccgactacacgctgcgatgtgactgcaattctcattttatatggtcttccaaggttacttactggatcaatcctagctcatgagatgatgcatgcatggctgcggcttaaaggttatcggactctaagtcaagatgttgaagaaggtatctgtcaggttttgtctcatatgtggttggagtctgaactttcttctgcatcaggcagcaactttgtatcagcctcatcctcgtctgcatcacatacatctagaaaaggtaaaagacctcagtttgagaggaagcttggggagttcttcaaacaccagattgaatcagacatttcccctgtttatggaggtgggtttagggcaggtcaaaaagcagtgagtaaatatggtctacaaaggacccttcatcatatcaggatgacagggacttttccatattaagtacaaagataccccttttaacagattgtttctcattatttctagatataaagcctggcctgttattattagaaaccgaggccaaggtgcttaggcataagcttccacgaattgttgattttttgtacttgtaattattgataccgttcattcacattttttcttttgatttatc

SEQ ID NO: 30059 - DNA, 991 bp, Glycine max
  Clone ID: UC-GMROPIC093D12_FLI
cgcagcttcagcagtcgcagcgcgtggttgaaaagtactctgcacttgcacacaacggggtcgtcgatgagaaggagcttgatcagttcatgacccattatgttctgttgctctgtgcctttaaagaacaactgcagcagcatgtccgtgttcatgccatggaggcagtgatggcttgttgggatctggagcaatctctgcaaagcttgacaggtgtatctcctggtgaaggaacgggtgcaacaatgtcagacgatgaagatgaccaggcagagagcaatgccaacttatacgaaggaagccttgatggcggcgaaactcttggatttggtcctcttgtccccactgaaagtgaaagatctttgatggaaagagtcaggcatgagttgaagcatgaactaaaacagggttacaaggagaagattgtggacataagagaagaaattctaagaaagagacgagcggggaagcttccaggggacaccacatcccttttgaaagcttggtggcaatcacattctaaatggccttaccccactgaggaagacaaggctagattggtgcaggaaacagggttgcaattaaagcagataaataattggttcataaatcaaaggaaaaggaactggcatacaaataacccctcatcctctagcaactccaaaagcaagcgcaagagtgcaggagaagccagtaaccagagcttcatgtgaacggtcgcatattttgaacaaaaattattggtattgttctcccttttaatgcatgctcgtgggattcatagatcttacggtccagcgtgaacgtgatggattctggatgaaaaagggaaattcatgatatataaaaccactgtattggttgaattacagaaaattatccctggtattgttgtatatgaggctgctgcatgccgcttgatatctgatactgatgcagtcgcattctattcgatttaatgggtagcatgctgatattattctgcttattt

SEQ ID NO: 30060 - DNA, 1106 bp, Glycine max
  Clone ID: UC-GMROPIC094G01_FLI
gtgaacctttgaagcgttctgaagcacaagtgctgctctccaaacgattgctcaataacttcaccttggacatggaatgcaccctccaatttctcctaaaccggaatggagggctttgatggatgagatggctgtcattgccactgaggagtaccggtccattgtgttcaaagaaccacgatttgttgagtatttccgcctggccacacctgagttggagtacgggaggatgaacattggaagtcgaccagcaaagaggaggccaagtggaggtattgagacactccgtgccataccttggatctttgcctggacacaaacaaggttccatcttccagtgtggctaggctttggtgcagcattcaaacatgttattgagaaggatgttaggaatattcatgtgctgcaggagatgtacaatcaatggcctttctttagggtcactattgatttagtggaaatggtgtttgccaaaggagacccagggatagctgctctttatgataggctccttgtttcagaggatctgtggtcatttggggagcagttgaggaccatgtacgaagaaaccaaggaactcctccttcaggtggctggccatagggatcttcttgaaggagatccatacttgaagcaaagactgcgcttgcgtgattcttatattactaccctaaacgtgtgccaagcctacacgttgaaacgtatccgtgatccaaactataatgtgaagctgcgccctcacatctccaaagagtctatagagataagtaaacctgctgatgaacttataacacttaacccaacaagtgaatatgcacctggtttggaagacaccctcattctcaccatgaagggtattgctgctggcttgcaaaacactggctaaatctgagtttttgtcttctctttggttccacttttattttctgtttcctttatcagaaataacgagtttagctgcatgcaccaaagggtgtttttccctcccctgtacccatgtttccattataagatattacagagagatagctgccgcaaaatgagacaatgcaagtatgcaactgattcttatgttccaatacgaaattatgctgatttatagactt

SEQ ID NO: 30061 - DNA, 1954 bp, Glycine max
  Clone ID: UC-GMROPIC096H09_FLI
ccaaaacaaaatttactaatttatcatagacatgaaacatatataagccttgagaaatttttccaaacatgtgcaggttagagatccacaaacagaaatcccacatgctagggagataaagctgggtgaactattgaagaagaaggcagaggaaggagtagctgtgagggttatgatttgggatgatgaaacatctttgccttttattaagaacaaaggtgtgatgaagactcatgatgaggacgcttttgcctacttcaaacacacaaaagtaatatgcagaaagtgtcccaggttacaccacgagtttcccacactctttgctcaccatcagaagaccataactgtggacaccagagcacccaactctgttcgtgccagagaaattatgagctttttgggtggtgtagatttgtgcgatggtcggtatgacacagagaaacactcactgtttcagacactcaccgaggaatcacattaccatgacttctaccagacaaacatagcaggagctagcctcaacaaaggagggccaagagagccttggcatgatgctcatgctagtgtaactggtgatgctgcttgggatgtgttaaccaattttgagcaaagatggacaaagcaatgtgatgcttctcttctagtccctgccaacactctagaaaatctcattcccacatgctcaagccctcccaaagagaggaattggaaagttcaagtatacaggtcaattgaccatgtgtctgctagccagttgtttagaaagctaactgtggagagaagcatccatgaagcctatgttgaagcaattaggcgtgccgataggtttgtgtacatcgaaaaccaatattttattggggggtgccatttgtggcagaaagataggcatagtggatgcaggaatctgattccggtcgagattgcactcaaggtggtcagtaagattaaagcaagagagaggtttgcagtgtacatagtcatcccaatgtggccagaaggagtgcctgaaagtgaaccagttcaagatatactgcactggaccagagaaacaatgataatgatgtataagttgattggagaagcaataatagaaagtggtgagccaggacatccaagagattacttgaatttcttctgccttgcaaatagggaaaagaagggaaaagaggagtatctttcaccacattctccccatcctgaaacacaatactggaatgcacaaaaaaataggaggttcccggtttatgttcactccaagatcatgataggtatgattatattactctccaattaaatttgtttccccactactttgcataaaagcttatttggaataatgttacttttaattttattcaatattgtgcaagtgaatttgtttaaatacctaatgcataagcatcaaagtaattgagttgtataattgtggtacaaactgtattgatattgtagattaactaagctatgttggtgttgcttgtgccaacagtggacgatatatacatattaataggatcagccaatgtgaaccaaagatccatggatgggcaaagggacactgagattgccattggggcctaccaatctcaagatggagctgatcaccacattataagccgtggtgatattcatgcatacagaatgtcactgtggtatgagcacactggaatcactgaggaattgttcttagagccagaaagtttgtcatgtgttaagagaatgctgtcaataggggatcacatgtggggagtctacagtagtgaagaaactgtggacatggaaggtgtgcaccttgtaagttaccctgtgaaagtaacacaagaagggtctgtgaaggatacggttgatggtggagatcattttcctgacacaaaatctccagtgaaggggaaaagatcaaaattcttagcccctatctttactacttaaccatacaactgagacatggacacac

SEQ ID NO: 30062 - DNA, 1617 bp, Glycine max
  Clone ID: UC-GMROPIC097D08_FLI
cattggaggatttgcaaagaaagtgaaaagcactactctatcttcagctacatgtttatcaatgagttcatcccaacactggaaggagaccaaggaatttgctacacacatccggaaaatcttccaggtgctaagaaagatgggagttatgtccatttgtttcacagaacaatcaatgcatatgctactggtcaacgaaagcatcgaaagattcatcatcaacagggtttgactgtaaattgcccgttttaatgtataatttccacttatggcatgcagaaaaaataaaaaatgtaagtaatggagatgtagcagacgactcatatcatcggtataaggtatatatggtttcaatagtagtattttagaagtagttttcatatgaataaagaatataattgatatgtagactcatgatagactggtccacctgttttaggaggatattggaatcatgaagtatatgaatttggatgcttatagattttccatttcatggtctagggtactaccgagtaggtcaagttttattgaaattccacccaaataattttttttccttagtttgtgttccatagtaactattattaatttcttataaatcatttgcagaaggaaaacttagtgcaggtgtaaaccatgaaggagtaaactactacaacaacctcatcaatgagctcatggctaatggtcataatttattgacccaaatttcataactatgtattattattattattattattattattattattattattattattattattattattgttgttgttgttgttgttgttgacgtcacaaatttcgtgtgttatcactacattcattcttattatataataattacataatcactaattattagaatattctaattaataacactaatatactttttttttctaattaagataattataattatagtaaccaatgatgattagaatattctaaaaaaaattatattttctaattcaaattacttaataacacaaatatatttttattctaatttaaatttgattaacactaatatgttttttttggtaattatgatagtaaaaacaaattaaatgttatcttaaataataataataataactacttacatttttattattaaaaaatacaatagttaaatacattaaaaagttataataatataaaattaatactcatgcaaggcagtataatcgacactgttgtgacaattttctctgggacagtgtgtgatttggttgaaagacgccctatgttgataacatcttctatcatgttcttccttagtggtttggtaatgttgtgggcacctaatgttgttattgttctgttagcgaggataattgatggggttgtcattgctcatgctgttactcttactcctctctacatatctgagatagtgccggctgacatcaggggccaattgaacacttattctctgaaccttgggccgctacaagcaacaggaattagagtgtggacaatatttaatatttaatccatttgatttgatgtaacattacattagtagctactttcggtgtctttaaaatttcctttgttattttgcttttccttttttatgcatattttgcattgagc

SEQ ID NO: 30063 - DNA, 2892 bp, Glycine max
  Clone ID: UC-GMROPIC097D09_FLI
taaaattgaaaaacctttattcttttcttttgatagtttcaaatcaatgaaaatattttttatgttcaaaatttggatgcgaaaaaaggaagaatttgaaatttctagttatacagaggaaagggcaaaagaaagttcgaaaaaagaggaggaaaaaaaaaaggaaaatgaggaaagaaaacgtatagaaatagcagaagcctgggatagcattatatttgctcaagtaataagaggtattttattaataacccaatccattcttagaaaatatattctattaccttcattgataataactaaaaatattgctcgtatactattttttcaatttcccgaatggtcggaagattttagggattggaagagagaaatgtatattaaatgcacatataatggtgttcaattatccgaaagagaatttccaaaaaaatggctaacagatggtattcagataaagatcttatttccttttcgtctcaaaccttggcacaaatctaagctacgatccaatgaaaagaaaaaggatctaatgaaaaaaaagaacttttgttttctaacagtttgggggatggaagtcgacttgcccttttctggttctccccaaaaaaatagattttcatcattttttgaccccatttttaaagaactaaaaaaaaaaacgaaacaatttcaatttttcacttttcgagttctaaaagttttaagtgaaaaattgaaattgtttctaactatcttaatagaaaaagcaaaaaggattagcaaaagtattatcgaaagtattcttaaaagtattctcaaaagtattctaagcctaacgaaaataaaacaatttttcaaattgctatttattaaatttaaattcaaaaagatagatgaattgagcgaaaataaaaaagattcaacaatttataagaataatccaatgatttctgaaacaaccatttcaattcaatcgataaattcagtaaattgttcattgaaaaaaaaaaaaaataaaggatcttaatgctaaaagaaaagcagttataaaaaaaattgaaaaaattaaaaaggggcttgtaatttcagagacaaatattcattcaaacaaaacaacttatgatagtaaaagggtagaattcgaaaaaaaaaaattgcagatattacaaagaagaagaaatgctcgattaactcgtaaatcacattctttttttaaatttttcatgaaaaggatatacagagatatatttctatatatcagctgtattccgaggatcaatatacaactttttcttgaattaacaaaaaaatttttaaataaatccatttacgataatgaagcaaatgcagaaagaatttataaaacaaatcaaagtataattcgctttatttcaattttacacaaatattttcatactagaaatccgaattcacataattcttgtgacatctcctttttgtcacaagcatatgtattttttaatttattacacacccgaattattaacataaacatctataagttaagatctgtttttcaatatcatggaattttttttttctgaaaaatgaaataaaggattctttttttggagcacaaggaatatttcattataaattaaaacataataaccctctcaattctgtaagaaatcaatggacaaattggttaaaggatcattattatcaatatgacttatctaaaagtagatggtccagattagtaccacaaaaatggagaaatagaataactgaatatcgtatagctcaaaataaagatttaaccaaatgcaattcatatgaaaaaagccaattaattctttacaaagaacaacaagtaaacgcattaaaaaaaaaaattagaaaacaatatagatacgatcttttatcctataattttatcaattatgcagataagaaagactcatatatttatggatatagatccctatttcaagtaaaaaaaaaccaagtgatttcttctaattacaacacgtataaaaaagaattatttgatatcatagataatctctttatcaagaattatatatcggaagatgcgattctagatatggaaaaaaatctgtatagaaagtattttgattggatgggaatcaatagagaaatactaaatcgttccatatcgaatccagaattttggttcttttcaaaatttgtgatattttatgacgcatataggggtaactcgcaggttataccaattaaattattttttttttcttctaatgtaaatcaaaatgttagtgaaaataaaaagaacattactagaaagaaaaaaaatgaatctcttgaattggagttagagactcgaaatcgggcaaaagcagaataccctgatcaacgaaatcttgaatcatctatctcaaaccaagaaaaagatattgaaaacgattatgtaggatcagacagtgaaaagaatagtaagggtataaagaaaaagaaagacaagaacaagatggaggcagaacttaatttcttactaagaaattttttgattttacatttaaattggaataatttcttaggtcaaagaatatttaacaatgtcaaagtatattgtctcctgattagaaaaaaatttaagagaaattacaatagcctctattcaaagaggagaactaggtctagatattatgatgattcaaaatcagaagaatttaattcttctaggcttaaggaaaaagaaaaataacaaatttatgaaaaaagaaatatttgttatcgaaccagttcgcctgtctagaaaaaacaataaacaattttttatgtatcaaaccataggtctttcattaattcaaaagaataaacgcaaaatttatcacaaatacccagaaaaaattcatgttaataagaaaaatttttataaatatattacaagaacaagagatc

SEQ ID NO: 30064 - DNA, 674 bp, Glycine max
  Clone ID: UC-GMROPIC097E06_FLI
caactgcagatttccatacctattccattctttggaatcctcagcgcataatcctgagttatattaatcaatccatggtggttcatatgtacgtatgtttcagcttctcagtggatgggaccccaataagagaattcaagaacatggaatcaaaaggagttgcattcccaaaggaacagccaatgaggatatactctagtctatggaatgctgatgactgggcaacaagaggtggacttgtgaagacagattggacacaagctccattcacagcatcatatagaaatttcaatgccaatgcctgcgtccattctggatcatcatcatcatcatcatcttgcactgccaactcttcttcctccaatgcctggttctcccaacagttggattcaacaagccaggacagactgagttgggtgcagaagaattacatgatttacaattactgcactgacaccaaaagatttccacaaggccttcccccagagtgccaaacatcttgaactccttctaatcctactcgaaacaaataccacaacactattctttattcttcctaggctgattgaattgcttttcatttgtatggatgttcattcttttattctttgatacttgtcgattgtattacaagaaacggaaagaagcctcaataatacttttcttgaatcttt

SEQ ID NO: 30065 - DNA, 5239 bp, Glycine max
  Clone ID: UC-GMROPIC097G07_FLI
atggacgcaagattcgtgctggtgattgtgcacttttcaagccacctagggactcccctcctttcattggaataattcgcaagttaacatttgacaaagaagaaagtccgagtttagaagtaaattggctataccgacctgctgatttgaagcttgctaaagggattgtactggaagctgctccaaacgaagttttttactcctttcacaaggatgaaacacctgctgcatccttactccatccgtgtaaagtcgcatttcttcgtaagggtgttgaacttccttcagggatatccgcatttgtctgtcgacgagtatatgacattgagaacaattgtttatggtggctaaccgataaggattaccttaatgaacgacaggaacaagttaaccagctattagacaagacaaaactagaaatgcatggggctgtgcagtcaggaggccgttctccgaagcccttgaatggtccaacatcaacgcagtcattgaaatctggttccgataacgttcaaaatagttcttcctttggtgcacagggtaaggggaaaaaaagagagcggggtgatcagggttctgattcatctaaaaaggagcggttatttaaggtagaagatggagattctggtcaattcagaccggagagcatgttaaagtctgagattgctaaaataactgataataaaggtgggcttgtggactttgaggcagttgacagactggtacaacttatgcaacctgatagtggtgataaaaaaatagatttggcagggcggatgatgcttgtcgatgtaattgcacttacggaccggtatgagtgtctatgcgggtttgtacagcacaggggtttgcctgtgttggatgaatggctgcaggaggtccacaagggcaaaatcagtgatggaaatatgcctaaagaaagtgataagtccattgacgaatttttgttagctttacttcgtgcgttggataagcttcctgtgaaccttcatgcactgcaaacctgtaatgttggaaagtctgttaatcatttacgcacccacaaaaattatgaaattcagaggaaagctaggagtctagtggatacatggaagagacgtgtggaagctgaaatgaatatgaatgattcgaagtctggttcaaaccgtgccatgtcttggccagcaaagccagcaaattctgagtctcctcatgttggaaataggaaaacaggaggaggatcctctgataatgttgcaaagagctcttcaattcaaccctcaatatctaaaaattcccaatctaagttaagttctggagaagcattgtccaagtcctcttcatctcctggctcaactaagtcaatgactacctcagcgagtggtaactcaaaagatcaaaacagtaaagtcttggttggagccgcagcgtcagatctgcctctgacacctatcaaggaggagaggagcagcagttctagtcaatctcaaaataacagtgtctcttgttctagtgaacatgctaaagctattggttcttgcagggaagatgcgaagagctccactgcagtgtcaacgagtgtgggcaaaattcctggtggtgtgtctcgaactcgcaaatcaagcaatggtctacatggggctggtgttgcagtaggtccgaaggagcacagctctgcaaaaaattcagctaagaattcacctgctgaaaaagtttcaccaactcgagtctcccatgaaaaatcagccgaccagccccttactgatcaagggaataatcagcgattaattctcaggttgccaaacactggtcgtagtccttcaaggggagctagcggtggctcatttgaagaaccaggtatcatgtgcagcaaagcttcgcctcctgccgacaggaatgagaaccaggacagaagagtgaaaactaaaaccgagtgtttgctgacccatgtgtcaaatatgatgaatgaagcatgcgatgctagtgaagctttgcttggtgttgacgaaggtaagggccctccaatgttcgatgagcgatgcagggctaatgaagatggtgataaggtagaagaaacatcaaaaccaactagtttgtcatctggatttgtttccagatcagggcagacttatgatttaagctccatgaatgcattagttgaaagctgtgtgaagatttctgaagcaagtgcatctgcgtcccatggagatgatggaatgaacctactagctactgtggctgcaggggaaatatcaagatctgaaaatgcctcacccatgtcatcccctgagagaaagtctcttcctgcagatgaattgagctcagccaatgatttcaagttaaaacattctgttgaagcagctggttgcactgtttcacagttggatggtggggctattgcagagcatcctttgaatacagttgattcattgcagataaaaaatgatttgaggcatcctgctacgacttcaggagatggtgaagccatttcatcgagttgtgtagagaaaagtggtgatggtagatctcagataaatagctcccctacagatttcttacaaaatgctgaaggtccatgcttacggcctgaaatcaaagaggatacttctgaaactatattgccagataaaaaggagactaatgtagacctcggaggttctgactctaaattaaagtcatgcacttcctctattgatgatgatcagaaggttgatcacatgaatgagggaaccattgagaatgaggaattgttggttccaaaagctgttgcaagtgttaagtctgaaaatgaatcaggtgaaaagcaagctgagttatcctcaggcgtggataatgagaaccagatttgttcagaaaaagcaacaggtactggtatactagtgcaaaaggcctctccaattgcagaaaactgtgagtccttatatttaaaaaaggagtcacctacttctggtaatgctgtaatggtatctagggatgaaaatgctgatgacatgaagtcagttgtgattgagcctgatgaacgaagaatggagcaggatttatcagtttcagatgatgttaatgaatgtgctgaagatactatgggcagaaatgaggctataggtcagtgttctggctcatcagttcagccagatttaccaacaatgcctaggaaagagaatgatgtgtttaaagcatgtgagcgaaagttggatgcaaatcaatctgaggttgcaggagagaggcatgcaggttctgctgctgggtctgatactgctgtaaaactcgactttgatttaaatgaaggctttcctgttgatgatgtaagccaaggggagattgctaggcaggaagatcctatcacatcatctgcagttcatgttccttgcctattgccttttcctatttcgtccatctctgggggcttccatgcttcaattacagtggcatctgctgcaaaggggcctgttgttccacctgaaaacccattgcggattaagggggagcttggttggaaagggtcagccgctaccagtgcatttcggccagctgaacctaggaaaaatgctgagacagcatccactactaatgatattgcttctgttgacggcacttctatcaaacaaggtcgccctcccttagattttgacttaaatgtggcagatgaaagatgttttgaggatgttggtttgcgtggttctttagaagctggaccacttgatcgtagcactgggggatttgatcttgatttaaataaagttgacgagactcctgaaattggcactttctcgctaagcaaactggaaattccttctttacctagtaagccttcgttgtccagtgggttatctaatggtggaagtgtctcaagagactttgacttaaataacgggccaggccttgatgaagttggcagtgaagtccctgcacgtagtcagcagatgaaaagtactgtaccattcccaactgctgtccatagcacacgaacaaacaatgctgaatttgggaattattctgcatggtttcctccaggcaattcttattctgcaattactgtcccaccacttctgtctggtagaggggagcagagttatgttgctggtgctggggcacaacggataatgggtcctacaggtagtgctccttttggtcctgaaatctacagaggaccagtgctttcatcctctccagccgttgcttatccacctactacaccttttccctatccaggatttccatttgaaaccaattttccattatcttcaaactccttttctggttgttcaacggcatttatggattcatctactgtgggtggattatgctttcctaccatgccctcacagccagttgggcctggtggtgttgtttcatccacatatccccgtccatatgttatgagtcttccaggtggtacaagtaatgtgattcctgacagcagaaaatgggcaagtcaaagtctggatcttaattcgggccctggtggtatggatacagaacggagagatgatagattgccttcaggattgaggcaaatgtctgtccccaattcacaagcctcgatggaggaccacttgaagatgtttcagatggctggtgcattgaaaagaaaagaacctgatggtggttgggagggagccgagagattcggttacaaacaaacttcatggcagtagtgccatggctcttcaacgcaaatattcaagagctattttggaaaatgtcagaaaaattggggatattattttgagtgttgagccatggacaacaagcaaagatgctacccttgttgctgatgtgcctcttcagttctgacttgataaagcgatcagggcctctgatgcagttgttttgtatgaatctgctcccagattgtcgcttgcagataaatgtttttcctgtgtagatatctaactgaaaacagcaggtgtgataatgccgcctagaatcagagaaattggcatcaagtgtttgactgtgactgttctgcaacagcaccgagcccaatccgctctcgagcatttggaaggagaggattggatgtatgaactggctaagcttgaggctagtttgtcttctttaaatcattttttttcaacttttgttacatatatagttattgctgtagtcttgactttggaattttgtcacttatcacattctggctattgatatatgcacaggttagcctccatggccaatgtgtcacttctctctcttattgttatcgccttgcacttgcaacattttctttttggtatcacaactggatttggtttgt

SEQ ID NO: 30066 - DNA, 1912 bp, Glycine max
  Clone ID: UC-GMROPIC097H11_FLI
gccagcttttctccttctctctctctctctctctctctatctgctttttcttcttcttcttcttcactcagtcagatccaactcctcagataacacaagaccaaacccgctttttctgcatttctagactagacgttctaccggagaagcgaccttagaaattcattatggtggcaacagctgctacttcatcatttttccctgttacttcaccctcgccggactctggtggagcaggcagcaaacttggtggtgggcctgcaaaccttggaggactaaaatccaaatctgcgtcttctggtggcttgaaggcaaaggcgcaagccccttcgaaaattaatggaaccacagttgttacatctaaagaaagcttcaaacatgatgatgatctaccttcgcctccccccagaacttttatcaaccagttgcctgattggagcatgcttcttgctgctatcacaacaattttcttggccgctgaaaagcagtggatgatgcttgattggaagccacggcgacctgacatgcttattgacccctttgggataggaaaaattgttcaggatggtcttgtgttccgtgaaaacttttctattagatcatatgagattggtgctgatcgtaccgcatctatagaaacagtaatgaaccatttgcaagaaactgcacttaatcatgttaaaagtgctgggcttcttggtgatggctttggttccacgccagaaatgtgcaaaaagaacttgatatgggtggttactcggatgcaggttgtggtggaacgctatcctacatggggtgacatagttcaagtggacacttgggtttctggatcagggaagaatggtatgcgtcgtgattggcttttacgtgactgcaaaactggtgaaatcttgacaagagcttccagtgtttgggtcatgatgaataagctaacacggaggctgtctaaaattccagaagaagtcagacaggagataggatcttattttgtggattctgatccaattctggaagaggataacagaaaactgactaaacttgacgacaacacagcggattatattcgtaccggtttaagtcctaggtggagtgatctagatatcaatcagcatgtcaacaatgtgaagtacattggctggattctggagagtgctccacagccaatcttggagagtcatgagctttcttccatgactttagagtataggagagagtgtggtagggacagtgtgctggattccctgactgctgtatctggggccgacatgggcaatctagctcacagcgggcatgttgagtgcaagcatttgcttcgactggaaaatggtgctgagattgtgaggggcaggactgagtggaggcccaaacctgtgaacaactttggtgttgtgaaccaggttccagcagaaagcacctaagattttgaaatggttaacgattggagttgcatcagtctccttgctatgtttagacttattctggtccctggggagagttttgcttgtgtctatccaatcaatctacatgtctttatatatatacaccttctaatttgtgatactttggtgggtaagggggaaaagcagcagtaaatctcattctcattgtaattagctactgctgtattctctctttctgctgctccatatttcatttcatctctgattgcgctactgctaggctgtcttcaatatttaattgcttgttcaaaatagctaggcatgtatattattattctttttctcttggcccaattaaagatgcaattttccttgtgaacacagcataattcttattcttatttatttttgtatatcctgtatgcaagaatgacttgtcctccaatacaactgtgattttgtatgctccagcttgtattttatgccagcttcccacatgggaattattgtgc

SEQ ID NO: 30067 - DNA, 896 bp, Glycine max
  Clone ID: UC-GMROPIC098B02_FLI
attgtattcctcccttccttagctccactacctcttctctcttcctccttgttccttcctcttacaatggcaagaatgcctttagagcctctaatagtggggagagtcataggagaagttcttgattcttttaccacaagcacaaaaatgattgtgagttacaacaagaatcaagtctacaatggccatgaactcttcccttccactgtcaacaccaagcccaaggttgagattgagggtggtgatatgaggtccttctttacactgatcatgactgaccctgatgttcctggccctagtgacccttatctgagagagcacttgcactggatagtgacagatattccaggcacaacagatgccacatttgggaaagagttggtgagctatgagatcccaaagcctaatattgggatccataggtttgtgtttgtcctgttcaagcaaaagcgtagacagtgtgttactccacccacttcaagggaccacttcaacacacgcaaattcgcagcagagaacgaccttgccctccctgtggctgctgtctacttcaatgcacagagggaaacggctgcaagaagacgctagctatagctgctgattttgccactgcttcaaccaaactagtattgtattgtattgaataaagcgataaaaaaaggtacaagtacaaggagtttcagtagtggaattaagttgatcctcacatgtggcttcaaataacttgcaggaagggaagataattaatcattttctagtttgacccgtgtgtatgctacgttttattttactttccatctgttgtgtaaacattatactactacgtgtattattattacctcgtgggactactatgaggtgtgatcttatatatagaaataagaggtttggtacgc

SEQ ID NO: 30068 - DNA, 919 bp, Glycine max
  Clone ID: UC-GMROPIC098F09_FLI
ggcaagacccatatggtatctttaacacagaagagtccattccaagggacattggtccttataagaacttggtcatattcacctctagctctatggatcccaagttcatctcaagtccatcctctataccattactaaggaagttaaggatcttgatgagcaatcttcaaacagttgacttgaaaagccttacaaaccaacagaaattagcattctggatcaatgtgtgcaatgcttgcatcatgcatggatttatccaatatggagtgccatctaccccagaaaaattacttgcattgatgaacaaggcaactctcaacgtaggaggcaacataataaacgctcaagcaatagagcatttcatattgaggaaacgagatatttctaatgtgaaagaggtacagcgaaagggtgaatgggaggagaaagaatcgtttgtccgtgaactttatggacttgagtttaatgatcctaatgtcacatttgctctgtgttgtggaactcgttcttctccagctgtgaggatatacacagcagatggtgttacagctgaattggagaaatcaaagctagactatctacaggcttcaattctggcaactagcaccaaaagaataggattcccagagctccttctcagaaacatgcttgatttttctgtggacacagactcactggtggagtgggtatgcagccagttacctacatctgggactctaaggaaatcaatggtggattgctttagaagccacagtaatgtgaagccttctaccattgttgaaaagataccctatgactatgaattccagtatttgttaacaatataaatgtacatttcttcttgctcttaatcccccataaaactttttcagtatacaaaatatagaagggcagaattgccatggtcccatgttgaggt

SEQ ID NO: 30069 - DNA, 1519 bp, Glycine max
  Clone ID: UC-GMROPIC099C04_FLI
aaaccgtttgcagaacatcccataaaagcttagcttgtattcagtttctcttctcccaacgtttttgtcgctagtaacagaatattacaaagtaacggctttctcagtggagcgcttgatttggagacggtgggggtgggaaggttatggctttttgcccaattttttgttgcggaaatagttcggatcgcaaaggacgagggaagaaacaacctccatggcgggtgttttctttgaaggaattacactccgctacaaataatttcaactatgataacaagctcggcgaagggggattcggcagtgtgtactggggccagctctgggatggatcgcaaattgcagtgaaaagattgaaagtttggagcaacaaagcagacatggaatttgctgttgaagttgagatattggctagagtacgacacaagaatcttctcagtctacgtggctattgtgctgaaggtcaggaacggttaattgtttatgattatatgcctaatttgagcctgctctctcatcttcatggacagcactcagcagaatcccttcttgattggaaccggcggatgaatatcgcaattgggtctgctgagggaattggatatctccacaaccagtcaatgccacatatcatccacagagatatcaaggcaagcaacgtgttgttggattcggattttcaggcacaggttgctgattttggttttgccaagttgatccctgatggggcaacacatgtgactacgagagttaaaggcaccctaggctaccttgcaccagaatatgctatgttaggtaaagcaaatgagagttgtgatgtctacagttttggaattctccttctagaacttgctagtggcaaaaaaccacttgagaaacttagttctgcggtgaagcgatcaataaatgactgggcactgccattggcttgtgagaagaaattcagcgaactagcagatccaaaacttgagggtaactatgcggaggaagagcttaaaagagtagttttaactgctctcttatgtgttcagagtcagccagagaagagacccaccatacttgaggtggtagagctactgaagggagaatccaaagataagttagcccaactggaaaataatgaactctttaagaaccctccagctgtaggacatactgatgatgggaccgttgctgctgaaggcagttcagatttcatctcagaagacaaggaatcaaaacctgagttggaagagaatactgagccataaactctgcaaaagaaatggaactatggatttgatatgctatacagattgattgtgaacctgcaggattgctttttttgtattactatttttattacttgtgcagagaaagactgggtgcctattcattatagaagttgctgcatgcatgtttctacttgccacactatgaatgtggttatgaatcatgcagaattgctgaaagtctgaaactaggaatttgatgttaaatacagattgtgaagttttcaaaaattgtgatttcttttttt

SEQ ID NO: 30070 - DNA, 1230 bp, Glycine max
  Clone ID: UC-GMROPIC100A06_FLI
aaaacctcttcttcttactctcttacgttaattcttcgttgtctatgatggcattggatatgattgatgttgttcccaggacgaggatggaagaagaaaatatagcaatacaagaagcagcttccgctgggttaaagagcatggagcatctcattcgtctcctttctccttcttcttctcttcacaacaacgttaataatctcaatctcaaccacctcgactgctccgaaatcaccggcttcactgtctccaagttcaaacaagtcatcaaccttctcaaccgcaccggccacgcccgcttccgccgctctccaccccaagcccaagcccaagcccaagcccaaactaatcctcaaccacaacctcagatccaacaacaagggttcagtttagatttcgtgaagcccaccattctaaactcaaagcccatcaacaaagacgaaactttgactctttcaacaacctcttcttccttcatgtcctccgtcaccaacgacgccagcgtctccgacggcaagatcggacctttcctccctccctccgccgccaaaccccctctctcctccgcccaccggaaaaagtgccgcgacgccgccgcagcactctccgccaaaccctcctgccactgctccaagaaaaggaaatcacgcgtgaaacgaacgattcgggtgccggcgataagctcaaagatcgcagatatcccaccggacgagtattcgtggagaaaatacggtcaaaaaccgatcaagggctcaccttaccctcgagggtactacaagtgcagcaccgtgagagggtgtccggcgaggaagcacgtggagcgagcgcaggatgaccccaagatgctaatagtgacttacgagggtgagcaccgtcacgtgctgccgttaacttccgctgccggcgttagtttcggccattgagttaatcgacggcgtcttttggaaacttggcgggggacgttaaatgagcgtcggatcgtgaagtaacggcggatgcgaacaaggatcgattcggttcgaggacggaaaaagaaaagtggcaactaaagtcaactttcgcgttgtggaatgattttgttgacgaggacttttgtgtaaatttgaccccaagtaaagtagtgcaggtctcaaagaatgaaaattatagtgatctcatctgtttttctttatttctattttttttttaaaaagagacatttatttatttatttatttgatgttagagttg

SEQ ID NO: 30071 - DNA, 794 bp, Glycine max
  Clone ID: UC-GMROPIC100C10_FLI
ctcttagtgactgagagagttgcttctgctataaattatggtgatcatggaagcacttttgctggaagccctctagtttgtagtgctgctcttgctgttttggataaaatatcaaaacctgatttcctgtcatctgtatctaagaaaggcctctacttcaaagaactacttagggaaaagttaggagaaaaccggcatgtgaaagaaattcgtggtgttgggctaatcataggaatagatttagatgtacctgcatcacccctcgtagatgcatgccggagttctggcctcctagtgttaactgctggaaaaggaaatgttgtcaggctagtcccgccattgatcataacagagaaggagctagagcaagcggctggcattttgtgccaaactttaccagttcttgataactaggagtgtaggagaaagagtattggccttactttgctagcgaaatagaacatatttggtggtgtattgttgagtagctgagtcacagatggtgttgcctaacttaccagattctgtggataaaataaggcttctaataatatagcagctaaggaatcatcaatatcatcacctaagtcacatgaattcccagtagggttatatattatattgaacttgtgtcttaccctctagctaggcatataactatagtatgacttcaaatatcttgagaggttctaggggaatggataagaccagttcaaaatgtcttaccgaacaataatatcaaaatgaaaactctaactgaaagagaccgaataataaatatgaaaacttcagtt

SEQ ID NO: 30072 - DNA, 732 bp, Glycine max
  Clone ID: UC-GMROPIC100E08_FLI
aaagaagctggctatgttccggagacaaaatttgtgttgcatgacatagatcaggaaggcaaagaagaagctcttcttgcccacagcgagagacttgctattgcttatggtctccttaacagccctgctcgcgctccgatgagggtaattaagaacctccgtgtttgtggtgattgccatacagcactgaagattatttctaagcttgtaggcagagaactcattattcgagatgcgaaaaggttccaccattttaacgatggactatgctcctgcagggattattggtgaacatgaacttagatgtatcctgattcctgactaccagatggattgaatagaatggctgttggtaagtaacccctcaagccagcagatagggaaattgttcatatatctcccggtcattaaattaaaattgatctttatatccacgaggagattggaattttgtttaaccaggctcttccacactaataaatcaagcagtgggacgtgcattcaggttgcagaggcattattcattgagtagttttatataattggttgttgtagcttccatataagatataaattattattgccactccaggcaagggaaaagcttatgtagttgatagacaacattttttttgaaaggcagttcatagacaacattgacattcaatggtataatttcagacaacttttttggatgtcagaacctagtcatttaccacaatcttaaaatcc

SEQ ID NO: 30073 - DNA, 1399 bp, Glycine max
  Clone ID: UC-GMROPIC100F11_FLI
gtgaaatcacaaaagcaaaattggcttttgaggggatgactgagagggaaacagcttcgtggaatgctttgataaatggttttgcagttaatggctgtgcgaaggaagcgttggaggtgtttgcgaggatgattgaggaagggtttggaccaaatgaggtgactatgattggcgtgttatctgcttgcaaccattgtggtctggtagaggaaggaagaagatggttcaatgcaatggagagatttggaattgcgcctcaggttgagcattatggttgcatggttgaccttcttggaagggctggatgcttggatgaggctgaaaatttgattcagaccatgccttatgatgctaatgggataatattgagttcttttctgtttgcttgtggttactttaatgatgttttgcgggcagagagagtgctgaaagaggtggtgaaaatggatgaagacgttgcaggaaactatgtgatgttgagaaatctgtatgcgaccaggcaaaggtggacagatgtggaagatgttaaacaaatgatgaagaaaagaggaacaagtaaagaagttgcttgcagtgttattgagattggtggaagttttatagagtttgcggctggggattacttgcattcacatctggaggttattcagttaaccttggggcagttaagtaagcacatgaaagttgaaataatctaataatctattgacaatggaaacacaagaaagctgaaaggagagatcaaaagtagttgaatgaaaattggataagccacaggctcacagcacatgtgtatttcagtgccctaatgccccttccaaaatttgaagtccattcagaatcaggctcctaactccagtaaacggtagggagattggaacacaactttattagaaggcaactttaaaacttaaaacatgtaactggaattggcgcccaaaattatgcgtaaattgtgggtcttctatcctagaattatggctcttccctaaggttttaaacaatgatttgcaactgcaatgtcaagatttgtggggtttctatgactgcatcgtggccacatcaatcgcatttgcttgtacttttgcgatatcaaggattgcaaccaagttgcaactacgacaatttaaaaccgtccccttcgctatgtgcaatgttgcatctgcacctcaccagcgtgaagcctttctacatatatgttaaagttctctcattctagttcccatgattactccactcagcttttttgcactgcgaaggaaattttgccgagaaatagcacgacatatcaattgtgggatgctatttaatttgtgaattgtgatcagtgaccagatatgacctttcacatggtttatttgtgagggatgaatggtttgattaattatattctgcaggg

SEQ ID NO: 30074 - DNA, 1145 bp, Glycine max
  Clone ID: UC-GMROPIC101B05_FLI
ttgaaagccaatctaactgaactggaatcacgtcatagcaataattatactgaggaagagttacattctgtaaaaaagttatctaaaaagttacctcccatacaagaagcaccaaagagttatactccatatatcaagtacaccaagcttcaatttaaggttgatacattctttgccgttggatcccctcttggtgtatttcttgcacttcgtaatatccgaattggcattggtagaggccaagaatattgggagcaggaaaatataagagaggagatgccggcttgtcggcagatgttcaacatttttcacccctatgatcccgtagcatacaggatagagccacttgtgtgcaaagaatacatcagccaacggcctgttttgattccatatcacagaggaggaaaaaggttgcatattggatttcaggaatttactgaagacctagcagttcgaactcatgcaataaagaattatatgaaatctgcaagggataaggtaatcacagtgtgtcagtcgaggaaaatggagaacatagaaggggagagttctgaagaggaagaacagccatcatatggatcttttatgatggagaggttgacaggaagcatgagtggacgaattgatcacatgcttcaggacaagacctttgagcatccatatctgcaagccattggagctcatacaaactattggcgggattatgatactgctcttttcatattgaaacacttgtatggagaaataccagaagattctgatttgttggttggatttactggggacaactcaaaatctgagagtacctctgttagttggtatgaaccgagagacacggttgaggaagatcttccgttgactttctcagacaaggttatggccagaagcttctcgagcaaagctaagaaggttctgcagaagcacactgcgtttaatttctaaatgcctatacacgatgtaatcgagagattgtgtaatctacggaagaatgtatagtagaagaagggttccccatcttaggattgtttcatatagttcgctagtgtacaattagaccctcctccaatgtacataaccaggggtgttaaagaaaaaacatcttttagtatcaatatatgagaaccgcatagtacctggtgttggcg

SEQ ID NO: 30075 - DNA, 965 bp, Glycine max
  Clone ID: UC-GMROPIC101B09_FLI
acactgaccttcaccaaatcattcgttcaaatcaagcattatcagaggagcactgtcagtattttctgtatcaaatcctccgtgggttgaagtacatacattctgctaatgttctgcatagggacttaaaaccgagcaaccttctcctaaatgccaactgcgacttaaaaatttgtgattttggactggctcgtgtcacctctgaaactgattttatgactgaatatgttgttacgagatggtaccgtgcaccggagcttctgttgaactcttctgactacactgcagcaattgatgtatggtctgttggttgtattttcatggaactgatggatcgaaagcctttgtttcctggcagagatcacgtgcatcagttgcgtctacttatggagctgattggcaccccatcagaggctgatttggggtttctgaatgaaaatgctaagagatacattaggcaactgcccctttaccgccgtcaatctttccaggaaaagtttccacatgtccatcctgaagctatagatcttgtagaaaaaatgttaacttttgatcctagaaaaaggattactgttgaagatgcactggcgcacccatacttgacatctctgcatgacatcagtgatgaacctgtgtgcttgactcccttcagctttgactttgaacaacatgctttgactgaggaacagatgaaagaactgatataccgagaggctctagcatttaacctcgagtatcagcagtagtgatagacttgttatcattggatttggatcgtgtgatgtctgtgtccatagatcaagagatttcattgtgtatatatatctatcatctgaaaccaggtgatcttggagttgaattatttccatcagaggcatgattggtagactgaaacaatcataaggtatttgtattggctttttgcttcatattattgtccaattcattggctgcagccaactgat

SEQ ID NO: 30076 - DNA, 1032 bp, Glycine max
  Clone ID: UC-GMROPIC101F01_FLI
aaaagagatatgaaattatcattgggacagccgaaggattagtttatctgcatgagaactccaaaacaaggataattcacagagatataaaagccagcaacatcttattggatgcaaagcttcgtgctaaaattgcagattttggtttggccaggtcctttcaagaggacaagagccacataagtacagctattgcaggaactttggggtatatggctcctgaatacctagctcatggtcagttaacagaaaaggcagacgtatatagttttggagtgttgctgctagagatagtcactgctagacagaacaacaggagcaaagcatcagaatattcagacagcttagttacagtggcatggaagcattttcaggcagggactgctgaacaattatttgatccaaacctagacttgcaggaagatcacaatagcaatgttaatgttaaggatgagattttaagagtggttcacataggacttctatgcacccaagaggtctcttctttacgaccaagcatgtcaaaggcactgcaaatgctaacaaagaaagaggaggatcttgttgctccctctaatccacccttccttgatgagagtaccatggaacttcatgacacaagtggtgacccattttatcctcttactgcacccgattcaattgccactatgtcccatagctctttttatcccaggtgaccaagagaatgcagagaaaatccctgacatgacatgtcggcagcgcagcttgtgattggcaaataacttggtctgcctcagaaatcagacctatggtctgcctcagaaatcagacctatgtcacttaaggttgttaacaaagcaatcgatccctttgctatttaaaatacatacttaagacacggggagattttgagccaaatgtccaatacggttatgggaagcaaacagtgtatactgtatagttccatgattaacattattaaacaattttagattaatcagatatatgtaacaactcataaatactacgtttggatacaactattaattc

SEQ ID NO: 30077 - DNA, 2120 bp, Glycine max
  Clone ID: UC-GMROPIC101F12_FLI
cacggtccccaataagcgccttatcatgtctcccgccctcaccactctgtcaccgccgttatctctttccgttacttcggcggcgcgtcgtccacggctgacagcgatggtgaagactgagaaaaagcaaagccttggcttcggcagcgataagaaggaaacaaagtggcactgcgtggagggttgtggttcctgctgtaagcttcaaaagggtccatcttttccctctcccgaagaaattttcgacgacccttctgacgttcagttgtacaaaagcttgataggtcctgatggatggtgtattcattatgagaagagtactcggaaatgctccatttaccctgagcgtccatatttttgccgtgtagagccagaggtatttaaatctttgtttggagttaaagagaagaattttcacaaggaggcctgcagtttctgcagggacacaattaagtctatttatggtcccaattcaaaggagcttcataatttcaacagctcaataaggaactcttctagttagattttgtgggatttggattcttaattgctcaaggttgttttcttgtctttaccttgattaattattatgctggtgggagttttcttgcttataacttctgaaatatgatttcttgatctaatgcaagtgctcaaagtagaactagaacctagcaacactgggaaaaaatagctatggatttgcgggttattattgtacgctcttttttggaaattattgattatttattgccatatatcttattttgggataactgaaggaccctaattagtaaaaccaactctattcagtgactgataaaacaacaacaaccaagccttttcccactaggtggagttgactacatgaatcagacaatgccataatgttccattgtatctctaaatcttttttaattcttttgcttatggtttttcttagtctccctctgcctctagtgactaggctatcctccatctgatctactctccttactaaggcttataagatcatcctcacacatgctcaaccctctaaggcaagaatctaccatcttttttacaacaggtgctaccctaactttttacccaatgcattcatttgtaatcctatcttttccagtatgtccactcatgtaatgccagcactctcatctctactacattgaatttgttctcttggttttttgctgaccaacatctagttccataggacatcactggtgttatggttatgttgaaaactttcctttaagcttgagtgataactttttattacaataaacactcgaagcacttctctatttctttcatcctgcttgaatcctccatatttagtggcttccatattaaaaagatgtaacgactagagttcatttaataagaagttgaaaatcttgatccatggaagcaacttctttgtataaaacttactgagtacaaacagaagttgttccctgtaattttaagatgccgaaattttgactgaaagtggattatatactaaatggaatatttgtaacagctggtttttcactgccttacatattgtctgggatgggaggaattctccacacaatgcatgtgcttatgcttttcaagcactgtgctatggatctctactcttatcgaagcacagctactatgttagtgtttttagactggcacaaacagaaacttccattcaaaattgaatattactttcacatgttcctcctagataactatgttcatgaaatgcttgctttgattatcatggtcaagctctcccatgccaggttttttgcttctcctctggtcacacagaagcagtagcagctggttcacaattcaaagcatcatctgcggttgtgattgctaaattctgtgcacttggaaatatgagcttagatggatggttaataaaatagacgtttcaacttatttgaatgggctaatttgatcattctattgcttatagaataggccctaccctaggatcgatacatcatggatgctatatttctttaccatgacaattttttgatttttctttttttggtacatgtttataaaacgtctgtattatctatacttacatgcatagtacctattcaatgatcacccacctttttgcatgg

SEQ ID NO: 30078 - DNA, 2054 bp, Glycine max
  Clone ID: UC-GMROPIC102G11_FLI
cacataataagttataagacaattaattaagttatttgacacaaaagtcagaagctagggtggtgaagacgcaataaaatggactcttgggttagaatgctgtttctcattgcttgcattgttccagctttagtcgagtgcaaagtgaggcactacaaattcaatgtggtactgaagaatactactaggttatgttcaagcaaaccaattgtcaccgttaatgggaaatttccaggacccactctttacgctagggaagatgatacagtgctagtcaaagtcaataaccttgtcaaccacaatgtcaccatccactggcatggtgtgagacaacttagaactggttgggctgatgggcctgcatacatcacacagtgcccaattctgtcaggacaatcatatttgtacaacttcacccttacaggacaaagaggaacacttctttggcatgctcatgttaactggctaaggtcaactctccatggtgccatagttatcttgccaaagaggggtgtgccataccctttcccaaaaccagataaagagttggttgtaatattaggagaatggtggaaatctgatacagaagatgttatcaatgaagctctcaagtcaggattagcaccaaatgtctcagatgctcataccattaatggccttccagggattgtgtctgtggccaattgttctacacaagatgtgtacaagcttcctgtggaaagtggcaagacctacctattgagaatcatcaatgctgcactcaatgaggagctcttcttcaaaattgctggccatccattcactgtggttgaagttgatgcctcatatgtaaagcccttcaagacagacactctttcgatagcccctggtcaaaccaccaatgcccttttaactgctgaccaaaactctggcaaatacacaattgtagcctctactttcatggattctccagttgtagctgtggataacttgactgcaacagccacattgcactacactggcactcttgccaccactcctacacttctcaccacccctcctccaagaaatgccacccaagttgctaacaacttcaccaattctctcaaaagccttaattctaagaaatacccagcaaaagtcccacaaaaagttgatcattcacttctcctcactgttggtttggggattaacccttgtccatcttgcacagctggcaatgggagtagagtagtggctgctgtcaacaatgtgacatttgtgatgccaaccactgcactgcttcaggctcattacttcaacatcaagggggtgttcaccactgatttccctggcaacccttctcatgtttacaactacacggcgactccgccggcggcagcttggcagaccacaaatggcaccaaggcttacaggctggcattcaactccacagttcaggttgttttgcaggatactggggtcattgctcctgagagccacccggttcatcttcatgggttcaacttctttgttgttggctctggtgtaggaaattatgatcccaaaacggatcaaaataactttaatcttgcggatcctgttgagaggaacacaattggagtgcctactggagggtgggttgctttcagattcagagcagataacccaggagtgtggttcttgcactgccatttcgaggtgcatacaacatgggggttgaagatggcattcttggtggacaatggtaaaggtcctaatgaatcactgctacccccaccaaaagatcttccaaaatgttagacttttcagtcatcgattgaacaacacacagacaagggaaggatacagagaagaagctaggaaaaacaagagaataaaggggatggtggttatttaataagcaggatgtcccacttgcctttttgagctaatgggagcatttcttcacagtaggttggagtcagcattttggttttctttgaacatacacttttttcttgttaaagcgattcagatcatattcatatgtattgagatcgaccctgcataatttggttatttactgaaataaatctgtcacgtacttcatcgtt

SEQ ID NO: 30079 - DNA, 1369 bp, Glycine max
  Clone ID: UC-GMROPIC103A03_FLI
ggagaatataggatatgtaatacccaccccagttatcctacattttatccgagactatgaaaagaatggggcatatacaggatttccaatccttggagttgagtggcagaagatggaaaatcctgatttacgaatgtcaatgggcatgggaccagatcaaaaaggtgtgcgtatcagaagaattgaacccactgctccagaatctcatgttctgaagccatctgatgtaattctcagctttgatggggtcaatatttcgaatgatggaacagtgataatacattacatagcagcaacgtttgatctggtaagggaaaatattcaaggtggtggtccaattaggcatggggagcgcattggtttcagttaccttgtctctcaaaagtacactggggatagagctctagtaaaggttttccggaatttacagatacttgaatttaacgtaaaacttgcaactcataagcggcttgttccagcacacatcaaaggcaggcctccttcttattacatcattgctggatttgtttttactgctgtttctgtcccctatcttcgttctgagtatggtaaagattatgaatttgatgctccggttaagcttctggaaaaacatctacattctatggcacagtctgttgatgagcagcttgttgttgtttctcaggttcttgtgtctgacatcaatattggatatgaggagatagttaacactcaggttcttgctttcaacgataaacctgtgaagaatctgaagagcttggccaacatggttgagagctgtgatgatgattatctaaagtttgatctggaataccaacagaaggtagtgttgaagactagcactgctaaggccgcaaccttagacatcctcaccacacattgtataccttctgcgatgtctgatgacctgaagacataaaaagttttggtgaaagttatttaaattactcccattggcctcatcttaatttttttttaagtgttattacacctagttcactataagattgcggtactattggatctgcactagtcaatgagataaaaaggcttcacatacagatgattagagaatcagaggatggggaaggaattagcaaaatacaacttacgcttcattaaattatcattaagtttatctctttcgagttggggtgttctgtactctatttatatcaattattgtgtcccccccttcccccctttttgatacaaaattgacattcatatgtatttttcttaagatgggagaggcatgtaaaattttatgttgaggatattaatgctgttattttgaagtaccctacttacatggagcagatgattctactgctcacaatgataaaagtgtttttctttgaaacgc

SEQ ID NO: 30080 - DNA, 879 bp, Glycine max
  Clone ID: UC-GMROPIC103B01_FLI
cttctgtgattctgcagatgccattccccaattgcttaagccaatttgtggcagtgattcttttggtagtgttcaccctgatctccaagaagatgtaatcacaacactcctcaacatctctattcatgataacaacaaaaagctagtggctgaaactcctatggtaattcctctccttatgagagcattgagatccggaacaattgaaacgaggagcaatgccgcagctgcgcttttcactttatcagctctcgactcaaacaaggaactcatagggaaatctggagttttgaagccgttaattgacctcttggaagaagggcatcccttagccatgaaggatgttgcttcagcaatttttaacatatgtgtaatgcatgagaacaaggcaagagccgagaaggacggcgcagtgagggtgattttggcaaagataaataagcagattcatgttgctgagttactagctattcttgcactgctttcaagtcaccagagggctgttcatgacatgggagatcttggagctgttcctagcttgctgaggatcatcagagagagctcatgcgaacgcaacaaggagaattgtgtagcaatccttcaaaccatttgtctgtatgatagatcaaagttgaaggaaataagggaagaggagaacagccacaaaacaatctctgagctagcaaagcatggaacatcaagggctaagaggaaagctagtggaattcttgagagattgaatagggctgttaatatcacacacactgcataatgtctcttgagccctctctcaaggtacattacatcgtatattctgcatttgtctccagaaactctaagttgtttaaagttaaaatcagtcagaaattctgtctcttc

SEQ ID NO: 30081 - DNA, 1423 bp, Glycine max
  Clone ID: UC-GMROPIC103C05_FLI
gttgcgttcctgttgatgatattttccaaatagtaataatttgatggtcaattcataagctagcactagctacatggtctaaacagattagtcattaatcatcttagtatcaaatattaaaggggattacaccggtgataatgtgacgacggagaacctctttgctgttattcttggagacaagagtaaattgaagggaggaagtggcaaagtgatcaacagcaaacccgaggacagaatatttatatactactctgatcatggaggtcctggaatacttgggatgccaaacatgccatacctttatgccatggattttattgatgtcttgaagaagaaacatgcatctggaagttacaaggagatggttatatacgtggaagcttgtgaaagtgggagcgtgtttgagggtataatgcctaaggatctgaatatttatgtcacaactgcatcaaatgcacaagagaatagttggggaacttattgtcctggaatggatccttctccacctccagagtacatcacttgcctaggggatttgtacagcgttgcttggatggaagatagtgaggctcacaatctaaaaagggaatccgtgaaacaacaatacaaatcggtaaagcaacggacttcaaatttcaacaactatgcgatgggttctcatgtgatgcaatatggtgataccaacatcacagctgaaaagctttatttataccaaggttttgatcctgccactgtgaacttccctccacaaaacggcaggctagaaactaaaatggaagttgttaaccaaagagatgcagaacttttgttcatgtggcaaatgtatcagagatcaaaccatcagtcagaaaataagacagacatcctcaaacaaattgcggagacagtgaagcataggaaacacatagatggtagcgtggaattgattggagttttactgtatggaccaggaaaaggttcttctgttctacaatccgtgagggctcctggttcgtcccttgttgatgactggacatgcctaaaatcaatggttcgggtgtttgaaactcactgtgggacactgactcagtatggcatgaaacacatgcgagcattcgccaacatttgcaacagtggcgtttctgaggcctccatggaagaggcttgtttggcagcctgtgaaggctacaatgctgggctattccatccatcaaacagaggctacagtgcttgattttgggttttgtacacaaaagctttaaagcccggttgatgatgtaatatttctctattgcattctgcctactggtttctgctgcttgtgtcaaattttctctaaactagagtagcccaatagcatacgtgttatgtgcattggtcatgtatacaagtgtaatactaataccttctacataatataagattagttagtttacttgtc

SEQ ID NO: 30082 - DNA, 1313 bp, Glycine max
  Clone ID: UC-GMROPIC103D01_FLI
ttgaaatagcagttgccacccctggaagattcattgatcatttacaacaaggcaacacttccctctccagaatttcttttgttgttctagatgaggcagatagaatgcttgatatgggttttgaaccacagataagagaggtaatgagaaatcttccagagaagcatcaaacactgctgtttagtgcgactatgcctgtggagattgaagaattatcaaaagagtacttagctaacccagtgcaagtgaaggtggggaaagtgagtagcccaacaactaatgtttcacaaactcttgtgaaaatttctgaaaatgagaagattgatcggcttctagatttgcttgtagaggaggcatcacaggccgaaaaatgtggtcatccatgtccattaacaattgtgtttgttgagaggaagacaaggtgtgatgaagttgctgaagcattggtagctcaaggattatctgcagtttctcttcatggtggtcgcagtcagagtgaaagagaagctgccttgcatgattttcggagtggctccaccaacattttggttgccactgatgtcgcgtctcgtggcttggatgtcacaggagtgtcacatgtcattaatctagatcttccaaagaccatggaagattatgtacaccggattggaaggacagggcgtgcgggatcaactggcttagctacttcattttacactgatcgcgacatgttcctcgtggcaaatataaggaaagcaatagctgatgcagaatctgggaacacactgacatttgcaaccggaaaggttgctagaaggaaggagaaagaagcagcagctgcacaaaaagaggcaaatattgctttatccaaacagttaggattgggagctgcttcaatgaacattgaagataaatataaattcatgattactgccacaaacactaaaaaagagggagcagcagatagtgcctgggatgattaacgaagtatttggttcttcccatatttgattggtgacaactgctaaagccttttaagtgctggtgcataattgatattgagtgcatttataggtttgttgcttttaagacgctggagatggagaagtttcttgttaagtttccaagtctacgtattgtttcacaccgttgtaaccaactagcttgctagacgcctaggtgctttgtagagttgtcatgcaggtagtgcatcttatgtaatcatagaagtgcaagttttttttaaatttgtgttacgccgaatataccactgttcgcacaaatatttcatcatcattaaatgtatatatccagcttgctgcatttcacac

SEQ ID NO: 30083 - DNA, 945 bp, Glycine max
  Clone ID: UC-GMROPIC103E01_FLI
aacatggcttccttaagctccttagtgctgctccttgcagctctaattctatcccctcaagttcttgcaaactatgagaatcccccagtgtacaagcctcccactgagaaaccaccagtttataagcccccagttgagaagcctcctgtttacaaacctccagttgaaaaccccccaatttataagcctccagtagagaagccaccagtgtacaagcccccagttgagaaacccccagtgtacaagcccccagttgaaaaaccaccagtgtacaagcccccagttgagaaaccaccagtgtacaagcccccagttgagaagcccccagtttacaagcccccagttgaaaaacccccagtgtacaagcccccagttgaaaaaccaccagtgtacaagcccccagttgagaagcccccagtttacaagcccccagttgagaagccaccagtttacaagcccccagttgagaagccaccagtatacaagcccccagttgagaagcctccagtgtacaagccaccagtagagaagcctccagtttacaagccaccagtagagaaacctccagtttacaagcccccagtggagaaacctcctatttacaagccacctgttgagaagcctccggtctacaagccaccatatggaaagccaccatacccaaagtaccctccaactgatgacacccatttctgaaggatgtcaagaggtgtattgagtatatgctaaataagaggtgctcaaaatgtagttatagattacaaattattgcaagggttgctcttagcttcttcatttcaagcttttgtttacactttgcagtgctatggcaaagataagagtatcatggatggaaaaagggggggaaaaatgttgctttgtactccaaattatgaataatagaactttatattatttatcagattattaatcctaaattacttt

SEQ ID NO: 30084 - DNA, 1675 bp, Glycine max
  Clone ID: UC-GMROPIC104A06_FLI
aagaggaaggaggacagagtgagcaacttacccgatgaagtgcttcatcgcatactttccactttggacgcaaaatcagcggttcaaacgtgcgttttgagcaagcgatggaggcacgtttggacttccctaccagtcctcaacttcctcgactcttccttcgacgattttctccatttccagtgtttcgtggaccattttctgtctcgcagagatgcttccagcaacatctccgtcctcaactttgcgtgcacagatcatgaacttgatgatgggcacacgcacatcgtagattccatcattgaccatgttaccctcacaccacccatcaccattcagggtctctacatcgtcgctgaatgcatcgtagggaagcttcctcaactctctatttgtcaatctctcactaccctcaaacttgctcacatatccactgaaaccacaacctttgacttcttatctctcacgcacttgcaccttttcgattgtcggtttgagtgcggtttggaagagcttctcgacccttttagggattgtcttaatctgaagcacttgtatcttcatcgctgtcagtactatggaggattccagaggtttaaaatctttgcccccaaactcaccctgttgagcattgccctgatgagagtagatgaaatgtttgattctgattgtaccatccagcttttcacgccaaagctccaatcttttacatactgtgactttgatctctatgatttttctattgagggggaccttccttttatagaagaagtggatattgatatgggctgtttggctaaggacacttattcactgcttcagttgattgaattgtttcaagtgatggggaatgcccagtttgtatccttatcacctgatatcattgatgttctagctacgtttcctgatctactggatggtcggtcatcccctttcactagagtgaggacttttgtgttgaacatggatacgccttcttcctcctttgttatacctcctaatgtcatggcctacttgtttagtggatctcgtggacttgatttcttgatttctatgaacgggaaggtgtggaaaaaggtatataaaacctcttttcaaaatgaaaaatgtaacacaatcactatttttcttcctaaatttttataaatgatttgccatgcttggacggaaaaaaatttgcagtgtagcattaccctaaaagttaactgttgtctaaatccaatgcaatatatcaacacttatttagttgtgatgggtaaatatggatcatatggtagagtatcggtcttcacaaggcctgcagagagaggttgtgatattttattgccacactgaaatcaaattataaatcttgtactttccgttacaggtgcaaaacagtgcaaaacaatctgattgaagatggcttcttgctaactttgacagttttatctttttgagattgaaagctgttttaacaaagaagactcgtgtatttttttgttctccccagagaaatagtggtcctgctgaatgctgataatttgctgaatatgcagcaaagatgggttgacgcattgttcataatctgtcatatttgttgctaacagttgttattttgtggtcttttaggccttttgctctctaatgttgtaaactgcatattacatatagagaatctcaattatatatcacc

SEQ ID NO: 30085 - DNA, 2755 bp, Glycine max
  Clone ID: UC-GMROPIC104F08_FLI
ttttaaagaattattatctagatccttaattcaaaaagatattgctattgcagaggaaaaatttcgaatgcatgacctcgtctatgatttagctagacttgtatcaggaagaagttcttgctactttgaaggcagtaaaattccaaaaactgttcgccatttatcattttctagggagatgtttgatgtctctaaaaagtttgaggacttctatgagctaatgtgtttgcggaccttcctaccacgtttgggatatccattagaagaattttatttgaccaaaatggtatcacatgacttgttaccaaaacttagatgcttgagaatattgtcattgtctaaatacaaaaatatcactgagctgcccgtttcaattgacagtttgttgcacttgcggtatctggatctgtcctacacttccattgaaagcttgcccactgaaacatttatgctttacaatttgcagacattgatactatcaaattgcgaatttcttattcaattgccacagcagattggaaatctggttaatttgcgtcaccttgacctcagtggcactaatttgccagagatgccagcacaaatctgcagactacaagatcttcgtactttgacagtttttattgttggaagacaagatggactaagtgttagagatttaaggaattttccttatctgcagggtcggctttccattttgaacttgcacaatgttgttaatcctgtggatgcatctcgtgccaatttaaagaacaaagagaagattgaggagcttatgctggaatggggcagtgaactacaaaatcagcagattgaaaaagatgtacttgacaacttgcaaccatcaactaatttaaagaaactcgacatcaaatattatggtggcactagctttccaaattggatcggagattcttcattttcaaacatcatagtccttcgtattagtgattgcaacaattgcttgacacttccatcatttggacaactaccttccctcaaggagcttgtcgtcaaaaggatgaaaatggtgaagacagttggttatgagttctacagcagcaatggaggttctcagttgctacagccatttccatcgttggagagtttggaatttgaagatatgttagagtggcaggagtggctaccatttgaaggtgaaggcagctactttccttttccttgtctcaaacgtttgtatctatacaagtgccccaagctgagaggaatcttgcccaatcatctaccttcattgacagaggctagtttctcagagtgcaaccaactagtgacaaagtcatctaatctgcactggaatacatcaattgaagcaatacatattagagagggacaagaagacttgttgtctatgcttgacaatttctcttattgtgaactattcattgaaaagtgtgatagcttgcagtctttgcctagaatgatactaagtgcaaattgtcttcaaaagttgactcttacaaatatcccatctttgatttccttcccagctgattgtttacccacatcattgcaatcacttgacatttggcactgtagaaagttagaatttctatcccacgatacatggcatagattcacatcacttgaaaagctaagaatatggaatagctgtcgttccttgacatccttttcattagcttgtttccctgcccttcaagaactttacatccgttttattcccaacttggaagcaattactactcaaggtggaggagcagctcccaaattagttgattttattgtcactgattgtgacaaacttagatcactaccagatcagattgatctcccttcccttgaacacttggacctttctgggcttccaaagctagcatcattgtccccaaggtgtttcccttccagtttacgatcactttttgttgatgttggtatactatcatctatgtctaaacaagagataggtttggtattccaatgcctcacttctctgacacatcttttatttaagggtctcagtgatgaagatcttattaacactcttctgaaggagcaattgctgcctatttctctcaaaattctggtcctgcacagttttggtggtttaaagtggttggaaggaaaagggcttcagaatctcacttctctccaacagttgtacatgtacaattgtccaagctttgagtccttacctgaagatcatcttccttcctctcttgcagtactcagtatgcgggagtgtcctttactggaagcaaggtatcgaagtcagaacgggaaatactggtctaaaattgctcacattcctgcaatcaagataaatgaaaaagtgataatatgagctgttgcatgaataagaatcctctaaagttggtagctgagatgagactggacacgcgtttcttcatatttgcttgctgagatggtgttagattactgtgttattcaattctctggtccgtatttcaatcttcttatctcatagcttttgccacttccagaaggtttcccttgaacaagctgtaccaaacatcaaatttttctctgtataactggtaattggttgaactaaacctatggtttgttgaggttattatccagttaagtagtttttctggggtgaactatttctaaaaccagaatgttattctatttatgatgtttttgttgaactatctaaacctttatatgcataacagaaactagaatttgtgttagacttcaatgttgtttatagtgttttcttttaataaaatgttacccttgtaattttgtc

SEQ ID NO: 30086 - DNA, 914 bp, Glycine max
  Clone ID: UC-GMROPIC104G08_FLI
cttccttaagctccttagtgctgctccttgcagctctaattctatcccctcaagttcttgcaaactatgagaatcccccagtgtacaagcctcccactgagaaaccaccagtttataagcccccagttgagaagcctcctgtttacaaacctccagttgaaaaccccccaatttataagcctccagtagagaagccaccagtgtacaagcccccagttgagaaacccccagtgtacaagcccccagttgaaaaaccaccagtgtacaagcccccagttgagaaaccaccagtgtacaagcccccagttgagaagcccccagtttacaagcccccagttgaaaaacccccagtgtacaagcccccagttgaaaaaccaccagtgtacaagcccccagttgagaagcccccagtttacaagcccccagttgagaagccaccagtttacaagcccccagttgagaagccaccagtatacaagcccccagttgagaagcctccagtgtacaagccaccagtagagaagcctccagtttacaagccaccagtagagaaacctccagtttacaagcccccagtggagaaacctcctatttacaagccacctgttgagaagcctccggtctacaagccaccatatggaaagccaccatacccaaagtaccctccaactgatgacacccatttctgaaggatgtcaagaggtgtattgagtatatgctaaataagaggtgctcaaaatgtagttatagattacaaattattgcaagggttgctcttagcttcttcatttcaagcttttgtttacactttgcagtgctatggcaaagataagagtatcatggatggaaaaagggggggaaaaatgttgctttgtactccaaattatgaataatagaactttatattatttatc

SEQ ID NO: 30087 - DNA, 1127 bp, Glycine max
  Clone ID: UC-GMROPIC105D04_FLI
tttatggtgttggtattgacctttggagtgctggttgcatcttggcagagctgcttgctggaaagccaataatgcctggccgaacagaggatgatacatgactaactttcgggttgcttggggccaggttgaacaactgcacaaaatatttaagttgtgcggctctccatctgaggaatactggaggaagtatagattgccaaatgctactatctttaagccccagcagccatataaacgttgcatcttagaaacatacaaggactttcctccatcttcactacctctaattgaaacccttctcgcaatagatcctgaggatcgtggcactgcctcagcaacactaaatagtgaattctttaccacagagccttatgcttgtgaaccatcaagtttgccaaagtatcctcccagcaaagaattggatgtaaaactgagagatgaagaagcaagaaggcaaaaggctctaaatgggaaagctagtgcagttgatggtgcaaaaaaagtcagagtacgtgagcgtgaacgtggtcgggctgttccagcccctgaagccaatgcagagatccaaacaaacttagataggtggagagttgtgacccatgcaaatgcaaaaagcaagagtgagaaatttccacctcctcatcaagatggagctgttggatacccgcaagatgcatcaaataaaggacctgtttcatttggcgcccctgacacttccttctcttcagggatatttaattcaaaaccttctggacatgttaggaatcatgctgctgcagggcttcacagagggaggaaaactaagaaagatgagtcccagatggcatcatcatggaaattcatgcgtccattcaaaccatcaacagctggactttccatggatttattatttaggagcaaatgatcaatcagtttcttttgattttggcttcctagaatatgagggtagtgatgatttaggccttgatacatctttttttgcatttcgcaatggttttcattttttttgtgtcgctcctaattttttgtatttcatttggcataaagttgttgtataatctacaacggggatccttacatttgtatatttagaggaataaattctctgctgtacagtttctggg

SEQ ID NO: 30088 - DNA, 2053 bp, Glycine max
  Clone ID: UC-GMROPIC105H10_FLI
ctttcttctaaaccctatggccgacgaagccaaagccaaaggcaacgcagccttctcctccggggactatcctgccgccatccaccacttctccgatgccatcgccctggctccctccaaccatgtcctctattccaaccgatccgccgcatacgcctccctcaaaaactacgcagatgcattagcggatgccaaaaagacagttgaactcaagcccgactggtccaagggttacagccgtctcggtgccgcgcatcttggcctttcccaatacgatgatgctatttcggcttacaaaaggggtctcgaaatcgaccctcacaacgagccccttaagtctggtttggctgatgcgcagaaggccttggccgcggcctccaggcctcgcccctcggcctctaaccccttcggtgatgctttctctgggcctgagatgtgggcccgtctcaccgcagaccccaccactagggcttacctccaacagcctgatttcgtgaagatgatgcaggatatccagagagatcctaataacctcaacttgcacttgaaggaccagagaatcatgcaggccctaggagttttgctcaacgtcaagattcaaacccctcccacgggggctgacaccgatatgccggattctccatcgccctctgcggcagcgtctgagaggaagagagctgcggaggccgagcctgctaagcagcccgagcctgaacctgagcccgagcccgtgcccatggaattgacgggggaggagaaggacgcaaagcagaagaaggctgaggctctgaaggaaaaggaagcgggcaatgcagcgtataagaagaaggattttgataccgcgattcaacattacaccaaggctttggagttggatgatgaggatatttcgtatctcactaaccgcgctgctgtctatttggaaatgggaaagtatgaggaatgcataaaagattgtgacaaggctgttgaaagaggaagagaactaagatcagattttaagatgatagcaagagctttgacaaggaaaggaaatgccttggtgaaaatggcgaagtgctcgaaggattacgagtctgccattgagacttatcagaaagcactcactgagcaccgcaaccctgacactttgaagaaacttaatgaagctgaaaaggcgaagaaagaactagaacagcaagaatattttgatccaaagttagctgatgatgagagagaaaaaggaaatgaattcttcaagcagcagaagtatcctgatgctgtgaagcattacacagagtctatacgaagaaatccaaaagatcctagggcttatagtaacagagcagcatgctacactaaattgggggcaatgcctgaagggttaaaggatgcagagaagtgcattgaacttgatccaacctttgtaaagggttatacccggaaaggtgcagtccagtatttcatgaaggaatacgacaaggctttggagacatatagggaggggttgaaatatgactctaacaaccaggagttgcttgaaggcatcagaacatgcatacaacaaattaacaaggctagccgtggagacttaagtcctgacgaattgaaggagagacaggccaaggcaatgcaggatccagaaattcagaacatccttcaagaccctgttatgagacaggtattgattgatttccaggaaaatcccaaggctgcacaggaacacacgaagaatccaatggtgatgaataagatccaaaagctggtcagtgctggaattgtccagatgaagtaagtttgtggcaggtggcagttcgtgtgaaaaagcaatcaagcaatcgataatgatgtctcagtgtgactattttgacatttaaatagatgtgactgggaaaaaagttgggaaattttgagttgtttttacctttgttttgttttagtgaattcatataatttacgaatatcaggtgcagtccatttatatttcaatggcttattgtggtgacatgacttccttttaatttaaaatcggtagggggcgaatgtgaagtgcggtttagtttttaaggttaat

SEQ ID NO: 30089 - DNA, 1611 bp, Glycine max
  Clone ID: UC-GMROPIC105H11_FLI
ctcgagagctttcagtttgtgtggttcatctttcttcttctccttccctcccccctctgtaacaccccgcttctctgaatccctttctgttaatcatctgtctttcaagctaagattttcgggtttgtctattaattcaccaagaagcaaacttagaaggatttttcgaaagccaggtgttttcagaaacgagatccaggttttattgtcgaatttcgctagtcaaattaattttcataattatttttttctttgaaaccagccaagagggttatttttgatccctcaaagctaatttctctctctctttttttatttccgggactgaagaggttgtctatttgaaatctccttcatcctttcctttcttgtagaaaactttttaaatttttttgtcagtgggtgttttaattaaccacctgttcttcaagttttagaaagacgcaggttgaattaattagtatcatggcagctttgatggatttttacagcagcagcccagagtttcaacttcactcagatccattcaggggagaactaatggaagttcttgaaccttttatgaaaagtccttctcccaactatttcccttcctccccctccctccctaatctttactcaaacgggttatccagcaacacccaaagcttaattggcttcgggcaagcgcaacccacatctcttgtgggcctgaaccacctaaccccatctcagatctctcagatccaagcccaaatccagatccaggcccagcagcatcagaatcacagcaacaccctgagcttccttgggccgaagcccatccccatgaagcacgcgggcatgcctccgaagcccacgaagctttacagaggggtgagacagaggcactggggaaagtgggtggctgagatcagacttcccaagaaccggaccaggctgtggctgggaaccttcgacaccgccgaggaagccgctctggcatacgacaaggccgcgtacaagctccgaggtgacttcgccaggctcaacttcccaaacctgcgacaccagggttcctccgtcggtggtgatttcggggagtacaagcctcttcattccgctgttgacgccaagcttcaggccatttgcgaaggcctggctgagctgcagaaacaggggaagaccgagaagcctccgaggaagtcgcgttccaaactcgcggagaaggttgtttccgacaaggagaacaacaactcttgtaaggtggaagctgcgtcctggtcgtcggaaggttcttcgccgctttcggatctgacgtttgctgacgtgagcgaggctcagtgggaaggtgattcggataattataatctccagaagtacccctcttatgagatcgattgggattctctgtgaagtgtcctattatgtatggtctagtctaggtcttagtgtctcttaggtggctgctactgcaatggagtttttggcaatttcagggctagtactattctgtgtataatctctctaccttgctcacagctggtttttttcttgcttgaccagggagaattagtccgcttaatatgtttttcaagtgcatcgctgtaatctacttcaatttcatcatcttataaaatatattattctact

SEQ ID NO: 30090 - DNA, 1352 bp, Glycine max
  Clone ID: UC-GMROPIC106A04_FLI
gtttgcaatgcatatacagtttttcaatatctgcaaaaagtttgtatgctgtagtcaccacaatatatggagacaggctgaaattccagtcaaaaccttccactactaccatccagatacaaagggtttagattttgctgcactcctcaatgatgtcaagaatgcaccagattgttctttcttcttgcttcatccgtgtgcccacaacccaactggtgttgaccccactgaggagcaatggagagaaatatcataccagttccaggtaaaaaatcatttcccattctttgacatggcttatcaaggattttcaagtggggatcttgacaaggatgcaatagcacttcgaattttccttgaagatgggcatttgattggttgtgctcaatcttttgcaaagaacatgggattatcagaacataaagctggttgtcttaggtaagaatagtcctatatcctagtgagtagagattcagaggcagagcatattctatgacacgtataatagaagttagatgtcaaacatgttccataacgcatttttgaggcaaggttcaagtacatgatattatgattgttataacatgaagctcaactttgtaataatattgccattatgtttaactattttgcttcttatgttcttttcagctttactaatctacaataaaatctataacagtgttttgtgccagagtataaagcaagtagctgcactaaaaagccaactgcagctgatgtcccatgcaatgtatagcagcattccttttcagggtatttcactagttactatgatattaagcgagccagatacagaagcactttggagaaaagagataaaggtcatggctaaacggattcaaactatgcgaactaccttgcggcattgtcttgagaacttgcattcatctttcaattgggagcacataactgatcaggttggcatgttctgtttttctggattaacccctgatcaggttcaacagatggagaagctgttccatatatacatgacccctgatggaagaatgagcatgtcaggtgtgacctctagcaatgtggattacttggcaaatgcaatacatcaggtgaccagaatcgatgaggaagccctaagatcatgttacgtatagcattattagtccttttctaccttattctgatcatagggtacataaccattttttctcttttgtaattatctatgtacctgatatacatcataccaatttagtgaaaatattgaagtcaatatttttggaccatcgtggatattactctaaaaaaattatttgtaaacacagccacatattaagtgatgaatgaaataacagatttacgtatgcctcttg

SEQ ID NO: 30091 - DNA, 896 bp, Glycine max
  Clone ID: UC-GMROPIC106C06_FLI
accattggcaatggtccttccttgggctgggttttcatggctgatttcttaactgcattggctaaaaaagtgaagaccaacaccgcagctgtggagaattaccggcgtatctatgtcccaccaggcattcctctgaggcgagagaaggatgaaccacttagagttaatgttctattcaagcacattcaagaactgctaagcggagatactgctgtaatagctgaaactggagactcatggttcaactgtcagaagctccatctgcctgagaattgcggatatgaattccagatgcagtatggatccattggttggtcagtaggtgctactcttggatatgcacaggctgcaacagacaagcgtgtaattgcttgcattggtgatggcagttttcaggtaacagcacaggatatttcaacaatgattcgctgtggacaaaagaccatcatctttctcatcaataatggaggttatacaattgaagttgagattcatgatggtccatacaatgtgataaagaattgggactacactcgctttgtggacgctatccataatgggcaaggcaaatgctggactgccaaggtacgtacagaggatgatctgactgaagcaattgcaaaagctactggaccacagaaagattcactatgttttatagaagtttttgtacacaaggatgacaccagcaaagaattgctggaatggggatctcgtgttgctgctgctaacagtcgtcctcctaatcctcaatagaaaatcatttcctaattattgacctgttttgtgtattttgttgaatagagttccactactggatatttacaagagaaaaacgacaaaaatgaaaaataagttgaaataaatgtttgcttttccagatttgtatctggtct

SEQ ID NO: 30092 - DNA, 2918 bp, Glycine max
  Clone ID: UC-GMROPIC107B02_FLI
ctccaaggcggcaccatccccacccttctcattctttgctcacagataaagctgcccttctggaattcagaaaaacaatcatatcagacccgcattcctcacttgctaactgggatgaagctgttcatgtgtgcaacttcacgggtgttgtatgtgacaaattccataaccgtgtcacacgactaatcctgtacgataaaggtctagtggggctgctttcacccgttctttccaatctcactggactgcactaccttgagattgttcgcagtcacttatttggcattattccacctgaattttccaacctcagacgccttcacagcatcactctcgaggggaacaatttgcatggctcaataccagagtccttttccatgctttccaagctttacttttttatcattaaggaaaataacatatcaggttcacttcctccatctctcttttccaactgcactctgctagacgttgtggacttttctagcaactcattaactggccaaatcccagaagagattggaaactgcaaaagcctgtggagtatcagtttatacgataatcaatttactgggcaacttcctctctcgctgaccaatctaacgcttcaaaatttagacgtggagtacaattatctgtttggtgaattgcctacaaagtttgtaagcagctggccaaatcttctttaccttcatttatcatacaacaatatgataagccatgataacaacaccaatcttgatccatttttcactgctctcagaaacaacagtaatctagaggagcttgaattggcaggaatgggccttgggggaaggttcacgtacactgtcgccggccaactcaccagtctaagaaccctgctcctgcaagaaaaccaaatttttggatcaattcctcgtagcttagcaaacctttcaaggcttttcattctgaatttaacatccaatcttctaaatgggactatatcctctgatatcttctttagcttgccaaagttggaacaactttccttatcacacaaccttttcaaaactccaattccagaagcaataggcaagtgtcttgatctgggtctactggacctgtcatacaatcaattctcaggtaggattccagacagtttgggaaatttggttggactaaattctttgtttctcaacaataaccttctctcaggaacaatacctcccacattgggacggtgtactaatctgtacaggcttgacttgtcccataatagattaacaggaagcataccactggaactggcaggcttgcatgagatcagaattttcataaatgtctctcataaccaccttgaaggtcctcttccaattgagctcagcaaattagcgaaggttcaggagatagatctttcatccaattacctaactggaagtatcttccctcagatggcaggatgcattgctgtttcaatgattaacttttcaaacaattttcttcaaggtgagctcccacagtcccttggtgatctgaagaacctcgaatcttttgatgtttcaagaaaccagttatctggattgataccagcaacacttggaaatccacaactttgtgggacaattgcaggcatatccttgtgctctcaaagaagaaaatggtttcacactcgttcgttgttgattatattcattttggtcatcttcatatcaacattgttgtcaataatttgctgtgtaattggatgcaagcgtcttaaagtaatcatcagctctcagaggacagaggcaagcaaaaatgcaactagacctgagttgattagtaacttcccaagaatcacgtataaggaactttcagatgccactggaggatttgacaatcagagacttgttggatcaggtagttatggacatgtctacaggggtgttctcacggatgggacaccaatagcagtcaaggtgctgcatttgcaatctggaaattctaccaagagctttaacagagaatgtcaagttttgaagagaattagacacagaaatctgataaggattatcacagcatgtagcctacctgattttaaggctcttgttctaccatacatggccaatgggagcttggagagccgcctctacccttcttgcggatcatcagacttgagtattgtccagagggtgaatatttgcagtgatgtagctgaagggatggcctatttgcatcaccattctcctgttagagtcatacattgtgatcttaaaccaagcaatattcttctcaatgatgacatgacagctctcgtttctgattttggggttgcaaggctaattatgagtgttggaggtggggctattgataacatgggcaactctagtgcaaatttgttctgtggatccattggatacattgcaccagaatatggatttggatccaatacatctaccaaaggagatgtctatagctttggcattctagttctcgagatggtgactagaagaagaccaacagatgacatgtttgttggtgggttaagtctgcaccaatgggtaaagattcattttcatggaagggtagaaaaggtgatagattctgctttggtgacagcctcaatagatcaatcccgagaggttagaaagatgtgggaagctgctattgtcgagttaattgagttggggcttctttgcacacaggagtcaccttcgacaagaccaaccatgcttgatgcagcagatgacttaaatcgtctcaagagataccttaatggggacacaacaggaacttttgcctcatcacttggaatttcatcttccactgtaggtggtgactggtgattcatattctttcagcatcagttgtctcatacttctgttgagcccaatggcagatccaatctataaccacagaaggatcaattgaaaatttacatgatgtatgatcagataacaaacaactttgttatt

SEQ ID NO: 30093 - DNA, 2362 bp, Glycine max
  Clone ID: UC-GMROPIC107B05_FLI
gtccaaatatctctgttctcaatattccacccccttttctcttctctcttctttctctattctcagatccattgctttatcccacagcttccaccactgcatccaaacacgcccttctctcatctagatagaatttgctcttgcaaaaatggcagcttctggggttcattctagcaagcaaatgaggaggttggaatcgaggaagtcacattcttggtggtgggatagtcacatcagccccaagaattctaagtggctttcagaaaaccttgaagagatggaccggagtgtgaagcgaatgttgaagctgatagaagaggatgcagattcatttgccaaaaaagctgaaatgtattatcagaagaggccagaattggttgctctggttgaggagttttaccgtgtttaccgggctctggctgaacgttatgatcatgtgacaggagaattacggaagaatataccctctgatctccaatcccaaggttcaggtatttcagatgctggctctgaaccatcctccacttggccctctccaactccaaagagggggggtcgtcttaaatctagtacccgagctgctgggtttgaatactttcttggctctagtggaaatggtactgatgtataccaaaaagatggggatgagtcttctactttgacagattctgaggaggaatctgatgattcatcagttaacaattattcaggtttctcacggaatggtagtgatctagggataaacagaagaataatggagttggaaactgagctccgtgaggtaaaagaaaagctatggatgcaggaagaggaacatgcagatggttcaactaggggatcaagaaatgagaatactgaagatctttataccaaaattaatgcatatgaacaagaactaatgactgtgaatgagaagttaagactttcagaagaagaaattactaaacagaagattgagcttcaaaaatacagactcttcaatacagaaaatttggaggctggttttgagtcatcattaacgaaaaaacacatcaatgaaggaggggaagcacacaagatgatagaggttgagggaagcattgatggtgtggataaggaattgtttgaccaaaatggtgagatcgagacgcttgcgagggagctaagaattaccaaagaaaatctcaaagcttcggaaatgcaaattacttcactgaaatttgaggccaataaatcatctgaaagaattcagcaattacatgatcagcttgagttggctcgtaaagacatttctacttggaaaaccaaattcaatagtgagaaaagagagagcaccaaactccatgaaagacttgcgaggttaaggactagtctatcagatcgtgaccatgagatcagggatttgaaaacagaagtatctgatgccgagcagaaaatcttcccagagaaagctcagttgaaatctgaaatgtcaaaggtgctggaggaacggactcatttagaggaacagatcagagaatgggaaagtcgaggccgttgttttgaagacgatatcagaaggatccagtctgaaaaaatggagatggaggaggcactcaagggtgagattcagctgttaaaggcaggaattgagcagagagagaacaacataaaagaactcaacacaagcattgatactttaaaactagagaaagataatctccacgtagaagttggttcactcaaggaagaggtgaactccagagatggtaggattgaacacctgaacagccatttgaacgagcttcacgtggaacatgtacaactgattgctggaatggaggaggcacacaaacatgtggaagaactaaaatcaaaagccaagcaacttgaggaagaggtcgagaggcaaagaaccgtgatcttagaaggagcagaagagaaacgcgaggccataaggcagctatgtttctcactcgagcactatagagatggctataatatgcttcggcagcatgttatggggcacagacgagttccagttttggctgcctagttaataaatttgaaacgtgatcttgtatattgttttggtgctatcttcatttctgtcttgggatgttttatggttctagtgtatgagtcaaggtcatgtgtactactacggagaagtgatgaccatgtttgcatggtgtaagttatactctggcttgttagctatacgcctaataccacaatatgctgctgatgccattgctaagataacccttccttaagggctcaagagagattgaaaaatttgcttagtttgatctaatattgtataaccgactcgtctggtctgatgtcaatgattgtgcaacttctttttttaagttattgcaacttggatttcccttacagt

SEQ ID NO: 30094 - DNA, 914 bp, Glycine max; identical to SEQ ID NO: 30086
  Clone ID: UC-GMROPIC107C12_FLI

SEQ ID NO: 30095 - DNA, 2965 bp, Glycine max
  Clone ID: UC-GMROPIC107E04_FLI
caatggcggaacctctctcaaacaccgaactctcttcttccaaaaccctggacccaaccaacggtcacgattccacttcggaaccgcatcaaacggctccggaagacgctcagctcaatcgagaagacgacgttgttccaaccgcgaaacggaagagggacgacgacgtcgaagaccgttcgctgcatccgctgtggaagaccagcctatgctcttacttccggagccacaacggatcgtgcagccacggcggcgcttgccgatacgcgcacggcgaggaggagctccgcccccgccccgacaacacgtgggacccgacctccgagcgcgcgaagaaagcgctgaagaccgagtcggacgaaaagcgcgccgtctcggaggaagtgatgatgacggaggccgtcgtggacgacggtgatgacggttgtggcgcgaatcacgcgcttaacatatgcttggtgcatttgccgcggaaatggagctccgagaatttgaggacttttctcggcgaacagggcataccttttaagcatgctaagaaaaagaaaggcatgatgattggttttgttacttttgaagatgaagaacagttgaagagttcaacaatggaattagaaggaaaatcaattggcaacaaaacggtaaaggttgctaatgttcttcctcggtcattcgaaaagaaaagtaatgccattgttgcatcccgtcaagaattagatgaggaaaatgcaggggttgatgttgcttcaagtgggactttggatggtgaaacaaataatgataacttggcaaagacaagaaatgtgcgtgatgcagtgactcctctagctcacatggcctatgccgatcagttggagcagaaaacaagctccctcatgcagattctcaaaaaacttactagaaatgctcgtaaagcttgtccaaatggtgtttctcttcctgaatggattctcaagtctagggaaataggtggtcttccgtgcaaactagagggtattattgcatcccctattgtaaatggataccgtaacaagtgtgagttttctgttggatattctctggaaggcaaagtgacagtaggtttcatgcttggaaacttcagggaaggtgtaacagcagttgaggaagcagtggactgcccaaacgtttcaacagttgcttgcaaatatgctacaatctttcaggaatttctacaggacagtgatttaccagtttggaacagatttaaaaatactggtttttggcgtcaattgacggttcgagaagggagaacaaatgggaatgttgttgatgctgaaacgtttagtggtgttgcagaggtcatgcttattgtgcagggagacaagacccctgattacttgaagcttatgatttgtatacctctttttttttaaagcgtcactcagaactctttgcctttggtgttgattataggtttctactgcaagctttgatgatgcaaaagtagctgctgagttcaagaggcttgctcaggcatttgttgccggagctacttcgcattgcccaatattaccccttacagctctggttgttcaggatcaccaaggaatatccaatgtggcaccagctgatgcaccactgcattcacttcccattcctaaagcagctggtgatcctgaggtggatgaaaataataatgccaaggatgtaagaatccatgatcatatcaacaatctccagttttctatatctccaacagcattttttcaggttaacactcttgctgctgagaagttgtactcacttgctggagattggtcatgcttaggtcctgacacactgctatttgatatatgctgtgggacaggaacaattggcctgacattagcacatcgagttggtgattggaattgaaatgaatgcttctgctgtatctgatgcgcataggaatgctgagattaatggcataaaaaacgttaaatttatatgttcgaaggcagaggacgtgatgggatctctgttaagggaatacctgaatgtgactagggaacaagttgatgatcctaatatctctggaagcggcaatgacattcctaaggatagtgcctgcccagaacctgaaaattgtgaaatagcatctcgttgtccagaaaataacattgccgaagttggaagtgaggttcagaagggttgcacttgtgaacaagctgatgggatctctgaacaggctgaggacgtgatgggatctctgttaaggggtgatgctaatgtggccaaggaacaaagtgatgatccaaatgtctctggaagtagcaatgacattcctgtggatgatacctgcccagagcctgaaaatggtgaaattacatctcactcagaaaataacaatgcagaagttggaggtgaggttcagaagggtatcagttctgaaaatgggaagacttcactgcaacagttcaaaaatgttgttgctattgttgatcctccacgtgctggacttcatccaactgtgatcaaagctttgagaactcatccaggcctgcggaggcttgtttacatatcctgtaatcctgaaactttggtggcaaatgctattgagctttgtacgccatcccccgtaaaaattgagaaaggaaataaagacaacagaggatggagaaacatgagcagtgctggtttagcacggcacagggccaagtctatgcccatctcagaggcattccatcccgtaaaggctatggctgttgatctttttccacatactccacactgtgaattggttatgcttcttgagaggtaggtcataggtggaccaaacaccaaagtctgggttaggtttattttatgtgctaggctctcaaatttcatttgtccaacattttttggcggcactgtaagtggtggtggatgttagtgcttattatattctgatcttacgcgcggtgaattatgttcaagcatgaccttcgatattcagttgtagcattattttcctttttgatgc

SEQ ID NO: 30096 - DNA, 1764 bp, Glycine max
  Clone ID: UC-GMROPIC107F03_FLI
taattgaagatgttcttgtgcatcttccaaatcccgtttcccccccaccccgtccccccaaaagaatgatgttattttgaatgacatgtcttatattttcaggttttgattgccaaaatagaggaatatgcaccaatagtgtatactccaacagtgggtcttgtatgtcagaactatagtggactgtttagaagaccaagaggaatgtacttcagtgctgaggatcgtggagaaatgatgtctatggtgtataactggccagctgagcaggttgatatgattgtagttactgatgggagcagaatcttgggacttggagatcttggagttcaaggaattggcattgccattgggaagcttgatctatatgttgctgctgctgggataaatcctcaaagggtacttccggtgatgattgatgttggtactaataatgagaagttactcgaagatcccttatatttgggattgcagcagcatcgtcttgatggggatgattatcttgctgtagttgatgaatttatggaggctgtctttactcgctggccaaatgtgattgtgcagtttgaagatttccaaagcaaatgggcatttaagttattacagcggtatagaaatacctacagaatgttcaatgacgatgtgcagggaacagctggagttgcaattgctggacttctaggtgctgtacgggcgcaaggaagacaatgattgacttcccaaagcagaagattgttgttgctggtgctggaagcgagaaaaacaatggcaaggatgttgggtaataatgaagtagcttttgagagcgcaaagagtcagttttgggttgttgatgcacagggattaatcacagaaggacgtgaaaatattgatccagatgcccttccttttgcaagaaatttgaaagaaatggatcgccaaggactgagggaaggagcaagcctcgtggaagtggtcaagcaagtgaagcctgacgttctcctaggattatcagctgttggaggattattctcaaaagaggtactagaggccctcaagggttcaacatcaaccagaccagccatatttgctatgtcaaatccaacaaagaatgctgaatgcaccgctgaagaagcattctccattttgggtgacaacattatttttgcaagtggaagtccattcagtaatgtggatcttggaaatggtcatattggccattgcaaccagggaaacaacatgtacctctttccaggcattggtctcggaactcttctttcaggcgctaggatcgtctctgatggcatgctgcaggctgcagctgagcgtctggctacatacatgagtgaagaggaggtactcaaaggaattattttcccttcaacatccagaattcgagatattacaaagcaggtagccacagctgttataaaagaagcagtggaggaggacctagctgaaggatatcatggaatggatgctcgggagctgcagaaacttagcgaggatgaaatcgcggaatatgtgcagaataacatgtggagtccagagtaccctacattagtttacaagaaagaatgagtaacctgcagggttgataactacaatttccctctcgatgcatgtttggttcgatcaggttgttcacagaatcctgtttactggattagatgatttaaattctgaaacattatctcatagcatatttctaaaagtctagaaaacttgtattttatgtacatgatgcttcttttaaataaaaatgaaaagccaagattagttttt

SEQ ID NO: 30097 - DNA, 1429 bp, Glycine max
  Clone ID: UC-GMROPIC107H01_FLI
gcttcaaccccaaatccaagtctttcatgagtgactcagtgggaagagccagtgcagaaacaacttcagagttctactttgccataatctcaaatgctgcaactgtcacaagccatgctgcttctaagttaatgggaaccacagataccacattagaaacttggtcaaatttcattaccttaagcccttataggccctttggcacttactatttctgcactggaaatggaaagtcagggaagaaaattgtgataacaaactcaaatgcagttctacaggtcctgtttttctctgctcaattaagcactgaagcagaagctgctcaagttccctataggagcttacgagatcatacaatttatggcaccgaactgcaacaaatggggcctcagaatgttgtgcacttggatcaacatcagctccagaatcttcctttgtctgaagatggtgctggtggctcaaatgcaaccattaacacggccttaaatgaccttggcctgattccaagagcaagactgtgcctccgggcagcagcagagtgggaggcaagaagaactgacaacgagaataagatcaaagagaagaaagattttgttgcgaaaaaattggacgttcttcgggaatacagaaaaatgtataaggataaaagggtgggtttttacgatggcttcagggagcataagcaaggtgaggatgacttcaaagcaaacgtgacgaggctagagctggcaggtgtgtgggacgagatgatggaaaaggtaagaagttatgaactcccagatgaatttgaaggcaacaaagattacattgaccttggaactgagcttcggaaacttatggaacctctggatattgccaattattaccgacatgggaggaattatgaggacagttcttcttcttacatgattaagggaagaccaaaacgatatagatatcctcaaagatggttggaacatgctgagagaaagtcacatgaatctctctcagcatcttgcttctgggccgaggtggaagaacttcactacaaaacaagtaggagtagtaacattgtctcattggatcaacaatttaaggaaaggattgagaaattagagattcaaataaaagcatggagtgacagaaaggaactagatgaggatgtcttcttggagggttctacgttggtgaagtggtggaaagcacttcctcaacaacacaagcaacattcatgcattaaaactcttattagagagtgacacgagacaaacatgcattgcaataagtccattcagcgagtgttaattggctgagtgagctttttttgtttctcttgtttactttgtttcttatgtagtttttcttggttccttctcgtgtgcggtttgtgattctatatatcgttttcctttaataaatgccacaaccaaggttgcggctatgtacaact

SEQ ID NO: 30098 - DNA, 1816 bp, Glycine max
  Clone ID: UC-GMROPIC108B04_FLI
cgatttgggtgggttcgaagtttgagtatagataggttctttgcttggagtgagtgcgagtcaatttttggtttcttgcgttagtcttggaagaaacaaacacaccagtcaaaaatcaaaatctcgagttcttggagggtttgagcgagctagttagtgtgagaaaataattgaaatgtctcagacgaagaaattgacgccgaatctggatcagcagagcacgaaggtgctgaatctcacggtgctccagcgaatcgatccgttcatcgaagagattctcttcaccgccgcacatgtctccttctacgacttcaacatcgaaagcaaccagtgggttcgttcttttctttctttctcttcgcttcttcccactttcttctctcatcttctgttttactcgttctagagtcgcaaggatgttgaaggatctctcttcgttgtcaagaggaattcacaaccacggtttcagttcatcgtcatgaatcgacggaatacagataacctagtggagaatctattggattttgagtatgaacttaaaaagccgtacctgttgtatcggaatgctgctcaagaagttaacggaatatggttttacaatccagatgaatgtgaagaagttgcaaatctctttaacaggatacttaatgcatacccaaagactgctccaactacagtactgcctgttaacataagtgagtctgaggaacttcagccagtgtcaattatgccggaaagccctctagagtcgtcttcagctactgcttctgcaattgatgctgttgaagatcctgcaaatacaaacttcttaagcacattgaaggttactggaaattatgcttccaatatggaaaattttagacagcattctgcaactgtcacttctgctcctagtggtttattctctactgcacctgctgtgcaaattccatctgcctctcattcaacttcatcgatatcaggcttccctcttgactctcttgaaacagccaagagtggcaatcaaatcattaatcttgttaagccttccacgttttttgcatcgacgtcttcatcttcactgttagttccacctatttcttcatctgtgcaacctagtgcagctgttcaacattccctgaatctgccacgccaatatggcactccagtacttcaacccttccctccccctaaccctcctctttctcttacccctatttcaagctccactccaaatagacctgtattcagcagggataatgtccgtgatgcacttttatcattggttcaggaggatcaattcattgacatgatgttccaggcattactgaaggtgagtcattcatgagtaatcaaacactgaaggttggatggaaactgcatataaagttagttctgtatattgtagttacacaccgtcacatctaacaggaggtgtaacctagtatagacatccgtccgtctttagctttagccacaactttgcacgatacatctgtaatggccaattccacaatatactaacaaatcatatggtgcattaatacactatgatcttcaccactgactttatgtgtgtatacgtgaactagttataagagaaaacaatggcaaaaagaatgatcttaatcactatgttgatataacgattgctccacgtttacgcacaaaaaactaatggtgaagcttctgtgtattcttacactgcaactctgttgtgtattgtagaaatagccgtctgtatcttcacaatgataaaagtgtttcgatgtcagtgtcgccttattaccctttgttgtctgtactttgtggttttaaatacaatcatggttctgtc

SEQ ID NO: 30099 - DNA, 737 bp, Glycine max
  Clone ID: UC-GMROPIC108E09_FLI
aaattatgcactttttgaaccaacaaagggaatttatgatccaatgtatcatctgcattatgataacatgcttgatgctcagattgatgcagcctatgccgctttggaggatgctggatttgacaaaatggaagtcatagttactgaaacgggctgggcctcaaatggagatcaaagtgaagctggagcaaatgcaactaatgcaaggacatataattataacctgcgtaaaaggcttgcaaagaggaaaggaacccctcatagacctaaaaatgttgtgaaggcatacatttttgcattattcaacgagaatgagaagcctgggcattcatctgagaagaactatggactgttcaaggctgatgggagtatatcatatgacattggctttcacggacttaatgctggacattcatctcttttgtctcttaagaatatcaatactcaagggttgtcccagtcatacatgatggtattctttttatcttctttgataccgctgattttctggagttagtgatccttatgatatcagcctgctcggcaaaccagttcctggcaatgaaatgagtttgacttggctccacttcatgtctcactatagatcaaattataccattgattgtcatatttcataaagcaatatctagaaatgttgatgtttcagcaaatgtgtaattatttcacttgagaaaggattttccttcgaagagtattagaatttttcagtttttact

SEQ ID NO: 30100 - DNA, 934 bp, Glycine max
  Clone ID: UC-GMROPIC108F07_FLI
aaaagaaaagaaactcacagctattgaatttcacttcacttcacttgcatgccaaatgaaaacaacctcttcccagaatcttgtcggtatttaactccctcgatttcacaacacccataacaatgagagtttcaacagagacagagccggagactaaaaagataaaacgcattcgcggcggcggggactcgagcaagcaccctttgtaccgcggcgtgcggatgcggaactgggggaagtgggtgtcggaaatccgcgagccgaggaagaaatcgcggatatggctaggcacattccccacgccggaaatggcggcgagagcgcacgacgtcgccgctctcagcatcaaaggccccgccgccattctcaacttccctcacttggccaactcgctcccccgcccggcttcgctggcgccgcgcgacgttcaagccgcggcggcgaaggcggcgcacatggacccttcctccctctcctccttggtctccgcaatggacttgtcctctgcctctgacgagttgagccaaatcatagagcttccttctttggaaagcaccgatgatggctctgttgacttaaagaaggagtttgtttttgttgattcccttgatgcttggatgtatcagccaccctttggttttgacaccgaacaagacactggtttcgagggtttgatgtggaattactaggttcgatccaagtttctattctatgtcttgtgtttgtataaatttatatcgatctcttttatgttttggtttgtgtgtgtctataagcagtaagcagccacttgtggtttttctttcgggggctgccagtgctactgatcactctcgtattcatcatcatgtctctgtgtctttttcttaattcctctgattttaattgtaaatggctagatgaataaagtaagaggagaaattttctgtaactt

SEQ ID NO: 30101 - DNA, 2089 bp, Glycine max
  Clone ID: UC-GMROPIC109C08_FLI
gtttgcgacactattaattaaacaaatactaccaccacacattcctttcttcttcttcatcatcttctcacctctctctctctctctctccctccctcctagggtttcacgtttccatgtgaaaatggattgagaatctctctctcattctctctctattttatattttctttcacgtcaattagggtttttttgctggcgtgattctgaaggcttggatctggatatcttctttgcttctttgctatggaagactcggattcagttgctacactgatagattctactacttctaagatacaacagctgcagaaggcatttgctgaacttgaaagttatcgggctgttactcttaacttgaaatggaaagaactagaggaacatttccatggtcttgagaaatccttgaagaggcgctttgatgaattggaagaccaagagaaagagtttgaaaacaaaacgaggaaggctcgtgagatactggagaagcgggaagcagctgtttttgctaaggagcaagattcgttgcagaggcttcaagagaaaagagatgctgcttcatttgccattgtaaatgctcgagaaaagcagaggaagatttcatcacgtgaattggctactttctctaatggtggtaaaggagggatgccaggagtggaggagaaaccagtggatactttgtccactgcagctgaaggtaatgtggaagatgtaaaacttcctgataatggaaatgtggagttggtatcttatccagagttggtaaaactatgcaaagagatggatgctgctggacttcacaaattcatatctgataaccgtaagaaccttgctgctgtaagggatgaaataccaaatgctttaagagctgctcctaatgctgcctgtttagttttagattctctggaaggattttactgtacagaagtgtcaaatcaggacgtaaagaaggatgctaacttattgggtcttcgccgaacctgtatcatgctgatggaatgtctctgtgatttcctgagcagctcaggttttgtttctaatgtgatttcagaagatatcaaggacagggcaaaagcagttgctgaagaatggaaacccaggctggatgctcttgacatggatgctagcaatgggaattccttggaggctcatgcatttttacaacttcttgctagttttggaattgcctctggttttgatgaggaggagttatctagattgattccaatggtgtctcggcgccgccaaactgctgatttatgtcgttttcttgggctgtcagaaaagatgcctggtgtaattgaggttttggtgaacagtgggcgacaaattgatgctgttaacttggcttttgcatttgatcttactgaacagttttgtcctgtttctttactgaagtcttacttgaaagatgctagaaaagcttcttctcctgttagaagtgctcactcttctcccactgcacagattgaggtgaatgaacgagagctggttgcacttaaggctgtaatcaagtgcattgaagaacataaacttgatgagcagtatcctctggatcctctccagaaacgattggtgcagctagagaaggccaaagcagacaagaagagggaaactgaagcaacaaagcctcaacccaagagacctcgtgcaaatggtgtgggatacggtccacgtgtcactaacattctttcggataaaacttgctatgctagagttgctgacaggtatccacaatacgtgtatgaccgaccaccttacatgtaccctgcacccactgagaatcattgcccccctctcatgaccactgcaacatataacatctctcccagccatggcaactactttggaaatgggtatcagtaccaagcctcatatctccactagagttagctgatatgtgaaaacaggcaactatgatccttttgtttaatatctagtctttaacctttaagctgttgtatgttgcacttcctcaatgtagtcttaagaacctctgaaaagaggtaaaatgacgagctaaaatttaacttttgtagcacaagatattctgatcctctaatgtatgaactctgttctcgttttgtac

SEQ ID NO: 30102 - DNA, 732 bp, Glycine max
  Clone ID: UC-GMROPIC109G12_FLI
agaggggaacctctatccacaaacaggcaatatgatagagattcatttggtgaggatccagaaagtgaatcatcaaacgaagatcctagcggggcatctctagttactgagttgacttctcaaatggcaaggtcccagttcttgcaagaactaagcacaaagccacctggccttactcaagaggccttggactgtttgcatcaggaagtttttagcagcaatgccagtgagatagggttggattccagggtactgcaggactgcagtatatgtttggagtctttcacagacggagatgagctgatacgtttgccatgtggacataagtttcactctgtttgcttggatccttggattcgctgctgtggagactgtccatactgtcgaagatgtatagttgtaaatactcactcatcattaaacgaggacgagtaattgatttcttgattgactttgttttgttctgtggttgtatgacaggataagaatgctgtaatggagctggttttttgtaacgatgctgaatacttgtctcttaccttgatatcgtattttttttttatcttttcctggtgacaatgggaaagatgtgggtagctaaatttggtattgtaagacgtgttataaaataataacagtcacgtgaatagtaaatagtatttttaatatttgtattcttatcgggaaaatacctattcatttttatcaagattcatgtattacattttagtt

SEQ ID NO: 30103 - DNA, 2369 bp, Glycine max
  Clone ID: UC-GMROPIC109H11_FLI
ctttctttctatcaacgaaaaacaacaatggaatatttgcaggacgctgggatccgcgtttctcgatcacacagaacaattcaattcatcagcgtgtctccacattttcgcgcgtgaaacctcatcgccattttccctcttcttcttcttcttcactgattggattaattgcacgtaaaggaggtttaaagcttcgcagcacgtgttgttgttgttgttcgtataattgttgttgttgtggcggcagtggtagtatttggaaattgaggattgagtggggtgtgtgaaaaatggctgccaggagtgatcaccaaacggttcctctttcggtgctcctgaggcgcgaattggcgaacgagaaaattgagaagcctgagattgctcatggtcaagcgtgccagagcaagaaaggcgaggatttgacgctgctcaagacggaatgccagagggtggtgggcgatggggtctctacatactcagtttttgggctatttgatggacacaatggatctgctgctgctatttattctaaggagaatcttctaaataatgttttaagcgcgattcctccagatcttaacagagatgagtggatagcagccttgcccagggctttggttgctggttttgtaaaaactgataaagattttcaagagaaaggccaaaaatctggaacaactgtcacctttgtcattatagaaggatgggttgtaacagttgcatcagttggtgattcccgttgcgtccttgaatcttctgatggtgagctttattacttgtctgcagatcacaggctagaaacgaatgaagaagagagggtgcggatcacctctagcggtggtgaagttggtcggctaaatacagggggaggtgcagaggttggtcctttgagatgttggcctggtggtttgtgtctctcacgatctattggagatatggatattggtgaatttattgtacctgtcccgtatgtaaagcaagtgaagatgtccactgctggaggccggcttgttatctgcagtgatggtgtttgggattctctacctgcagaagtagcccttgattgttgtcgtggaatgccagccgatgctgctgcaccacatattgttaaagaagctgtacaagcaaagggacttagagatgatacaacctgcattgtagttgatatattacctcaggagaaaccacctgtttctgcgccacaaacaaagaggccagtaaagggaatgctcaagtccatgtttcgtaaaaaatcttctgaatcatcttcttatattgacaaagagtacatggagccagatgtagtagaagaattgtacgaggaaggatctgccatgctttcagagaggttagatactaaatatccagtctgcaacatgttcaagttgtttatgtgtgcagtatgtcaagtagagataaaacctggagagggtatttcaatacacgagggtgcacccgactctcgaaaatttcgtccctgggacggacctttcctgtgctcaagttgccaagagaagaaagaagccatggaagggaaaagatcatcaggtagaattagcagtggaagtgatgaatgaactctcgtgtaaatttgcattttgagagtgataaaaattgttcatatgatgggaaagtcaaacaattcaatcaacaaagactcccttctaattttcactggggctttatggatataattttgaattccacatgaaaagacatatgaaaagtaaaccaatagcagcctgttagaagatttctgacttggaagtatgaaatagcaacaagtattgtgaagggttgtgttaaatgtggaagtacacaacaagatatcagaggtaatgcattctttttatatactttttttttgtgggatccgttcatttgtatacgggtcatttggaatcactatagacctttaatgaaagtggtctttgttattgtaatgtaatatagggagtttaattagaattcatagaatcaattctactgtaggttagatgtgtgttaagccttctgaatgattttttcctctaacattcgattttgacaattccttttgccatacgagcattaggtcttttgtaaaagatgttaggtggaattatcccccgcaccccgtctcaaaagtctcacagaaaaaagaggggaaaaaaatacatagtagtttattacacatttacatcccacctaactttgctgtttttccgtatgttatttgtaaattacaccccacccttgaaaattgctgaaccgtttcacccaatatgcatgctgtaatgtctttgtttttattactgtatttttttttacaactattccttcttggagaattggaccagaattcaagaataaaaaataagatgttatcc

SEQ ID NO: 30104 - DNA, 1406 bp, Glycine max
  Clone ID: UC-GMROPIC109H12_FLI
ctgtggaaagacattcatagatgctggtgcgttgaggaaacattcccacatccatcgtagtgacaaacatattgcctctctccatggatgtgagaatggcaatatgtttgtcactacgatggatgtggaaagaaatttctggatagctcaaagttgaaaagacattttctcattcatacaggggagagggattttgtgtgtcctcatgaaggctgtggtaaggccttctccctggatttcaacttaaggtctcacatgaaaacacattctcaagagaactatcatatctgcccatatccagattgtggaaagagatatgctcatgaatacaagctaaagaatcacattgcatctcatcatgaaaaggttgggtagtgtttcctatttgtgtagctggtacactttccttatttttttaccactcagtctattaattaatgatgcatgttatcatgtaaagcatctctgttcttttaatccatccatttggtgtttctgcaatagtttcatttggtttgttagtatatctcagtacaaatatgtattatttttctcatgtatattgtgaatttctttataaagatgtctctaattcgaaactgatgaattactccagtggatgtgattcacaaatttttgaaactgttaacatttcttgaataaccgtttgatttggaatttcaaccttatctagcagaatgcacccttggatgtggcaaagtacactactccacctccagagaagcaaacaaaaacttctaaaccatctggaggggcatacggttctgcatcatctgaccgtccctatgcatgtccctatgatgggtgtgaaaaggcatacatccatgaatacaagcttagactccatttgaagagggagcacccggggcttatggctgatgaaaatgcagagcatgctcaggctaatgttggcaatgaaatggatgaagcaagtgaccatgatgcctatgttgcgaaacggtcaaatggtaaaattcagaagcagagtaagccaaaaccaaacctcaagttgcctccttccaaaattgcaaaacgcaaagtctccactcccactttaactgtaaataaaaattcttggcccgtgaaagatgaacctttcgatgaagaagatagtgaagaaacagaagaggatcgtgacaatgttgaagatggttggagatatgcaggaggaaacaatgaagatgatgatgaagaaacagaatatgaagactgaatcagttatggcatcctctatggaacttacctttttcaagaagtatatttctcttctacaattgttttttgggttgtcgcttttttatttggctttggaaatgacatcttgtcaaactgtgtgttggctgttacaagcattaggaagaatttatataaataaaatgcgattt

SEQ ID NO: 30105 - DNA, 947 bp, Glycine max
  Clone ID: UC-GMROPIC110B02_FLI
caaattcggggctttcatcaattacacgcttcattcgcttcattccacccttcacctgaaaaaaaaaaaaaaaacaaacaaacaaacaaaaaggagtgcaaaccatgggcgatgcaattgatttgtccggcgacggaggagtcattaagaccattgtcagaaaaagcaaagccgatgctgttggtccaacagaaaattttcctcttgttgatgttcattatgaaggcacacttgctgatactggtgaagtttttgacactacacatgaagataacaccatcttctctttcgagattggaaagggcagtgttatcaaggcttgggaaattgctgtgaaaaccatgaaggttggagaagttgcaaaaataacttgcaagccagaatatgcatatggcagtgcaggatctcctccagatattcctccagacgcacaacttgtttttgaagttgagcttgttgcttgtcggccaaggaagggctccagtttgggaagtgtttcagaggagagggctaggcttgatgagctgaagaagcagagagagctagctgctgctgccaaagaggaagagaagaagaagagagaagaagcaaaagcagtggctgccgcacgtgtgcaagccaagttagaagccaaaaaaggtcaaggaaagggtaaaggtaaagcaaagtaggaagttagcaaacatctatatgagtttggtatatgatgacaatcaaatagttatgtgttatacactattcagtatctcactacttcccctttggcccatccaaaaccttatataaatgaaatgctgctttggctagatgcttttgtctaattatatggacaccatatttcgtcccttctgaatgtagctagctgatatatacaagcaattctgtaataataagcgttggatacgtaataaagttgatgggaatgatgagttccctatgtcaatttc

SEQ ID NO: 30106 - DNA, 642 bp, Glycine max
  Clone ID: UC-GMROPIC110D02_FLI
ctcaaattcttctggaatgaatcatcaaatgcttcatcaacttatgggagttgatcctggaacaaccctgtttgccatttccttggaagcaaggccattttatgggtacccaatttatctgtggacactgactataaaaccaacgtctgttgctcaagtatgcatggttatgatttttgggtcattggtcatggtttcggccagtggacagatgccagcaggaaaacatataatctagtggatgccctgactagacacactacacaggtgtatccaaaatcctggactactatattggtgtctttggataaccaaggcatgtggaacttgaggtctgcaatatgtcccacagaccaacattgttgcttaattagtccatgcatcttgagcaccatgagaatgagattgtgtataaaataaattatcatgtgctgtgtgttgtgcaagtactaccttctctagctagattgctagagctagaatttcaacctacctatgtgtactgataagatctgcttccctacttaaagagagcatcatcctgtgatcagtgtgcttcgtattctctctctctatatatatatggtaaaaagtggttatctcgtgcctcgccttgagctatccatcacttttttttttatc

SEQ ID NO: 30107 - DNA, 1067 bp, Glycine max
  Clone ID: UC-GMROPIC110D12_FLI
tcggaggatgggaattcatgggcatcctttggagattcaggcactgttttattctgccttactttgtgcacgtgagatgcttactccagaggatggatcagctgatcttatacgggcactgaacaaccgtctggtagctctttcatttcatattagagaatactattggattgatatgaaaaaattaaatgagatttaccgttacaagacagaggagtactcatatgatgcagttaataagttcaacatatacccagaccagatttctccttggttagtggaatggatgccaaacaaaggaggctatttaattggcaacctacaaccagctcacatggatttccgatttttttcactgggaaacttgtggtctgtcgtaaacagtttggccactgaggaacaatcacatgccattttggatcttattgaggccaaatggtcagatttggtggcagagatgccattcaagatttgttatcctgctcttgatggtcaggagtggcagataatcacaggcagtgatcctaagaacacgccttggtcctaccataatgcaggctcctggccaacactgctctggcagctcaccgttgcatgcataaagatgaagagaacacatattgctgcaaaagctgttgagattgccgagagacgcatattaagagacaggtggccagaatattatgacacaaagagatctcgattcgtcggaaagcaatctcgactatatcagacttggtcaatcgcaggataccttgtggcgaagctgctgcttgcagacccaagtaaagcaaacacattgatcactgaagaggattctgagcttgtgaatgccttgataagtgccaaccctagaggaaagcgagggcgcaaaaatttgaggcagacttacattgtatgagtcttcatttgcaattcatttggttccttttggtcaaattcatttttcttcttattattagcagcatgttattctagctagatacgacagggatatgcaaaaatatatagtagtttgggttgattgtgatgaaacaaatactagtatatatataaatgtaattgtg

SEQ ID NO: 30108 - DNA, 1545 bp, Glycine max
  Clone ID: UC-GMROPIC110E02_FLI
agaagaatgaaatctatctatcttcttatccgaagcccgggaggccaataagaagcacgtcagctgctatgaatggtgaataaaacacaaaagaaacaaattgctacatagcacacactccctcttctcttctacggttatggcgtccacgttgggcacttcttcaattgcggttcttccttcgcgctgcatctcttctttttcttccaagccttccattcacacactctctctaacttcagggcagagctatgggcggaaattttatggaggaattggaattcatggcatcaagggaaggtctcagctctcagttgccaatgttgccactgaagttaactctgtagaacaggcccaaagtattgcttctaaagaaagccagaggccagtatacccattttctgccatagttggacaagatgagatgaagctttgtcttctccttaatgtgattgatcctaagattggaggtgtaatgatcatgggggataggggcacagggaaatctacaaccgtcaggtcattggttgatttacttcctgaaatcaaggttgttgctggtgacccttataactcagacccacaagatccagaattcatgggtgttgaagtcagagagcgtgtacttcaaggagaggaactttctgttgtcttgaccaaaattaacatggttgatttgccattgggagctacagaagatagagtgtgtggaacaattgacattgagaaagccctgactgagggtgtcaaggcatttgagcctggactactggctaaagctaataggggaatcctatatgttgatgaagttaatcttttggatgatcacttggtagatgtgttgttggattctgctgcatcaggatggaacacagtggagagagagggaatttctatctcacaccctgcacggtttatcctaattggctcgggaaaccctgaagaaggtgagctccggccacagctgctggataggtttggaatgcatgctcaagtgggaactgttagggatgctgagcttagagtgaagattgtggaggagagaggtcgatttgacaaaaatccaaaggaattccgagattcttacaaagccgagcaagagaagctccaacaacaaattacatcagcaaggagtgttctttcttctgttcagattgatcaagatctcaaggtgaaaatctccaaggtgtgtgctgagttgaatgtggatggattaagaggagacatagtaacaaatagagctgcaaaagctcttgctgctctgaaggaaagagacaaagtaagtgcagaggatattgctactgtcatccctaactgcttgagacaccgtcttagaaaggatcccttggagtctatagactcaggtttacttgtcactgagaaattttatgaggtatttagctgaggatcttagatataacacggtttgtatgctgtggtattccatgagtataatgctacttcattatttacattttaccttttctgtggggattttcattgtacttaaacattagtaagattcatgagttccttctacgcagg

SEQ ID NO: 30109 - DNA, 1801 bp, Glycine max
  Clone ID: UC-GMROPIC111B04_FLI
ccattttctctgctacacttgtgcaccttgaccctctctccagcaaccatgaacgcctccatcattgatccgttgcagggcgatttccctgaagtgatagaggagtatttggaatatggttgtatgaaatgcattgccttcaatcgccgtggcacccttcttgctgctggatgcaacaatggaagttgtgttatttgggattttgaaaccagaggcattgctaagattctgcgtgatgatgaatgttcttctcccataactagcatttgctggtcaaagtatggtcatcaaattcttgtatctgctgctgataaatcattgatattgtgggatgttatgagtagtaagaagataacacggatagttttgcaacaaacccccctacaagctcgtcttcatccaggatcctcgaccccatctctttgcttagcatgtcctctttcatgtgctccaatgattgttgatctgaacacaggaaacacaactttacttaaagtttctgtcttagagacatgcaatggaccaacaccaacccctccttcacgtaataaatgttctgatggaattacctccttcacaccaactgctgcttgttttaataagtatgggactctggtttatgtgggaaactcaaaaggggaaattcttgccattgattacaaaaatggtgacgtgcgtgctgtagttccaatctctggtggttctgttgtaaagaacattgtgttcagcaggaatgggcagtatctgctcacaaattcaaatgatcgaataattcgaatctatgaaaaccgtctacccctgaaagatgaagtcagagcccttgatgacctgagtgagaaccacaatgttctaaataatatcgagaatttgaaggctgttggatcaaaatgtttaactttattccgggaatttcaagattccatcacgaaggtacactggaaagcaccttgtttcagtggtgatggtgagtgggtagtcggtggttctgctagcaaaggtgagcacaagatttacatatgggatagagctggacatcttgtgaaaatccttgaagggcctaaggaagctctgatagatttagcatggcatcctgtgcatcctattgttgtatctgtttcgctgaatggtttggtttatatatgggcaaaagattatactgagaactggagtgcatttgctcctgatttcaaggagcttgaggaaaatgaggagtatgtagagcgtgaagatgaatttgatctgattcctgagactgagaaggtgaaaggacctgatgttaatgaagatgaggaagttgacattataacagtggagaaagatgctgctttcagtgattctgatatgtctcaagaagagctatgttacttgccatcaacccctagtcgtgatgttcctgagcagcaagagaagtgtgtagaaagttcttctaagttgttggacagcaataacactggatcccctctttcggaagaagctggaccaaatggacatatgatgaatcatgcatctagtcctcttgaagatgatgctgggcgcatgaaaagaaagcggaaaccttcagagaaggtgttggaattacaagcagaaaaagttaagaaaccctcaaaatctagcaaattggcaaaacctaagagcaaatctttggccgatcaagataatggtaacggttttcatggtgatggactttatgatgaataattgtagattatgaaattcttgtttacaaaagcacagttttatcttcattttttgtctttattagtttttcttttctaaaaaaacttacctttatggctttatt

SEQ ID NO: 30110 - DNA, 1174 bp, Glycine max
  Clone ID: UC-GMROPIC111D07_FLI
gcttctccaaagagaaagaacaccaagcaaagcatagtaacctaattcactttacacctaccaccctccttctaactcaattccatttttcttccttattcctctctcaaaccataatatgcagactctttcgccgcctacttccaacgctctcaatttgaagcacgttcttcgcccgcgtcgagtcgcgcctagccgaatctttgtcaaatgcgccttcgcgtctgagcccgccagctacggggtcggctcgagccgagccgattggcagagctcctgcgccatcttagccagcaaggtcgtttctcaagaacaaacctcctccgctgaccagaacggcggcaccgccgaccatatcgccgccgtcaacggccacaaagccgccgtcagcgacctccaactcgttccaattggaaatctagcacaggccaacaacaagccgctcccgccgaagccgctcacaatctccgacctctcgccggcgccgatgcacggctccaagctccgcgtcgcgtaccaaggcgttcccggcgcgtactccgaggcagccgccggcaaggcctatccgaactgcgaggccattccctgcgaccagttcgaggttgcgttccaggcggtggagctctggatcgccgatcgagcggttatgccggtcgaaaactccctcggcggctcgatccaccggaactacgacctcctcctccgccaccgcctccacatcgtcggcgaggtccagctcccggtccaccactgcctcctcgcgctccccggcgtccgaaaggagttcctcacgcgagtgatttcgcatccgcaggcactcgcgcagtgcgagcacactctcaccaaactcggcctgaacgtggcgcgcgaggccgtggacgacaccgccggcgccgccgagttcgtcgccacgaataacctccgcgacaccgccgccatcgcgagcgcacgagcggcggagctctacggccctgaacgtgatggcggacggaatccaagacgatccgagcaacgtcacgcggttcgtgatgctggcgagagagcctatcattccgcgcacggaccgtcctttcaagacgagcattgttttcgcacacgacaagggaacttcggtgctcttcaaagtgctttccgcgttcgcgttccgtaacatcagtctaacgaagatcgagtc

SEQ ID NO: 30111 - DNA, 1291 bp, Glycine max
  Clone ID: UC-GMROPIC111D08_FLI
ctacattatcctaaacccgcatcctttagcaggtgagtattcattagcttcaatatactctgagaatggttgtcaatgaatactcacctactacattatcctaaacccgcatcctttagcaggaacgagtgcgttcataatcctgtactgttctttgccatattgtccaatcagagatccggtagtgggtggtttgagacccttttgaatagccacattaatgtaagctccaatggggagatattttctgttagagagagaaggcaaaatgtttcttcaattttgcatactttagataaagtttacaatttggactggttcaatagtgcttccaagaatgagtgctctgctgcaactggcttgaagtggatgcttaatcagggattgatggagcaccataaggaaatagcagagtatttcaatcgtagacgtgtttctattatatttcttttccggagaaacttgctacgcaggatggtatcaatgctagccaattcatatgaccgttatgccaagctattgaatggaacacacaaggctcatgtacactctgcagaagaggctgagattctttcaaagtacaagcctatcataaattctacatcattgctggatgacttacaggatatggagatgagatctgctaaggctttagaatacttctacagcactaggcatatgattgtgtactatggggatcttatgagaaatcacacaaagctaaaagatgtgcaagattttttaggattgccacagatggagttaacgagccgtcacgttaagatacatagaggaccgttgtcagaccacattcagaactgggacgatgttaacaagacgctgaaaggaaccatttatgagagttttcttgaagctgactattagtcgtagtctcttctattctaactgctggagaaaggtgtaaataccataccaacttttctgatcttttgtccccccaggaaagcctcagggttcaaaagttttggttttggttctggaacattacctcagtgttctgatgcctttttttttgtcaccacttcgtgatcaactaacaccgttgatgaattgaatgcttcttgtttctttgtagtctttattttgtttatttttttttcctttccttggtgaacatgtatattcctttgccgctaattgattgaagtagagaggagcattgttttgttcaaaccggtgtttaataatttccttggtgaacatgtatattcctttgtcaccatttcgtgatcaactattaattgttttaggaatttagcttttcttagtc

SEQ ID NO: 30112 - DNA, 1543 bp, Glycine max
  Clone ID: UC-GMROPIC111F11_FLI
gattctctctccctctctccctcttattcccaaaccaagcccctatttgtgttcatttcgcgtcacattagaataagaaacgcaatatggaagacagtatcctatgcaaacacacagtgcatcacaccgttaccaagaaactcatctcccccaaaaaatcatcccaaaccaattcgacgacagagcgcagaatagtgcggatttcatacactgatccagacgcaaccgactcctccagcgacgaggaaggtttccccttcgttcgccaaagaatgaagcgctatgttaaccagattgaaatagaaaccgccgccgccgaaaaagttgttcggaaaaggcccgccggtgaggcttgccgccggccggcgaagcttcactccgggaagaagttccgcggcgtccggcagcgaccgtgggggaaatgggcggcggagattcgggatccggcgagaagagtgcgtctctggttgggaacctacgacaccgccgaagaagctgctatggtttacgacaatgccgctattcgtcttcgtggccctgacgcgttaacaaacttcgtaacgccgcctcaaagagattctccgtctccgtctccaccgccggcggcggcggagactccggcggaggtttgcgagatgaaggttgtggtcaccgaagaagcctccggctccggctacgactccagcgaggatcattgccaccacaacctctcctctccgacttcggttctccagttccgaagcaactcgagcgaagaaaattccgagtctcagcagaaagcagaacaagtgttgagagaatgcgagggtgagacagaaacgagtttgttcgaggaaacgggtgagtttttggcgctggataacatgcctttgcctgcctgggatgacgtgttcaatttcgaaacgccagagtaccctcctcttctgtttcaagaggaggagaatctgaatctacttcatcagtcccagatgttgggcgaaacggtgcagttttcctcggaggaagggttcagtgatgaaagcagtatcatgctggccgactcgctcatagatttcgacagagcctgcccttcaccatcctccttgtgccaagtggacgatttcttccaagacattttgtttgcttctgatcctctcgttctgctctgaacactcttaaaacttactaaactgtcattcgttaatcgtcaatcgtccacttcacggcttgcccaatattcatggcagatttttgcttccggtggtaaaaaaaaaatgcctagtttctatttaattaaaatactatatatatatatatatatatatatatatatatatatatatatatatagttttatttgcgtatttatttagatgttttagatgctccgttacaaatagctaacggggggatgagttgagaacttgtgagcgaagttttgtttaaattttagttatatttgtaatctttttgcttaataagtaggatcgtacgttgagacttgagaatgtaatgtatatttgtccagatgttaatctaagtgtaatggcgttcttttctttac

SEQ ID NO: 30113 - DNA, 1875 bp, Glycine max
  Clone ID: UC-GMROPIC111G03_FLI
ttcaacttcaatcctgtcttgtctctttctcttttcttgttttgcttacctgcaaccggcttaagctgtgatcaccaattttcaacatgacaaagataagtcctgaagttgaaatcaggatgccaatggaggcatttccgccagtttcagctgatgtgagctttatttctaatagttttccgaagtacaaactggatgctgataatcaagttctggaagagccagttgaggataaccagggtccttctttgaaggacgttattgaacaagaagcttccaatttgtcagaccaacacaagcgtatctcagttcgtgaccttgccagtaaatttgacaagaacctggctgcagctgctaagttgtctaatgaggcaaagctaagagacgtggcatctttggagggacatgttcttttgaaaaagctaagagatgccttagaatctttaagaggccgttttgcaggaagaaacaaagaggatgtggagaaagctatctctatggtggaagctttagcagttaagttaacccaaaatgaaggagaattgattcaagagaagtttgaagtgaagaagcttgtaaactttctcaaacaggcttctgaagatgctaaaaatttggttaatcaagagaagtcttttgcttgtgccgaaattgaaagtgctagagctgtggtgctgagaattggggaggctcttgaagaacaagaaaaagcttcccaagcttctaaaccacaggatgtggatggactagtcgaagaggttcaagagtctagaagaatcaaattgttgcatcacccaagcaaggtgatggccatggaatatgaactacgtgctcttagggatcaaattcgagagaaatctatattttcaattaagcttcagaaagagctaatcatgagcaagaggaacgaggaaaataaatcttgtttatacatgttagatggttctgaagctttgggttcatatctgcgagtccagccttgctcagatgaagtgccacaggtttcgaaatgttcatttcagtggtaccgcttgtcttctgaaggcagctggagggaagttatttcaggtgccaacaaatcaatatatgctcctgacccctctgatgttgggagaatcttacaagtagatattgtctcaaatgggaaaaagctcaccctaacaactaatcccattcaaactgtttcaggacttggaagccatgtggagacacttctacgaaaatctaatactgattttaatgtagttatttctcaaatgaatggaaaagatcactcatcccattctactcattcatttaatgtggggagaatgaggataaagctatgcagaggttggattacaaaagctagagagatttactccccatcaatgcagctatgtggcgttagaagtgatgtcgtgaatgcagcgaaggtgttgttttggcaagcaagaaagggcctctcatttgtattaacctttgaatcagagagagaccgaaattcagccattatggttgccaggaaatatgctcttgattgcaatgtcgtgcttgccgggccagatgatctagtgtaggagcaaaaattaactgactgagcttttccaacaaacgtgagatttatcagattcttggtgtgagtatacgtgtgtgcttgttttgttaaagaaagatatgatttcatctgtgattgggtttttcactaattgagttgcattgttttaggcatggtttttttatttgcctaatcatgttgtaccaaactcaacttttttttataattattagttcatttgttcattgtggctaatttgcatgtgctagttgttttgtaatgtaaagcatatccgaaacatggtatataccaaaatttcctaatgattattggctcgt

SEQ ID NO: 30114 - DNA, 972 bp, Glycine max
  Clone ID: UC-GMROPIC111H08_FLI
gagtaaataaggatactaccaattcaaaggcaccgccaatgccattggcaacattacctcttctcttggtagatgataacaatgcttgcattgatctttcaatgggagaggagaaagtagttaaactgtctccattgtcaccaaagattttagtgtatattgattggtctcagaagcttctggagaagtatgatactcatacacttgagactttgcctgaagttttaaaatatggacctgtaaccaagaaagctcgtactgaacctctctccttgtacacctgcttggaagcttttctgcgtgaagaacctctggtgcccgaagatatgtggtactgtcctaaatgcaaagagagacgacaagcaagcaagaagcttgatttgtggagactcccagaggttttggtcattcatttgaagaggttctcatacagcaggtcaatgaagcataaactggagacttttgttaactttcccattcatgattttgatttaactaattacatagccaacaaaaacaactctcggcgtcaactgtacgaactgtatgcccttacaaatcattatggcagtatgggtagcggacattacactgcacatattaagcttttagatgagaacaggtggtacaattttgatgacagccacatatcactcataagtgaagatgaggttaacactgctgctgcctatgtactattttaccgcagggtgaagactgacgatgccgctgttagcaatggggcttaggctttcattttggcagttttatgtataaagtaaatgtcaagaacgtacctggttattccataaaattttagaaaaaggtaggtgaacaatttcaaatgcatgccttaatttagggtttttttttttttttttttactgtatggaaaggcacaagcctgttgatgccagagtgtagtcaatgaaaaggtaggtggaaagttgaatttgacacccttttggtttc

SEQ ID NO: 30115 - DNA, 683 bp, Glycine max
  Clone ID: UC-GMROPIC112C12_FLI
gattaaaatctacgaataatggagcaagagcttcaacgcaacagtgtccacgacgacgaagccgccaccaccacgagctccggcgacaagcccgccatccctcgcggcggcggaacccgacaccccctcttccgcggcgttcgcaagcgccgctggggcaaatgggtctccgaaatccgggagccgaggaaaaagtcacgcatatggctcggctccttcccggcgccggagatggcggccaaggcctacgacgtcgccgcctactgcctcaagggccgcaaggcgcagctcaacttccccgacgaggtccaccgtcttccgctgctcccctccgcctgcaccgcccgcgacatccaggccgccgccgccaaggccgcccacatgatgatagtccaggccgcctctgccaccgccgactcgccggagaaaagcagcagcattacctccgactgcggcggcggtggcggtggagacgacttctggggcgaaattgagctgccagagttgctcaacgccaagtggtgggcctccgaccacgacgtcacgccgtggcccgagtccgagctcccgccccagcagcccttcaccacggcgtgcttgtagtttgtaataatcaataatgctcttctctcaagctccgacttggttggtatattaattatatatattagtattttgctcat

SEQ ID NO: 30116 - DNA, 727 bp, Glycine max
  Clone ID: UC-GMROPIC112G08_FLI
gtggaactcatttttccccattttgtgaaattcaattccaagggtttccattttccatttcaatgtcttcccattcgcacaaaggcacctccttctacggcgatgccgccccttatcgatccagagaggggcttagcactcgacccgttgcatcctccgatgaaatccaattgcacatcgatcccggcatcgacttcgacgacgaaatcaccggtcttcgtggccaagttaaaaaaattgaaaaatgttgctgaagagataggttcagaagtcaagtttcaaagagattttctggaacaagtgcaaatggtaatgatacaagctcaagctggggtcaagaataacttaagaagattgaacaagagcatcgtcaaaaatggttccaacaatattgttcatgtgattgcttttgcattagtctgtttctttatagtatacttctggtcaaagatgtccagaaaatgatggctcgtagttgaaagattttattcaaagcttttttcggttgactcattatgatgcctaatcttgtacagaaaagctacacttactgttgcagtttacagttaaaaattcttcgacttcaaagttatgtgtcttggtcgaagcagtagttttgtgtaatagacaggataattgcttgtttaatagattgcaaaagcctcttttctcttaaaaatatcatgtgaacgtctgtagtagttaataaaatccttgaactttattc

SEQ ID NO: 30117 - DNA, 2569 bp, Glycine max
  Clone ID: UC-GMROPIC113B12_FLI
actaaatagtgctaagaactctaatggtggacaagatgaatatgctgatattcaagtcccttcagatttctttgctgctagttttctctatcagaaacaccacagcagaaaagaaaacccatcacacaaaacacacatacataattcacatggacaagttcaacatgccagagagttttaacgaccatctcctctggtttgattcatcactaaaatcagtatcagactcagcagagatgctctacacatataaaaaagtagctcatggcttctctacaaggctaactacgcaagaagcagagttgctctcaaagcaacctggtgttctctccgtcatcccggaagttagatatgatcttcacacaactcgaacaccagagtttctggggttggccaaatacagcactctttcactggcctctggcaaacaaagcgatgtgattgtcggagtgctagacactggtgtgtggcctgaactaaagagcttcgacgacaccggactggggccagtacctagtagctggaaaggtgagtgtgagagaggtaagaatttcaacccatcaaactgtaataagaaacttgttggtgcaaggtttttctcgaggggctacgaggcagcctttggacccatcgacgaaaagacggaatcaaagtcaccaagggatgatgatggccacggaagtcacacctcaacaacggcagcaggttctgcagttgtaggagcaagcctctttggttttgctaatgggacagcaagaggcatggccacacaagccagacttgcaacttacaaagtgtgttggcttggagggtgctttacatcagacatagctgctggaattgacaaggccattgaagatggtgtcaacatcctttccatgtcaattgggggaggtttgatggattactacaaagacactattgcaattggaacttttgcggccactgcccatggaatactggtttccaattcagcaggaaatggtgggcctagtcaagcaactttgtctaatgtggcaccatggctaaccacagtgggtgcgggaactatagaccgtgatttccctgcctatatcacccttggaaatggaaagatgtacacaggggtgtcactttacaatggcaaactcccacccaattctccactgccaattgtttatgctgcaaatgtaagcgatgaatcccaaaatctgtgcaccagaggtactttgattgctgaaaaagtagccggaaaaatcgtgatatgtgaccgaggagggaatgctagggtggaaaagggtttggtggtgaagagtgctggaggcattgggatgatactatcaaacaatgaagactatggggaagagttagttgctgactcctatctcctccctgcagcagctttgggccagaaatcaagcaatgagttaaagaagtatgttttctcatctcccaatcccacagctaagcttggatttggtggcacccaattaggggttcaaccatccccagtggtggcagctttcagctcaagagggccaaatgtgctcacaccaaaaatactcaaaccagacctgattgctccaggagtcaacatcctagctgggtggactggtgcagttggaccaactggcttgactgaagacaccagacatgtggaattcaacatcatttcaggcacttccatgtcctgcccccatgtcactggcttagctgcccttcttaagggcactcacccagaatggagccctgcagctataaggtctgccctcatgaccacagcttacagaacctacaaaaatggccaaaccataaaagatgtcgccaccgggctaccggctacgccatttgattatggggccggacacgttgatccagtggctgcgtttgatcctggtcttgtgtatgatacttccgtggatgactacttgagcttcttctgtgccttaaactacagttcctatcaaataaagcttgttgcaagaagagacttcacctgcagcaaaaggaacaattacagagtggaagatctcaattacccatcttttgctgttcctttcaacacagcttatggagtaaagggtggttctcgcaaaccagccactgtccaatatacaaggactttaacaaacgtgggtgccccggcaacgtataaagtttcggtgtcgcagtctccctcggtgaagattatggttcaaccacaaacacttagtttcgggggacttaatgagaagaagaactacacagttacgttcacgtcttcgtcaaagccttctggaacaaacagctttgcttatctggaatggtcggatgggaaacataaggttactagtcccattgctttcagctggacttagactctgatttttaaaagccctaactttgaattacctgttgcaagcaaacgtgctcgtcttcatgaataattgtatctctttgtttttattctgcttttggtgcagcaaaaggggcactgatgttatgtttctctttgctgtactcctttgaaaattagtacagaatgattgtacagaaaagaaacagggtaatggtgtacctgaataaatgacagtaagctctttcttatccc

SEQ ID NO: 30118 - DNA, 3257 bp, Glycine max
  Clone ID: UC-GMROPIC113C10_FLI
ccacccccaacacaacacaaaccgtgtgctaacaatagtatagtgggtgtgaacccccaaaccctaatccttcgtttctatgcatgcgctagcttcgtcgtcgtcgtcatcgattttccggtttgtgattctcgtgattcttctcgggccgaattattgggtttgacggcatggatttggtaccgagcgtcaaggaaaagttgaactattttcgtataaaagagctcaaagatgtgctcactcagttacacctttcaaagcagggaaagaagcaggatcttgttgatcgcatattatccgttctctcagatgaacaagtttcaaaaatgtgggctaagaagaatgctggtggaaaataacaggtggcaaaattagtggatgatacatataggaaaatgcagatatcaggggccactgatctagcttctaagggacagggtgcatcagatagcagtagtgtaaaggttaaaagtgaatttgatgatgcttttcaacgagatgtaaagattcgctgtctatgtggaagtagattggaaacagaggatttggtcaagtgtgatgatccaagatgccatgtgtggcaacacatcatttgtgttattattcccgagaaacctaccgaaggcatcccaccagttcctgataaattttattgtgaactctgtcgtctcactcgtgcagacccattttgggtttcagtggcacaccctttgcatcctgtgaagttgaccacaaccagtaatccaactgatggaaacaacccagtgcagagtgtggagagaacatttcaactgactagagctgacatggacttagtatcaaaaccagaatttgatgttgaggcttggtgtatgctcctgaacgacaaggttccattcaggatgcaatggccacagtatacagacctgcaggtcaatggtgttcctgttcgtgcaactaacagacctggttcacagttgcttggggctaatggtcgggatgacggtccaattatcacgccatatacaaaagacggaattaataagatttccttaacaggatgcgatgctcgcattttttgtttaggggttcgtattgttaaaaggcgcagcatgcagcagatcctaaactcaatcccaaaggagtctgatggagagaaatttgaagaagctcttgcacgtgtctgccgttgtgttgggggaggaaatgcagctgatgatgctgatagtgacagtgatttggaagtggtttcagatactttcactatcaaccttcgatgtcctatgagtggttcaagaatgaagattgcaggaagatttaaaccctgtattcacatgggttgctttgatcttgaagtttttgtggaaatgaatcagcgatcaagaaagtggcaatgtcctatatgtctcaaaaactatgctttggagaatatcatcattgacccttatttcaatcgcatcacttctatgatgatgaactgtggcgaagaaattgcagagattgaggtgaagcctgatggttcttggcgtgttaaggtaaagagtgaaagtgaacgcctggaattaggaaatctagcacagtggcgccttcctgatggaaccctttgtgtttcaactgatggagatgttaagagagtggatacattgaagcaggttaaacaggaaggtgtttcagacagtcctgctggtttaaaacttggcataaagaagaattgcaatggagtttgggaagtcagtaaacctgagggcacaaacacctcttctggtaataatttgaaaagggtttttggaaatcccgaacaggttgttattccaatgagcagcagtgccactggaagtggtcgggatggtgacgatcctagtgtaaatcagggtggtggtgggcatattgactattccactacaaatgggattgagatggattctttgtgtctcaataatgttgatttagcatatgaatatactgcacccaacacttctgcccaggtgggtggtgcagaagttattgttcttagtgattctgaagaagacaatgatctgttggcatctcctgcaattgcatataagaacaacagaaatgatgctacagatggttactctgtaccaccacctgtaattgttgattcatatactgaagatcataatcttggtggaaattcatgcttgggactctttcctaatgatgatgattttgggatgtcttccctatggccattgccttctggaagtcaagctggtcctggcttccagttatttggttctgatgcagatgtgtctgacgcattggtccatctgcagcatggtcctatgaattgctcctcgtcactaaatggttatgcattggccccagatactgctttgggatctggcggtatcttgcaagagtcctctgctggtcgctcagttgctgatttgaatggtggtttggtggacaatccattggcatttggtggagatgatccctcatttcagatttttctccccacaagaccagcagattcatccatgcacaatgaattgagagatcaagcaaatgtggctaatggtgtctgcactgaggaggattggatatcccttagacttggaggtggtgctggtggtaacaatggtgatgctcccactcaaaatgggttgaattctagacatcaaatcccaaccagagaaggcgccaagaatactttggatgatactgcttctttactccttgggatgaatgatgttagatctgacagggcaagaaggcaaagatcagatagccctttctcctttcctcggcaaaagcgttcagtaaggccccgcttgtacctttctattgattcagattcagagtaaaggtcagaccttgtgtctcaagaactttaggtactcttaacatcagatttcgtatttagaaattgaagaaagttgagaggcatttttggtcctcatgaaatggcagttaatacataatgataatgtggtctgaggcatctctggtggaacagagctacaaattaccctgtgccaaaatgctttcacctaccccattggcaaagatgttggccctaatgattctttgctcttgatatctaaattgtccttgtgacagatgtttgctgggggtatagtgctggtttgttgtatagttaatcattcaaatctgtagttcaaactttcaaatttggtggtatattatttctgcatttttgtctctgctgagagcaataacctgtaaatgttttagccacatatcagatccaacagtgaaatcaaagatattgtttctggccatttttctag

SEQ ID NO: 30119 - DNA, 1747 bp, Glycine max
  Clone ID: UC-GMROPIC113D03_FLI
ctttctcttccaccgccatcatctctccaccctccaccgccctcacacccttttaatatcctcactccccccaccacctcccactcttttcttttcacacccctcctcattcttcttcttcacactaattcagaatcaacatgaacccaaatgatgctaactctcctaagccgttggagattctgcagatgaaccctgttcctccgtttttgtccaagaccttcgacctcgtcgacgacccgactctcgaccccattatctcatggggctccaccggttttagcttcgtcgtgtgggaccctctcgagttcgcgagaatcgtccttcctcggcatttcaagcacaacaacttctccagtttcgttcgtcagctcaatacttatggattccgcaagattgacacggacaagtgggagtttttcaacgaagctttccagcgagggaagaagcacttgctgaagaacatccaaaggcgcaggtcatctcaatcccagcaggttggtagctatattggaatcgaatgttctactgaggcaggaaggtctgatgttgagattgagatagaaaggcttaggaaagaaaggactatgttgatggaagaggttgttgatttgaaacaagagcagcgaagaatggctcaccgcgcaggagaagtgaatcaaaggctccaatccacagaacaaaggcagaaacaaatggtttctttcctggtcaagttaatccagaaccccgcctttttagcccgccttaggcatgaggagcaaaaagaaatagattctccaagagtggtaaggaagtttgtcaagcagcaccaacatgaaactggaacagcagaaactctccaagaagggcagatagtgaggtaccaacatgattggagaaatataggcatgtcttccgaaactccaaaactaagtccagtttccattgaacagtctcctcactacctttcacagggtttggcaggagaagtgagtgtaggcgcagaagatcttactgctcaaatagagaatattgtatcaaatgacttggctgcagtgcacgggatcacagtgtctcaggaaattatgattggagaaggattatctagctttggagctgaagacccccttttcaaagggaaaagtgtcatgagtccaattctagaagttcctccagagtattttgcttccttcccagagggtttgaccaaggggaaagactttcaagatttttctgctcttggaactgaaggcatgataaagctagaagatatatgggactctggccttaatgttagtggtgctgcttcaggtagtgggaatgagctgtggagcaatcatgtcaactatgaagagtttccagaatttggagtcacaagtggtatgtctgactcagacatctgggatattggcttaggaagtttgggaattgataagtggccaactgatgaaccttctcttggtgaaacaaatggtcaagctggtcaaccaaaagaagataggcctaagaattttggtccatagggtttcatttgctcctgcacttgttgccctttggttacttgctatatttatagttcctaggaggcatattattgaatcatttgatttataaatagtattcattcacctgcttttattcatcatttactttcaatttttttattcttttagatgaattctttaactgtccatgtttttcttcgtaaattctaattgtgtaattattgataacttccactcaagtaaatcatacttttcctttc

SEQ ID NO: 30120 - DNA, 1470 bp, Glycine max
  Clone ID: UC-GMROPIC114E02_FLI
ctcatatgcatctaatgaaataaaattacatttagaagttgaaataaatggtgtggatcaatccaggttgagtgagtgcagtggagagtccaatgctctagttaagggtattcaaattgatactaaacaaaactgctgtcaatatgatgtagaagttgaagatagcattaacaaaaaggactgtggaaatgttggtgaagacattcagcaacatcaagacataggtttagatgcttatactgaatcagtatatggaatattggatctgaattctgtacaaaagatgtttcttaagggaatgagtagttttggcagtactgattctgacatagctgagatttaccaatgctcaggtgcgtcaatgcaagcacgatgggagctgttccagaagcaagctgaacttaccaaaaagaatcatggggaagctaacattcggtatgcttggcttgcttcttctaaaggagaactatctacaatgatgaactatggactaagtcattatggattatctggatcaaagtgcacatatggcattggtgttcatcttgctgctgttacttgccctgacgccagtgtgcgttattgtgatgttgacgaaaacggggttcgacacttggccctttgtcgcgtaataatggggaacatggagattctccagcctggcactggtcagtttcatcccagtagttgtgaatatgataatggggtagattccattgaatgtccacgatactatgtggtgtggaatatgaacatgaacacccacatctatccggaattcgttgttagcttcaaagtctcatctgatgctgaaggtcatttttgtggaagtgagggtaagaatgtttctggggttaattcagcctgtcagggtcctcatggcttgttacattcagaatcttctactgtagataatggaaaagctcctagtatggttgctagcaccccaaaagttccaaaatccccttggatgccttttcctttgcttcttgatgctatcagaaatcaggttcctcccaagggtatggatgtaatcaaaatatattatgaacaattcaggtcaaagcatatatcgcgggatgattttgtgaagatgctgaggttaatagttggagatggtctgttgagaactacaataacaaatcttcagttcaagataccttccggtggtgaattgaaaggctcaatcaagaaggaagtctgaggctgtatttctgtgaggtggagatctttctccttggagtcaattaatgtcaactttttgctggataaatcaaaatgaagttgtgatattgttatctcttaggcaaactatctttttcatttccttttgccatctttatttggacttgagacatacatgcaactagaactatattagagtttagtttgaactgttcgtgatcaggtgacctgtcaatcaatcctcttgtttatgttggattttatagtaaaaacctgaatttggat

SEQ ID NO: 30121 - DNA, 1559 bp, Glycine max
  Clone ID: UC-GMROPIC114G03_FLI
ggtgactctcgtcgtaagtatgctacaggaagcatgcctacttcaaattttcaaatcacatacgggtttacagagtgcacacctgatttgtcattgcaagagtgcactcagtgcttgggtgaagctatcgcggatatcccagtttattttaatgggaaaactggaggtaatgttttaaaacccagttgtagaattagatttgatccctactccttctacggatctacgctgaaattagacccagatgcaccgccaccagcgaccccgctaccatcaccgcccaccaacaacaattcttcttcacaaggaaagagcaacacatcacgaattatcattgccatagtagtaccagttgctagtgttgttttggtgctcattcttttctgcatctatctaagagtgaagaagccaagaaaagaaaatgagattaaaagagaagaagataattatgaagatgaaattacatttgctgagtcattgcaattcaactttgacaccatacgagttgctacaaatgaatttgctgattcttataaacttggacaaggcgggtttggagctgtttacagaggtcagctttccaacggacaagagattgcagtaaaaaggttgtcaaggaattctgggcaaggagatatggaatttaagaatgaagttcttttagtggccaagcttcagcaccggaatttagttaggctacttggtttctgtctggaaggaacagaaagactacttgtctatgaatttgttcctaataaaagccttgattacttcatatttgatccaataaagaaagcacaattgaattggcaaaggcgttacaaaatcattggaggtattgctcgaggcattctctacctccatgaagattctcgactgcgtattatacatcgtgacctcaaagcaagcaacattctcttggatgaagagatgcatcctaagatatctgattttgggatggcaagattggttcacatggatcagactcagggaaatacaagtagaattgttgggacctatggatatatggcacccgagtatgcattatatggtcagttttcagcaaaatcagatgtttttagttttggtgtactagttcttgagattataagtggccaaaaaaacagtggtgttcgtcatggggagaacgtggaggatctattgtgctttgcatggagaaactggagggcaggaacagcttcaaatattgtagaccccacgttaaacgacggttctcaaaatgaaataatgagatgcatccacattggattattatgtgttcaagaaaatgtggttgccagaccaaccatggcttctattggtctcatgcttaatagctattctctcactctcccggtgccttcagaacctgcacttcttgtggatagtagaactagaagcctttcagagcatgactcaatggaaacaagaacaagtgaatcagcaaatcaatcaacacccaaatcgataaatgaggtttcaatcactgagctatatcctcgttagattttggtgagtcattagcctattcaattaaataaaacatcaattcctaaagt

SEQ ID NO: 30122 - DNA, 874 bp, Glycine max
  Clone ID: UC-GMROPIC115B02_FLI
ataactgtaggtaaggaccatttcgttgccctgggtcgaaccgcgtgggatttcatgcgcacagaaggtgggtccgacttcggagcaaacatcttccttaacctcccacctgtcctcaacatgtcggtgctaacagtcgaacgacaaccctggcgaggccacaaccagttcgccatcccctacccctcctacttccaccccaaaaccctagcccaaacgctgacgtggcagtcccatctccgccgacgcgccaggccccacctcttctccttcgtcggtggcacgcgcccggggttacaaaaggcaaaagtccgcgaccacatcgtctcgcagtgccaagcctcaaaacgttgcgttttggtccggtgcgcgagtggagacagcaaatgccacaaccccatgagcgtgctcgaggtgatggaaaaatccaccttctgcctccaggcgccgggggattccttcacgcgccggtcgacgtttgattccgtactggcggggtgtattcccgtatttttttcagagcatacggcgtatacgcaatataagtggtattttcctagggagagggatacgtattcggtgttcattgatgagagggaagtgattgaaggaaaggagaagatgatgattgaggaggtactgttgggatttggggagaaagaggttgagagaatgcgtgaggtgctcattgggctaatccccaccctcacctacgcccaccccaacgccactgccgcctttcaggatgttgtcgatgtcatgctgcgccgcctctctcgccgagttacccaccatttcaatcctataatttaattatatccctcatcatctcatttcactcaaaatctcaagtataaaataaatataattttat

SEQ ID NO: 30123 - DNA, 379 bp, Glycine max
  Clone ID: UC-GMROPIC116A03_FLI
tctactgtccttgttagtaggttcccatgttttgcctatagaagtgtagcttcaattttgaataatgctccttctaagatacaaaggaactatcactggagaagagtctgtttttcattggaattacttgtatttcaacatctaatccttttaggaggaggatatttgagcccatgggccgcatattgaattttggattagtcctaattttatgtgcgttagtgcccccggttgaactttttggtgtgtttgtggtggctgtacaagatttttgatgtatgtgggatgcacaaagcgtgcaaacatatacttctaggccttgtggtcgagtattatgcactagtattacgcaataaggtcatcatggatatgctttttt

SEQ ID NO: 30124 - DNA, 652 bp, Glycine max
  Clone ID: UC-GMROPIC120H12_FLI
ttgtgactcgttcttcttcgtcgttatcttcttcttttgttgtttgtgtgtttgttttttctctcacctgaaaatgtcttgctgcggtggtaactgtggttgcggaagcgcctgcaagtgcggcaacggctgcggaggctgcaagatgtacccagacttgagctacaccgagtcaaccaccaccgagaccttggtcatgggagtggcaccagttaaggctcaattcgagagtgctgaaatgggtgttcccgctgagaacgatggctgcaaatgtggagctaactgcacctgcaacccctgcacttgcaagtgaggtgttggagagctaaagcttcaagcagagatggcccttagaaataatgataaaaactatatatagtttcaaaacttcaaaattatgtagtatgtattatgttgcactctggtgttttgtgtctaaacaaacacccttagaataaagtggtcatttcttgcccttgagcaagttcaagtgttttggacttgtgatgggtgtgttaaggtcatggttgcctttttttttatatatatatatatataaatgtttggtaattggtcgcttctgtataaagttcggctagttaatctgaattatgaatctctgcttataatattaaactagtactattgctgg

SEQ ID NO: 30125 - DNA, 1447 bp, Gossypium hirsutum
  Clone ID: UC-GSFLMAXXA088B02_FLI
gtttaaaagcaaaatggaaaatttttatatattttttcccatctctgaaatcccagaattcaatcatttttagctcaaaaccccacttttttccccctttccttttaatatatagtctttacctgagaaactacaaggttcatcagcccccccacattgaaaatgacggagacgccgttctcaaaactctccgacgacgtcgttcttaacatcttctccaagctcgaacatcaccccaagagctgggcttgtctcgcttgtgtctgcaccaaattctcttctctcattcacaacacctgcttcaaacaaaaatgcttcaaaaccatccccgccgtttgcgccggtctcctctcctcttcctccgtccctcccggcggttggtcctccctccataagctctccgtctgctgccctggcctccatcacgctggcgtccttctcgaccactccgattttggcttcgcacgtgagattggccccgaggtgaaatatcccaagctagctaattcccaattctccccgccgcccaccgagccttggtccagcaaagtggaagggaatccgaatccggatccggaaaataacgctgccgggtccgattgttcatggtcgcttttcgatgatctatgttacgacaccgtttcaaacccgtccgagtcgatagacggttataaagtagaaagaattgacaacagagacataaaaaccgggcgtgaatttctcgtttgtaaaaggaggaagctatctagaccgcttagatcccatctagcagacggcgtttggaacttaagccgagaacagggcaacaagttgttagcgagccggttccgaggcgattgtttatacatttgcgattggccgggatgcattcacatggaggagaagcggaattacatgcttttcagaggggttttcaacgacttcaagaaatcccgagtgtggaggacgataaatgatgggaacaggcgcaagatcgatctgagttgcgccttttgctcttgtaaacaaacatgggatttgcattctgctttctgtttgaggcgggttttcgggtaccacgatgatggggagccagttgttcgagcttatgtttgtgagaacggacatgtttctggtgcttggactgatttgcctttgtacacttaagagaaacagcatatcacatcaacattactagtaagttgtttccagttaaagtaagtggaatttacaacttgatgatgattagtaagcagcatttagtattgggtttgatttattgatagaaatgatgttctttgttggctttctcagaagatgagactagtgattatcattatggttatgtctattacattgtataccagcattggattgttagattatctagtgagatttttggcattggattattagtttatcaagtgaagttgaatttcaatctttgaactattaattctttggattt

SEQ ID NO: 30126 - DNA, 1371 bp, Gossypium hirsutum
  Clone ID: UC-GSFLMAXXA094H12_FLI
ataaaataaagttgcagaaactgagtgcaaatcttactaagccccagctcgaactcctctgtcccattaactgtatgagagagaggaaatctgattttcaatttcatcactgcatcttctctttgcttttggcctcaccttcagaaaggtaagtcaagttctttagattgcttgccgctttttgagtttcaagatctatgaaccccagatctgtagagccttgatcttattgctgaattcttgaattttagtagtttgggttcttttgctttttccttaataactagatttagtttattgtaaggtcattttagctcattcaggatgttgggtcgtcctgggttatctagaactggaagctttaggcctgagaatctaggacaaaatgctttgcatatgattggcaatctttgtttcactatatttgtaattggtgtcctagttttcaccattatagctgctacttatgagcctgaggaccctcttttccacccttccaccaagctcacgactttcctcacgtccacatcaaatgccaccttccaatcggataacacggttgttaaaaccggagaggactttatggccgccaaccagactgcatttgccacttttatcaatgtgacggatgtagtagaaatcaaggaggaagactccctccctgagaatcacgaaaaggccatcgttctctttaacccaaacccacttcttcttcatgacacacctcccttgtcttcccctccttctaccctctccttctctttcgattctcacctcctctccggatttaagaaccaaattctacgggcagctgacatgaaatcagccgaaactgaagagaacaagatggaaaacgaaggatgtctagcagttgttccatgggttccctctcagattgcttcagtagaaagtagagatagcgaacagcaagttccagcgttgatggaaactgatgaaatggatgtagaagagaactgtagcaacaatggaagtatgcaggaagagcatgggtatgaattggatgggttgaagccaagagacgccctccataactgggcgcagcagcaacattgcatgcttccccagcctcctcaaaacccttttactccaatcacatggtctgattgataactggggattatagtgttgccttttccttctgtaaatggttttgtcgtgtaatgttaggggttaagaaatgagatggacagagcctgagtaagaggtgacgggggtttccccttttgcttgcctgcttcattcaacggttttgaggggcataaatgcttgaaacctttcctctactgggtggggtgtatcttctcctcttatggtaattgaagcttcttctctaatatggtaattgaagct

SEQ ID NO: 30127 - DNA, 395 bp, Gossypium hirsutum
  Clone ID: UC-GSFLNU33B005F05_FLI
cttataaatccttaatcaatcatctcattcctttgtcatctaattattaaagcaaagatagatggctaaacttgccacctttttcgtcttaacccttctcttcgtttccactctatcctttgccgcccgccctggtccagctttccctaaccagtctcctaccaaaactcaagctaagggtattactgtggtggagactgaggttgagcggtcgactgaagctgttgaagatagctgccaaggagttggagaagaagaatgtttgatgagaagaactcttgctgctcatgttgattatatctatactcagaatcacaagccatgagagctttttatgaatttatggacatggtcttttaaattttaaataacataatcactcaagttaatttgtg

SEQ ID NO: 30128 - DNA, 429 bp, Gossypium hirsutum
  Clone ID: UC-GSFLNU33B019G09_FLI
aaaaccccattatttagtgatcaaattctgtttgtttggttgacttattttgagatctgattagtttttgaaattgggttttgaaaaatgaggaaacccacaaaagaatcagagttaaacactgagccaatcggtcaaaatctgatcaaattgattagtaatctctgtttctctgtttttgtgttgtcggttcttatatttacagccattgctatcacttatcaaccaccagatccatggctggaatcagctccttctttaaccaagctcttcactcaaactgaaaatgccactgtcggctgccattttttctctcattttctctcttgccaaacaccatttttcttcttcaaaagacagcaactggttacttctttaatttgggtttcaagcaaagttaaaccccattcaacaatttactgtttgatt

SEQ ID NO: 30129 - DNA, 842 bp, Gossypium hirsutum
  Clone ID: UC-GSFLNU33B129C05_FLI
tatccttataaatccttaatcaatcatctcattcctttgtcatctaattattaaagcaaagatagatggctaaacttgccacctttttcgtcttaacccttctcttcgtttccactctatcctttgccgcccgccctggtccagctttccctaaccagtctcctaccaaaactcaagctaagggtattactgtggtggagactgaggttgagcggtcgactgaagctgttgaagatagctgccaaggagttggagaagaagaatgtttgatgagaagaactcttgctgctcatgttgattatatctatactcagaatcacaagccatgagagctttttatgaatttatggacatggtcttttaaattttaaataacataatcactcaagttaatttgtgtttgtttcttcttcattatatatttcttcaatcttctggtttttttttttttttttgaaatatatggttggagtttctcatattttttgttaactttggtaatatatttataaataattattaactccacaagttaagagatttaattaatattaaaaataaaaatatatataaataataattttttgtgaagttataaatattcattgtaggattacaagcttaattatataaaatagtctttttaagaattacctttttcaaatgctacatttggtcacttttcttttagtgattttgctatattttttttgtgttggagaatatgcatgaaccatgatggctaaaatatgtactaatcattttacacaatcttaccacactattggatatgagaatgtgtcattcttttgtaatatatatatattcttttatcttttttg

SEQ ID NO: 30130 - DNA, 979 bp, Gossypium hirsutum
  Clone ID: uc-gsflnu33B137e01_FLI
gttaagttcatggaaaccgtcgtttcctccgtcgttgctcccgacgaactcaccgtcgaggaacggaatctcctctccgttgcctacaagaacgtgatcggcgcccgccgtgcttcctggaggattgtttcttccatcgagcagaaagaggaaggacgtggcaacgccgatcacgtctccatcattcgtgagtacagggccaagatcgaggctgagttgtctgagatttgtgccggaattttgaagcttctcgaagagaagctcgttccggctgccgggaacggggattccaaggtcttttatctgaagatgaagggagattaccataggtacttggctgagttcaagactggagatgaccggaaagccgctgctgagaatacgctctctgcgtataaatctgctcaggacattgcagtttccgagctcgctccaactcatcctattcgtttgggattggctctgaacttttctgtcttctactatgagatcttgaattctccggaccgcgcttgcagtcttgcaaaacaggcttttgacgaagccatctcggagcttgatactctcggagaggattcatacaaagacagcactctgataatgcaacttcttcgtgataaccttactttgtggacctcggatatgcaggaggatggaacggaggaaatcaaagaagcctccaaacctgaggatgagaaacaacagtaaaatccgtaatcttcgagttagtattttacttctctggttgtttttgtatggagaagttgattggtcccactatcccttcagtttgccttatatttttaaaaaaaaaaaacttgaaaatactgctaaaagtttcttggtatttcactatatatatatttagttgaagctttctaattatagtgggggcattgtgcactattttcctaattgtttacttcacaataatggaactgatgatttgagatatttttctaagcttaatgattttgat

SEQ ID NO: 30131 - DNA, 888 bp, Gossypium hirsutum
  Clone ID: UC-GSRONU33B004A11_FLI
ctcattctcatggccaccactggaaacaagaacatcaatgctaaattagttctacttggggatgttggagctgggaagtctagccttgtgttgcgctttgttaaaggacaatttgttgaatttcaggaatcaaccataggtgcagctttcttttcccagacattggccgtgaatgatgcaactgtaaagtttgagatatgggatacagctgggcaagaaaggtatcacagcttggcaccaatgtactaccgaggagctgcagctgcgattattgggtatgatatgacaaatcaagcttcatttgaaagagccaaaaattgggttcaagaacttcaagcacaaggcaatcctaatatggtaatggcactggccgggaacaaagctgacttactggatgcaaggaaggtggcagcagaggaagcacaaacttatgctcaggagaatggtcttttcttcatggaaacttctgcaaagaccgcatccaatgtcaatgaacttttctatgaaatagctaaaagattacctcgagtgcagccagcacaaaatcctgctggaatggttctcatgaatagaccttcagaacggactgcaactgcatcttgttgctcttaggcgatggtcgttgttttcccacctgtatcatctaaatagctcttgtaatgctccctggctctgcaaccaaagttttatctttcctttgccctgtttgtactattcattgagagctgtacatgcgtgttgtctagaggcattgatataaacccgtttattgcattggagattggtttttcttgtaattaaagtgtggtaatgctatgtttcacggccatagtacgacctgcatgttcaaataaaaatgcttgcctgtgttgacttggctgctccttt

SEQ ID NO: 30132 - DNA, 759 bp, Gossypium hirsutum
  Clone ID: uc-gsronu33B046C09_FLI
gtggaaactccaattcctcaagctcctcgcagcttcagaactctgggtctgaagaggacctgcaccagcagaatatgatggaccaaagaaaaagaaagagaaaggaatctaacagggaatcggcaagaagatccaggatgaggaaacagcagcacttggatgaattagtggcccaagtggctcagctcagcaaagaaaacaaccaaatcctgaacagcatcaacttcaccacccaccactatctcaacattcaggctgagaactcggttctgagggctcagatgatggaactgagtcaaagactcgactatctgaatcaaatcctcagttatctcaacaccatgagcgccagtgagttggtgtacgaaactgatcagtgctttgaaacaagtacttgtgaccacggtttcaccaagcctttccatctaccttaccttaaccaacccatcatggcctctccagacatgttccagtactactgatccataataatcctcaccaccatcatccctcattttcttataaaacgagggtattaatataatattattgttatggttaattaatttaatgaaatattagtgttattggcagctataggtctaggaagatgatgtaagggatgatgattgtgagagaattggcaagtagcaagtgaaagctgcttggcatgggatgcaattttttattatcaattttcttcttgtaaatggggatttgagatataaaatagggtttgatgtttgacgggttttctgg

SEQ ID NO: 30133 - DNA, 531 bp, Oryza sativa
  Clone ID: UC-OSFLCYP006D11_FLI
agaactggtggagaagcagaaagtccagaagcaacaagtgcaatgggaccagacacaacctcaaacaagttcctcatcatcctccttcatgatgagggaagcccttccaacaactaatatcagtaactaccctgcagcagctggcgaaaggatagaggatgtagcagcagggcagccacagcatgttcgcattgggctgccaccatggatgctgagccacatcaacggctaaggaggcttcagatccataccagtaatcacaagttgcaacctgacccggtccggtcgcctgctgctctggtttactactagtactattgtcatcttgcggttgcgagacgaggaaagcattttagccctaaattcagcattagtagcaagctgcaatgtgtatattttggcttcgtccagcaccgtcttcctcccaccagtaatttacccatgtaatatatgcgagtagcatgaacaaattttcccgtttccaaccatctccattggtgtcatgtgtgacttaaatagcgaaatttcagc

SEQ ID NO: 30134 - DNA, 3813 bp, Oryza sativa
  Clone ID: UC-OSFLCYP009D07_FLI
gggcaggctcttgagctaccaagtatgtcagcttcaaatgagaagtggattgatgggctccagttctcatcactgttctggcccccaccacaggattcacaacaaaaacaggcacaaattctggcctatgttgagtactttggccagtttacagctgacagtgagcaattccctgaagatatagctcagctaattcaaagttgctatccatcaaaagaaaagcgccttgtagatgaagtattagcaacttttgttcttcatcatcctgagcatggccatgcagttgtgcatccgattctgtcacgcatcatagatgggacactcagttatgatagaaatggtttcccgttcatgtccttcatctctttatttagccatacttctgagaaagagtactcggagcagtgggccttggcctgtggagaaattcttagagttctaactcactacaacaggccaatcttcaaagttgatcaccaacatagtgaagcggaatgtagcagcacatctgatcaggcctcatcatgtgagtctatggagaaaagggctaacggttctccaagaaatgaacctgaccggaagccattgaggccactatctccttggatcacagacatattgcttgctgcacctctgggtattagaagtgactattttagatggtgtggtggagtcatgggaaaatacgcagctggtggagaattgaagcctccaacaactgcttacagccgaggatctgggaagcacccacaacttatgccatccacgcccagatgggctgttgccaatggagctggagttatactaagtgtctgtgatgaggaagtagctcgttatgagacagcaaatttgactgcggcagctgttcctgcacttctattacctccaccgaccacaccattggacgaacatttggttgcggggctccctcctcttgaaccatatgctcgcttgtttcatagatactatgcaattgctactccaagtgctacccaaaggttgctttttggtcttctcgaggcaccaccatcatgggccccagatgcacttgatgcagcagtacagcttgttgaactccttagagcagcggaagattacgattctggcatgcggcttccaaagaactggatgcatcttcatttcctgcgtgctattggaactgcaatgtcaatgagagctggtatcgctgctgatacgtctgctgctttacttttccgaatactctcccaaccgacattactttttcctccactgagacatgccgaaggagttgaactccatcatgagccactaggtggctatgtatcatcgtacaaaaggcagctggaagttcctgcatctgaagccactattgatgccactgcgcaaggcattgcttccatgctatgtgctcatggtcccgatgttgagtggagaatatgtaccatctgggaggctgcgtatggtttgctacctctgagttcatcagcagttgatttgcctgaaattgttgtagctgctccacttcagccacctactttgtcatggagcctatacttgccattgttgaaagtatttgagtatttacctcgtgggagtccatctgaagcatgccttatgagaatttttgtggcaacagttgaagctatactgagaagaacttttccatcagaaacctctgaacaatccaggaaaccaagaagtcaatctaagaaccttgctgttgctgaactccgaacaatgatacattcactctttgtggagtcctgtgcttcaatggaccttgcgtccagattactatttgtagtattaactgtttgcgtcagtcatcaagctttgcctgggggaagtaaaaggccaactggtagtgataatcattcctctgaggaggtcacaaatgattcgagattaaccaatggaagaaacagatgtaagaagagacaaggaccagttgctacattcgactcatacgttctagcagccgtttgtgccttatcttgtgagctccagctgttcccttttatttccaagaatgggaaccattcaaatctgaaggactccataaagatagtcatacctggaaaaaccactggtatcagtaacgagctacacaatagcattagctcagcgattcttcatactcgtagaatacttggcatcttggaagctctgttctccttgaagccatcatctgttggtacttcatggagttatagttcaaatgagattgttgcagcagctatggttgctgctcatgtttctgagttatttcgtcgatccaggccatgcttaaatgcactgtctgcgctgaagcaatgcaagtgggatgctgagatttctaccagggcatcatccctttaccatttgattgacttgcatggtaaaacagtgacctccattgtgaacaaagctgagcctctagaagctcacctgacccttacaccagtaaaaaaggatgaacctcccattgaggaaaagaacattaactcatcagatggtggtgcattggaaaaaaaggatgcttcaagatcacacaggaaaaatggttttgcaagaccactcttgaaatgtgcagaagatgttatactaaatggtgatgtcgcaagtacttctgggaaagccattgcaagtttacaggtggaagcttctgatttggcaaacttcctcaccatggaccgaaatgggggttacagaggttctcaaactctcctaagatctgtactgtcagagaagcaggagctatgcttctctgttgtctcattgctctggcagaagctcattgcatctcccgaaatgcagatgtctgcagaaagtacatcagctcatcagggttggagaaaggttgtggatgcgctttgtgacgttgtttcagcctcaccgaccaaggcttcagctgctatcgttctgcaggccgagaaggacttgcagccctggattgctcgagatgatgagcaaggtcagaagatgtggagagtcaaccagcgaatagttaagctgatagcagagcttatgaggaaccacgatagcccagaagcattggtgatccttgctagtgcttcagatcttcttcttcgagcaactgatggaatgcttgttgatggtgaagcttgtactttaccacaattagagctattggaagtaaccgccagagcagtccatctcatcgtcgaatggggagattcaggtgtatccgtcgctgatggcctctccaatctgctgaagtgccgtctatcaaccaccatccgctgtctttcgcaccccagcgcgcatgtccgtgcactcagcatgtccgtccttcgcgacatcttgaacagcggacaaataaactccagtaagctcatccaaggggaacaccggaatggcatccagagcccaacctaccagtgcttggcagcaagcatcatcaactggcaagccgatgtggagagatgcatagagtgggaagcccacagccgccgcgccaccgggctgacgctcgccttcctcaccgcggcggcgaaggagctcggctgcccactcacttgctgacaaggccacaccatgactgtcactgcaagcagctgctgtaggatcagcgagtaggaaaggatgacttgccggtcagtttcctgagatgtgatttaagactgatattagctgatgttcccaagcatgatacggggcttgctcccaagatgtgatttttactttacttttggttaatgtgctaccgctgacattagatgttcaagcatatgaaaactgcttgtgctgtaacttgtatgtctgtaacgtaaaaatctttccatatggtaaccggggaagcagaggtatatccttttctgctgttgtatc

SEQ ID NO: 30135 - DNA, 2203 bp, Oryza sativa
  Clone ID: UC-OSFLCYP011G10_FLI
ctcggatctgtagcaaagagcgaagagcgaagctgcagcctgcagctacgcttgttcgcttgagacctagggtacgagcaacaataatagagagtgactgagtgagcgagcactgagtagcaagggcccggcacaaacaggacgcagccggcaacgtgtacgtcgaaccaaacagagaacagctagctaatcgatcggtcgccatgaccaaggacgacgccgtcccggtggccgtggcgccggcgaagcgcccgcccatcaacaagtacgccttcggctgcgctctcctcgcctccatgaactccgtcctcctcggctatgatatctcggtgatgagcggcgcgcagatattcatgaaggaggatttgaagatcaccgacacgcagatcgagatcctcgccggcgtcatcaacatctactcgctgttcggctcgctggcggcgggcatgacgtccgactggctgggccggcggtacaccatggtgctcgccgccgccatcttcttcacgggcgcgctcctcatgggcctcgccccgaactacgcgttcctcatggccggccgcttcgtggccggcatcggcgtcggctacgcgctcatgatcgcgcccgtgtacaccgccgaggtggcgccgacgtcggcgcgcggcttcctcacctcgttcccggaggtgttcaacaacagcggcatcctcctcggctacgtctccaacttcgccttcgcgcgcctccccgtccacctgagctggcgcgccatgttcctcgtcggcgccgtgccgcccatcttcctcggcatcgccgtcctcgccatgccggagtcgccccggtggctcgtcatgcggggccgcatcgaggacgcgcgccgcgtgctcctcaagacctccgactcgcccgacgaggccgaggaccggctcctcgacatcaagaaagccgtcggcatccccgaggacgcgtccgatggcgaggacgtggtcgccatcgtccgcgcgaacaaggcctcacagggagagggggtgtggaaggagctgctgctcaacccgacgaggcccgtccgccgcatgctcgtcgccgggctcggcctgatgttcatccagcaagccaccggcgtcgactgcgtcgtgatgtacagcccgcgggtgttcgagcgcgccggcattaagtcgaagacgaactcgctgggggcgtccatggcggtgggcgtttgcaagaccttcttcatcccgatcgcgacgctcctcctcgaccgcgtcggacggaggccgctcctcctcgccagcggcggcggcatggccatcttcctcttcaccctggccacgtccctgctcatgatggaccggcggccggagggcgaggcgaaggcgctaggcgccataagcatcgccgcgatgctgtcgttcgtggcgtcgttcgcctcggggctgggccccgtcgcgtgggtgtacacgtcggagatctacccggtgcggctgcgtgcgcaggcggcggccatcgggacggggctgaaccggctgatgagcggtgccaccaccatgtccttcctctcgctctccaacgccatcaccatcgccgggagcttctacctgtacgcgtccatcgccgccgcagggtgggtgttcatgtacttcttcctgccggagaccaagggcaagagcctggaggacaccgtgaagctcttcggcaaggacacagacgacgacgatgacgtcgacactagccgccatgagcgcaagaggtccactgagctgagcgctcagcactgaacagaacacgtccgtcccgagtccgagtgtggtcgaagcctattcgttctccgatagaaaaaagcttcgacatcgtgtgttgctttgtgaatcttcagattctggccacttaggttagattgctagacttttggatctcgtgcacatcagcttgttggccttagccaacatgtagggacattgagctgctttacgggggaaaagatcgtgtgatattccacactgcagggacgagtccacgtaaaaaggtcgcagtcaccgttgcggttacgcagcttggcacggatctgtgggtctttttcaccctgtacaacaattcaaccggccaatccttcgacgacagcattgagatccagggagccagggtctacctggctatgttttcttgttcagatattaccgtggcagtgtaattgtatacgagtctataatgtatatagcttttt

SEQ ID NO: 30136 - DNA, 1281 bp, Oryza sativa
  Clone ID: UC-OSFLCYP020C06_FLI
ggcacgcgtgagagtgaggagctcgcgaactccaaaaccctaaccctctcggagcttcacatcggcggcggcggcggcgatggcggagggtggcggcggaggaggagggtcggcggcgtcggcggcgctgaaggatcaggggaacgagcagttcaaggcggggaactacctcaaggccgccgcgctctacacccaggccatcaagctcgaccccgacaaccccaccctctatagcaatcgggctgctgcatttctccatctagttaagcttaataaggcactcgctgatgctgatatgacaataaaactcaagccacaatgggaaaagggtcatttcaggaaagggtgtgttttagagtcgatggaacactatgaggaggcaatatcttcttttcagatagctttgcaacacaatccacaaaatacagaagtttcaagaaaaattaagaggcttactcagttggcaagggaaaagaagcgggctcttgatgtggagaacatgcgttctaatgttgatgttgcaaagaacttggattcactgaaaaccgagctggctggaaaatatggagatgccgaactggggcaaagtatcttcacttttgttgttaatgtgattgaatcagctataaaggtctggcatgacaccggaaaagtagatgcaagagttaattttcttcttgatgaccagaagactgatactgaaaaacatgccccagtggttaacattgacaaggcctttgactcaccccacactcacagcagttgcttcacatttttgcggcaatattccgaggagtctttctcaaaggctgcttgtatagtagcacctaagagcgccatctcgtaccctcaggtctggaaaggacagggatcaagaaaatggaagcttgaccagagtgatggtttctttgtgcaatttgagtcaccaattctgcggaagatatggtttgtccctagcacaactgaaaagggacgagtattatgcaggagtcctgagctcctggacattagcatccacgaagtgcttccccgtatattcaaagaaacggcttgaataaacaacaaatggacagtgaatggctcccaaattcttcccctgttgtggtcatattctttcctagcttacagttgcaaaggggatatttttcatagcgtggtgagagcttagatttgcatgccagattttgtaagctgttgatctgtattgtacaccgaggcacacaaattttgctgatctggttttttaattatatatgccttaagtggtgcaatttccattgt

SEQ ID NO: 30137 - DNA, 1670 bp, Oryza sativa
  Clone ID: UC-OSFLCYP020G01_FLI
gacgagatggcgggaggcggcgtggcggcgctgggggtgaagaaggagcgggcggcggagtacaagggccgcatgacgctcgccgtcggcatggcctgcctcgtcgccgccgtcggcggcgccatcttcggctacgacatcggcatctccgggggagtgacgtccatggatccgttcctcaagaagttcttcccggtggtgttccggaagaagaacgacgacggccagaacaactactgcaagtacgacaaccagggcctctcggcgttcacctcctccctctacctcgccggcctcgtctcctcccttgccgcctcgccggtgacgaggaactacggccgccgcgccagcatcgtctgcggcggcctcagcttcctcgccggcgccacgctcaacgccgccgccgttaacctcgtcatgctcatcctcggccgcatcctgctcggcgtcggcatcggcttcggcaaccaggccgtgccgctgtacctgtcggaaatggcgccggcgcacctccgcggcgcgctgaacatgatgttccagctggcgacgacgctgggcatcttcacggcgaacatgatcaactacgggacgcagcacatcaggccgtgggggtggcggctctcgctggggctcgcggcggcgccggcgctgctgatgaccgtcggcgggctgctcctgccggagacgcccaacagcctgatcgagcgcgggcgcgtcgaggagggccgccgcgtgctggagcgcatccggggcaccgccgacgtggacgccgagttcacggacatggcggaggcgagcgagctcgccaactccatcgagcacccgttccgcaacatcctggagccgcgcaaccggccgcagctggtgatggcggtgtgcatgccggcgttccagatcctgacgggcatcaactccatcctcttctacgcgcccgtgctgttccagagcatgggcttcggcggcagcgcgtcgctctactcctcagtcctcaccggcgccgtcctcttctcctccaccatcatctccatctccaccgtcgaccgcctcggccgccgcaagctcctcatcagcggcggcatccaaatgatcatctgccaggtgatagtggcggtgatcttgggggtgaagttcgggacggacaaggagctgacgaggagctactcgatcgcggtggtggtggtgatctgcctgttcgtgctggcgttcgggtggtcgtgggggccgctggggtggacggtgccgagcgagatcttcccgctggagacgaggtcggcggggcagagcatcacggtggcggtgaacctcttcttcaccttcgtcatcgcgcaggcgttcctgtccctgctctgcgcgctcaagttcggcatcttcctcttcttcgccgggtggatcaccgtcatgaccgtcttcgtccacgtcttcctgccggagaccaagggcgtgcccatcgaggagatggtgctcctatggaggaagcactggttctggaagaaggtcatgcccgacctgccgctcgaggacggcgacagtcatcacaagtgaaagaaatgtactctgagatagtatatgggggttacagtagatgagacatgacatgtaggatgaggagattaagattgatcatgtgcggtaatgcattctgtgtgtatgttaattgaagttcatggatc

SEQ ID NO: 30138 - DNA, 1736 bp, Oryza sativa
  Clone ID: UC-OSFLCYP022A11_FLI
gtcggaaacgcgccgaaagacgaactggaggcgccccccccaaatcttgagatcgcaggatggatggacatacaaatggcactaatggttcctgctctaagccatgcgagccattaacagactactgcatccctgattacattctgaatcctgactctgaacaagtcctcgttgatcaggcaccatgttgccctgtagtagtattcatcaactctagaagtggcggccaactcggaagcagtttgatcaaaacgtatcgtgagcttctcaataaagcgcaggtttttgatttatcagaagaggctcctgaaaaggtgcttcacagattgtattgcaactttgagaagctcaagtctaatggcgaccctattgcttttcaaattcagagcaacctaagactaattgttgctggtggtgatggcacagcaagttggctgcttggtgtagttagtgaccttaagctctctcacccacctcctattgcaactgtgcctctgggaactggaaacaaccttccattctcatttggatgggggaagaagaacccaaccactgaccaagaggcggtgaaatcatttcttggacaagttaaaaaagcaagagaaatgaatattgatagttggcatatcatcatgaggatgcgagctccacaggaaggtccatgtgaacctattgctccgttagagctgcctcactcattgcatgcattccaccgtgtatcaggaagcgattcacttaatatggagggctaccacacataccgtggaggattttggaattactttagtatggggatggatgcacaagtgtcttacgaatttcactctgagaggaagagaaatcccgagaagttcaagaaccagctaacaaatcagagtacatatgctaagcttggacttaaacaaggatggtttgctgcttcactaactcacccatcctcgaggaacattgctcaacttgcaaaggtgcggatcatgaaaagacctggtggccaatgggaagagcttaagattcctcgcagcattcgatcaatcgtctgtctgaatctgccaagtttttctggaggactgaatccttggggaacacctggcaccaggaaagtacaagatagagacctgactgcaccatttgtcgacgacggccttatcgaggttgtcggctttcgcgatgcctggcacggtcttgtcttgcttgcccctaatggccatggaactcgtctagcacaggcccatagaatccggttcgagttccacaaaggagcagccgagcacacgttcatgaggatcgatggggagccatggaagcagcctcttcccaaggacgatgacaccgtggtcgtcgagatctctcacctccgtcaggtcaccatgctcgccagcgacccgtgcaagtcgaagagcgtcaacgacccctcgtcgccgatgtgctgtagcaaccacgacgacgacgagcgcaacagcttggaggacgaagatgagtgggaggaggggaggaagaagtttggtgcagctgatacgttcaagttccctgatgaggttgatgttgctcaccttagctgagctataagtgattcagagttcagatttcagaatgttcgctactactgttagcgatactgcctttttgggggtttatatatactactagtttattagttatcagccctgtgtagattcgaccggctgtattcgagaactgcaaaattttccgagtaatgtcatattttcatgcaacgc

SEQ ID NO: 30139 - DNA, 1377 bp, Oryza sativa
  Clone ID: UC-OSFLCYP022H02_FLI
gtgatcgccgccgccgccgcctcgggcgatggcctccgcttccggcctcgtcaacgccgccctcccggacgacctgctcgcggaggtgttccgccgcgtcgccgccgcggggggcaaggccgacctcgacagctgcgcgctcgtgtgccgccgctggcgcggcgtcgagcgcgcgtcccgccgcgccgccagggtccccgtcgacgggcccgacggcgacgccgtcgtccgctgcgtcgccgaccggttcccgggcctcgccgatgtcttcctcgacgaagctttagaagctattggttcatcttgctctgctttagaaaatttgtcacttgacaaccttaataagtgctcagacaggagccttttttccatagcaaatggatgcaagcagctgaaaagtctaattatcaaatcatcggtcaaattcacagatagaagtattgaacgtgtttcccagaactgtaaaatgctacaacacatggaaattaacatgtgccatattatggaaagtgctgcattggagcatattggacagcgatgcataaatcttctagggcttactctaaacagtctgtggattgacaataatgcatttctcggatttggtcgatgttgcttccttctcaagtctgtctgtttggccaactgttgtaaaataagcgatgaggccatatctcacatagctcaaggctgcaagaacttgagagagctttctatcatctcttgtcctcagatcggggatgaagcattactatctgtaggtgagaattgtaaagaacttagagagttgaccctccatggtcttgggaggttaaatgataccgggcttgctacggttgatcaatgtcgtttccttgagaagttagatatatgtgggtgcaatcaaattactgattatgggcttactaccattataagagagtgccatgatctagtccatctgaatataagtgataccaagaaaattggtgacaccacactagcaaaggttggtgaaggattccgaaaattgaaacatctcatgatgcttcgctgtgatgcgattagcgacgttggcctagaagatattgcaagaggatgcttgcagctggaggcgtgtggggtgttccgctgctctcaggtaactccagcaggcgtggcagccctagctggaggcagctccagattgcagaggatcattgttgagaagtgtaaggtgccagaggaggccacagggaagtgcaggatgatcaatgatcccatccttatttcttattattaagacgtgaaattgatgtcttccgggcatagctgtgaaggaaatcctttgctcgtttgagcttacatacatttaaaatgtgagaatattttaaacaatgatttcctggatgatggttg

SEQ ID NO: 30140 - DNA, 485 bp, Oryza sativa
  Clone ID: UC-OSFLCYP022H12_FLI
caggacttctggctggtggtggagcccaagttcctcgacaggttccccaacatcaccaagcgcctcaagcgccccgccgtcgcgctcgtctccaccgacggcaactggatcacttttatgaagttgaggctagacagggtcttagcagaacaatttgaagcagaaacgcttgaggaggcattggcttctaacccggtcgacttgaaatttgacaagcctgagaaatggacagctccataccccaagtatgagtatggatggtgggagccctttctacctccaaagtctagcaatggaacagcatagagatgatcggcaatccatatgagcaatgtaagatttcttccatgcaagtgcccaaatgtaatctaaatttttaacaatgcctatgtaatacttggggtgctgtgagtacagttagctacaatagttgcagagttgctgtactttctggtaataccagataagcagtggttttgttttgg

SEQ ID NO: 30141 - DNA, 1750 bp, Oryza sativa
  Clone ID: UC-OSFLCYP023A10_FLI
ctcgcgagagcagagcaggggagggggaggggaagggcgccgtcgtcctgttgttcactcctgacctgcatcacatctggagatgtctttccgcagcatagttcgtgatttcagggacagtttcgggactctatccaagcggagtttcgaggtgaaaatttcaggcttttcgggccgtcacagagggaaatccattggaccatcaagcgagctggatgacacgcccgtggtagctcagcaaagcaagtgggctggtcttcctcctgaattacttcgcgacgtgatgaaaaggctggaggaagatgatagcaattggccctcccgcaaggatgttgttgcctgcgcttcagtttgtacgacttggagagacatgtgcaaagatattgtcaggaaccctgaattttgtggaaagcttacatttccagtgtctcttaagcagcctggacctcgagatggagtaatccaatgtttcataaaaagggacaaatcaaaactaacttatcatctctacctgtgccttagctctgctgtgcttgatgagactggaaagttcctactatcagctaaaaggagccggcgaacgacacacactgactacatcatttctatggactccaaaaatatctcccgatcaagtagtggctatattgggaagttgaggtcaaatttcctcggcaccaaattcatcatctatgacacgcagcctccatacaatgctcggacactttgctcacaagaacggacgagccgtcggttctcctctaggaaagtttccccaaaagttccaacgggttgttatcccatcgtgcaggtgaattatgagctaaatgtgcttggaacccggggaccaagacggatgcaatgcgctatgcattccatcccagcatcagcagtagagcctggtggcattgtgcctggccaacctaaagagctcctcccaaggttatttgaggagtccttccgcagtatggcaacttccttctccaagtactccatcacagatcattcgacagacttcagtagttctcgcttctctgagtttgggggaggggctctgcaagggcaagagcaagagcaagatggcgatgatgtgaacaaggagaggcctttggttctccggaacaaagcaccaaggtggcatgaacagctgcaatgctggtgcctcaacttccgtggccgtgtgacggtggcttcagtgaagaacttccagctgatagctgctgcacctcagccatcttctggagccgcctctgaaccttcacaggcagggcaggctgcacaacagcaaacccaaccttttcagccatcgagttcgtcgtcgtcgtcatcatccaaccatgatacggtgatcctgcaattcggcaaagttgcaaaggacatgttcaccatggattaccggtacccattgtcggccttccaggcttttgctatctgtttgaccagctttgacaccaagctggcatgtgaataaatgagtagaatagcgatcagaaagcactccagtgtacctgaggacctaagccactccaggcgtatggtattttaggataggagaattctgtgtctagtcacttgtgtgtattcatgtgcagttctttggttgaatccttgtgttcctccggcgtgcgtgtttgttagaagtgtaaaaaggggattgaagtgtagatgtctgtaagatagaacaagatcttgtttcttgtatgttgggcttaaaaagttttgagcaagagaatgaatgaatggttgaggg

SEQ ID NO: 30142 - DNA, 1230 bp, Oryza sativa
  Clone ID: UC-OSFLCYP024A11_FLI
cggcgctgctgaggaaggccgacgcggccacggccacgctctccgccgccgccaccgccaccgccaccgtctcgtcgctgcatagttcgccggcctcccgtctctctcgaatctagagacgcacgccgagctcagagacccgatcctgctaaggtttggttggtagctcgagcagccgacggcgacgacgcacacccagttcccggcgatgtcggcggctgccaccgctgggacctactctccggcttctgccgcgggggaaaagcgtcgggagaggaaggaggagctgcggcgccacctcgccgaggacgccgactggccccgcgccgacggccgctccttccacgactgccgtcctgcatttatgcaaacaggaccaacaaccgctgcatcaggatctgcttatgcagaatttgggaagacaaaggtcattgtgtcagtgtttggaccgagagaaagcaagaaagcaatgttgtacagtgatactggtagactcaattgcaatgtgagctacacaacatttgccactcctatacgtgggcagggaacagataacaaggagtactccgcaatgcttcataaagctctggaaggcgcagtgatgttgcacacttttccaaagaccactgttgatgtttttgccttggttcttgagtctggtggcagtgatcttcccatcattatttcttgtgctagtcttgcgttggctgatgctggaatcatgatgtatgaccttgttacatcagtatctgtgtcctgttttgggaagaacataatcattgatccaacctctgacgaggaagcatggcaagacggcagccttatggtggcgtacatgccagcccgcaaagagatcacgcagctaactcttactggagagtggtctgatggcaaaatcacgaacgcggtggagctctgcatggatgcctgcagtaagctctgtgacatacttcgggagcgcttgaaagatgcttccagcttggctgagtgaataaagttttagcagcaggatgttgcaagctcaaacagatatccttagctgtacaaattttgtaggcaagggaggctgatgcctgatgtttgcgggactacatgattatatgctgattgtttcctttgcaaaacagctaattgttcagagagaaagtagcattgtctgtatgttgttttgtactactcctgattgtaatactttatagatgaagccataaaagaatgcaaaattagctt

SEQ ID NO: 30143 - DNA, 1519 bp, Oryza sativa
  Clone ID: UC-OSFLCYP024D07_FLI
cacagcgatgcggccccgccgcagagacgcctccgcctccgactccgacgacgccgacgcgcgctcctcctcccctcgcccgcgccgccgccccgaccccgcgccgccgcgcgcgcccctcctcagcagcctcgtggtcaagctgcagccgcgggggccggaggaggagcacggcgcggccgaccggctggagcgccggcgcgatcccccgcccgccgcacgccgccccccgcgggagccctcgcctccagggttcatgcgccgccgggagtcgcgccagacgccgccgccgcagcagccgcacgcggcgccgaggcgccgcggcggcagcgcgtcccctcctccccctcgccgccgcgggagccccctggggtttcggcctaggtatccccagccccgtgaggagccacaaggatatcacccgcactcaggttccatgatacctccacgtggccgcggagtagaaagcagcaatttcaatgacggttcacgttatggatatgagctggcaagtaaaggaggtgaaaggttacaatatgtttctcctcccaatggaagaggaagaccacacaggagggatggtggtgctcctggaaaagatttcatcttcattaatggagaatatgtgcacaggaatgacccaaacttgtctccaagagaaggtgactggatatgtcagaatcccacttgcggaaatcttaattttgctcggcggtctcactgtaacaactgcaacaaggaacgctatgcacctgccatgtacaagtccagctacagtcctgacagacgccagttcaactctccaccacaagggccaccgagtagggttattggtccaccgagtggccgtgatctgccaagggagaaacaaaggtatagatcaccaccgcgtggttggggtatggtccgaccggatgatcatagggactattctacgcagttgtcccaagatcgtccaggacgaatggcagaccctatgcacagggacaggatcaacttcggggatgaacttccacaccgacagcgtgggaagtttgactgggatggctataatcaccgggagcatccacgcgatggaccatatcttgaccgaagagaaccacggttggggtctcccaggggtaactggggacaagctgtacgggacagaagtcattcacccatgcgtaacaagcccatgaacaggggactagacttacgggagagaagccgttcaccctttcgggacaggcccttgaacaaagcctccattggaagaggtggacctgaccgagactatgttcatccatttgacacccatgggcgacctcataatttgggcaatagccgtggccatggttacaggcaggaggatgatctgtttcctattcgcaatcaaggtgaccagcgtgtcctttcccgtcattggaatggaatccactgaaatgtaatatctttcagctgggtacagattcttcgtgttgataggctatctggaaaagcgaatctaataaaaattatctcgatgcttgaggactcc

SEQ ID NO: 30144 - DNA, 2001 bp, Oryza sativa
  Clone ID: UC-OSFLCYP029G06_FLI
caacctccctcctcctcctccacctcgtcgtcgtctccgccgcgctgtctcctcctctatataccctcacccacactcgcacgcgcaaacccaacccccgcatatgcttaactccccaacccaaaccctcctcctcccccatgggcgcgtgcttctcatcccacactgcgaccgccgccgccgatggcgggagcgggaagcggcagcagcggaagggggatcacaaggggaagctccccgatggcggcggcggcgagaaggagaaggaggcggcgcgggtggagttcgggtacgagagggacttcgaggggaggtaccaggtcgggaggctgctcggccacggccagttcggctacaccttcgccgccaccgaccgggcctccggtgaccgcgtcgccgtcaagcgcatcgacaaggccaagatggttcgccctgttgctgtggaggatgtaaagagagaagtgaagattcttaaagaacttaaaggccatgagaatattgttcacttctacaatgcgtttgaagatgactcatatgtatatattgtgatggaactatgtgagggtggtgaactattggaccggattttggcaaaaaagaacagccgttatagtgagaaagatgctgcagtggtggtgcggcagatgctcaaagtggcagctgagtgccatctgcatgggctagttcaccgagatatgaagcccgagaacttccttttcaaatcaaccaaggaggactcacctttaaaggcaacagattttggtctgtcagacttcataaaaccagggaaaaagtttcacgatatagttggcagtgcctattatgtagcaccagaagttttaaaacgacggtctggccctgagtcagatgtttggagcataggagtcataacttatattttgctctgtgggagacgccctttttggaataagacagaggatggcatattcagagaggtactaagaaacaagcctgattttcgtaagaagccttggccaggcatcagttcaggtgctaaagatttcgttaaaaagttacttgtaaagaacccaagggcaagattaaccgctgctcaagctctctcgcatccatgggtaagagaaggaggagaagcatctgagatccctgttgatatatctgtattgtccaacatgcgtcagtttgtcaagtacagccgttttaagcaatttgctctgagggctttagcaagtacactaaaagaggaagaactagcagatctgaaggaccagttcgatgcaattgatgttgataaaagtggatcaattagtattgaggaaatgcggcatgcccttgcaaaggatcttccttggagattgaagggcccccgtgttctcgagattatccaagcaatcgacagcaacactgatggtcttgtggactttgaagagtttgtagcagcaaccctccatatacatcaaatggctgagcttgactctgaaaggtggggcctacgctgccaggctgctttcagcaaatttgatctggatggtgacggatacatcactccagatgaactcagaatgcacactggcttgaagggttccatcgagccattgctggaggaggccgacatcgacaaagacgggagaataagcttgtcggagttccgcaagctcctgcggacagcgagcatgagcaaccttcccagtccaagaggacctccaaatccacaacccctgtgaacgtcggtaagaaccgagatgagacgtcgtaaattagtcttgtaaaggttgtcttgttcctgtccgcgtgccatgtgatgttgagggtgtcttgagtttttagcatccaggttccgtgtgcagcatgcagataaagtttcggtgtagtacggagtacatacatatttttttcaaaaaaaaatgttacaagcagaaatgctgttctagtctcccattctcctccttgtacataattctatatatgtatgatttgattgcacgtattcatcgcaataaagttgcctgggattgcatgatc

SEQ ID NO: 30145 - DNA, 641 bp, Oryza sativa
  Clone ID: UC-OSFLCYP032A09_FLI
gtgcaacaaggtttgctcttgagaatcaggctgttaacgaagccaccttccgttgtccagatgagctagggtggaaacctcagagggttcctattgtaccatcggatggagccatctcacggacaagagagactacgcttccggtaaatgagttgaccaagtcactccggaagacaggctacgatgtaatgccatcagacgatgctggtcggtttgtatgcaactatgtgtattatcattctcttcggttcgcagagcaacacggcatcaaatctctgtttgtacatgtgcccctgttcttgacgatcgatgaggaggtccagatgcattttgttgcttcccttcttgaagctcttgctgtcttgaactagggaaaaagaaataacaattcaagattggaagcaggctgaataaaactgtattgtcatcgatgatattggtcttgctccaaagggtgtatttatgaggaaattggctgcttagagtgtgttcttggtcagatgccacttgtattccactacatcacatgttctaaacatgcctgaaaacaaacttggttttcaataaaaatcgacagatcgtcgaaatggatgcattgcatccagtacggttgttgatgctgcttttgcatttctgatgcc

SEQ ID NO: 30146 - DNA, 907 bp, Oryza sativa
  Clone ID: UC-OSFLCYP036C07_FLI
ctcgcaacgtcgtcggcatcatcggcaatgtcatctccttcggcctcttcctcgcccccgtgccgacgttctggaggatctgcaagaggaaggacgtggaggagttcaaggcggacccgtacctggcgacgctgctcaactgcatgctctgggtgttctacggcatccccatcgtccacccaaacagcatccttgtcgtcaccatcaacggcatcggcctcgtcgtcgagggcacctacctcttcatcttcttcctctactcccccaacaagaagcgcctgaggatgttggctgtgttgggcgtggagttggtgttcatgctggcggtgattctgggcgtgctgctgggcgcgcacacgcacaagaagcgctccatgatcgtcggcatcctctgcgtcttcttcggctctatcatgtacttctccccgctcaccatcatggggaaagtgataaagacgaagagcgtagagtacatgccgttcttcctgtcgctggtgtgcttcctcaacggcgtttgctggacggcctacgcgctcatccgcttcgacatctatgtgaccatccccaacggccttggtgccatcttcggtgccatccagctcatcctctatgcctgctactaccggaccacacccaagaagaccaaggccgccaaggacgtcgagatgccctccgtcatctccggtcccggtgctgctgccaccgccagtggcggcagtgtcgtctccgtcaccgtcgagcgataaattaagtaaaattaaattaattagcttgtgttaattttggtggtagttttttcggctcgatatatatgatctgagtgagagtgtaatatttacctatatagttgaagtttgatgagacaatacaatgatacaatatcacccgccagtggcggatttaggct

SEQ ID NO: 30147 - DNA, 1838 bp, Oryza sativa
  Clone ID: UC-OSFLCYP047H06_FLI
gctagctaccagtccaaccaacaccaacaactgcgcgagtgagcgcgcggctattgcgtgccacggcgtgccgttgagcgatggctggaggtgggttccccgtggccggcggcgccccgccgggcgactatggcggcggcataaccttctccgtcgtcgtcacctgcctcatggccgcctccggcggcctcatcttcggctacgacatcggcatctccgggggagtgacggcgatggagtcgttcctggcggccttcttcccgggggtgctccggcggatggcggcggcgcggcgggacgagtactgcgtctacgacagccacgtgctgacggcgttcacgtcgtcgctgtacctggccgggctggccgcgtcgctggcggccggccgcgtcaccagggcggtcgggaggcaggccgtcatgctcgcgggcggggcgctcttcttcgccggcgccgccgtcaacgccgccgcggtcaacatcgccatgctcatcgtcggccgcatgctgctcggcttcggcattggcttcaccaaccaggcggcgccggtgtacctggcggagacggcgccggcgaagtggcggggtgcattcacgacggggttccagctcttcctcggcatcggcaacctgacggccaacctgacaaactacggcgcggcgcgcatcccgcggtgggggtggcgtctctccctcggcctggcggcggcgccggcgtccgtcatcctcgtcggcacgctgctcatctcggacacccccagcagcctcctcgtgcgcgggcgggtggagcaggcgcgcgccgcgctccggcgcgtgcgcggcgccaaggcggacgtggacgccgagctggagggcgtggcgcgcgcggtcgaggcggcgcgcgccaacgaggagggcgcgtaccgcaggatcctctggaggcagcaccgcccccacctggtgatggccgtcgccgtgccgctgctccagcagctcaccggcgtcatcgtcatcgccttcttctcgccggtgctcttccagacggccgggttcggcagcaacgcgtcgctgatgggggccgtcatcctcggcgccgtcaacctcggctccaccctcgtctccatcgccacggtggaccggtacggccgccgggtgctgttcctgaccggcggcctcgtgatgatcgcctgccaggtcgcggtggcgtggatcatggggtcgcagatcgggcgggacggcgagtcggcgatggcgaggcgctactccgtggcggtgttggcgctgacgtgcgtcttctcggcggcgttcgggtggtcgtggggcccgctgacgtgggtgatccccggcgagatattcccggtggagatccggtcggcggggcaggggatcagcgtggccgtcaacctcggcgccaccttcgtgctcacgcagacgttcctcgccatgctgtgcagcttcaagtacgccacgttcctctactacgcggcctgggtcgccgtcatgaccgccttcgtgtgggcgttcctgccggagaccaagggggtgccgctcgaggccatgggcgccgtctgggcgcggcactggtactggcggcgcttcgtgcagccgccaccggcggccaaggacgccatgctgccggaggtcctcgtgaactgacaacgtatactgtacgtgttctctgccttgaccgtgtggcggcgctgcattaattcgtgggaagttgtgtaaaattaaatctggtttctggtttaacggttcctacatggttgaataccatcccgtgtttgtcctcttgcgaaaaatttgtattgtttacatatgaacaaatccaaagtccgtgttctattttagtttcttacc

SEQ ID NO: 30148 - DNA, 1134 bp, Oryza sativa
  Clone ID: UC-OSFLCYP054A07_FLI
ggcgatttctcatctgaattgcaggccaattccagttgagtttctccacagaccacagatatggcttccggcaggatagctctgctctgccttcttggcttgctgctggtagcagcctcaccggctgccattgctgccaaagatgacaaaatcttctaccagattactttcatgtggccgggagcgtactgcgcgcagacgaaggccggatgctgcatgccgaagaccgacgtcgcgccggcgtccgacttctacgtcgccggcttcacggtctacaacgccaccaccaactcttccctgtccagctgcagcaacactccattcgacatgaaccaaattggggatgtcacgaggctgatgcagtactggaacaacatcaggtgccccagcaagagcggccagaagggctggaagaacgcgtgggagacgtccggcgtctgctccgacctcaccgagagcgcctacttcgacaccgccctcgccctccgcgacaagatcaaccccctttctcgcctcgtcagcaacggtattaagccggactttgggctgtacagcgtgaagaagatcaaggaggtgatcgaggaggggatcggcgcgccggcgctgatccagtgcagcaagggcccgttcaacaagttccagctataccagatatacgtctgcgtcgcggaggacgccaagacgttcgtggagtgccccagcccgaggaagccgtacacctgcggcgacgacatcctcttccaccctttcaagaagtggatgctcaagaccaactccaccaaatcctacgccgccgccgacgccatcgaccagctgctcgaagcggtcatggaaatctgagctcgatcgatcgatcgatcaagaagacaaattaacccttgttgtgatatgcgatttgtgcgtgtgtgttgtctgtttcgatcgtgatgttttctgcgtgtttatttcgtgatgttctctcatcgcgcccgcgcgcggttgggtacgatccgggacacctacgtagcactgaatccgtctctgtgatgcattcagagaataagtccgaatatgtgcggccttgttaatgttttcatgaataactcgtgtagtgggattactttgtcatcggacatttcatgatttccgatgcac

SEQ ID NO: 30149 - DNA, 648 bp, Oryza sativa
  Clone ID: UC-OSFLCYP071A08_FLI
tgaagttttgcacattgaactgcgaaaatgggcagatatcatggtgattgcgccattatcagctaataccctagctaagattgctggtggtttatgtgacaacctcttgacatgcatagtgagagcatgggactacagcaaaccactctttgttgccccagctatgaacaccttcatgtggaacaacccgttcaccagtcgtcatcttgagacaatcaacctgctaggtatatctttggtccctcccattaccaaaaggctggcctgtggtgattatggtaatggtgcaatggctgagccttctgtgatcgattccaccgtcaggcttgcttgcaagagacagccacttaatacaaatagttcacctgtggttcctgccggcagaaacctcccatctagctgatgcggcaactattctgttcaagattaaactctggacctagttttctatggtaaagagtacttcgtgtcacaaaatgaaatgttaagtgatgtctatgtcggccaacatagcacctttattggccagttgttgtactactattagtgatatggtaggacgtggagattggagaaaggctattgtcccagcactttaatgttgcttttccaaatttcttgtgacataatgctaaggtgctgatgaat

SEQ ID NO: 30150 - DNA, 2054 bp, Oryza sativa
  Clone ID: UC-OSFLCYP077G12_FLI
ccccgcgcagcagctcagccgtcgctaccaccacctcaagctcccgcctcgcgtgcagctagctgagagcgagcgctcgccatggagaacggcgccggcgccggggacgacgagtacacgcgcgacggctccgtcgacctccgcggcaaccccgtcctccgctccaagcgcggcggctggaaggcctgctccttcatcgtcgtgtacgagctgttcgagaggatggcgtactacgggatcgcgtcgaacctggtgatctacctgacggagaagctgcaccagggcaccgtggaggcggccaacaacgtcaccaactggtccggcaccgtcttcatcacgccgctcatcggcgccgtcgtcgccgacgcctggctcggccgctactggaccttcgtcgccggctccgccgtctacctcatgggcatgctgctgctcacactggccgtctccgtgccagcactgaagccgccgccgtgcgacggcggcggcggcgccgcctgcccgcgcgcgtcggcgctgcagctgggcgtctacttcggcgggctgtacaccatcgcgctcggccacggcggcacgaagccgaacatctccaccatcggcgccgaccagttcgacgacttccacccgccggagaagctgcataagctctccttcttcaactggtggatgttcaccatcttcctcggcatcctcttctccaccaccgtcctcgtctacctccaggacaacgtcagctggaccgtcggctacggcatccccaccctgggcctcatggtctccgtcgccgtcttcctctccggtacgccgctgtaccgccacaaggtgccccagggtagccccctcgccacgatggggagggtcgtcgccgccgccgtgtggaagtggcgcgtcccgctccccgccgactccaaggagctccacgagctcgagctcgagcactacaccacccgccgcgggttccgcatggacgcgacggtgtccatggcgttcctgaacaaggcggcggtgaagccgggcgaaggaggaggaggatcggtggcgcggctgcccgggtggacgctgtgcacggtgacgcaggtggaggagacgaagcagatcgtgaagctggtgccgctgctcgccacaatggtggtgccgtgcacgctggtggcgcaggcgggcacgctgttcgtcaagcagggcgtgacgctggaccgccgcatcgggaagttccacgtgccgccggcgagcctcggcgcgttcgtgacggcgacgatgctcatctgcatcgtgctctacgaccggttcctcgtccccgccgtgcgccggcggaccaagaacccgagggggatcacgctgctgcagcggatcagcctggggatgctgctccagatcgtgacgatggtggtgacgtcggttgtggagagccagaggctggggtacgcgaggaggcacgggctggtcgccaccggcgggcagctgccggtgacgatcttcatcctgctgctgcagttcgtgctgctgggcgtcgccgacgcgttcctggtggtggggcagatcgagttcttctacgaccaggcgccggagagcatgaagagcctcgggacggcgatgtcgctgacggcgtacggcgccgggaacctgctgagcagcgccatcctcgcggccgtcgagcgggtcaccggcggcggcaaggggaggacgccgtgggtgaccaacaacctcaacgcctcgcgcctcgactactactacgcgttcctcgccatcctcgccgccgcgaacctgctggcgttcgtcgtgctcagctgcaagtactcgtaccgcgtcgagtccacggagaccatcgacgtcgacgtcgccatggacgacgtcgcgcagggcggcggcgtggtgacggtcaaatcagaggcagccccaatggcatgacagcacttccggaattgtatcctgtctattcccgtctggattctgaagttgcaatgtaatgaagaaacggtgatgatacatattagcactttaaaaatgttaaatgaaaattttatttactcgttctgtaaaggaacggtaatacggac

SEQ ID NO: 30151 - DNA, 2227 bp, Oryza sativa
  Clone ID: UC-OSFLCYP081G08_FLI
aacatttccttgtccctcgccttcctcgcctcgcctcgcctcggctctcacacgacgcctcttcctctcgctactactagctcaagctaagctagcaagagcattccttgggctttttttcttgttcggggttgagaggcaatggcggtgatgactgatgtgtcgaccaccgggacggcactccggaccccggcggcgggggcggtgaaggagggcgacgtcgagaagctccggttcatcgacgagatgaccaccaacgtcgacgccgtgcaggagcgcgtcctgggggagatcctcggccgcaacgccagcacggagtacctgaccaagtgcggcctcgacggcgccaccgaccgcgccgccttccgggccaaggttccggtggtgtcgtacgacgacctgcagccgtacatccagcgcattgcgaacggggaccgctcgccgatcctgtccacccaccccgtctccgagttcctcaccagctccggcacgtcggccggcgagcgcaagctgatgcccaccatcatggacgagctcgaccgccgtcagctgctctacagcctcctcatgccggtcatgaacttgtatgtgcctgggcttgacaaggggaaggggctctacttcctgttcgtcaagtcggagacgaagacgccgggaggcctgacggcgaggcccgtgctgacgagctactacaagagcgaccacttcaagaaccggccgtacgacccgtaccacaactacacgagcccgacggcggccatcctctgcgccgacgcgttccagagcatgtacgcgcagatggtgtgcggcctgtgccagcgcaacgacgtgctgcgcctcggcgccgtgttcgcctccggcctcctccgggccatccgcttcctccagctcaactgggagcagctcgccgaagacatcgagtccggcgagctcacccctcgcgtcaccgacccgtcggtgcgcgaggctgtcgccgccatcctcctcccggaccccgagctcgccaagctcatccgcgccgagtgctccaagggcgactgggccggcatcatcacccgcgtgtggccgaacaccaagtacctcgacgtcatcgtcaccggcgcgatggcgcagtacatcccgaccctggagttctacagcggcgggcttcccatggcgtgcaccatgtacgcgtcatccgagtgctacttcggcctcaacctccgccccatgtgcgacccctccgaggtgtcctacaccatcatgcctaacatgggctacttcgagttcctccccgtggacgagaccggcgcggcttcgggcgacgccacccagctcgtggacctcgcccgcgtggaggtggggcgcgagtacgagctggtgatcaccacctacgccgggctgaaccggtaccgcgtcggcgacgtcctccgcgtgacggggttccacaacgcggcgccgcagttcaggttcgtgcgccgcaagaacgtgctcctctccatcgagtccgacaagaccgacgaggccgagctgcagcgcgccgtggagcgcgcgtcggcgctgctccgcccgcacggcgcgtccgtggtggagtacaccagccaagcgtgcaccaagcgcatcccgggccactacgtcatctactgggagctcctgaccaagggcgccggcgccacggtggtggacgcggacacgctgggcaggtgctgcctcgagatggaggaggcgctgaacacggtgtacaggcagagccgcgtcgcggacggctcgattgggccgctcgagatccgggtcgtccgcccgggcacattcgaggagctcatggactacgccatctcccgcggcgcgtccatcaaccagtacaaggtgccacgctgcgtcacgttcccgcccatcgtcgagctgctcgactcgcgcgtcgtgtccagccacttcagcccggcgctcccacactggactccggcgcgacggtccgaatagtcggtcaaatccccacctcgtcgttggaccgtgtccaagaatctgaagtagtagaagccggatgcctccacctaaaaacacttatctgttatttttggaattaattttgatggttgctgtcaactctgtcagttagtggcaagagggtacctctgatgtgagggagagaactgcagaacgaacggaagaaagtgttgatgtaagaggttaccactagtagtactgtttgtctgtatcaggaatgtgattataatttaacctgtcctcc

SEQ ID NO: 30152 - DNA, 1075 bp, Oryza sativa
  Clone ID: UC-OSFLCYP099G03_FLI
cctctcctttgttcttcaacgcaaacttagtctgaccttgtgcacctgcaaataatgcatagcacttacacagatacaacctactatatcacttgtggaccatttacaagaacatatacggttctcggaaaactagcccaagtggagataagcataatagacaccatccacccaaggaacaatggatgaaacccaagaagatcatacaaatcacacgactttgccagattccaaccaagtggatggcacatcattttcccaattagacaacaagcgcaagccttttccatgaacgaaaggaatcattctcaggcaactaaatattctagtccatccccctttcactagagtactttctccattttattttcttacttttcgagtgattccgtcagacaaatcaacaagaaagtggctgccaaaccagtgatctagtccaataccaccagacctcaagctaagaaaacgacagcgccactgctgcttcttccacagaagagcaagcagacagactaacagttcaaaacaacatgaacagcagcgaaatgactagatctgcagttcaacgggggcatactgcatctaataggtaaaaaaacgatagatcgatgaaccgaattagctcgaaaggggaacagctatgcgtgcatatttcgtgtgaataatcaaatacaggcttcctccacgcagatctcgagtcttcactacagtccccaacacgatctccagtaaacatggcaagaaaataaaacgaggtgtgtttagttccaaagtttttttccaaacttctaacttttcccatcacatcaacctgtcatacacacacaaactttcaatcacatcgttgcaattttcaaccaaacttacaacttcggcgtgaactaaacacagccacatctcacagtcaccaagaaccctaaactttcgcatcagatcagacctcgaaccccacacagccataccctccaaccctagatctaacacgattccaaacaaaaacaacagctgcagatccgtaccgagcaatctcaaatcgaagtgcaactgcgggaaagatcaagaacgaacactccac

SEQ ID NO: 30153 - DNA, 692 bp, Oryza sativa
  Clone ID: UC-OSFLCYP110F05_FLI
gagagagaggaagagattgcagtgagtgagtgagtgagtgaagcagccatggcggcggcggcgagggcaacggcgcgggtcgggcttgcgctgctgctcgcggtggtgggcgtcggcgcgcaggactacgacttcttcttcctggtgctgcagtggcccgggtcgtactgcgacacgaagcagagctgctgctacccgcgctccggcaagccggcggccgacttcggcatccacggcctctggcccaaccgcgacgacggcagctacccgcagaactgcgaccctgacagcgagttcgacccctccaaggtgagcgacctgctggggagcatgcgctcggagtggccgacgctggcgtgcccgagcaacgacggcatccggttctgggcgcacgagtgggagaagcacggcacctgcgccgcggcggcgctcggcgacgagcacggctacttcgaggcggcgctccgcctccggtcgcggctgcccgtgctcgccgcgctgcgcgacggcggcgtgtcgcccgacggcggctactacacgctgtcccagatcaagggcgccatccagcgcggcgtcggcgccgagccgttcgtggagtgcaaccgcgacgagtccggcaacagccagctgtaccagctctacttctgcgtggacgccgccggcgagcgcttcgtcgactgccccgcctcccc

SEQ ID NO: 30154 - DNA, 3941 bp, Oryza sativa
  Clone ID: UC-OSFLCYP112B04_FLI
tctcctcctccttcccctgcgcctcctccaccgcccgtgtcgccgccgcgcgcgtctatcccctcgccgccgccgccgccgccgccgtctacgccgcgtgaggtccggattggttgaaaggctgatcgaggtgcttttattgctaactggagcagtttgtgtagtttctttctttctctttgagaattctctcagtttcttgggcaggctcttgagctaccaagtatgtcagcttcaaatgagaagtggattgatgggctccagttctcatcactgttctggcccccaccacaggattcacaacaaaaacaggcacaaattctggcctatgttgagtactttggccagtttacagctgacagtgagcaattccctgaagatatagctcagctaattcaaagttgctatccatcaaaagaaaagcgccttgtagatgaagtattagcaacttttgttcttcatcatcctgagcatggccatgcagttgtgcatccgattctgtcacgcatcatagatgggacactcagttatgatagaaatggtttcccgttcatgtccttcatctctttatttagccatacttctgagaaagagtactcggagcagtgggccttggcctgtggagaaattcttagagttctaactcactacaacaggccaatcttcaaagttgatcaccaacatagtgaagcggaatgtagcagcacatctgatcaggcctcatcatgtgagtctatggagaaaagggctaacggttctccaagaaatgaacctgaccggaagccattgaggccactatctccttggatcacagacatattgcttgctgcacctctgggtattagaagtgactattttagatggtgtggtggagtcatgggaaaatacgcagctggtggagaattgaatcctccaacaactgcttacagccgaggatctgggaagcacccacaacttatgccatccacgcccagatgggctgttgccaatggagctggagttatactaagtgtctgtgatgaggaagtagctcgttatgagacagcaaatttgactgcggcagctgttcctgcacttctattacctccaccgaccacaccattggacgaacatttggttgcggggctccctcctcttgaaccatatgctcgcttgtttcatagatactatgcaattgctactccaagtgctacccaaaggttgctttttggtcttctcgaggcaccaccatcatgggccccagatgcacttgatgcagcagtacagcttgttgaactccttagagcagcggaagattacgattctggcatgcggcttccaaagaactggatgcatcttcatttcctgcgtgctattggaactgcaatgtcaatgagagctggtatcgctgctgatacgtctgctgctttacttttccgaatactctcccaaccgacattactttttcctccactgagacatgccgaaggagttgaactccatcatgagccactaggtggctatgtatcatcgtacaaaaggcagctggaagttcctgcatctgaagccactattgatgccactgcgcaaggcattgcttccatgctatgtgctcatggtcccgatgttgagtggagaatatgtaccatctgggaggctgcgtatggtttgctacctctgagttcatcagcagttgatttgcctgaaattgttgtagctgctccacttcagccacctactttgtcatggagcctatacttgccattgttgaaagtatttgagtatttacctcgtgggagtccatctgaagcatgccttatgagaatttttgtggcaacagttgaagctatactgagaagaacttttccatcagaaacctctgaacaatccaggaaaccaagaagtcaatctaagaaccttgctgttgctgaactccgaacaatgatacattcactctttgtggagtcctgtgcttcaatggaccttgcgtccagattactatttgtagtattaactgtttgcgtcagtcatcaagctttgcctgggggaagtaaaaggccaactggtagtgataatcattcctctgaggaggtcacaaatgattcgagattaaccaatggaagaaacagatgtaagaagagacaaggaccagttgctacattcgactcatacgttctagcagccgtttgtgccttatcttgtgagctccagctgttcccttttatttccaagaatgggaaccattcaaatctgaaggactccataaagatagtcatacctggaaaaaccactggtatcagtaacgagctacacaatagcattagctcagcgattcttcatactcgtagaatacttggcatcttggaagctctgttctccttgaagccatcatctgttggtacttcatggagttatagttcaaatgagattgttgcagcagctatggttgctgctcatgtttctgagttatttcgtcgatccaggccatgcttaaatgcactgtctgcgctgaagcaatgcaagtgggatgctgagatttctaccagggcatcatccctttaccatttgattgacttgcatggtaaaacagtgacctccattgtgaacaaagctgagcctctagaagctcacctgacccttacaccagtaaaaaaggatgaacctcccattgaggaaaagaacattaactcatcagatggtggtgcattggaaaaaaaggatgcttcaagatcacacaggaaaaatggttttgcaagaccactcttgaaatgtgcagaagatgttatactaaatggtgatgtcgcaagtacttctgggaaagccattgcaagtttacaggtggaagcttctgatttggcaaacttcctcaccatggaccgaaatgggggttacagaggttctcaaactctcctaagatctgtactgtcagagaagcaggagctatgcttctctgttgtctcattgctctggcagaagctcattgcatctcccgaaatgcagatgtctgcagaaagtacatcagctcatcagggttggagaaaggttgtggatgcgctttgtgacgttgtttcagcctcaccgaccaaggcttcagctgctatcgttctgcaggccgagaaggacttgcagccctggattgctcgagatgatgagcaaggtcagaagatgtggagagtcaaccagcgaatagttaagctgatagcagagcttatgaggaaccacgatagcccagaagcattggtgatccttgctagtgcttcagatcttcttcttcgagcaactgatggaatgcttgttgatggtgaagcttgtactttaccacaattagagctattggaagtaaccgccagagcagtccatctcatcgtcgaatggggagattcaggtgtatccgtcgctgatggcctctccaatctgctgaagtgccgtctatcaaccaccatccgctgtctttcgcaccccagcgcgcatgtccgtgcactcagcatgtccgtccttcgcgacatcttgaacagcggacaaataaactccagtaagctcatccaaggggaacaccggaatggcatccagagcccaacctaccagtgcttggcagcaagcatcatcaactggcaagccgatgtggagagatgcatagagtgggaagcccacagccgccgcgccaccgggctgacgctcgccttcctcaccgcggcggcgaaggagctcggctgcccactcacttgctgacaaggccacaccatgactgtcactgcaagcagctgctgtaggatcagcgagtaggaaaggatgacttgccggtcagtttcctgagatgtgatttaagactgatattagctgatgttcccaagcatgatacggggcttgctcccaagatgtgatttttactttacttttggttaatgtgctaccgctgacattagatgttcaagcatatgaaaactgcttgtgctgtaacttgt

SEQ ID NO: 30155 - DNA, 1745 bp, Oryza sativa
  Clone ID: UC-OSFLCYP126G11_FLI
ctcatctgaccgcagtttagctccctcttagacagaggccagagggagaaagagagagagagaggagaaggctgagactgaacattcaagatggccggaggtgtcatcgtggcgaacgacggtgatggctccgccgtggaccacggcggacggctgacgttctcggtggtcatcacctgcctcgtggcggcctccggcggcctcatcttcggctacgacgtcggcatctcaggcggcgtctcgacgatggagccgttcctgcggcggttcttccccggcgtggtgaggaggatggcggaggcgaggcccgggaacgagtactgcgtctacgacagccaggcgctgacggcgttcacgtcgtcgctgtacgtcgccgggctggtggcgtcgctcgtggccagccgcgtcaccagggcgatggggcggcaggccgtcatggtcatgggcggcgcgctcttcttcgccggcggcgccgtcaccggcttcgccgtgaacatcgccatgctcatcgtcggccgcatgctgctcggcttcggcgtcggcttcaccaaccaggcggctcctctcttcctcgccgagatggccccgacgcggtggcgcggctcgctcacggccgggttccagttcttcctcgccgtcggcgtcgtcatcgccaccgtcaccaactacttcgcgtcgcgcgtcccctgggggtggcgcctctccctcggcctcgcgggggcgcccgccgtcgtcatcttcctgggcgcgctcttcctcaccgacacgcccagcagcctcgtcatgcgcggcgacacggcccgcgcgcgcgccgcgctgctccgggtgcgcggggctggcgccgacgtggaggcggagctgaagggcatcgtgcgcgccgtggaggtggcgcgccagggggaggacggcgcgttccggcggatggcggcgaggcgggagtaccgcccttacctggtgttcgccgtggccatgcccatgttcttccagctcacgggcgtcatcgtgatctccttcttctccccgctggtgttccgcaccgtcgggttcggcagcaacgccgcgctgatgggcaacgtcatcctcggcgccgtcaacctcgtctgcctcatgctctccaccctcgtcatcgaccgctacggccgcaaggtgctcttcatggtcggcggcgccatcatgatcatcgcccaggttggggtggcgtggatcatgggggcgcaggtggggaagaacgggtcggaggcgatggcaaggccgtacgcggtggcggtggtggcgttcacgtgcctgcacacggcggggttcgggtggtcgtggggcccgctggggtgggtgatccccggcgagatattcccggtggacatccggtcggcggggcaggcgatgaacgtgtccatcggcctcggcctcaccttcgtgcagacgcagtcgttcctcgccatgctctgccggttcaggtacggcaccttcgcctactacgccgcgtgggtcgccgtcatgaccgtcttcatcgccgtcttcctgccggagaccaagggcgtcccgctcgagtccatggccaccgtctgggcgcgacactggtactggaagcggttcgcgcgggagcaaccaaagacgagcgccgacgaaccgaccgggacgtactgatgtttcacgatgtgtagatgtacttaattctgtggagtacatgtcttgtataacttttgaatcatgatacttggtcctagttcactcgtctgtttcaatcg

SEQ ID NO: 30156 - DNA, 1886 bp, Oryza sativa
  Clone ID: UC-OSFLCYP143F07_FLI
gtttcgcggatcacctgtggtcctgtgcagccgtaccgtacgcctctgctttcctctcaccccaccgcgccaccggcgagcggcccgcgagggaggaggcgctgccgccgcctctgctgatgctgatgatgctaggggcggcctcccagtggatcctggccgccgccgcggcggcggccgtggcggcgctgctgtggctggccgtgtcgacgctggagtgggcctggtggacgccgcggcggctggagcgcgccctccgggcgcagggcatccggggcaaccggtaccgcctcttcaccggcgacgtgccggagaacgtccggctcaaccgggaggcccggaagaagccgctgccgctcggctgccacgacatcatcccgcgcgtgctgccgatgttcagcaaagccgttgaggagcacgggaaaccatcattcacttggtttggcccaacgccaagagtgatgatttcagaccctgaatcaataagggaagttatgtctaataagtttggccactatggcaaaccaaagcctacccgtctcggaaagttgctagcctccggagttgtaagctatgaaggcgagaaatgggcaaagcaccggagaattctgaatcctgcctttcaccacgagaaaataaagcggatgctgccagttttttctaactgctgcacggaaatggttacaagatgggagaattcaatgtctattgaaggaatgtcagaggtagatgtttggcctgagttccaaaatcttacaggagatgtcatatcaaagacagcattcggtagcagctatgaggaaggaaggagaatttttcagctgcaagcagagtcagccgaacgcataatacaagcctttcggacaatttttataccaggatattggttcttaccaactaaaaacaacagaaggttgagagaaattgaaagagaggtcagcaaacttctacgaggaataattggaaagagagagcgggctattaaaaatggtgaaaccagtaatggtgacttgttgggcttattggtggagtcaaatatgagggagtcaaatgggaaagcagaactaggaatgactacggacgaaattattgaggaatgcaagctattttattttgcaggaatggagacaacatcagtattgctcacttggacattaattgtgctaagtatgcacccagagtggcaagagcgagcaagagaagaagtgctacaccactttggaagaaccacaccagactatgatagcttaagtcgtctgaagattgtaacaatgattctgtacgaggttcttaggttgtatccgccagtggtgttcttgaccagacgaacatacaaggaaatggagctcggcggcatcaaatatcccgctgaagtgacccttatgttgcccattttatttattcaccatgatcccgatatttggggaaaagatgcaggtgaattcaatccagggaggtttgctgatggcatctccaacgcaacgaagtatcagacctctttctttccatttggatggggtccccgaatctgcattggccagaactttgcactattggaagccaagatggctatctgtacaatccttcagcggttctcctttgagctttcaccatcgtacatccacgcaccattcactgtgataactctccacccacagcatggtgcacaaattaagctgaagaaaatctaaccatgctgctcacttgctcggattggtcaaggagaaacaagtcagtttgataagttatatatctttctcttttgtaaacagaggtagtctacaggtttcgtattcgaactagaaagattttacttattgatatactagcttttatgcagataaaaacatggtgagtgaaataatattccgagtttttaatacaat

SEQ ID NO: 30157 - DNA, 864 bp, Oryza sativa
  Clone ID: UC-OSFLCYP159C11_FLI
caaaaccaacgcgaagctctcgtcgcgcacaaccaactcgacaccgcggcgaggcgaaccaacgcgcggcgtgggcatggggaggtcgccatgctgcgagaaggcgcacacgaacaagggggcgtggacgaaggaggaggaccagcggctgatcgcctacatcaaggcgcacggcgagggttgctggcggtcgctgcccaaggcggcggggctcctccgctgcggcaagagctgccgcctccgctggatgaactacctccgccccgacctcaagcgcggcaacttcaccgacgacgacgacgagctcatcatcaagctccacgcccttctcggcaacaagtggtcgttgattgcggggcagctgccggggaggacggacaacgagatcaagaactactggaacacgcacatcaagcgcaagctcctgagccggggcatcgacccgcagacgcaccggccggtcagcgccgggagcagcgccgccgcggcgagcgggctgaccacgacggccagcaccgccgcctttccgtcccttgcgccggcgccgccgccgcagcagcacaggctacacaacccggtgcacgccgcggcgccgagcaatgcgagcttcgccaggtccgcggcgtccccgccgtcggaggacggccacagcagcagcggcggcagctcggacgcgccgcggtgccccgacctcaacctcgacctcgacctcgacctgtccatgagcctgccgagctcgccgcccaagacgccggccgccgcgtcgtccacgaccgcgtcgcgccaccatcaccaccagcagcagaagaccatctgcctctgctaccacctcggcgtccgcaacggcgacgtctgcagctgcaa

SEQ ID NO: 30158 - DNA, 1554 bp, Oryza sativa
  Clone ID: UC-OSFLCYP176E09_FLI
cttgaagctcaaggaagaatatggaacataatttcctgagaattgtgcatgcccaccaccaagcaagggaaacatgatcacaattctgagtattgatggaggtggggtgaagggtatcattcctgctgtcatcctctcattcctggaatctaaacttcaggagcttgatgggaaggatgctcggattgcaaactactttgatgccattgctggcacaagcacaggtggtcttattgcaggcatgctagcagctccatcactgggcaatgccaatcaaccatgctatgccaaggatattgtcccattttacctcaagcattccccccacatctttccgcacaggactggattttttggttggttcttcaacatcctgggcatcataaagatggccattgggccaaagtatgatggaaaataccttcacagactaatcattgatcttcttggcgagacgaggatgaaagaaacattgacaaatgttgtgattcccacttttgatgtgaagtgtgtgaagccaataatattcagcacattcaaggcgagacgtaagcccttgaagaatgcttgtcttgctgatgtatgtattggtacatctgcagcaccaacctttctccctgcacactattttgaaaccgtggatcacacgggtgcatcgcaaagcttcaacattattgatggtggcatggcagcaaacaatccaactttggtgactatgggtgagataacaaagcagatcaagcggaagagcgaggagttcccgaaagccgagcccttggattaccgcaagtatctggtgatatctttgggcacgggtctgccggagcacgatatcatgtttgatgcaagaaatgttgccaaatggggcatttttcgatggctagttgataaggatacaatgccgttgctcaacatgttctttcatgccagctcagatatggccgatactctcgttgcagacctctttcaagcaatcggatgttcacaccaactattgcgcattcaggatcacaacatcccaataggggcaatatccaatgacctctcgacgaaggatcatcttcaactgttggttaagataggcgaaaaccttctcaagaagccactaagcaaggaagagtgtgagaagaacaacattgagccagagccaaaccttcatggtgaccatgtgacgacctatgcagatatgctcacacggtttgcaaagctactttcagacgagaggaagctaaggctccacaacatgaagctggatgctaagccctagcacaattgaaacgtgagatccttggaacagatgtctcatgttcatctataggattgcgtgtcccctactaagccaattaattttgtattgtgaaatagctgtctgaactgttaaaaataagaactttgtacagtagtggtaatgttgcttttatttgcttcaaaaaacactagttggtaaagtttatactacctatatctgtgtgatgtgtggtgtctgttcagaatgtagaactatgtattgtaatggtgaatttatgaaaaacgatgtatttgcatatattgtat

SEQ ID NO: 30159 - DNA, 2934 bp, Oryza sativa
  Clone ID: UC-OSFLCYP178G12_FLI
gtgggaatatttgtcatcttccatataattcagtatcttgccttgctgccttttcaatggcaaaatttattccatgtccatgaattttaaggtttttgcattgtcttaaattacaaatgatgcatatgtttagtttcccatgaaaatgttgttcattcatggattaacaatatggaacatggtgtgcatgatcatcaatgttaactatgaatgaagttagaataaatgatttgactctgcaatggatagcttttgaggatttgtgagatatattcacgttgacataaaaagatagtttagtctcggtggcttgatagttcttcatagttcgtctagaagcagaacttaccttcgtgtatgatagtgtggttggacttcagtacttgatcgttaaaaccttggtgctgtcacatgatcaatgaacaattactgtggtactagtttcaatctttagtcggctagtcttttgagttttggtaactgcttactgctagatgagatctgattatgtttcctacataagaagtcagaactgactcatcaaggttcctctcgcttccagtttccatgatttattttgtttgaaggtgccaatttggagttggttgggtatcctaatgcagatacagctaggctttcatcatgggctccacatccttcatccattacatgcacagaagagggatattgaccattatcccttgcccttgcatggtttgtgtagttggtaactggtaaggctgcttattgctgaaatggaaagaaaaaaaaacaatgtggcattgggagactgcaccaaatgtttcattgccatgacaaggatactgcatcaccatgtctaggtttgctgaactaaattgttgccactaatttgcaatagctgaaaaagcagcaagttttctcgcatcacatacgtcagttatttgatgtgttagctttccaactagaatattcaagttggctgacagcctatattgttggagttaaatcatatatgtgagctatgcatgcaattttgctatgtttcttttttttgaattgctgcatgtaatatcaccatggttatgtgatgatgtcataacgtgcaactgtaatcccatttacttcttacttacccattggctctgctaaaggtgatggttctgttgatatatgcattcatcacattgatattttgtgtttgtctattgttcagatcccctggtccttttaaaaattcttgtttagatgtctgaaggaggttgtgaaatgccagtattaattagaatccttttatctaacaatgtttgtgaatgcttaagcataaattatgtttttagtgaatcatggtgccatagcttatatgcaggcttattttgttattgttggtatgctgcaagtatgaagtgaaacactggtcatcctttttaattatcttacaaaaatgcctttattcttctgtgttatatttgtaatttgtaattgtactatttagtattttgtttttgtcatttagtgttcttgttttgtttctaacgttccttcttaaacagacattttcaagacatggggctcaatctggtggatatggtcagcaaaactaccgccctcagggtcatggtgcagcttctcagtggggcccacgttctcaaccccagcctggatatggatatccaccaagagggcctccacctcagaacatgccatactcccaaccttatggtggctacccgcagcagccaccaccaagaggtggcatgggctgggatcagaggcagggccctccaccccatgcttcccaccatggtggcggttacgactactataaacagggttctcaaccatatgaaggccagccaccaaattaccctcctgggcctggaaactacaatagttatgggccatcacagggcccaaattatggacaacctcagtatccgcagtctgcacctccacagaactatgggccgggttatggtgatcctagatacaatgctccagcaccaaaccagcagtactatggacagcctccagcgggtccacagcaaggctaccctccacagcaagatccctacgctaggccttatggtggacctggacaatgggcacccagaggtgcaccagccggagatggcacttaccaggcgccaccacctacatcttatggcccaccatctcagcagcctcctgcttatggtcagacatatgggccaacgactggacctgatgggtattctcagcagagttacccacagcaaggtgcacaagcgccagcaacatatggtcagagtgcaccagcagggccagggtatgctcaacaaggcgcacagcaaggtggctatgcacagtatcctcaatcccaaccagcatatggtgatcaagcagctcaaaacaatgcaaactacggctaccagggtgctccagcagatcccaactatggaaatgcctacccacaggcaggatacggttctactccggctagtggccaggctggatatgctgctgcaccggctgctggccagccagggtacggtcagccaggatacactcagccacctacaaatccaccagcttatgatcagtctgcccagccaccagctcagagtggctatgctgcacctcctgcaaacccacagcctgctgttgcaaagggggtgtcaccgcagcctgctggatatggtggacaatggaccgcttgaggtttgtacctcattattgacagcaatgatctagttgaagactatgttttgcctcatgatgctgccgcttatatgaagtaggcggttgaatccccttgggatgttcattcagtaagcggtagacttttgatatgcctataagggatgtaaccccttgcctctccagttgttataccggatctctgtagtagttagtagtttgttaagatgacataaaacctcctgtttagtttaaaagtgaaccgaattatgtgtt

SEQ ID NO: 30160 - DNA, 1011 bp, Oryza sativa
  Clone ID: UC-OSFLCYP179H11_FLI
gctgcagtggcctggcaccatctgcgcctcaacccgccactgctgcgccatcaacggatgctgccgctcggagccgctccagacgttcacgatccatgggctgtggccggactacgacgacgggacctggccggcgtgctgccgccacaccagcttcgacatggacaagatattgcccctgaagccgacgcttgagaagtactggccgtccctctactgctcatcctcttccacttgcttcagtggcaaggggcccttctgggctcatgagtgggagaaacatggaacatgctcatccccggtagttaaggatgaattagagtatttcaccactgctcttgacctctacttcaaatacaacgtcacggaaatgttggcaagtggtggtatctatgtttcaaatggtaaacaatatgcgctaactgatgtcattgatgccatcaaatgtgcttttggggcctcaccgcaaattgtttgcaagaagggctcagttgaagaactgaggttatgctttgacaaagatttgaagccccttgattgccttactactactgctaccaatgaaaacgtatcgaagaagtattgccctcgatacatcaccctgccaacatatgaccccatagtacatgctaattctactcgggagatcataacagtcgaaagtgaggtctatggatatctttacacatcctaagatacgattaccgcgagcaagaattacatggccatgatgaagccggtagttcagggctcttagctgcttaagacatactggggccggcattgaggttcaaggaaatgtatatctagataactcgattattacatttgtaagcacggcacgccagaacaacggagaatgtgattgtgtctgaaaaatcaattgctttatgtactatgcaaggttggaaaatagttcgtccatgtatatagtcattggtcagggtcatctgcgactgcaatctgctgaattataatggacagtggcaatcggtctgaacttttctggct

SEQ ID NO: 30161 - DNA, 3152 bp, Oryza sativa
  Clone ID: UC-OSFLM202002F03_FLI
ctctctctctctctctctctctcggcaccacggacactcgtacagctgccgcctgccggagggttggtggtgtgtttcaggttccagaaaaatcctccagcgttttgtggtcgcttgaggagctgagctgtgtgagccttgcaaggtttgcatcaacaagcttgggggtttttcctatcttgttgttctgagggaattcaagaaatgctccatatggtctgaattcgtaggtctttttgtgttggaatctctcagagggtttaagaggaaaaaggaaagaggagaaattgtaaggacaagtagagaagaacatggctgacctggaagcaggcatggttgctgctgccacagaccagggcaattcaacaaggtcacaagatgacgcagccacactgatcccgaacagtggcaatctgggctcgagcaacaggagcaccaagacggccaggttcaaggacgacgacgagctggtcgagatcacccttgacgtgcagcgcgattcggtggcaatccaagaagtgagaggggtggatgagggtggctccgggcacggtaccgggttcgacggcctgccactggtgtcaccctcgtcgaagagcggaaagctgacgtcaaagctcaggcaggtgaccaatgggctcaagatgaagagctccagcaggaaggcgccatccccgcaggcgcagcagtctgcgaagagggtgaggaagaggctggacaggaccaagagcagcgccgccgtggcgctcaaaggattgcagtttgtgactgcgaaggttggcaatgacggctgggccgcggtggagaagcggttcaatcagctgcaggtggatggtgtgctgctccgttcaagatttgggaaatgcattggaatggatgggtccgacgagtttgcggtgcaaatgttcgattctctggcgaggaagagagggatagtgaagcaggtgctcactaaggacgagctcaaagatttctatgagcaattgactgatcaggggtttgacaatcgtcttcggacattctttgacatggttgacaagaacgctgatggaaggctcacagcagaagaggttaaggagattattgcccttagtgcatcagcaaacaaactttccaagatcaaggagcgagctgatgagtacacagcactcattatggaagagcttgaccctacaaacttgggatacatcgagatggaggacttggaagcactattgcttcagtcaccatctgaagctgctgcaagatcaacaacgacgcacagctccaaacttagcaaagctcttagcatgaagcttgcgtctaacaaagaaatgagcccagttcgtcattactggcagcagttcatgtacttccttgaagagaattggaagcgcagttgggttatgactctgtggatctcaatctgcattgcccttttcatttggaagttcattcagtaccgtaatcgagccgtattcggcatcatgggttattgtgtgaccactgcaaagggtgctgcagagaccctcaaattcaacatggctttggtcctacttcctgtctgcagaaatacaatcacatggattcggtcaaagacacaggttggagctgttgtacccttcaacgacaatataaactttcataaggtcatagccgcaggtgttgcagttggtgttgctttgcatgcaggtgctcatctgacatgtgattttccccggctgctccatgcgagtgatgcacaatatgaactaatgaagcccttctttggggagaagaggccaccaaattactggtggtttgtaaagggaactgaaggctggacaggtgtggtcatggtggtgctcatggcaatagcatttacattagcccaaccatggttccgacgtaacaagctcaaggactccaatcccctcaaaaaaatgactggcttcaatgccttctggtttacccaccacctgtttgtcattgtgtacactttgctctttgtccatggaacgtgcttgtatctaagcaggaaatggtacaagaagacgacatggatgtacctcgctgttcctgttgtcctgtatgtaagtgagcgtattcttcggttgtttaggagccatgatgcagttgggattcagaaggttgcagtgtatcccgggaatgtattggctctttatatgtcgaagccacctggtttcagataccgtagtgggcagtacatcttcataaaatgcactgctgtgtctccatatgaatggcatccattttccataacatcagcacctggagatgattatcttagtgttcatattcgcacaaggggtgattggacttcacggcttagaactgttttctctgaggcatgccgaccccccactgagggagaaagtggactacttagagctgacctttccaagggaataacggacgaaaacgcaagattcccaaaacttttggtcgatggaccgtatggtgcaccggcacaagattaccgtgaatacgatgtgctacttctcatcgggctgggcatcggagccacccctttgattagcattgtgaaggacgtgcttaaccacattcaaggtgagggatcagttggaaccacggagccggagagcagcagcaaggcgaagaagaaacctttcatgacgaagagagcctacttctactgggtgacgagagaggagggctcgtttgagtggttcagaggcgtcatgaacgaggtgtctgagaaggacaaggatggagtcattgagctccataaccactgctcaagcgtgtaccaggaaggcgatgctcgttctgctctcattgtcatgctccaagaacttcagcatgcgaagaagggcgtcgatatcttgtcgggaactagtgtgaagacccatttcgcacgacctaattggcgaagcgtcttcaagaaggttgcggtcaaccatgagaaccagcgcgtcggtgtgttctactgtggtgagcctgtgctggttccccaactaaggcagttgtcagcagatttcacccacaagacaaacacaagatttgatttccacaaggagaacttctaatggtacaaattgagaaatacccgtgtatggttttgtatgtagttctttatcatgtgaattatatggtttctaatatatataaagttggacaaaataaatgaaatgatggaagctattttgttg

SEQ ID NO: 30162 - DNA, 1104 bp, Oryza sativa
  Clone ID: UC-OSFLM202006A10_FLI
cggacttaatctctctcgccctaatcatcatcgtcttcctcctcttggatcttctcctctgccatggcgggcaacagaggaggcgatgccggggaaggggagtggctcaaggtcgccgagctcagggccacggtggaagcccaggacccccatgccaaggaagtggacaacctgacgctgaggaggttcctgcgggcgcgagaccacaacgtggagaaggcgtcggcgatgctgctcaaggcgctccggtggaggagggaggcggtgcccggcggctcggtgccagaggagaaggtgcaaagcgacctcgacgacgacaaggtctacatgggcggcgccgatcggaccggccgccccatcctcctcgccttccccgccaagcacttctccgccaaacgcgacatgcctaagttcaagagttattgtgtctacttacttgacagcatctgtgcaaggatccccagaggccaggagaagttcgtctgcatcgtggatctcaagggctggggttactccaactgcgacatcagagcttacatcgcggccatagagatcatgcagaattactacccggagaggctcggcaaggccctgatgatccatgtaccctacatgttcatgaaggcctggaagatgatctaccctttcatcgacaatgtcaccaggggcaagttcgtgttcgtggacgacaagagcttgcaagaggtgctgcaccaggagatcgacgatagccagatcccggatacgttgggcgggaagctggcaccggtttccctcaagaacaacgcgcgaattaaccttgattagtagcgaggctcaattagcacgcagttataccgataatcaagcacaagattatacacacacgtatactatacatggatcgatgggatgaacaaaagatatgtgtaattgtgaaaaatgcagctctcatatcacagctggtctcactgtttgtagcattgccatcgtcatttatctcagtaacaaaagcttctgatcagtaattacatgtactactgtcactatgacaagtaaagactccaatactccatatcgaaaaaatatgaaaaagggagccacgtggctaagaagtataaattt

SEQ ID NO: 30163 - DNA, 1211 bp, Oryza sativa
  Clone ID: UC-OSFLM202009G07_FLI
cctgattatcaagtacttagatcagcttttgttcagaggcactacccaaaccgtcctgattttgatttccacaagtacatggttcgtgctcttgagcatgattttaaagaagtagttggaatcagctggtacctatggcttttcgttattgtcttcctgctactgaatataaatgggtggcacacatacttctggctgtctttcttgcccttaattctcctactcattgttggcacaaagctggagctcataagcactaggctggcacaagaggcagcagactgcccagatgaagcaacaggaaacccctggacaaagccatgcaaggagcacttctggttcagcaagcctaggattgtcctccatttgatccacttcatcctgttccagaactcctttgagatgggttttttcttctgggttctggcaacatatgggtttgattcatgcatcatggagaacaagatttatgccctccccagacttgctattggaatcatcgtccaggtgctctgcagctacagcacgctgccgctatacgccatcgttacccacatgggcggggacatcaagctgcaggcgttcggcgagacggtgcacgtgtcggtgcacagctgggcgacggacgtgaggaagaagaaggcggcgccgccgccgcactcccacctccgcatccccttcctcatgaagcgacgccacagcacccgcggcgccgacgacgccgcggacgacgccggcggcgacgtcgaccaccaccaccaccatcacggccaccaccatcacggtcaccaccaccacgaggggagctccgcggcggcggcggcgccggacctggaggagatcgtggcgacgacgtcgggcggcgaggacgggcacccgccggcgccgccgccgccgccgcaaggcccacggccgtagatattatcgtatacggaagcccgagccgccggcggccggtgcccacggcggccggcgtggcgagccggcggcatggagacgtgttgctagctgagtaggtaagctaccttgcgcgacaccgttagaccaatcgctacgtgccacgtgtatggagtttgctgatgagctgtacaaaatggagttaattattaaaattgtacatgcatgcaaacttatggaattggacacatatcatatttttggcatacatgtactcttctgtgttatagtacaattaatgcaaattaaattgg

SEQ ID NO: 30164 - DNA, 1490 bp, Oryza sativa
  Clone ID: UC-OSFLM2020118D05_FLI
cctccttcccatgctgctccaccagcgccggcggcctccgcctccgctcccgcccgtctcgcttcccgcagaaggctgcgacgacgaggagcgggcgcgccggcgcgggggcgcgggcggtggtccggtgcatggcggcggcggcggtggcggcgtccgacgcggcgcagctcaagagcgcccgggaggacatcagggagatcctcaagaccacctactgccaccccatcatggtccgtcttgggtggcacgattctggcacgtacgacaagaacatcgaggagtggccgcagaggggcggagccgacgggagcttgagatttgacgccgaattgagccacggagccaatgctggtctgattaatgctttgaagcttatccaaccaatcaaggacaaatacccgggtataacttatgctgatttgttccagttggcaagtgctacagcaattgaggaagctggtgggccgaaaattccaatgaaatatggacgagttgatgtcacagcagctgagcagtgcccaccagaggggaggcttcctgatgccggtccatgtgtgcccgctgatcatcttagggaggtattctacaggatgggccttgatgacaaggaaattgttgcattatctggagcacacacacttggaagatcaagacctgacaggagtggctggggaaagccagaaacaaaatatactaaggatgggcctggtgaacctggagggcaatcatggacagttgaatggttgaagtttgataacagttacttcaaggacataaaagagcaaagggaccaggatcttctagtgctacccacagatgctgcattatttgaggatccgtccttcaaggtatatgccgaaaaatatgcagaggatcaggaggcattctttaaagactacgctgaagctcatgctaaactgagcgaccttggtgcaaagttcgatccacctgagggattttcactggacgatgaaccagccgtcgaagagaaggatcctgaaccagcaccagcgccagcagcagcaccaccacctccaccagtcgaggagaagaaggaagctgaaccaactccagtaccagtaacggtaggagcagcagtggcatcatcgccagcggatgacaacaacggtgcagcaccgcaaccagagcccttcgtcgctgcgaaatactcctacggaaagaaggagctgtcggactcgatgaagcagaagatcagggcggagtacgagggattcggaggcagcccggacaagcctctgcagtccaactacttcctcaacatcatgctcttgatcggagggctggccttcttgacgtctctgctcgggagctgagagcgatggtctgatgacctcctctgacgagtgttttgagttgttctgcctgtgctaagatttgcgtgtttctctttccatgttttgagtcgttattccgtaaataaattgaggtaaaaggatgggcatgtgaatggattccagtactttctg

SEQ ID NO: 30165 - DNA, 1140 bp, Oryza sativa
  Clone ID: UC-OSFLM202012A10_FLI
cttcaataacttgcaaggataactcaaactacttgaatcagatcagacaaaaacatcataagaatatcacgatgtgtggaggagcactgatcccgaacgactatggcgacaagccgccgccgccgccgtcggagtcgtcggagtgggacgccacaacgaagatgaagaagaagaagaagcgtggtggcggcggcgacgacgactgggaggccgccttccgggagttcatcgctggcgacgacgacgacgacgacggcggcgtttccatgttcccttctggtgcagggacgatggagacgaccacagaggtggcgccggcggcggcggtggtggagaggccgcggcggcggcgaagggtgaggcggagctacccgtaccgcggcgtccggcagcggccgtgggggcggtgggcgtcggagatccgcgaccccgtcaagggcgcccgcgtctggctcggcaccttcgacaccgccgtcgaggccgcgcgcgcctacgacgccgaggcgcgccgcatccacggccacaaggcaaggaccaacttcccgcccgacgagcctccgctgccggcgccatcgcaggcgccgttctgcttcctgctcgacgacgacgacgacgacgacggcgtggcccgtggaaacagcccggcgtcgtcgtcggcgccggacagagcctccgcttgcacgacgtcgtcgacggtggcgtccggcgagcgaggcgatgagctcatactgctggagtgctgctccgacgacgtgatggacagcctcctcgccggcttcgacgtgtccagcgaaccacgcagtgttttgggaatggttaattagcagcgcgcacgcctgattagatcggtacatgtgaagtacaagagaagtagttactactagctaggagcaaattaacttggagtgcaagaataaaatatgcatgtctctgcactactactgtagtgttagcaagtttgctcattgttctgttgtatcctttcatgtccatttcagacttcccaatgctacataaggatgtacatatgtatgatgttgtgtgccttgttaatcaatgaatgtaaatatctttatattgcttttgtacaacaaaaatggttatgttgagactatctatacggaataatgtatcatatat

SEQ ID NO: 30166 - DNA, 1734 bp, Oryza sativa
  Clone ID: UC-OSFLM202018F10_FLI
ggcatcagcagcagcagcagcaacaacatttggccgctctgaagattggtgacggagaatgcccggcggctccctcctcaatagcggcggcatggcggactacggcggcggtggcggcagcggcggcggcctcacgttcccggtcgtggttacctgcctcatggcggcctccggtggcctcatcttcggctacgacattggcatctcaggtggtgtgtcggagatggagtcattcctggagaagttcttcccgggcttgctgaaggggacggcgcacgcgagcaaggacgtgtactgcatctacaacagccaggcgctcacggcgttcacctcgtcgctgtacgcgttcggcatggtcgggacgctggtggcgagccgcgtcacccggcggaccggacggcaggccgtcatgctgatcgggggcagcatgttcctggtcggcgcgctcgtgaacgccgccgcggtcaacattgccatgctcatcatcgggaggatgctgcttggcctggggctcgggttctcgggccaggccacgccggtgtacctcgccgagatgtcgccgccgcggtggcgcggcgggttcatctccggcttcccgctgttcatcagcgtcgggtacctcatcgccaacctgatcaactacggcacgtcgcggatccccgtgtggggatggcgcctgtcgctcggcctcgcggcgttcccggccgccgtcatggtggccggcgcggcgttcatcccggacacgccgagcagcctggtcctgcgcgggaagcacgacctcgcccgcgccgcgctccagcgggtgcgcggcaagggcgtcgacgtcgacgccgagttcaacgacatcctcgccgccgtggagcacgaccgcaggaacgacgagggcgcgttccggcggatcctgcggcgcgagtaccggccgtacctggtcatggccatcgcgttcccggtgttcctcaacctcaccggcgtggccgtcacggccttcttctccccgatactgttccgcacagtcgggttcgagagcgatgccgcgctgatgggcgccgtcattctcggcctcatgaacatcttcggcatcgtcggctcgggcttcgccatggaccgctacggccggaggctgctcttcatgatcggcggcgcgctcatgttcacctgccaggtggcaatggcgagcatcgtggggtcgcagctggggcacgggagcaagatggcgaaggggtacgcggtgacggtgctggtgatgacgtgcgccttctcggcgagcttcagctggtcgtggggggcgctgtactgggccatccccggcgagatctacccggtggaggtcaggtcggcggggcagggcgtggcggtggcgctcaacctgggcctcaacttcgtgcaggcgcagtgcttcctcgccatgctctgctgcttcaagtacggcaccttcctcttctacgcgtcgtggctcgtcgtcatgaccgccttcgccgtcgccttcgtgccggagaccaagggcgtgccgctcgagtccatgggccacgtcttcgcgcgccactggtactggggcaggttcgtcaaggaccacaagttcggcgacgtgtcgacctaaaatttgcaccgcatatgccgatgcggaatgtttggctttgatctcagaaatttagttagcgtgtgtgctctcgatcgtagtataaggctaagatggacgactttgggtaaattaatcaagaatgggcaatgtatgcc

SEQ ID NO: 30167 - DNA, 1346 bp, Oryza sativa
  Clone ID: UC-OSFLM202018G09_FLI
tcttgccagtgccttctgcagtgaatgcctccatttttgaaagttttgttaggcggaacattactgagtctgaaactgatgtccgttccagcattcagcagctggtgaaagatagctatggtttcccagcagatggttgttctgaaatattatatggcaacacctgtcttgcactcttcaacaagcttgccctttgctgcatccaagaccagggcaccttacttttccccttgggcgctaatggtcactatgtctcagcagcaaagtttgtgaatgcaaatacgctgactattccgacaaagttagaatcaggcttcaagattgaaccacgggttctagctgacacacttgagacagtatctaggccatgggtttatatttctggccccacaattaaccctactggtttcctgtacagtgacagtgatattcaagagctcctttctgtttgtggtaaatatggagctagggtagtaatagatacctccttctctggtctggaattccaaactgatggctggagtcgatggaatttggaaagatgtctttctgctgtgaattgtccaaaaccctcgttctctgtagctcttctcggagaactgtcctttgagctgactgctgcagggcatgactttgggtttctgattttgaatgactcatccttggttgacacatttcacagtttcccaagcttgagtcgtccccacagtacgctgaagtacactttcaaaaaactactgggcctcaagaatcagaaggatgaacacttctccaatctcattatggagcagaaggacacactaaagagtcgtgctgaccacttgataaagacacttgagggctgtggctgggatgttgctggcagtcatggtggcatatcgatgctggcgaaaccgactgcctacatcggcaaaataatcaaggtggatggttttgatggcaagctagatggctgcaacatcaaggaagccattctcaggtccaccgggttgtgcataaacagcagctcatggacaggaataccggatcactgtcggttcagctttgctctggagagcagcgaattcgagcgtgcaatgggctgcatagttcgcttcaaggagttggttcttggaagcaaggcttttcatcagatcaatggtaactaaatgaaatttcccatcgtcgtggaaactgaatcctgaagaaatgtagccactacatacatattattatccattgttagcctgtcctgttcggggctgattgaacatttttgtgcttagaaaaagaataatgagcacaggaaggctggtatgaatgtagtagcaaactggaattaagtctgaacgacgtattggcatggc

SEQ ID NO: 30168 - DNA, 4061 bp, Oryza sativa
  Clone ID: UC-OSFLM202020B05_FLI
ctcggagtccgcggtgacaggagcccaccgtcgccatgggtgaggagaagaaggataaggcgagcggcaaggacgccggcgagaagaaggacgccgccgccgccgccgtctacgccgcgtgaggtccggattggttgaaaggctgatcgagtttcttgataccaaggcaagtagcttataagaagatttggactttggtggcataaatggatgaactaactggcggcttcaacgtggtgttgattacaggctcttgagctaccaagtatgtcagcttcaaatgagaagtggattgatgggctccagttctcatcactgttctggcccccaccacaggattcacaacaaaaacaggcacaaattctggcctatgttgagtactttggccagtttacagctgacagtgagcaattccctgaagatatagctcagctaattcaaagttgctatccatcaaaagaaaagcgccttgtagatgaagtattagcaacttttgttcttcatcatcctgagcatggccatgcagttgtgcatccgattctgtcacgcatcatagatgggacactcagttatgatagaaatggtttcccgttcatgtccttcatctctttatttagccatacttctgagaaagagtactcggagcagtgggccttggcctgtggagaaattcttagagttctaactcactacaacaggccaatcttcaaagttgatcaccaacatagtgaagcggaatgtagcagcacatctgatcaggcctcatcatgtgagtctatggagaaaagggctaacggttctccaagaaatgaacctgaccggaagccattgaggccactatctccttggatcacagacatattgcttgctgcacctctgggtattagaagtgactattttagatggtgtggtggagtcatgggaaaatacgcagctggtggagaattgaagcctccaacaactggttgcttacagccgaggatctgggaagcacccacaacttatgccatccacgcccagatgggctgttgccaatggagctggagttatactaagtgtctgtgatgaggaagtagctcgttatgagacagcaaatttgactgcggcagctgttcctgcacttctattacctccaccgaccacaccattggacgaacatttggttgcggggctccctcctcttgaaccatatgctcgcttgtttcatagatactatgcaattgctactccaagtgctacccaaaggttgctttttggtcttctcgaggcaccaccatcatgggccccagatgcacttgatgcagcagtacagcttgttgaactccttagagcagcggaagattacgattctggcatgcggcttccaaagaactggatgcatcttcatttcctgcgtgctattggaactgcaatgtcaatgagagctggtatcgctgctgatacgtctgctgctttacttttccgaatactctcccaaccgacattactttttcctccactgagacatgccgaaggagttgaactccatcatgagccactaggtggctatgtatcatcgtacaaaaggcagctggaagttcctgcatctgaagccactattgatgccactgcgcaaggcattgcttccatgctatgtgctcatggtcccgatgttgagtggagaatatgtaccatctgggaggctgcgtatggtttgctacctctgagttcatcagcagttgatttgcctgaaattgttgtagctgctccacttcagccacctactttgtcatggagcctatacttgccattgttgaaagtatttgagtatttacctcgtgggagtccatctgaagcatgccttatgagaatttttgtggcaacagttgaagctatactgagaagaacttttccatcagaaacctctgaacaatccaggaaaccaagaagtcaatctaagaaccttgctgttgctgaactccgaacaatgatacattcactctttgtggagtcctgtgcttcaatggaccttgcgtccagattactatttgtagtattaactgtttgcgtcagtcatcaagctttgcctgggggaagtaaaaggccaactggtagtgataatcattcctctgaggaggtcacaaatgattcgagattaaccaatggaagaaacagatgtaagaagagacaaggaccagttgctacattcgactcatacgttctagcagccgtttgtgccttatcttgtgagctccagctgttcccttttatttccaagaatgggaaccattcaaatctgaaggactccataaagatagtcatacctggaaaaaccactggtatcagtaacgagctacacaatagcattagctcagcgattcttcatactcgtagaatacttggcatcttggaagctctgttctccttgaagccatcatctgttggtacttcatggagttatagttcaaatgagattgttgcagcagctatggttgctgctcatgtttctgagttatttcgtcgatccaggccatgcttaaatgcactgtctgcgctgaagcaatgcaagtgggatgctgagatttctaccagggcatcatccctttaccatttgattgacttgcatggtaaaacagtgacctccattgtgaacaaagctgagcctctagaagctcacctgacccttacaccagtaaaaaaggatgaacctcccattgaggaaaagaacattaactcatcagatggtggtgcattggaaaaaaaggatgcttcaagatcacacaggaaaaatggttttgcaagaccactcttgaaatgtgcagaagatgttatactaaatggtgatgtcgcaagtacttctgggaaagccattgcaagtttacaggtggaagcttctgatttggcaaacttcctcaccatggaccgaaatgggggttacagaggttctcaaactctcctaagatctgtactgtcagagaagcaggagctatgcttctctgttgtctcattgctctggcagaagctcattgcatctcccgaaatgcagatgtctgcagaaagtacatcagctcatcagggttggagaaaggttgtggatgcgctttgtgacgttgtttcagcctcaccgaccaaggcttcagctgctatcgttctgcaggccgagaaggacttgcagccctggattgctcgagatgatgagcaaggtcagaagatgtggagagtcaaccagcgaatagttaagctgatagcagagcttatgaggaaccacgatagcccagaagcattggtgatccttgctagtgcttcagatcttcttcttcgagcaactgatggaatgcttgttgatggtgaagcttgtactttaccacaattagagctattggaagtaaccgccagagcagtccatctcatcgtcgaatggggagattcaggtgtatccgtcgctgatggcctctccaatctgctgaagtgccgtctatcaaccaccatccgctgtctttcgcaccccagcgcgcatgtccgtgcactcagcatgtccgtccttcgcgacatcttgaacagcggacaaataaactccagtaagctcatccaaggggaacaccggaatggcatccagagcccaacctaccagtgcttggcagcaagcatcatcaactggcaagccgatgtggagagatgcatagagtgggaagcccacagccgccgcgccaccgggctgacgctcgccttcctcaccgcggcggcgaaggagctcggctgcccactcacttgctgacaaggccacaccatgactgtcactgcaagcagctgctgtaggatcagcgagtaggaaaggatgacttgccggtcagtttcctgagatgtgatttaagactgatattagctgatgttcccaagcatgatacggggcttgctcccaagatgtgatttttactttacttttggttaatgtgctaccgctgacattagatgttcaagcatatgaaaactgcttgtgctgtaacttgtatgtctgtaacgtaaaaatctttccatatggtaaccggggaagcagaggtatatccttttctgctgttgtatct

SEQ ID NO: 30169 - DNA, 2072 bp, Oryza sativa
  Clone ID: UC-OSFLM202020D04_FLI
ccgctccccttccccgaggagccacgccgccgccgccgccgccgccatgccgaagcactaccggcctgcgggcaagaagaaggaggggaacgcggcgaagtacatcaccaggaccaaggcggtgaagtacctgcagattagcctcgcaaccttcaggaagctatgcattctcaagggcgtctttccccgggatccaaagaagaaggtggaagggaaccacaagacctactaccacatgaaggatattgccttcctggcccatgatcccttgattgagaagtttagagaaatcaaggtccacaggaagaaggtcaaaaaggcgtttgctaagaaaaataaagatcttgcagacagattattgaaccgaccaccaacttacaaacttgacaggcttattcttgaaagatatccaacttttgttgatgctcttcgtgacttggatgattgcctaacaatggtgcatctttttgctgcgttgcctgctgttgaaggtgaacgtgtgcaagttcagcggattcataattgccgcaggttgagccatgaatggcaagcatatatatctcgaactcattccctgcgaaagacatttatatccgtcaagggcatatattatcaagctgaagttcaaggtcaaaagatcacctggctaactccacatgctcttcagcaagttttaactgatgacgttgacttcaatgtgatgcttacctttttggaattctatgagacacttctgggatttataaacttcaagctttaccattcgataaatgtaaattatcctcctgttctggatcctcgtttggaagctttagcttctgagctctatgcgttgtgccggtacatgtcttctggaagagtacctggaaattcagaacctgctggactaattgaagacaaagagggtgaagacaataaagagagctcaaaaacagatgagtctgaactcagattggcacaacttcaacaccagctcccaactaatgaacctggagcgctgatgcatcttgtacaagaatctactgctgctgatgcagacgacgctgatgccaaagaatgcaggagtttattcaaaaacctgaagttctacctaagtcgtgaggtgcctagggaatctctcttatttatcattccagcatttggtggtaccgtttcatgggaaggagaaggagctccttttgatgagacagatgaagacatcactcatcagattgttgatagaccgacccaaagccacgttttcctctctagggagtatgttcaaccacagtggatatatgattgcgtgaatgctcgcatcatattgccgacagaaggttatattgtcgggagggtgcctccaccacatttatctccctttgtggacaatgatgcagagggttacattcctgagtatgcagagaccattaagaggctgcaagctgctgctcaaagccaggtgttgcctctgccaagtttaggggacgaagatatggaaaattcactggtagaggcaattattgatcgatcagagtctaatgaaattgctgacaagaagaggaagttggagatgctagagaagcagtaccacgatgagctgaggatggaatacgaaggaaagaccttctcaaataggacggcagataaccaaccagatgttgtggacaaaagtgatactaaagaagctgacgatcatatggaggactctcataaacaagccgagaaggatgctgctgacatttccaagacccttatgtctcgcaagcagagaggccttcttcaagcaattgagattaaccaggaaaggaaaaaggacaaggtgaacttgctgaagaaaaggaaaaagaatgctgattccagtgcttcggccaaaggtcgctgaggctcgaacttcatttgctccatgctgtatctgttttgacaaattgttcatcggtcgctgcttctgtggagttgctgccatgatctgcacacctacgtattcttatgcatgataagcagctccattttgatgtttaggtgttttacatgggctttaagaatatgcccagatacctcagtagaaaattttgagctatttacctagtgtccag

SEQ ID NO: 30170 - DNA, 1083 bp, Oryza sativa
  Clone ID: UC-OSFLM202025G02_FLI
tctctctcgccctaatcatcatcgtcttcctcctcttggatcttctcctctgccatggcgggcaacagaggaggcgatgccggggaaggggagtggctcaaggtcgccgagctcagggccacggtggaagcccaggacccccatgccaaggaagtggacaacctgacgctgaggaggttcctgcgggcgcgagaccacaacgtggagaaggcgtcggcgatgctgctcaaggcgctccggtggaggagggaggcggtgcccggcggctcggtgccagaggagaaggtgcaaagcgacctcgacgacgacaaggtctacatgggcggcgccgatcggaccggccgccccatcctcctcgccttccccgccaagcacttctccgccaaacgcgacatgcctaagttcaagagttattgtgtctacttacttgacagcatctgtgcaaggatccccagaggccaggagaagttcgtctgcatcgtggatctcaagggctggggttactccaactgcgacatcagagcttacatcgcggccatagagatcatgcagaattactacccggagaggctcggcaaggccctgatgatccatgtaccctacatgttcatgaaggcctggaagatgatctaccctttcatcgacaatgtcaccaggggcaagttcgtgttcgtggacgacaagagcttgcaagaggtgctgcaccaggagatcgacgatagccagatcccggatacgttgggcgggaagctggcaccggtttccctcaagaacaacgcgcgaattaaccttgattagtagcgaggctcaattagcacgcagttataccgataatcaagcacaagattatacacacacgtatactatacatggatcgatgggatgaacaaaagatatgtgtaattgtgaaaaatgcagctctcatatcacagctggtctcactgtttgtagcattgccatcgtcatttatctcagtaacaaaagcttctgatcagtaattacatgtactactgtcactatgacaagtaaagactccaatactccatatcgaaaaaatatgaaaaagggagccacgtggctaag

SEQ ID NO: 30171 - DNA, 1839 bp, Oryza sativa
  Clone ID: UC-OSFLM202028F12_FLI
gcgagtgagcgcgcggctattgcgtgccacggcgtgccgttgagcgatggctggaggtgggttccccgtggccggcggcgccccgccgggcgactatggcggcggcataaccttctccgtcgtcgtcacctgcctcatggccgcctccggcggcctcatcttcggctacgacatcggcatctccgggggagtgacggcgatggagtcgttcctggcggccttcttcccgggggtgctccggcggatggcggcggcgcggcgggacgagtactgcgtctacgacagccacgtgctgacggcgttcacgtcgtcgctgtacctggccgggctggccgcgtcgctggcggccggccgcgtcaccagggcggtcgggaggcaggccgtcatgctcgcgggcggggcgctcttcttcgccggcgccgccgtcaacgccgccgcggtcaacatcgccatgctcatcgtcggccgcatgctgctcggcttcggcattggcttcaccaaccaggcggcgccggtgtacctggcggagacggcgccggcgaagtggcggggtgcattcacgacggggttccagctcttcctcggcatcggcaacctgacggccaacctgacaaactacggcgcggcgcgcatcccgcggtgggggtggcgtctctccctcggcctggcggcggcgccggcgtccgtcatcctcgtcggcacgctgctcatctcggacacccccagcagcctcctcgtgcgcgggcgggtggagcaggcgcgcgccgcgctccggcgcgtgcgcggcgccaaggcggacgtggacgccgagctggagggcgtggcgcgcgcggtcgaggcggcgcgcgccaacgaggagggcgcgtaccgcaggatcctctggaggcagcaccgcccccacctggtgatggccgtcgccgtgccgctgctccagcagctcaccggcgtcatcgtcatcgccttcttctcgccggtgctcttccagacggccgggttcggcagcaacgcgtcgctgatgggggccgtcatcctcggcgccgtcaacctcggctccaccctcgtctccatcgccacggtggaccggtacggccgccgggtgctgttcctgaccggcggcctcgtgatgatcgcctgccaggtcgcggtggcgtggatcatggggtcgcagatcgggcgggacggcgagtcggcgatggcgaggcgctactccgtggcggtgttggcgctgacgtgcgtcttctcggcggcgttcgggtggtcgtggggcccgctgacgtgggtgatccccggcgagatattcccggtggagatccggtcggcggggcaggggatcagcgtggccgtcaacctcggcgccaccttcgtgctcacgcagacgttcctcgccatgctgtgcagcttcaagtacgccacgttcctctactacgcggcctgggtcgccgtcatgaccgccttcgtgtgggcgttcctgccggagaccaagggggtgccgctcgaggccatgggcgccgtctgggcgcggcactggtactggcggcgcttcgtgcagccgccaccggcggccaaggacgccatgctgccggaggtcctcgtgaactgacaacgtatactgtacgtgttctctgccttgaccgtgtggcggcgctgcattaattcgtgggaagttgtgtaaaattaaatctggtttctggtttaacggttcctacatggttgaataccatcccgtgtttgtcctcttgcgaaaaatttgtattgtttacatatgaacaaatccaaagtccgtgttctattttagtttcttaccaagattgcaagacttgtcgaggatggattctaatc

SEQ ID NO: 30172 - DNA, 1521 bp, Oryza sativa
  Clone ID: UC-OSFLM202031F07_FLI
ctcgaagaccgatcgcatccgcctccaaaccctagacgcggcggccatggcgcggcgatccgcccctctcctccagcgcctcctctcccccactccctccccctccccctccccgccccatcctctcgccgccgccgccgtctcccgccgcaccgtcacctacatgccgcggccgggggacggcgccccgcgcgccgtcacgctcatcccgggcgacggcatcgggcccctcgtcaccggcgccgtgcggcaggtgatggaggccatgcacgcgccggtctacttcgagtcctacgaggtccgcggcgacatgccgacggttccccccgaggtcatcgactccatccgccgcaacaaggtctgcctcaagggcggcctcgccaccccagtcggcgggggtgtctcctccctcaacgtgcagctccgcaaggagctcgacctctacgcctccctcgtcaactgcttcaacctcccggggctgcccaccaggcacgacaacgtcgacattgtcgtcatcagggagaacaccgagggcgagtactccgggcttgagcacgaggtcgtccctggcgtcgtggagagccttaaggtgatcacaaagttctgctctgaaaggattgccaagtatgcttttgagtacgcgtacctcaacaacagaaagaaagtgactgccgtgcataaagcaaacatcatgaagcttgctgatggtttattcttggagtcttgccgtgaggttgcaacaaagtatcctggaattcaatataatgaaatcatcgtggacaactgttgtatgcagcttgttgctaagcctgaacaatttgatgttatggtcacgccaaatctttatggcaatctggtggctaacacggctgcaggtattgctggaggcactggtgtcatgcctggaggtaatgtgggtcaggaccatgctgtcttcgagcaaggagcttctgcaggaaatgttggaaacgtcaaagttgtggagcagaagaaagctaaccccgttgctctgctcctctcatctgccatgatgttgcggcatttgcaattcccatcattcgctgaccggctggagacggcggtgaagcgtgtcatcgcagaaggcaagtacagaaccaaagacttgggcggcagcagcaccacgcaggaagtcacggatgcagtgatcgcgcatcttgattaattgctggccggctgcgttcttttgaaacaaaattttccctttggactaggtgtctagtcccgactgattttcgtttcttatagcgttagatcttcatttcgttcgtcacagccttgtacaatcttcaggtgtcttgtgtctggtggattttgcttcggaatgatggagcaaatcaccaggaatccaggatcgatttttaacgcaatgtttttgcggtcttaactggaaataagagagaacgattctcttaactgtaacactattgcgttgattacttctacttattattacatattctgatctttactataatgataatgtctgcctgatttccttgt

SEQ ID NO: 30173 - DNA, 2215 bp, Oryza sativa
  Clone ID: UC-OSFLM202038E10_FLI
cgatcggcgatccgaggctgacgtcggtggaggcggcgttcgagaagaacccgctgccgggcttcagctggctggtgacgccgcgggccatggccgtcgcggtgctactcgggatcgtcttctgcttcgtcggcatgaggatccagatgatgaccgggttcgtgccggcgctcaacatgcccgtcaccgtcctcagcttcttcctcctcaaggtgctcgccaggcagctgcagaagtggcgattgaccgtggtgcccttcacgcgccaggagaacatgttcctcatcacttgcgtcatcacctgccttaacctagccatcactggtggtttcgcaaccgctctcactggaatgggtactatagtggccaaaacacttgctgatgatctagatccaagagatattatcgactatataccaacaggaaaattgattatatactttttccttattggtatggcaggggtattgtctaatattccattaaaccagatcatgattatcgactaccaattactattcccaacaggatcggtcataggacaccttattaatagctttcacactcctgaagaatgcaggttatgactattttcaaagtattttttggtagtttttcttggtctatattccaatggttctattcttcaggcagtggttgtggattttcaagctttccaacgtttggactggaactatataaacgcagattctacattgatttctctgcaacatatattggtgtaggaatgatgtgcccacatatagtcaattttgggttacttttcggggccatcatctcttggggatttctatatccttaccttgaaactaaacatggggagtggtatcaaactgatagcccttcaaacttagacggactcaatggatacaaggtgttcatcagcgtgacactgatcgtcactgacggcctgataaactttctgatactcgtgacttcagctgcaattaacttctaccatataaggcaacagcaacagcaaacgtcagggctggccagctacatcagcaagaaccctagcatgaactacgacgaacgcaaaaggatcgagatgttcttgtccagcaagatcccaatgttcgtgccggtggcggcctacgtcgcatggacggccatcagcatggtcgcgatgccggccatgttcgaccagatcaagtactaccacgtcggcgtgctctacctcgccatacccgtggtcggcttctgcaacacctacgcgacggggctcaccgactggtcggtgtcgaacacctacgccaagttctcccccttcatcttcgcggcgtggatcgccaggccgggcgccatcgtcgccagcctcctcgtcagcgggatcaccatggcgtcgctgcacgtctcgtcgcaggcgatgcaggacctcaagtcggcgcacatgacgctgacgtcgccgcgcgccatgatcgccgggcaggtgttcggcgtggcgctcagctccgtggtcagcccctgcatcttccgcgcgttcgagaaggcggcgaagcccggggcgccgctggggtccaaggactccgtctacccgtgcccctacgccgggctgtaccgcgccatctgcatcatcggcatgggaggggtgaagggcctcccaaagtactgcgtcgagctctgcgtcatcgccgtcctggtgaccatcgccatcgacgccctggtgctggtctcgcagctcaaggggtggaggctccacctctacatcccgagcatgacggtgatcgcgctgccgttcttcgccgggtcgtacttcaccctcgacatgtgcctgggcggcctgctgctgctcctctggaagaagatcgacaccatgagcgccgagatcctgtcggccgccgtcgcagcgggcttgatctgcggcgaggggctcttcacgctgccatcggcgttgctcaacatgttcaaggtgctaccgccgatgtgcatgaagttcttgcccagtggacaagaggttgaggtggtggactcattcctgaacagctcgggaggaacagtacccaagacatgaccgatcgatgttgagatcaagttaatatatgcactcatcaaattaagattgactgttagtactccttaattggttaccacatctcggtggaaattaagtggtctatgaatcattattgatcattgtaaataatgatgcacgtatcgtattttacatatatatatgtcatgtaattgacat

SEQ ID NO: 30174 - DNA, 3765 bp, Oryza sativa
  Clone ID: UC-OSFLM202041D12_FLI
gctatccatcaaaagaaaagcgccttgtagatgaagtattagcaacttttgttcttcatcatcctgagcatggccatgcagttgtgcatccgattctgtcacgcatcatagatgggacactcagttatgatagaaatggtttcccgttcatgtccttcatctctttatttagccatacttctgagaaagagtactcggagcagtgggccttggcctgtggagaaattcttagagttctaactcactacaacaggccaatcttcaaagttgatcaccaacatagtgaagcggaatgtagcagcacatctgatcaggcctcatcatgtgagtctatggagaaaagggctaacggttctccaagaaatgaacctgaccggaagccattgaggccactatctccttggatcacagacatattgcttgctgcacctctgggtattagaagtgactattttagatggtgtggtggagtcatgggaaaatacgcagctggtggagaattgaagcctccaacaactgcttacagccgaggatctgggaagcacccacaacttatgccatccacgcccagatgggctgttgccaatggagctggagttatactaagtgtctgtgatgaggaagtagctcgttatgagacagcaaatttgactgcggcagctgttcctgcacttctattacctccaccgaccacaccattggacgaacatttggttgcggggctccctcctcttgaaccatatgctcgcttgtttcatagatactatgcaattgctactccaagtgctacccaaaggttgctttttggtcttctcgaggcaccaccatcatgggccccagatgcacttgatgcagcagtacagcttgttgaactccttagagcagcggaagattacgattctggcatgcggcttccaaagaactggatgcatcttcatttcctgcgtgctattggaactgcaatgtcaatgagagctggtatcgctgctgatacgtctgctgctttacttttccgaatactctcccaaccgacattactttttcctccactgagacatgccgaaggagttgaactccatcatgagccactaggtggctatgtatcatcgtacaaaaggcagctggaagttcctgcatctgaagccactattgatgccactgcgcaaggcattgcttccatgctatgtgctcatggtcccgatgttgagtggagaatatgtaccatctgggaggctgcgtatggtttgctacctctgagttcatcagcagttgatttgcctgaaattgttgtagctgctccacttcagccacctactttgtcatggagcctatacttgccattgttgaaagtatttgagtatttacctcgtgggagtccatctgaagcatgccttatgagaatttttgtggcaacagttgaagctatactgagaagaacttttccatcagaaacctctgaacaatccaggaaaccaagaagtcaatctaagaaccttgctgttgctgaactccgaacaatgatacattcactctttgtggagtcctgtgcttcaatggaccttgcgtccagattactatttgtagtattaactgtttgcgtcagtcatcaagctttgcctgggggaagtaaaaggccaactggtagtgataatcattcctctgaggaggtcacaaatgattcgagattaaccaatggaagaaacagatgtaagaagagacaaggaccagttgctacattcgactcatacgttctagcagccgtttgtgccttatcttgtgagctccagctgttcccttttatttccaagaatgggaaccattcaaatctgaaggactccataaagatagtcatacctggaaaaaccactggtatcagtaacgagctacacaatagcattagctcagcgattcttcatactcgtagaatacttggcatcttggaagctctgttctccttgaagccatcatctgttggtacttcatggagttatagttcaaatgagattgttgcagcagctatggttgctgctcatgtttctgagttatttcgtcgatccaggccatgcttaaatgcactgtctgcgctgaagcaatgcaagtgggatgctgagatttctaccagggcatcatccctttaccatttgattgacttgcatggtaaaacagtgacctccattgtgaacaaagctgagcctctagaagctcacctgacccttacaccagtaaaaaaggatgaacctcccattgaggaaaagaacattaactcatcagatggtggtgcattggaaaaaaaggatgcttcaagatcacacaggaaaaatggttttgcaagaccactcttgaaatgtgcagaagatgttatactaaatggtgatgtcgcaagtacttctgggaaagccattgcaagtttacaggtggaagcttctgatttggcaaacttcctcaccatggaccgaaatgggggttacagaggttctcaaactctcctaagatctgtactgtcagagaagcaggagctatgcttctctgttgtctcattgctctggcagaagctcattgcatctcccgaaatgcagatgtctgcagaaagtacatcagctcatcagggttggagaaaggttgtggatgcgctttgtgacgttgtttcagcctcaccgaccaaggcttcagctgctatcgttctgcaggtcaagatattgttattgttatatttacatacttgttatcatatttaaaagcttcatattgtatgtacctttgaaaaaaaaagttccatactgtagcttcttttgttctcatttcttggtttcaaagcatcagcatcattaccgatataaaatatacccatttcctcagtcatcttccccgactcttgtatctttcacaggccgagaaggacttgcagccctggattgctcgagatgatgagcaaggtcagaagatgtggagagtcaaccagcgaatagttaagctgatagcagagcttatgaggaaccacgatagcccagaagcattggtgatccttgctagtgcttcagatcttcttcttcgagcaactgatggaatgcttgttgatggtgaagcttgtactttaccacaattagagctattggaagtaaccgccagagcagtccatctcatcgtcgaatggggagattcaggtgtatccgtcgctgatggcctctccaatctgctgaagtgccgtctatcaaccaccatccgctgtctttcgcaccccagcgcgcatgtccgtgcactcagcatgtccgtccttcgcgacatcttgaacagcggacaaataaactccagtaagctcatccaaggggaacaccggaatggcatccagagcccaacctaccagtgcttggcagcaagcatcatcaactggcaagccgatgtggagagatgcatagagtgggaagcccacagccgccgcgccaccgggctgacgctcgccttcctcaccgcggcggcgaaggagctcggctgcccactcacttgctgacaaggccacaccatgactgtcactgcaagcagctgctgtaggatcagcgagtaggaaaggatgacttgccggtcagtttcctgagatgtgatttaagactgatattagctgatgttcccaagcatgatacggggcttgctcccaagatgtgatttttactttacttttggttaatgtgctaccgctgacattagatgttcaagcatatgaaaactgcttgtgctgtaacttgtatgtctgtaacgtaaaaatctttccat

SEQ ID NO: 30175 - DNA, 2235 bp, Oryza sativa
  Clone ID: UC-OSFLM202042G12_FLI
aacatttccttgtccctcgccttcctcgcctcgcctcgcctcggctctcacacgacgcctcttcctctcgctactactagctcaagctaagctagcaagagcattccttgggctttttttcttgttcggggttgagaggcaatggcggtgatgactgatgtgtcgaccaccgggacggcactccggaccccggcggcgggggcggtgaaggagggcgacgtcgagaagctccggttcatcgacgagatgaccaccaacgtcgacgccgtgcaggagcgcgtcctgggggagatcctcggccgcaacgccagcacggagtacctgaccaagtgcggcctcgacggcgccaccgaccgcgccgccttccgggccaaggttccggtggtgtcgtacgacgacctgcagccgtacatccagcgcattgcgaacggggaccgctcgccgatcctgtccacccaccccgtctccgagttcctcaccagctccggcacgtcggccggcgagcgcaagctgatgcccaccatcatggacgagctcgaccgccgtcagctgctctacagcctcctcatgccggtcatgaacttgtatgtgcctgggcttgacaaggggaaggggctctacttcctgttcgtcaagtcggagacgaagacgccgggaggcctgacggcgaggcccgtgctgacgagctactacaagagcgaccacttcaagaaccggccgtacgacccgtaccacaactacacgagcccgacggcggccatcctctgcgccgacgcgttccagagcatgtacgcgcagatggtgtgcggcctgtgccagcgcaacgacgtgctgcgcctcggcgccgtgttcgcctccggcctcctccgggccatccgcttcctccagctcaactgggagcagctcgccgaagacatcgagtccggcgagctcacccctcgcgtcaccgacccgtcggtgcgcgaggctgtcgccgccatcctcctcccggaccccgagctcgccaagctcatccgcgccgagtgctccaagggcgactgggccggcatcatcacccgcgtgtggccgaacaccaagtacctcgacgtcatcgtcaccggcgcgatggcgcagtacatcccgaccctggagttctacagcggcgggcttcccatggcgtgcaccatgtacgcgtcatccgagtgctacttcggcctcaacctccgccccatgtgcgacccctccgaggtgtcctacaccatcatgcctaacatgggctacttcgagttcctccccgtggacgagaccggcgcggcttcgggcgacgccacccagctcgtggacctcgcccgcgtggaggtggggcgcgagtacgagctggtgatcaccacctacgccgggctgaaccggtaccgcgtcggcgacgtcctccgcgtgacggggttccacaacgcggcgccgcagttcaggttcgtgcgccgcaagaacgtgctcctctccatcgagtccgacaagaccgacgaggccgagctgcagcgcgccgtggagcgcgcgtcggcgctgctccgcccgcacggcgcgtccgtggtggagtacaccagccaagcgtgcaccaagcgcatcccgggccactacgtcatctactgggagctcctgaccaagggcgccggcgccacggtggtggacgcggacacgctgggcaggtgctgcctcgagatggaggaggcgctgaacacggtgtacaggcagagccgcgtcgcggacggctcgattgggccgctcgagatccgggtcgtccgcccgggcacattcgaggagctcatggactacgccatctcccgcggcgcgtccatcaaccagtacaaggtgccacgctgcgtcacgttcccgcccatcgtcgagctgctcgactcgcgcgtcgtgtccagccacttcagcccggcgctcccacactggactccggcgcgacggtccgaatagtcggtcaaatccccacctcgtcgttggaccgtgtccaagaatctgaagtagtagaagccggatgcctccacctaaaaacacttatctgttatttttggaattaattttgatggttgctgtcaactctgtcagttagtggcaagagggtacctctgatgtgagggagagaactgcagaacgaacggaagaaagtgttgatgtaagaggttaccactagtagtactgtttgtctgtatcaggaatgtgattataatttaacctgtcctccaaaaccgt

SEQ ID NO: 30176 - DNA, 1047 bp, Oryza sativa
  Clone ID: UC-OSFLM202043D04_FLI
gttggggattgattgattgattcggattgggaagaagaagaagcaggggagcatgggcagcaagtcgtacccgacggtgagcgatgagtacctggcggccgtgggcaaggcgaagcgcaagctccgcggcctcatcgccgagaagaactgcgccccactcatgctccgcctcgcgtggcactctgctggcaccttcgatgtgtcgtcgaggaccggcgggcccttcggcaccatgaagaaccccggcgagcagtcccacgccgccaacgccggcctcgacatcgccgtcaggcttctcgaccccatcaaggaccaacttcccatcctctcctacgccgacttctaccagcttgctggcgttgtggccgtcgaggtcaccggcggacctgaggtccccttccatccgggcaggcaggacaagcctgagcctcctcctgaaggccgtcttcctgatgccacacaaggttctgaccacctaaggcaggtcttttctgcgcagatgggtttgagtgacaaggacatagttgctctttctggtggtcacaccctgggaagatgccacaaggagagatctggctttgagggagcctggacgtccaaccctttgatctttgacaactcttacttcaccgagcttgtgagtggcgagaaggaaggccttcttcagctgccaagtgacaaagccctcatggctgacccagccttccgtccactggtggagaaatatgctgcggatgaggacgccttctttgcggattacgccgaggcccacctcaagctctctgaactgggatttgctgaggaataagaagcctttagagagcgggatatccgcaaaagattaatgccgatttgtattttgcgccttagagtcagtacgatcaagactgtcgtggcggttgtaataaaaattagtgtgctttgggccatctttttatgtgattccaattgtctttctcttcattcttgctttgatgctctttgtctggacctctagaccgccgtattgtactgtggagtttcaaagttaccaagctatttgctgtc

SEQ ID NO: 30177 - DNA, 2250 bp, Oryza sativa
  Clone ID: UC-OSFLM202043E05_FLI
catcgcccaaaatccgaggttggagcttttgctcgggcgattgattttggaatcggaggaggggatgtcaggaccactcgatcgatttgccaggccatgttttgaaggttttacgcataatgatgaaaagaaagagatcagatctgacgcagacaactccgaaggagagaagaagactaaaattggttctttcaagaaaaaggcgattaatgccgggaacaaattcaggcattccctgaggagaagaagcaaaaagaaaaatgaacctcggggttccattgaggacataagggatgttcaagatcttcaagctgttgatgcatttcgacaatgtttagttgatgaggacctgttgccgcaacagcatgatgattatcacacaatgcttaggttcctcaaagcacggaaatttgatgttgagaaagcaaagagtatgtggtcagatatgcttaaatggagaaaggaatttggggctgacaatatagaggagtttgactacaccgaggcggatgaggttatgaaatattatccacaattttaccatggagtggataaagaaggaaggcctatctacatagagttaataggaaaagttgatgcgaataagctaatgcaagtaactactatagagcgatatgtgaaatatcatgtgaaggagtttgagagatgcttccaaatgagatttcctgcctgctcgattgctgcaaaaaggcccatagattcatctactactattctggacgtgcaaggcgtgggtttaaagaacttctcaaaagctgcaagggatctaatcacacgactgcagaagatcgacaatgacaactacccagagacgttgcgccgcatgtatattattaatgccggccaaggcttcaagatgttatggagcactgtaaaatctttcctagatcctaaaactgcttcaaagattcatgttctaggaagcaagtaccaaaataagttacttgaaataattgatgagaatgaattgccagagttttttggtggaaaatgcaagtgcgaggcatttggaggttgcaaaaaatcagataaaggtccttggaaggatcctaacataataaagagggtcctgaatggcgaagcaaattatgggaggcaaattgtgaccatatcaagcactgatggaaaaataattcgttatgctgggccacaatacccaacaagaaaaggaagtgatggctcagcggagtctgggtctgaagtggaagatggcgcgtcacctatggcatcaaggaacctgataacaaatccccttttgacccctgttcatgaggagtcaaaattggcagcacatggatttacatctgcttccccttccattattgaagaaagcattcctgttgttgacaaggttgtggatgatggatggggcagtcctagagctagttcatcaccctcgagaagtttgcctatcacatttgatggcctctggacacaagttatcacatggctgactgtcttgatcgtgagcctttttgctatggttcgctctgtcccaagcaggatggctaaaagattctcaagccaatccactgaccatgatcactcctatgtggagtatcctcaagaagcagagtacaaggaagaattccggccaccgtctcctgctccgtcttatactgaaaaggatgtcctctcatctatggtaagacgactaggcgagttggaggagaaggtgcaggcgctcgaaacgaagccatccgagatgccatttgaaaaggaggaattgctgaatgcagccgtccgccgtgtggatgcattagaagccgagttaatctctacaaagaaggctctctatgaagccctgatgcggcaggacgagctgcttgcgtacattgacaagcaagatatgatcaagtttcgtaaaaagaaattctgcttctagcagctcaacgacgagttaattctccatacacagagctgttcgtgtatatttggatcaattaatcaccacgaatatgaatgaatgcagctagtttggagtgtaaaattaaaagtgtgcatatggcaaattgagaatccaacaataacaccacggtatcggtatgtgagttacaaggtggaccttgaggtgttgttggctggtcattcagaatccagacgatgcatcgtcttgtgctggagggtcctggctgctgtaaattaagcctgtaattaatcttgtgacttgtaacatatatagcacaaatgtgagttaaaatcgttgtaaatggacttcaccttggaatc

SEQ ID NO: 30178 - DNA, 1244 bp, Oryza sativa
  Clone ID: UC-OSFLM202047F04_FLI
ctctctctctctctcctccaccttgtcgtagagaggaggcggccatggaagctgccgcgatccatgcgcccaccaccaccacctcctccgactccggctcgtgcgtcaccaatggcacgcgagagaagcgcgagatctctaagcacaagcagctcaagcggaagaggagcacctctcctgctcctcctcccggctgcggcggcggccaaggacaggaagcggcggtggagactgacgctgacgctggcgccgccggcgaggaggagagcagcagctgcggtggcgctggcgccggcgagggcgagcgcaagaggggtgacgccggcaggcacccgtcgtaccgcggcgtgaggcggcggagctggggcaagtgggtgtcggagatccgcgagccgcgcaagaagtcgcgcatctggctcggcaccttcccgacggcggagatggccgcgcgcgcgcacgacgtggccgcgctcgccatcaagggccgcgccgcgcacctcaacttcccgagcctcgcccacacgctcccgcgcccggcctccacctcaccctccgacatccaggccgccgccgccctcgccgcagctgcagccgccaccgaccaatgcgagtcctcctcctctgccgtcgccgccgccaccgccaccgacgccgaggcggcggagtccacctcgtcggccgcggccagcccgtgcgccgccaccagcagcgtcgaggagaacgcgctgttcgacctgcccgaccttctcctcgacctgagcgacgggctctggtgctcacccgtctggacgacagcgccggccgatcagtacgacgccggcgacgacggcgacgacgccgcggcgccgctcctgtgggccgagcagtgctggatggacgccccagcggcgcccgtgcagcctgactaattaagccaatccacctgctccgactcgccggccggccattgcaccggttgggttggtcgcagcagtcaacctatcgacaccatgggcgtctttttcttttctctctgtttttttttcttttttggaggtgccttgcttcgtgtgcagtgaaacggcgccacgccgcgtttgcggtgggcgatcaggcgatgtgatttaattaattacggaggggaagtcgttttagcgcgaggtgaaacagcggattgcatcgatcggcggcaagaactgcctagacatttcattgatcaaattactaattactccccttcgtggttgtgtgtaaatcaattcggc

SEQ ID NO: 30179 - DNA, 805 bp, Oryza sativa
  Clone ID: UC-OSFLM202067D06_FLI
acatccgctgtagtgattggtggtgcaactgtcatatggatcttgtttgaagtgcttgattaccatctcttgactctgctttcccatgtgatgattggtgccttggccatcttgttcctgtggtcaaaagctaccacatttatcaagaagagtccaccagatattcctgtagtacagatacctgaagatgtcgccgtgaacgtgtcacgagcattacgcagtgacataaacagagcacttcacctgtttcgggagatcgcgttggggcatgacctaaagaagtttctgggcgtgattgttgctctctgggttctctcagaagtaggaagctgctgcgacttcctcaccttgatatatgttgccgtcctgatgctccacacggtgccgatcttgtatgacaagtaccaggataaggtcgaccactttgctggaagggctcactctgaggcctgcaagcactatgaggtgctggatgccaaggttttgagcaagatacccaggggcccggtgaagccaaagaagaactagaataagttgcgcaaggggactcgattcggaagggtggcgtcttttgtcgggtttgcgagttctcaggtgtacccaactgcgtcgcgtcctactgacggtagcagctgaatgttcgttctgcttgatgggtggtttgctggcttcgctgctgtgtgcttcagtgatgccagttcatgttcattctatcttgaagcctgtatctaaaatatctaaacgtgactgaatgctacgtttctgctactgaagctgcctgtagatatccgtgataaaacatgat

SEQ ID NO: 30180 - DNA, 1171 bp, Oryza sativa
  Clone ID: UC-OSFLM202068C06_FLI
cgctccccccactcccactcgcctgaaaccctagcaaggagctcccggcggatggacgagggaggcggcgctggtgctgcggctgccgccgccgggaacgcggcgggggcggcggtgcaccacaacgcgcggtccgcggaggacgtcttccgcgacttccgcgcgcgccgcgcgggcatcgtcaaggcgctcaccaccgatgtggagaagttctaccggcagtgcgaccccgagaaagagaacctgtgcctttatggattgcccaatgagacctgggacgtgacccttccagctgaggaagtacctcctgaacttccagaaccagcactgggcataaactttgctcgtgatggaatgatcgaaaaagattggttgtcgctggttgcagttcatagcgatgcatggctactgtctgtagcattttactttggggctcgctttggatttgataaggaagccaggagacggctcttcaccatgattaatggtcttcccactgtatatgaagttgtgacgggaattgccaagaagcaaacaaaagtctccaacggcagcagcaaaagcaacaagtccaaccctaaaccatcgaagcaatccaattctaacagcaagcctgcaaagccacctcagccaaaagatgaggaagacagcggcccggaaggcgcagaggatgaggaccaggcttacatgtgtggcgcttgcggagagacttacgcgaacggtgagttctggatctgctgcgacgtctgcgagaagtggttccatggcaagtgcgttcggatcacccctgcgaaggcagagcacatcaagcagtacaagtgccctggctgcagcagcaagaggagccgagaatgaccacgggaggctcccggttgacatgttttagaatcgttaggaattggtgaagaggcggagaaccgcttcacccgcaacctgctgccgtgcagcagcagacccggcgtgcaggccggttgttgtatttttcagtcattgtgttgtacccgacatggtaagtagctattgtatttagcaggcaggcaggctaactgctgtggtcgtagtgtgatgtgaacctctatgagagagttggatactctcggtgttcagtagtgattaagttatgggttagtgtgtatgattctatgataactgcctcccctttcatgaggtt

SEQ ID NO: 30181 - DNA, 1863 bp, Oryza sativa
  Clone ID: UC-OSFLM202083H11_FLI
agagagagagagcctttgaccgccggagcagcagcgtcaccgccatggcgggcgatcagatgcacgtgctctccgcgctggacagcgccaagacgcagtggtaccacttcaccgccatcgtcatcgccggcatgggcttcttcaccgacgcctacgacctcttctgcatctccctcgtcaccaagctcatcggccgcgtctactacaccgccgacggcgcgtccaagccgggcagcctgccgcccaacgtctcggcggccgtgaacggcgtcgccttcgtcggcacgctcacggggcagctcttcttcgggtggctcggcgacagggtcggccggaagagcgtctacggcatgacgctgctcttgatgatcatctgctccgtcgcgtcggggctgtcgttcggggacacgccgacgagcgtcatggccacgctctgcttcttccgcttctggctcggcttcggcatcggcggcgactacccgctcagcgccaccatcatgtcggagtacgcgaacaagcggacgcgcggggcgttcatcgccgccgtgttcgcgatgcaggggttcgggatcctcgccggcggcgcggtggcgatcgggatcaccgcgatcttcaggagccggttccccgcgccgccgttcgccgccgacccggcggcgtccaccccgccccaggccgactacgtgtggcggctcatcctcatgttcggcgcgcttcccgcggcgctcaccttctactggcggatgaggatgccggagacggcgcggtacaccgccatcgtcgccaagaacgcggagcgcgccgcggccgacatgtccaaggtgctccaggtgaagatcacggcggagcaggcggagatggcctcgccggtggacaagcccttcaccagcaagcccttcggcctcttctccggcgagttcgcgcggcgccacgggttccacctcctgggcacgacgtcgacgtggctcctcctggacatcgcctactactcccagaacctgttccagaaggacatcttcagcgccatcgggtggatcccggaggcgaagacgatgagcgcgctggacgagctgtaccacatcgcgcgcgcgcagacgctgatcgcgctgtgcgggacggtgccgggctactggttcacggtggcgctgatcgacgtggtcgggcggttcaagatccaggcggcggggttcttcgtgatgacggcgttcatgctggcgctggcggtgccgtacgaccactggacggcggcggggaaccagatcgggttcgtggtgctgtacgcgctcaccttcttcttcgccaacttcgggccgaacgcgacgacgttcatcgtgccggcggagatatacccggcgaggctgcgcgcgacgtgccacgggatatcggcggcgtcggggaaggtgggcgcgatcgtcgggtctttcgggttcctgtacctggcgcagagccccgtcccggccaaggcggcggcgcacggctacccgccgggcatcggcgtccgcaactcgctcttcgcgctcgccggctgcagcttgctcggcttcctcctcaccttccttgtgccggagcccaagggcaagtcgctcgaggagatgtcacgggagaacgaggtcggccagccgtgatccacccgttaattccaccgccgtccgtctgcatgcaagatccatgcatatgcgtggttagtccactagagatttttgttctcttttttctagaatccattggaatgcatatgttctttttttttctagaatccattagaggctggatgatgaaataatggccgccaattaattgttgacgacaatgtagtttagcattaggtgagtttttcatataatgaaactatcattagagttc

SEQ ID NO: 30182 - DNA, 1731 bp, Oryza sativa
  Clone ID: UC-OSFLM202092H07_FLI
cagcagcaacaacatttggccgctctgaagattggtgacggagaatgcccggcggctccctcctcaatagcggcggcatggcggactacggcggcggtggcggcagcggcggcggcctcacgttcccggtcgtggttacctgcctcatggcggcctccggtggcctcatcttcggctacgacattggcatctcaggtggtgtgtcggagatggagtcattcctggagaagttcttcccgggcttgctgaaggggacggcgcacgcgagcaaggacgtgtactgcatctacaacagccaggcgctcacggcgttcacctcgtcgctgtacgcgttcggcatggtcgggacgctggtggcgagccgcgtcacccggcggaccggacggcaggccgtcatgctgatcgggggcagcatgttcctggtcggcgcgctcgtgaacgccgccgcggtcaacattgccatgctcatcatcgggaggatgctgcttggcctggggctcgggttctcgggccaggccacgccggtgtacctcgccgagatgtcgccgccgcggtggcgcggcgggttcatctccggcttcccgctgttcatcagcgtcgggtacctcatcgccaacctgatcaactacggcacgtcgcggatccccgtgtggggatggcgcctgtcgctcggcctcgcggcgttcccggccgccgtcatggtggccggcgcggcgttcatcccggacacgccgagcagcctggtcctgcgcgggaagcacgacctcgcccgcgccgcgctccagcgggtgcgcggcaagggcgtcgacgtcgacgccgagttcaacgacatcctcgccgccgtggagcacgaccgcaggaacgacgagggcgcgttccggcggatcctgcggcgcgagtaccggccgtacctggtcatggccatcgcgttcccggtgttcctcaacctcaccggcgtggccgtcacggccttcttctccccgatactgttccgcacagtcgggttcgagagcgatgccgcgctgatgggcgccgtcattctcggcctcatgaacatcttcggcatcgtcggctcgggcttcgccatggaccgctacggccggaggctgctcttcatgatcggcggcgcgctcatgttcacctgccaggtggcaatggcgagcatcgtggggtcgcagctggggcacgggagcaagatggcgaaggggtacgcggtgacggtgctggtgatgacgtgcgccttctcggcgagcttcagctggtcgtggggggcgctgtactgggccatccccggcgagatctacccggtggaggtcaggtcggcggggcagggcgtggcggtggcgctcaacctgggcctcaacttcgtgcaggcgcagtgcttcctcgccatgctctgctgcttcaagtacggcaccttcctcttctacgcgtcgtggctcgtcgtcatgaccgccttcgccgtcgccttcgtgccggagaccaagggcgtgccgctcgagtccatgggccacgtcttcgcgcgccactggtactggggcaggttcgtcaaggaccacaagttcggcgacgtgtcgacctaaaatttgcaccgcatatgccgatgcggaatgtttggctttgatctcagaaatttagttagcgtgtgtgctctcgatcgtagtataaggctaagatggacgactttgggtaaattaatcaagaatgggcaatgtatgccactgaaatgtt

SEQ ID NO: 30183 - DNA, 805 bp, Oryza sativa
  Clone ID: UC-OSFLM202093A02_FLI
ttacaacaaagcacgcatttgcaactctgtccttcattgctgagacttttctcttcctgtatgttgggatggatgcattggatattgaaaaatgggagtttgccagtgacagacctggcaaatccattgggataagctcaattttgctaggattggttctgattggaagagctgcttttgtattcccgctgtcgttcttgtcgaacctaacaaagaaggcaccgaatgaaaaaataacctggagacagcaagttgtaatatggtgggctgggctgatgagaggagctgtgtcgattgctcttgcttacaataagtttacaagatctggccatactcagctgcacggcaatgcaataatgatcaccagcaccatcactgtcgttctttttagcactatggtatttgggatgatgacaaagccattgatcaggctgctgctaccggcctcaggccatcctgtcacctctgagccttcatcaccaaagtccctgcattctcctctcctgacaagcatgcaaggttctgacctcgagagtacaaccaacattgtgaggccttccagcctccggatgctcctcaccaagccgacccacactgtccactactactggcgcaagttcgacgacgcgctgatgcgaccgatgtttggcgggcgcgggttcgtgcccttctcccctggatcaccaaccgagcagagccatggaggaagatgaacagtgcaaagaaatgagaatggaatggttgatgaggagaatacatgtaaaatgtgacagcaaaagagagaaggcaagttttgggtttgtag

SEQ ID NO: 30184 - DNA, 1746 bp, Oryza sativa
  Clone ID: UC-OSFLM202094H12_FLI
tcagcagcagcagcagcaacaacatttggccgctctgaagattggtgacggagaatgcccggcggctccctcctcaatagcggcggcatggcggactacggcggcggtggcggcagcggcggcggcctcacgttcccggtcgtggttacctgcctcatggcggcctccggtggcctcatcttcggctacgacattggcatctcaggtggtgtgtcggagatggagtcattcctggagaagttcttcccgggcttgctgaaggggacggcgcacgcgagcaaggacgtgtactgcatctacaacagccaggcgctcacggcgttcacctcgtcgctgtacgcgttcggcatggtcgggacgctggtggcgagccgcgtcacccggcggaccggacggcaggccgtcatgctgatcgggggcagcatgttcctggtcggcgcgctcgtgaacgccgccgcggtcaacattgccatgctcatcatcgggaggatgctgcttggcctggggctcgggttctcgggccaggccacgccggtgtacctcgccgagatgtcgccgccgcggtggcgcggcgggttcatctccggcttcccgctgttcatcagcgtcgggtacctcatcgccaacctgatcaactacggcacgtcgcggatccccgtgtggggatggcgcctgtcgctcggcctcgcggcgttcccggccgccgtcatggtggccggcgcggcgttcatcccggacacgccgagcagcctggtcctgcgcgggaagcacgacctcgcccgcgccgcgctccagcgggtgcgcggcaagggcgtcgacgtcgacgccgagttcaacgacatcctcgccgccgtggagcacgaccgcaggaacgacgagggcgcgttccggcggatcctgcggcgcgagtaccggccgtacctggtcatggccatcgcgttcccggtgttcctcaacctcaccggcgtggccgtcacggccttcttctccccgatactgttccgcacagtcgggttcgagagcgatgccgcgctgatgggcgccgtcattctcggcctcatgaacatcttcggcatcgtcggctcgggcttcgccatggaccgctacggccggaggctgctcttcatgatcggcggcgcgctcatgttcacctgccaggtggcaatggcgagcatcgtggggtcgcagctggggcacgggagcaagatggcgaaggggtacgcggtgacggtgctggtgatgacgtgcgccttctcggcgagcttcagctggtcgtggggggcgctgtactgggccatccccggcgagatctacccggtggaggtcaggtcggcggggcagggcgtggcggtggcgctcaacctgggcctcaacttcgtgcaggcgcagtgcttcctcgccatgctctgctgcttcaagtacggcaccttcctcttctacgcgtcgtggctcgtcgtcatgaccgccttcgccgtcgccttcgtgccggagaccaagggcgtgccgctcgagtccatgggccacgtcttcgcgcgccactggtactggggcaggttcgtcaaggaccacaagttcggcgacgtgtcgacctaaaatttgcaccgcatatgccgatgcggaatgtttggctttgatctcagaaatttagttagcgtgtgtgctctcgatcgtagtataaggctaagatggacgactttgggtaaattaatcaagaatgggcaatgtatgccactgaaatgttagatc

SEQ ID NO: 30185 - DNA, 1274 bp, Oryza sativa
  Clone ID: UC-OSFLM202096G05_FLI
caagcccaagaacgaactcaccacgctagtgttgagaagtggagagagttgagaggaatcaatggagatgatggttcatgggaggagagacgagcagtatggcgggctcaggctcgggcttgggcttgggctcagcctcggcgtcgccggtggtgcagccgacgacgagcagccgccgccgcgccgtggtgccgccccgccgccgcagcagcagctgtgcggctggaacggcggcggtctcttctcctcgtcttcctccgatcatcgggggaggtcggcgatgatggcgtgccacgacgtcatcgagatgccgttcctgcgggggatcgacgtgaaccgtgcgccggcggcagagacgaccacgacgacggcgagggggcccagctgcagcgaggaagacgaggagcccggcgcgtcctcccccaacagcacgctctccagcctcagcggcaagcgcggcgcaccatctgccgccaccgccgccgccgccgccgccagcgacgacgaggactccggcggcggatcccgcaagaagctccgcctctccaaggaccaagccgccgtcctcgaggacaccttcaaagagcacaacaccctcaatcccaagcagaaggcggcgctggcgaggcagctgaatctgaagccgcggcaggtggaggtgtggttccagaacaggagggcgaggacgaagctgaagcagacggaggtggactgcgagctgctcaagcgctgctgcgagacgctcaccgacgagaaccgccgcctccaccgcgagctccaggagctccgcgccctcaagctcgccaccgccgccgccgcgccgcaccacctctacggcgcccgcgtcccgccgcccaccaccctcaccatgtgcccctcctgcgagcgcgtcgcctccgcagccaccaccacccgcaacaactccggcgccgcccccgcgcggccggtgcccacccgcccgtggccgccggcggcggcgcagaggtcgtcggcgtagagaccccactactgattaattagttaattagagatgagtagtggctttttcttaattagcagggtattaattaattacttaattagggttggacccctgtagttttcttgtttatactacgtgtataatttagctctggttttgaactttttaattagtttcataatctttttttttcctatctctcacttcaccctgtttgttgtttactcagcaaagaatatggtgtctttgtataaagtgatgcatgaaatggatcataaaagttttcaatatt

SEQ ID NO: 30186 - DNA, 1730 bp, Oryza sativa
  Clone ID: UC-OSFLM202099H03_FLI
cccaacgaagaaggaaaaaaaaaggaggaaaagaaaagaggaggaaagcgaagaggttggagagagacgctcgtctccacgtcgccgccatggccgcccgcgccgccgccgccgcgttcctgctgctgctcatcgtcggcgcggccaccgcggcgccggacatgtcgatcatctcctacaacgcggagcacggggcgcgggggctggaggaggggcccacggaggccgaggcgcgcgccgcgtacgacctctggctcgccgagaacggcggcggctcgcccaacgcgctcggcggcgagcacgagcgccggttcctcgtgttctgggacaacctcaagttcgtcgacgcccacaacgcccgcgccgacgagcgcggcgggttccgcctcgggatgaaccgcttcgccgatctcaccaacgaggagttccgcgcgaccttcctcggcgccaaggtcgccgagaggagccgcgccgccggggagaggtaccgccacgacggggtggaggagctgccggagtccgtcgactggagggagaagggcgccgtcgcccccgtcaagaaccagggccaatgcggaagctgctgggccttctccgcagtaagcacagtagaaagcatcaaccaacttgttactggtgagatgatcacattgtcggaacaagaacttgtagaatgctcaaccaatggacagaacagtggctgcaacggtgggctcatggatgatgcctttgacttcatcattaagaatggaggcattgatactgaagatgactatccttacaaagctgtagatggcaagtgtgacatcaacagggaaaatgctaaggttgtgagcatcgatggctttgaggatgtacctcaaaatgatgagaaatcacttcagaaggcggttgctcaccaaccagtcagtgttgctattgaggctggtggccgcgagttccagctctatcattcgggcgtcttcagcggtaggtgtggcacaagccttgaccatggtgtggttgccgtcggttatggcactgacaatggcaaagactactggattgtccgcaactcttggggcccgaagtggggtgagtctggatacgttcgcatggagcgcaatatcaatgtgaccacggggaagtgtggcattgccatgatggcatcataccctaccaagagcggagcaaacccacccaagccatctccgactcctccaactcctccaacaccacctcccccatccgcccctgaccatgtctgcgatgataacttctcttgcccagcgggcagcacctgctgctgcgcattcggcttcaggaatctctgcttggtttggggctgttgcccagttgaaggtgcaacctgctgcaaggatcatgccagctgctgcccgcctgactaccctgtctgcaacacccgggctggaacctgctcagcgagcaagaacagcccattgagcgtgaaggctttgaagcgcacgctcgctaagctgaacaccgcatgagctcatcgataacatgtaatcggcgaggagaggggatgaggcagcgtggagcctttctgaaatttctgcttccgtgcctccatatatcgttgtcgcattttgaggggacagcttatttactctactgcctgccttttatcttacagtgatctgtgtacatagctcgatccaatttgtactcttatttatcttctccaatttgtactctatataatttatcatctcaagaatacattaacg

SEQ ID NO: 30187 - DNA, 2221 bp, Oryza sativa
  Clone ID: UC-OSFLM202111B11_FLI
gccacggactcctctaattctctctcttgctttctctctcctcgcttcccgggtttgatacgtggggtagggaagcgattaaccggcgatcgatcgatcgatgcaagtgatcgcgctcggttgatccaggaattggagagcatcggctgatcgagagatggcggggaacgagtggatcaatggctacctggaggcgatactggacagcggcggcgcggcggggggagggggagtcgacccgaggtcgccggcggcgggggcggcgagcccgcgtggcccgcacatgaacttcaatccgacgcactacttcgtggaggaggtggtgaagggcgtcgacgagagcgacctccaccggacgtggatcaaggtcgtcgccacccgcaacgcccgcgagcggagcacccgcctcgagaacatgtgctggcgcatctggcacctcgcgagaaagaagaagcagctggagcttgagggaatcctgaggatttctgcacggaggaaggagcaggagcaggtgcgccgcgagacttcggaggaccttgcagaggatctgtttgaaggcgagaaggcggacaccgtcggtgaattggcacagcaagacactcccatgaagaagaagttccagaggaacttctcagagctcaccgtcagctggtccgacgagaacaaggagaaaaagctgtacattgtgctcatcagtcttcatggtctagttcgtggcgataacatggaacttggtcgggattcagatactggaggacaggtgaaatatgttgttgaactcgcaagagcacttgcaatgatgcctggcgtgtacagagtggatctgtttactcgtcaagtgtcatctcctgaagtggactggagctatggggagcctactgaaatgttaacctccggttccactgacggagagggaagcggtgagagtgctggtgcgtacattgtgcgcattccgtgcggtccaagggacaagtacctccgtaaagaggccctgtggccttacctccaagagtttgtcgacggagctctcgcgcatatcctgaacatgtccaaggctctgggggaacaggttagcaatgggaagctggtcttgccatatgtaatccatggccactatgccgatgctggagatgtcgctgctcttctttctggtgcgctgaatgtgccgatggttctcaccggtcattcacttgggaggaacaagctggagcagatcatgaagcaagggcgcatgtcgaaggaggagattgactcaacttacaagatcatgaggcgcattgagggtgaggagctggccttggatgcagcggagcttgtcataacgagtacaaggcaggagattgatgagcaatggggactgtatgatggctttgatgtcaagctagagaaagttttgagggctcgtgcgaggcgcggagttagctgccacggccgttttatgcctagaatggtggtaattcctcctgggatggatttcagcagtgttgtggttcctgaagataccagcgatggagatgatggcaaagactttgagattgcctcgccgaggtcactgcccccaatctgggctgaggtgatgcggtttttgaccaatccccacaagccaatgattctggctctgtcaagacctgatccaaagaagaacatcaccacccttgtcaaagcatttggagaatgtcgcccactgagggaacttgcaaacctaattctgatcatggggaacagggatgacatcgatgagatgtccgctggcaatgcaagcgtcctcaccactgtcctgaagctgatcgacaagtatgatctgtacggaagtgttgcattccccaagcatcacaagcagtcagacgtaccggagatttatcgcctcacagggaagatgaagggcgtcttcatcaatcctgctcttgttgagcctttcggtctcaccctgatcgaggctgcggctcacggtctcccgatcgtcgccaccaagaacggcggtccggttgacattaaaaatgctctgaacaatggactgctggtagacccgcatgaccagcacgccattgccgacgcgctgctgaagctggtggcggacaagaacctgtggcaggagtgccggaagaacggcctgcgcaacatccagctctactcgtggccggagcattgccggacatacctcaccaggatagccggatgccggatcaggaacccgcgctggctgatggacacgccggcggac

SEQ ID NO: 30188 - DNA, 2457 bp, Oryza sativa
  Clone ID: UC-OSFLM202113B07_FLI
gtggagttctgcgtcacacagcaaagcaaggcaatggataatggaggacagcgtcttgatataatttttaagttttcaacatattatcacatcacattacacttttcaatagaacactactagagggagttccataaattgagacactgtcgtgtccagaaagatagcaagtggatcatcttgcacaggctgcaccgtcgtattggttcagaatctttcaaataaagtcgaaatattaagaagatatgcttctcagaccatgcatcaccacactatataaggggcaaacaagctcccagtatcgttactttgagcccccgcctccccttttgaaataaggttgactgtaattctgcttttgttcgtaatatggatgatcataacttagactacaagggaagtggtgctcttgaagagcttgagatgttaacagtgaatgccaaagaagcccaagagctcatattgacgaaaatccttgagaggaatcaggctaccgagtacctgagcaaattcatgaatgggtcaacaaatatttctgccttcaagagacatgttcctgtagtaacatatgataaggtacatccatacattctcaggattgcaactggtgaggaatcttcaattttatgtggagaatatatcttggagctgcttagaagctcggggacttctcgaggtgagccaagattgatgccgtccatcttaaaggatcttgaccgtcgaacctacctctatagtctgatcatgcctatcatgaacaagtatatatcaggccttggtgaggggaaagctatgtaccttctctttgtgaaagctgaaacactgacagattctggaattccagttcgatcagtcctcactagctactataagagccctcatttccttcaccgcaaacacgatttatacaacaactataccagtcctgatgaggtcattctttgccctgatagccagcagagcatgtactgccagctgctctgtggcctggtagaacgccagcatgttcttcgtatcggggcagtctttgcctcagcattccttcgatctatcagcttccttgagcagcattggcgtgaccttgtcaatgacatacgaattggtcagctcaactccagtatcaccagtccagcatgccgtttggccatgctgaacttccttgcattgcccaacccagagctagctgatcaggttgaggcaatatgcagctgcggttcatggaaggggattctgggaaggctatggcctaatgttaaatatatcgaagctgttcttacgggcacaatggcacaatatatccccatgctggaattctatggtggtggtgcgattcctttcgtctgcacgatgtatgcttcctcagaaagctatttcggtgtcaatctgagtccactatgtagcccagctgatgtgtcttacaccatcctcccaaacatggcttactttgagttcataccattagaggacggcctcaggttgactgatcacgaggaggtgatagagaatgacaagcttgtcagcctggtagatgtcaaggttggatgttactatgagcttgtagttaccacattttcaggtctttacaggtacagggttggtgatgtgcttcaagtgacaggcttctacaaccgagctccgcagttcaaattcatttgccggagaaatgttatcctcagcatcgattctgacaagaccaacgaggaggatctccacaacagtgtcaccactgctaagaaaatcctggagaaccaaaattacctcctcctggagtacactagctacactgatatttccactgtccctggccactacgtgctgttctgggagatcaagtccacccacgatgaaaggccggcccctcttgacgctcagctcctcgagagctgctgtgctgctgtcgaggagtcactggactacgtctaccgtcgttgcagagcccatgacaggtccatagggcctctggagatacggcttgttgaagctggtgcatttgatgctctgatggatctattggttagccatggcagctccattaaccagtacaagacacccagatgcatcgaatctagccttgcactgaagctgctgaactccaaggtcattgcctgctttttcagtccacaggatcctgaatgcggcatgtaaaactttggtaaataagcaagtatgcttctgtgcttgcttgatatgcaatcttactacaattaaccgaaattaatagtctgagatatagtggaaataataataataataatgtactactagcttaaataatgaagttcttattttagatggctgcaggctttaggagcttcatttccaatctagtcagatcagcctgctgcctagataagtgggtataaatgttgccaacttttagattttcatttgggttttaattactgaatattcaggggccaacatacccaaatgagaatgatatgtgctgttgctgct

SEQ ID NO: 30189 - DNA, 674 bp, Oryza sativa
  Clone ID: UC-OSFLM202117E05_FLI
tggggataagacatttttcattgctgcacttcttgcgatgcaatatcagagagcattggttttacttgggtcaatggctgctctttccctaatgactattgtgagtgttataattggaaggatttttcagtctgtaccagcacaatttcaaacaacactacctataggagagtatgctgcgattgctctcctggcattttttggtttcaagtcaataaaagatgcatggcaacttccagataatgcaaatggaaaccttcagggaaactctgaatctggggagctggctgaggctgaggagcttgtcaaggagaaggtggctaaaaagttgactagtcctcttgaggtcctttggaagtctttcagccttgttttctttgcagaatggggagatcgctctatgctggctacaattgcgttaggtgctgctcagtctccttttggtgtcgcaagcggagccatagctggacacttggttgcaactttccttgcaattgttgggggagcattccttgccaactacctatctgagaagctggttggcctgataggaggagtactttttttgctgtttgctgttgccacattttttggtgtattctaatatctgaagaatttgtagcttgtaaaggattctgtaggtcaatttaatcctattttaaggttttaagggc

SEQ ID NO: 30190 - DNA, 2009 bp, Oryza sativa
  Clone ID: UC-OSFLM202118G07_FLI
cctatggttgcttccactgtcaccaaagggggactcgccatctaccttgttcctcagttcatgcgaatttcatgcggtcctgggctgtgactgggagtagattgagggttgatctcgtttgcggagtaacaaatttgcaagcctacaactgctagggagaatttgactaaaaatggggtcgtgttgcagcagagctacgtctccagattctggtcgaggaggagcaaacggttatggctattctcaccagacaaaacctgctcagacaactcctagctataaccatcctcagccgccgccgccagctgaggtgaggtacacaccatcagcaatgaaccctccggtagtcccacctgtggttgccccaccgaagcccaccccagacacaattcttggaaagccgtatgacgatgtgcgctcggtttactcccttggaaaggaactcggaaggggacagtttggggtgacatacctgtgcacggagatcgctagtggtaagcagtatgcttgcaaatccatctctaagcgcaagcttgtgagcaaggccgacaaggaggacattcgccgggagattcagatcatgcagcacctatctggacaacaaaacattgtcgagttccggggagcatatgaggacaagagcaatgtccatgttgtcatggagctctgcgctggtggggagctgtttgatcggattattgccaaggggcactactcagagcgtgcggctgctaccatctgcagggcagtggtgaatgttgtcaacatttgccattttatgggagtgatgcatcgtgatttaaaaccggagaacttcttacttgcaaccaaagaagagaatgcaatgctcaaagccactgattttggtctctcagttttcattgaagaaggaaaaatgtatagagacattgttggaagtgcttattatgttgctcctgaagtccttcggcggaattatggtaaagagattgatgtatggagtgcaggcgttattttgtacattcttctcagtggtgttcctccattttgggctgaaactgaaaagggaatatttgatgctattcttcaaggggagattgactttgagagtcaaccatggccatcaatatccgagagtgctaaagaccttgttagaaagatgttgacacaagatccaaagaaaagaattacttcggcccaagttctccaacatccctggctcagagatggagaagcatctgacaaacctattgacagcgctgttctttctaggatgaagcaattcagagcaatgaacaagctgaaaaagatggctctgaaggttattgcttcaaaccttaatgaggaggagatcaagggcctgaagcaaatgttcacaaacatggacacagacaacagcgggaccatcacatatgaagaactcaaagcaggattagccaaacttggatcaaagctttcagaagctgaagtaaagcagttgatggaagctgctgatgtagacggcaatggatccatcgactatgttgaatttatcactgccacaatgcatagacacaagctcgaaagagatgagcatttgtttaaggcattccagtattttgacaaagacaacagtggcttcatcacaagagatgaactggaatccgctttaatcgagcatgaaatgggcgatacaagtaccataaaggatattatatcagaagtcgacacggataatgatgggaggattaactacgaggaattttgcgctatgatgagaggaggggggatgcagcagcctatgaggctcaaatagtctgtttccttgtagaaaatgatgtacaattagattagtaaactgttttcgccttcttttttttgttccatggatggtagtcgacggataaaaggtttaccctggacgcagcttttgcattgttgagatgattgtgtatattttcttgccttgcccgtgtatggtgtagtgatttgaatgtcctcccttttgtaagttgtttctgcaagtacacacaataaaagagcatttttgc

SEQ ID NO: 30191 - DNA, 1167 bp, Oryza sativa
  Clone ID: UC-OSFLM202123C02_FLI
tccgcgagcctctagggttcgtgggatcccccggaaatggatccgaaccctagacttctcatcctactcgtcctcctcgcgttctccgccaccgtggcggtcgccgaggacggcgaatcgacggggggatcgaaggtctcgctggggcgccgtgcaggggggttcttgcacgggctgaagaaggaagcagtggtggagggagaccatggggtggccctcgatgaggtcggccccgggctgttcgatgcgctcttcgcgagtctctcgatgatcttagtcagcgagattggagatgaaacctttattattgcggcgctaatggcaatgcggcaccccaagtcaatcgttctgtctggtgcgctatcggcgctctacgtgatgacggtactatcaactggacttggtaggatagtccccaacttgatatcaaggaagcacactaacagtgctgctacagttttgtacttgttctttggactacgtttgttatacattgcttggaagtctgacccaaagggatctcagaagaaggaaatggaagaagtggaagagaagcttgagtcaggtcaaggaaaatcaacccttcgccggttctttggaagattttgtacaccgatctttttggaggcttttatcttaaccttcttagctgaatggggcgaccgaagccaaatagcaactattgcgcttgcaacccacaagaatgcaatcggagtagcagttggagcatcattgggccacactgtctgcacatcacttgcagtcataggtgggagcatgttggcatccaagatttcacaacggacagttgcaacaatcggaggtgttctcttcttggggttctccgtgtcatcgtacttctatcccccactatgattaacagcattaacagctccttactctttcttgataccctttggtcaccctgctccctgtgttgagcaaatgagtagaggaattaaattgattctttgggcacctctacgctacgattcgcaattcatgtatagcccttgcaaatgaaattgttcctgaccatgctacttcacttcagtctatagcagaagccgtctcgatgatgaaatcatgtctgattttttgcttggttgtacctgacatctaacttatacaatatatatacactatgttgttcaaggttccttgcgt

SEQ ID NO: 30192 - DNA, 3077 bp, Oryza sativa
  Clone ID: UC-OSFLM202123C04_FLI
ggggggcactcgttgagggtgggtttcagaggtgtgggaggtcgcctccatggcggaggacaagggaggcctcgatgccgtcctcaaggagtcggtcgacttggagaacatcccgatcgaagaagtattccagaatttgaaatgctgccgacaggggctcacttccgaagaggcgcagctgcgcctgcaactttttggtccgaacaagctcgaggagaaggaggagagcaaattcctcaagttcttggggttcatgtggaatccgctgtcatgggtcatggaggctgcagctatcatggccattgcattagccaatggtggggggaagccaccagattggcaggactttgttggtatcatcacactgctacttatcaactcaactatcagtttcattgaggaaaacaatgctggcaatgctgctgctgcgctcatggcgcgtcttgcgccaaaagccaaggtgctccgaaatggtagttggactgaggaagaggcagccatccttgtgcctggggacatcatcagtattaagctgggagatatcattcccgcagatgctcgcctcctggaaggagatcctttgaagattgatcagtctgcgctgactggagagtcattgccagccaccaaaggtcctggtgacggtgtttactctggttcaacggttaagcagggtgagattgaggctgttgtgattgcaactggtgtgcacactttctttggaaaggctgcacatcttgttgattccaccaatcaagttggccatttccaaaaggttttaacagctatcgggaatttttgcatttgctcaattgctgtggggatgtttgttgagatcattgtcatgtaccctatccagcacaggccataccgccctgggattgacaacctattggtgcttctcattggaggcattcctatagcaatgcccacagtcttatctgtaaccatggcaatagggtctcatcgcttgtctcagcagggagctataacaaagagaatgactgcaattgaagagatggctggcatggatgttctttgcagtgataaaacaggaactctgactttaaataagctcacagtggacaagaatctcattgagatttttgaaagaggagtcactcaggaccaagtaattctgatggctgctagagcatcccgaacagaaaatcaagatgctattgatactgcaatagtcgggatgctcgctgatccaaaagaggcacgtgctggtattcaagaggttcacttcctgccattcaatccgactgacaagagaactgcattgacatacattgatagtgatggaaagatgtaccgtgttagtaaaggcgcaccagagcagattctcaacctggcacacaacaagacacagatagaacgacgagtccatgctgtaattgataagtttgcagaacgtggacttcgatcacttgctgtagcatatcaggaagttccagatggaaggaaagagagtcctggtgggccatggcgctttgttgctctccttccactctttgatcctccaaggcatgatagtgcagaaacaattcgaagggcacttaaccttggtgtaaatgttaagatgatcacaggtgaccaactagcgattgggaaagaaacagggcgtcgtctaggaatgggtacaaacatgtacccttcatctgctttgttgggacagaacaaggatgagtctgttgctgctttaccagttgacgatctaatcgagaaagctgatggttttgctggtgtattcccagagcacaagtatgagattgtaaaacgtctgcaagcacggaagcacatctgtggaatgactggtgatggtgtaaacgatgctccagccctaaagaaagctgatattggtatagcagttgctgatgcgactgatgcagcaaggagtgcatctgatattgtactcacagaacctggcttgagtgtgatcattagtgctgttcttaccagtcgggcgattttccagcgaatgaagaactacactatatatgctgtctcgattacaatacgtattgtgtttgggtttatgctgcttgcccttatatgggagtttgatttcccgccatttatggttctgatcattgcaattctgaatgatggtaccataatgactatatctaaggatctagtaaagccttctccactacctgacagctggaagttggctgaaattttcacaactggagttgtgctgggtggatacttggcaatgatgactgttatattcttctgggctgcatacaagaccaactttttccctaggatctttcacgtcgaaagccttgagaagacagctcaagatgactaccaaaagcttgcatctgctgtatatcttcaagttagcaccatcagccaagctcttatctttgtcacaaggtctcgcagctggtcatttatcgaacgccctggctttctacttgtctttgctttcttcgttgcacagctgatagctacattgatagctgtttatgctaactgggcattcacttcaatcaaaggcattggatggggctgggccggtatcgtgtggctctacaatctcgttttctacttcccgctcgatatcatcaagttcctcatccgatatgctctgagtgggaaagcatgggatcttgtcattgagcagagaattgcgtttacaaggaagaaggattttggcaaggaagagagggaactcaagtgggcacatgcacataggacactccatggcctgcagccaccggatgcgaagcccttcccagagaagaccggctacagtgagctgaatcagatggcggaagaggcgaaacggagggccgagattgcaaggctcagggagcttcatacgctgaaggggcatgtggagtcagttgtgaagctgaagggcctggacattgataccattcaccagtcctacacagtgtgatagactcttatctaacaagagtaatatggttgctgcagaggaactgtttcgtttcatctaattagtagtttttatctcctctcagctaacataaatgtaatcaaccaacagttcatacaatctataaatcaaatcatcaaaggggattgttgagatt

SEQ ID NO: 30193 - DNA, 1722 bp, Oryza sativa
  Clone ID: UC-OSFLM202124E12_FLI
ctcgtcgtcgtcgttgacgtcatcaatggcgggtggtttcgccgtcgaggccaaggtcgccggcggcggcgagcggcgggagttcaaggggaagatcacgtggtacgtgtggctgtgcggcatcatcgcggcgacgagcgggctcatgttcggctacgacgtcggcatctccggcggcgtgaccgccatggacggcttcctgatcaagttcttcccgtcggtgtacgcgcggaagcaccgcgcgagggagaacaactactgcaagttcgacgaccagcggctgcagctgttcacctcgtcgctgtacctcgccgcgctggccgccagcttcgcggcgtcgaggctgtgcacgcggctggggcggcggcgcacgatgcagctcgcgtcggtgttcttcctcggcgggacggcgctgtgcgccggcgcggcgaacctggcgatgctgatcgtggggaggatctgcctcggcgtcggcgtcgggttcggcaaccaggcggcgccgctgttcctgtcggagatcgcgccggcgcacatccgcggcgcgctcaacatcctcttccagctcgacgtcaccatcggcatcctcatcgccaacgtcgtcaactacttcacctcgagcgcccacccgagcaccgggtggaggtactccctcggcggcgccggagtgcccgcggcggtgctgttcctgggctcgctggtgatcaccgagacgccgacgagcctcgtggagcgcgggcggcgcgacgccgggcgcgccacgctggagaggatccgcggcacgcgcgacgtcggcgacgagctggacgagatcgcgcgcgcatgcgaggcggcggcggcgctgagcgcggaggagtcggcgtaccggaggctgcggcggcgggagtcgaggccgccgctggtgatcgcggtggcgatgcaggtgttccagcagttcacggggatcaacgccatcatgttctacgcgcccgtgctattccagaccatggggttcaagagcaacgggtcgctgctctccgccgtcgtcaccggcggcgtcaacgtcgtctccacgctcgtctccatcgtcgccgtcgacaagatcggccgccgcaggctcctcctccaggcctgcggccaaatgctcatcgcacagacagcggtgggggcgatcatgtgggaacacgtgaaggcgaacggcaatccgggcgagaagtgggcggtggcgatcgtggtgctcatctgcgtctacgtctcgagcttcgcgtggtcgtgggggcccctggggtggctaatcccgtcggagacattccccctggcgacgaggacgacggggttctccttcgccgtgagctccaacatgctcttcaccttcctcatcgcgcaggccttcctctccatgatgtgcagtatgaaggccttcatcttcttcttcttcgctatctggatcgttatcatggccgccttcgtcttctggctgctgccggagacgaagggggtgcccatcgacgagatggtcgacacggtgtggcgccgccattggttctggaagaggttcttcaccgatgccggggatggcaggattggtaactgctgatggatgggtttgaaatttgatttgatttgaagatccattgatgaaatcaagtcaaattgaaattagttttacctattatttatgagtaatcggaatgtagtaatttatttgggtgtggatgattatgatgagatgaactacgtactctc

SEQ ID NO: 30194 - DNA, 1811 bp, Oryza sativa
  Clone ID: UC-OSFLM202132E03_FLI
caacaactgcgcgagtgagcgcgcggctattgcgtgccacggcgtgccgttgagcgatggctggaggtgggttccccgtggccggcggcgccccgccgggcgactatggcggcggcataaccttctccgtcgtcgtcacctgcctcatggccgcctccggcggcctcatcttcggctacgacatcggcatctccgggggagtgacggcgatggagtcgttcctggcggccttcttcccgggggtgctccggcggatggcggcggcgcggcgggacgagtactgcgtctacgacagccacgtgctgacggcgttcacgtcgtcgctgtacctggccgggctggccgcgtcgctggcggccggccgcgtcaccagggcggtcgggaggcaggccgtcatgctcgcgggcggggcgctcttcttcgccggcgccgccgtcaacgccgccgcggtcaacatcgccatgctcatcgtcggccgcatgctgctcggcttcggcattggcttcaccaaccaggcggcgccggtgtacctggcggagacggcgccggcgaagtggcggggtgcattcacgacggggttccagctcttcctcggcatcggcaacctgacggccaacctgacaaactacggcgcggcgcgcatcccgcggtgggggtggcgtctctccctcggcctggcggcggcgccggcgtccgtcatcctcgtcggcacgctgctcatctcggacacccccagcagcctcctcgtgcgcgggcgggtggagcaggcgcgcgccgcgctccggcgcgtgcgcggcgccaaggcggacgtggacgccgagctggagggcgtggcgcgcgcggtcgaggcggcgcgcgccaacgaggagggcgcgtaccgcaggatcctctggaggcagcaccgcccccacctggtgatggccgtcgccgtgccgctgctccagcagctcaccggcgtcatcgtcatcgccttcttctcgccggtgctcttccagacggccgggttcggcagcaacgcgtcgctgatgggggccgtcatcctcggcgccgtcaacctcggctccaccctcgtctccatcgccacggtggaccggtacggccgccgggtgctgttcctgaccggcggcctcgtgatgatcgcctgccaggtcgcggtggcgtggatcatggggtcgcagatcgggcgggacggcgagtcggcgatggcgaggcgctactccgtggcggtgttggcgctgacgtgcgtcttctcggcggcgttcgggtggtcgtggggcccgctgacgtgggtgatccccggcgagatattcccggtggagatccggtcggcggggcaggggatcagcgtggccgtcaacctcggcgccaccttcgtgctcacgcagacgttcctcgccatgctgtgcagcttcaagtacgccacgttcctctactacgcggcctgggtcgccgtcatgaccgccttcgtgtgggcgttcctgccggagaccaagggggtgccgctcgaggccatgggcgccgtctgggcgcggcactggtactggcggcgcttcgtgcagccgccaccggcggccaaggacgccatgctgccggaggtcctcgtgaactgacaacgtatactgtacgtgttctctgccttgaccgtgtggcggcgctgcattaattcgtgggaagttgtgtaaaattaaatctggtttctggtttaacggttcctacatggttgaataccatcccgtgtttgtcctcttgcgaaaaatttgtattgtttacatatgaacaaatccaaagtccgtgttctattttagtttctt

SEQ ID NO: 30195 - DNA, 1722 bp, Oryza sativa; identical to SEQ ID NO: 30193
  Clone ID: UC-OSFLM202132E11_FLI

SEQ ID NO: 30196 - DNA, 1889 bp, Oryza sativa
  Clone ID: UC-OSFLM202141F04_FLI
ctccatttgattgatctcgtcgtcgtcgttgacgtcatcaatggcgggtggtttcgccgtcgaggccaaggtcgccggcggcggcgagcggcgggagttcaaggggaagatcacgtggtacgtgtggctgtgcggcatcatcgcggcgacgagcgggctcatgttcggctacgacgtcggcatctccggcggcgtgaccgccatggacggcttcctgatcaagttcttcccgtcggtgtacgcgcggaagcaccgcgcgagggagaacaactactgcaagttcgacgaccagcggctgcagctgttcacctcgtcgctgtacctcgccgcgctggccgccagcttcgcggcgtcgaggctgtgcacgcggctggggcggcggcgcacgatgcagctcgcgtcggtgttcttcctcggcgggacggcgctgtgcgccggcgcggcgaacctggcgatgctgatcgtggggaggatctgcctcggcgtcggcgtcgggttcggcaaccaggcggcgccgctgttcctgtcggagatcgcgccggcgcacatccgcggcgcgctcaacatcctcttccagctcgacgtcaccatcggcatcctcatcgccaacgtcgtcaactacttcacctcgagcgcccacccgagcaccgggtggaggtactccctcggcggcgccggagtgcccgcggcggtgctgttcctgggctcgctggtgatcaccgagacgccgacgagcctcgtggagcgcgggcggcgcgacgccgggcgcgccacgctggagaggatccgcggcacgcgcgacgtcggcgacgagctggacgagatcgcgcgcgcatgcgaggcggcggcggcgctgagcgcggaggagtcggcgtaccggaggctgcggcggcgggagtcgaggccgccgctggtgatcgcggtggcgatgcaggtgttccagcagttcacggggatcaacgccatcatgttctacgcgcccgtgctattccagaccatggggttcaagagcaacgggtcgctgctctccgccgtcgtcaccggcggcgtcaacgtcgtctccacgctcgtctccatcgtcgccgtcgacaagatcggccgccgcaggctcctcctccaggcctgcggccaaatgctcatcgcacagacagcggtgggggcgatcatgtgggaacacgtgaaggcgaacggcaatccgggcgagaagtgggcggtggcgatcgtggtgctcatctgcgtctacgtctcgagcttcgcgtggtcgtgggggcccctggggtggctaatcccgtcggagacattccccctggcgacgaggacgacggggttctccttcgccgtgagctccaacatgctcttcaccttcctcatcgcgcaggccttcctctccatgatgtgcagtatgaaggccttcatcttcttcttcttcgctatctggatcgttatcatggccgccttcgtcttctggctgctgccggagacgaagggggtgcccatcgacgagatggtcgacacggtgtggcgccgccattggttctggaagaggttcttcaccgatgccggggatggcaggattggtaactgctgatggatgggtttgaaatttgatttgatttgaagatccattgatgaaatcaagtcaaattgaaattagttttacctattatttatgagtaatcggaatgtagtaatttatttgggtgtggatgattatgatgagatgaactacgtactctcaaattcacattcaaattattgagaggcatgcgtacatgtaccgatttattcctcgagcgagtattcagtataattgcaaatgaaggcaataatatatatagcaaatgtacatgaacagaattgaacatactaattcaaacttttcctgtatc

SEQ ID NO: 30197 - DNA, 1131 bp, Oryza sativa
  Clone ID: UC-OSFLM202141G08_FLI
tctgaattgcaggccaattccagttgagtttctccacagaccacagatatggcttccggcaggatagctctgctctgccttcttggcttgctgctggtagcagcctcaccggctgccattgctgccaaagatgacaaaatcttctaccagattactttcatgtggccgggagcgtactgcgcgcagacgaaggccggatgctgcatgccgaagaccgacgtcgcgccggcgtccgacttctacgtcgccggcttcacggtctacaacgccaccaccaactcttccctgtccagctgcagcaacactccattcgacatgaaccaaattggggatgtcacgaggctgatgcagtactggaacaacatcaggtgccccagcaagagcggccagaagggctggaagaacgcgtgggagacgtccggcgtctgctccgacctcaccgagagcgcctacttcgacaccgccctcgccctccgcgacaagatcaaccccctttctcgcctcgtcagcaacggtattaagccggactttgggctgtacagcgtgaagaagatcaaggaggtgatcgaggaggggatcggcgcgccggcgctgatccagtgcagcaagggcccgttcaacaagttccagctataccagatatacgtctgcgtcgcggaggacgccaagacgttcgtggagtgccccagcccgaggaagccgtacacctgcggcgacgacatcctcttccaccctttcaagaagtggatgctcaagaccaactccaccaaatcctacgccgccgccgacgccatcgaccagctgctcgaagcggtcatggaaatctgagctcgatcgatcgatcgatcaagaagacaaattaacccttgttgtgatatgcgatttgtgcgtgtgtgttgtctgtttcgatcgtgatgttttctgcgtgtttatttcgtgatgttctctcatcgcgcccgcgcgcggttgggtacgatccgggacacctacgtagcactgaatccgtctctgtgatgcattcagagaataagtccgaatatgtgcggccttgttaatgttttcatgaataactcgtgtagtgggattactttgtcatcggacatttcatgatttccgatgcacaccttggct

SEQ ID NO: 30198 - DNA, 1093 bp, Oryza sativa cypress
  Clone ID: UC-OSROCYP002H08_FLI
ctcgaccgccactactgtacacggcccagagcgagcctcctcctcctctgcaccaccggagatggcttccgccgcgctgccggaggccgtcgcgccgaagaagaagggcaacgtccggttcgccttcgcctgcgccatcctcgcctccatgacctccatcctcctcggctacgatatcggggtgatgagcggggcgtcgctgtacatcaagaaggacttcaacatcagtgacgggaaggtggaggttctcatgggcatactgaacctctactcgctcatcggctccttcgcggcggggcggacgtcggactggatcggccggcggtacaccatcgtgttcgccgccgtcatattcttcgcgggggcgttcctcatggggttcgccgtcaactacgccatgctcatgttcggccgcttcgtggccggcatcggcgtgggctacgcgctcatgatcgcgccggtgtacaccgccgaggtgtcgccggcgtcggcgcgtggcttcctgacgtcgttcccggaggtgttcatcaacttcggcatcctgctcgggtacgtctcgaactatgctttctcccgcttgccgctgaacctcgggtggcgcatcatgctcggcatcggcgcggcgccgtccgtgctgctcgcgctcatggtgctcggcatgccggagtcgccgcggtggctggtcatgaagggacgcctcgcggacgccaaggtggtgctggagaagacctccgacacggcggaggaggccgcggagcgcctggccgacatcaaggccgccgccggcatccccgaggagctcgacggcgacgtggtgaccgtccccaagagagggagcggaaacgagaagcgggtgtggaaggagctcatcctgtccccgaccccggccatgcggcgcatcctgctgtcgggcatcggcatccacttcttccagcaggcgtcgggcatcgactccgtcgtgctctacagcccgcgcgtgttcaagagcgccggcatcaccgacgacaaacacctcctcggcaccacctgcgccgtcggtgtcaccaagacgctcttcatcctcgtggcgaccttcttcctcgaccgcgtcggg

SEQ ID NO: 30199 - DNA, 879 bp, Oryza sativa
  Clone ID: UC-OSROCYP004E11_FLI
catcctcctactagtttctttcttgtttctttggaatttttttgatctcttgaagagatccggttcttggattaagttttggacaagaaccgtactgtgaccatgtcgtcgccttcgcgccggagctccagcccggagagcaacaccagcggcggcggcggtggcgccgacgagcggaagaggaagaggatgctgtcgaacagggagtcggcgaggcggtccagggcgaggaagcagcagaggctggaggagctgatcgccgaggcggcgcgcctccaggccgagaacgcgcgcgtcgaggcgcagatcggggcctacgcgggggagctgagcaaggtcgacggcgagaacgcggtgctccgcgcccgccacggcgagctcgccgggcgcctccaggcgctcggcagcgtcctggagatcctccaggtggccggcgcgcccgtcgacatcccggagatccccgacgacccgctgctccgcccatggcagccgccgttcgcggcccagcccatcgtcgccaccgccatggccgacgccttccagttctgagccaccatggagagctcgcacgccatggccattggcatcaatggcatggttgcagctgcattacaactagtagtactagcctctgtggttgtgtctgatgatgcttattatgtttaattatggtttgcttcatgttgttttcattaatctagaccattaataagcaatgtgtgttgtaatcttgtctagtcttatgtgagatgtgttcatctccagtgctccttgctaataagggtggaagagaacaatccgatttgatgtaattcttggagagcacatgtgtgctggtttgtgatgtgatgaactgatgattgtaatattttgacattg

SEQ ID NO: 30200 - DNA, 540 bp, Oryza sativa
  Clone ID: UC-OSROCYP005G07_FLI
caaagagttcgacatcccgaagggccacatcgtcgcgacatctccagccttcgccaacaggctccctcacatcttcaagaaccccgactcatacgaccccgaccgctacgcaccaggcagggaggaggacaaggcagcgggcgccttctcgtacatctcctttggtggcggcaggcacggttgcctcggtgagcccttcgcctacctacagatcaaggccatatggactcacctgctgaggaactttgagttcgagctggtctcccccttcccggagaccaactggaaagccatggtcgtcggcatcaaggacgaggtgatggtcaacttcaagcggcggaagctcgtcgtcgacaactaggatgccaccttcaaccttaggagtcgatgcttgtcgcgcttttcgcctttttttctcttcttttccctttctgtcagtatttgatccgtgtaagtttctgccagctttgtattagggtgtttcagtcgttttaggatcctgtgatttgcttcctgccatgaaaaatcaagcttgatctc

SEQ ID NO: 30201 - DNA, 1622 bp, Oryza sativa
  Clone ID: UC-OSROCYP011B02_FLI
cttctcctagctcgccaagatgaggatttccatggctctcgcggcggccgcgctgctgctgctgctgtcgctggcagcggcggacatgtcgatcgtgtcgtacggggagaggagcgaggaggaggcgcggcggctgtacgcggagtggaaggccgagcacggcaagagctacaacgccgtcggcgaggaggagcggcggtacgcggcgttcagggacaacctccggtacatcgacgagcacaacgccgccgccgacgccggggtccactccttccgcctcggcctcaaccgcttcgccgacctcaccaacgaggagtaccgggacacctacctcggcctcaggaacaagccgcggagggagaggaaggtcagcgacaggtacctcgccgccgacaacgaggcgctgccggagtccgttgactggaggaccaagggggccgtggctgagatcaaggaccagggaggttgcggaagttgctgggctttctcagcaatagcagctgtagaaggcatcaaccagattgttactggcgacctgatatctttgtctgagcaggagctagttgactgtgacacttcatataacgagggatgcaatggaggtctgatggactatgcatttgatttcatcatcaacaatggtggaatcgacaccgaggatgactacccttacaaaggcaaggacgaacggtgtgacgtaaacaggaaaaacgcaaaggttgtcacaattgacagctacgaagatgtaacaccaaacagtgagacgagtctgcagaaggcggtagcaaaccagcccgtcagtgttgcaattgaagccggtggcagagcattccagctctactcatcgggtatcttcacgggtaaatgtggaacagcactagaccacggcgtcgctgctgttgggtacggcacagagaatggcaaggactactggatcgtgaggaactcgtggggcaagagctggggtgagtccggctacgtccgtatggagcgcaacatcaaggcgagcagtggcaagtgcggcattgccgttgagccatcctaccctctgaagaagggcgagaaccccccgaaccccggccctactccgccgtccccaaccccgcctcccaccgtctgcgacaactactacacttgccccgatagcaccacctgctgctgcatctacgagtatggcaaatactgctacgcctggggctgctgcccactcgagggcgccacctgctgcgatgatcactacagctgctgccctcacgagtaccccatctgcaatgttcagcagggaacctgcctcatggctaaggacagtccactggcagtgaaggctctgaagcgtaccctggcaaagccaaacttgtctttcttgtttggcaacggcaagaagagcagcgcttgagcaatttcagaaccgtatcagaccgtccagagccagcgtggttgcatcatcaaatgatcagctggtaactgacgaagacgattgcgcagctcggcggcgaaccctgcgcactaagtatatctgcttttataatagatttctcgtgtacataaaatctaaaaaaacgggttcagttggttacagaactgccaaatttgcttctgaatgtatatgtaaaattcagctg

SEQ ID NO: 30202 - DNA, 1720 bp, Oryza sativa
  Clone ID: UC-OSROCYP012F07_FLI
cttgagtatggtcacttcttcagttcttcctaaggtggttgatgatgccggcgagggcgaggccaaccctcgccgggcgaaatggtggtacgcgacgttccacagcgtcaccgccatggtcggcgccggcgtgctcagcttgccgtacgccatggctcacctaggatgggggccggggacggcggcgctggtggtgtcgtgggggatgacgctgtacacgctgcggctgctgatcgagctgcacgagtgcgtgcccggggtgcggttcgaccggtaccgcgacctcggcgcgcacgcgctgggcccgcgcctggggccctggctcgtcgtgccgcagcagctcatcgtgcagctcggctgcgacgtggtgtacatggtcatcggcgggaaatgcctcatgaagttcgccgagtcggtgtcgtcgtggtcgcgcgcgccgcagctgcaccaccagtcctactggatctgcatcttcggcgcctcccagttcctcctctcccagctccccagcctcgactccatcaccgccgtctccctcgccgccgccgccatgtccgtcggctactcgacgatatcatgggcggcgtgcttggcgaggggtactcccgcggcggcggagggcggcggtgggggggtgagctacgcgtacaaggacgggacggcggcggactcggtgttccgggtgtgcagcgcgctggggcaggtggcattcgcgtacgccgggcacggggtggtgctggagatccaggcgacgatcccgtccacgccgacgaagccgtcgaggggggccatgtggaagggcgccgtggcggcgtacctggtcaccgcgctctgctacttccccgtcgcgatcgcgggctactgggcgttcggccgcgacgtctccgacaacgtgctcgtcgcgctgcgccggccgccgtggctcgtcgccgccgccaacatgatggtcgtcgtccacgtcctcggcagctaccaggtgtacgccatgcccatcttcgagaccctcgagacgattctgatcaccaggatcaggctccctcccggggcgctcctccgcctcgtcgcccgatcagcctacgtcgcgttcacgctgttcgtcgcggtgacgttcccgttcttcggcgacctgctcggcttcttcggcggcttcgggttcacgccgacgtcctacttcctcccctgtattctgtggctgaagatcaagaagcctccgaggttcagcgcgtcgtggtttgccaactggggttgcatcgtcgttggagtgctgttgatgatcgcttccaccatcggcgggctacgaagcatcatccaggatgcctcgacgttccagttctactcgtgatgggtgatgatgcatacgtactgacttagtacatacagaacgtcaggatcaactgtaaccaggccaagaaattagaggtatcaagagtagttgcaaacgatggccatattattctgtgactttcattgatcgttggcctcgcttgcagcgtgccggccagcggtccttgcgaaatgtgtaactgaagacgaattacagtagtgattcagtgatgcgcatcgaccctgtctgtgcaccagatgtaatagaccttgctgacacacggtttcgcaatcctcatgctgaataacatcgatggcgattgcagggagaaaaatatatataaacatctagtaatacaagtttactatcgcagtgattgcgaatcttctattcttc

SEQ ID NO: 30203 - DNA, 1052 bp, Oryza sativa
  Clone ID: UC-OSROCYP013F04_FLI
tggctgtcggggaggcggcggtcggggtgggcgaggctggtggaggaggaggaggaggggagaaggcggatcgagaggaggaggaggggaaggaggatgtggaggagggcggcgtgtgtaaggatctggtgctcgtcgaggacgccgtccccgtcgaggatccggaggaagccgcagcaactgcagcacttcaggaagaaatgaaagcgctcgttgaatccgtcccagttggtgctggggcggcattcaccgcgatgcaactacaggagcttgagcagcaatctcgtgtctaccagtatatggctgcccgtgtgcctgtgcctactcatctcgtcttcccaatatggaagagtgttactggtgcatcttctgaaggcgcccagaagtacccgacattgatggggttggcaacactctgcttggactttggaaagaacccagaaccagaacctgggaggtgccggcgaactgatggaaagaagtggcggtgctggagaaatgcaattgcaaatgagaaatattgcgaacgccatatgcaccgtggccgcaagcgtcctgtacagcttgttgtcgaggatgacgagcctgattctacctcagggtcgaaaccagcatctggcaaggccaccgaaggtggcaagaagactgatgacaagagctcaagtagcaagaagcttgcagtggcagcaccagctgctgtggagtctacatgattgatgcagcatttaggagctgcataaagagcataactgtgctggcaattagagttcgcttcttattgtaatcctgaaaagactgtagtctggtctagctataacctcatcaagcaagaaaagtgtctgtggaaagaagccacaaaaactttcatttagctgtcactgaaattttcagtttaggtgtatagtttgatttagctttgccgtgccctctgccttcaggcagatgagcggcattattggataaatcctctctgactgacaatatcgcattgtgactcaagaagccgatggaaggatctgcgagactagatacgaagctatttgttgtgtatc

SEQ ID NO: 30204 - DNA, 1331 bp, Oryza sativa cypress
  Clone ID: UC-OSROCYP013H07_FLI
caaacgcccatctccaagatatgcatcccggagtcagctgccaacatcatgctgccgtgcaaggcagggcaagatatcgtcaagggcctgaagggaaaaaaggaccatcgccggaggcttctctggtacaccggagaagaagagagccatcgccggtcactggccggcgccgccggcgaggattactgcgcgcaatcgggcaaggtggcgctgatgtcatcgggcggcatgcaccagctgcacatattcattttcgtgctcgcggtgttccacgtcacctactgcgtcatcaccatggctctagggcgtctcaaaatgaagaaatggaagaaatgggaattagagaccaactcgttggagtatcagttcgcaaacgatccttcacgattccggttcacgcatcagacatcgttcgtgaaacggcatctgggactgtcaagcacacctgggctcagatggattgtggcgttcttcaggcagttcttcgggtctgtcaccaaggtggactacctgaccatgcggcaaggcttcatcaatgcgcatttgtcgcagaatagcaagttcgacttccacaaatacatcaagaggtcattagaggacgatttcaaagttgtcgttggcatcagcctcccattgtggtttgtcgcgatccttgtgctcttccttgatatccaagggttcggcacgcttatctggatctcttttgttccactcgtcatcctcatgttggttgggacaaagctggagatggttatcatggagatggcacaggagatacaggacagggcaactgtgatcaagggagcaccggtcgttgaaccaagcaacaagtacttctggtttaaccggcctgattgggtcttgttcttcatacacttgatactgttccagaacgcatttcagatggcacatttcgtgtggactctggcaacccctggcctgaagaaatgcttccatgaaaacatgggcttgagtatcatgaaagttgtagtggggatattcattcagttcctatgcagctacagcaccttccctctctacgcactcgtcacacagatgggatcaaacatgaagaagaccatcttcgaggagcagacgatgaaggccctgatgaactggaggaagacggcgagggagaagaagaagctccgggacgccgacgagttcctagcacagatgagcggcgacacgacgccgagccgcggctcgtcgccggtgcacctgctgcacaagcaaagggtgaggtcggaagatccgccgagcgcaccggcatcgccggggttcgccggagaggccagggacatgtacccggtgcccgtggcgccggtggt

SEQ ID NO: 30205 - DNA, 1231 bp, Oryza sativa
  Clone ID: UC-OSROCYP014H01_FLI
ctcttgtctcgctgtggctcgctggacacaacacacacccacacccactcccccactctctctccggttcatgtcctgctgctccccatgtcgcccccactcgagctcgactacataggcctctcgccgccggtgcccgccgccgccgatgccgccgccgacaacgacctgaagggcaccgagctccgcctcggcctgcccggctcccactcgccggaccgctccccgcccgccgccacgctcgaccttctccccgctgccaagggcgccaagcgcgggttctccgacgaggcgcgtccgctgccggcgtccgccgccgccgccgccgccgccgggaagggcaagaaggcggcggccggcgaggaggatgaggatgcggaggaggaggacaagaaggtcgccgccgcgccgcaggcgcctgctgccaaggctcaggtggttggatggccaccaattcgcagctaccgcaagaacacgatggctactaaccagctgaagagcagcaaggaggatgctgaagcgaagcagggccaggggttcctgtacgtcaaggtcagcatggatggtgccccctacctcaggaaggtggacctcaagacctacaagaactacaaggacctgtcaactgcgcttgagaagatgttcattggcttcacaactggcaaggatggcttatctgagagccgcaaggatggtgaatatgtgctgacttatgaagacaaggatggagactggatgcttgttggcgatgttccatgggagatgtttgccaactcttgtcgcagactcaggatcatgaaaggttcagatgcaattggacttgctccaagggcagttgataagtccaaaaaccgcaactagaatggtttctgccccacagtcaaaagcaagatggagatcaaatgactgtagggaattttctgaaaaccaagaagtctaacagttttaagatggagtctgccttatggtctgtactacatggtttgctattgtgaaagttaaaaaaaaaggtgtcttgttatgttagcttcgccaaatctcctagggacataaactctatttgattgtgcccaagtctttgtacgtgtgttaatgctattcgtgtaaatggtttggacaccatgtgctactgctatgattgagcacccctacctactttgcaaaatgttgtcaatgaactgtttgttcgctacataaatgttcaatgaagcttgcaaatgtattgtccacc

SEQ ID NO: 30206 - DNA, 1076 bp, Oryza sativa
  Clone ID: UC-OSROCYP016G10_FLI
cgcgacattccggaggagaggtataccaatgcttttctcgggtacgggcctgaggactcgcattttgttgtggagctcacttacaattatggtgtggaaagttatgatatcgggactgctttcggtcacttcgggattgctgtcgaggacgttgcaaaaacagtagatctcattaaagccaagggaggaacggtaacaagagaaccaggacctgtaaaaggtggaaagtctgtaattgcttttattgaagatcctgatggttacaaatttgagcttatagaaagaggtcctacacctgagcctttatgccaggtaatgcttcgagtgggagatcttgatcatgctatcaatttctatgagaaggcatttggcatggaacttctccggaaacgagacaatccccaatacaagtatactattgcaatgatgggatatggtcctgaagacaaaaatgctgtactggagttgacctacaactatggtgtcaaggaatatgataaaggaaatgcttatgcacagattgctattagcacagatgatgtctacaagactgcggaagtcattagacaaaatggtggacaaataactcgtgaacctggcccattacctggaattaatacgaagataactgcttgcacagatccagatggctggaaaacagtatttgttgataatgtagattttctcaaggagttggaagaatgagtttttgccaatgatctcatcttggtacaggattcagaggtttttccccttgatttgacatcttgcgcccttgaaatcttgtaaaagccacaccacctcgaactgaggtttgtagataggccatgcaaatctaccattccacagttggtagtttaatagagcattagattacaacattccaagcgatgtagatgcgcaatccattttgttagcgaagtcaaatcatatgtacaaattttgttttccgggtcagaactattgttcttaatcaatccattttacattcgaaagttagcattcctgctgtaggacttcttgtcatttgtattctatgtcatggaatatgaatgaatggtggtaagtatggaatc

SEQ ID NO: 30207 - DNA, 1610 bp, Oryza sativa
  Clone ID: UC-OSROCYP028C02_FLI
cgcccccgcccgctactcgcgtgcttcgcccgtcacacggtgactcacaccgatccacgccgccaccgacgacgatctcctccgcgccgcccctccgtgcaacccctaactgccgcccccattcctcccctcaccatccaacctcgccacctgacgattcccctaagcgccgctctccccgcttccatcgccgccccccgctgctcgcgcgcctccgcccatcgcgccgatccacgccgccaccgatgacgatctcctccgtgccgcccctccgtgtatcgtctaactgccaccccatcccttccctcaccatccaacctcgccgcccgacgattcccctaagcgccacgcgctctcatccgtcccatcaccatctccttccaacctctccggccatccgccctcatccctcccctcgccatgtccttccaacctcatcggccatccggacgtcgccccctgcccgtcggagatcgacggccgccggttccaccaaccaccgcaattgaccccatctctcatctctgtgtttactgaatatttgcatagtgtttgattttgaccaaatccactatagtgatggcagatgaacagtgatactacttcaacatcagaaattttctgcatgttgtgaggattgttcagctggcttgcacacattaagatatggataacaatattgggggctccacaccagcatcgttaacaagatcacgcccttttgctgatattactaatacaagtgccggggataaaaaaagaacgtaacagtattgggtctcccccctcttatctttaacaacatcaagagttttttttgtcagttatattcagtccatcaagatgtcacttgcgtactaatttcgcaagatttcctccctcagccctgtttgccgatattactaatgcaagcgcggggggatttacaaataaaccatgtcagtaagagatgcacatcctccaatttgccgcaaaaggaaatatgcaaaatctgcaagaaggtggtgctaatctcagcgcattagaattaagaaggaagtgatgtgaccatggctactatggatacaaccgttgctcacatcatagatgaacaacaagatattaagttcaagtcctccaagtgctggaatccgattctgctacactgctgacttcaaacggccaccaaatctgcatacgacctccgttttcggcccgtgagtacttgatggaaagctctcggagtcgtctttccaacggatccagcatcatccccgaattccatcttgttttgacgcaatcacaaaaacaaggtgctgcgtcacctgtcatgggcctttgggcttgtaacttcgtttgggaccccggcccaagtggggcccagtggggtgcgccccaatctggtagagcacgaccctaggatcctcttggtcgttctcgcacccctataagtagccagataccccttcagggttgcttagggttttgattaattgtaagtttagccattgctacttagcttgcagcgcgcatgtcggctagaccgtccatctgcttgttcgaaacctcactttatcgtgtatcaattcatctttgtgcgtcttgtctatctaataattcagttgctttct

SEQ ID NO: 30208 - DNA, 959 bp, Oryza sativa
  Clone ID: UC-OSROCYP028E06_FLI
ggtccgcctaaagaaaaacacgcacacacttcttctgcttccctccccttgtttccgctccacttcccttccaagcaagaaaaccgaggcttcagcttagctaggaccgaccgatccgatgtgcggcggtgcaatcatctacgactacatcccggcgcgccgccggttgtgcgcctccgacttctggcccgacgccgacgactccgacccccacacccccgctcccgagaaaccgccgcgcgcgaagagggagcggaagaaccagtaccgcgggatcaggcagcggccgtgggggaagtgggcggcggagatccgcgacccggtgaagggggtgcgcgtctggctcggcacctacccgaccgccgaggccgccgcgcgggcctacgaccgcgccgcgcgccgcatcaggggcgccaaggcgaaggtcaacttccccaacgacttcggcgccgcccccgcgccggccgcggcggcggcgaaggccgtccctcgcgtcgcgcccacgccggccgtgctcccgccgcccaagatggaggcggtgtccgagggcgccggcgcctgctcctccgacgaggtcaaggagctgtccgaggagctgctcgcgtacgagaactacatgagcttcctcggcatcccctacatggagggcggcgccgcctccgccgccggcgccgaggaagccgcggcgcccgccgggctctggaccttcgaagactacgagctgccgtcgctagcgctctagtaaaaatgtcacaataaaaatgacatgtatgtgaaaaaatttttccctacccgtagtaagtaaccagtgtctttttttaccgtactctatgcgttatttttgttgaaattaatccattgttgaagttgtaactgtgcatggtcggcgccagtctcagtgaagcttttgctgaatccaagtttttctctaatgtaaatatgaaatttccagttaactc

SEQ ID NO: 30209 - DNA, 1863 bp, Oryza sativa
  Clone ID: UC-OSROCYP029F03_FLI
gttttggtcaagctcgaccaggccaagacgcaatggtaccatttcatggcgatcgtcatcgccgggatggggttcttcacagacgcctacgacctcttttgcatcgcgctggtcaccaagctgttgggtcgcctttactacaccgacatcaccaagcccaacccagggacactcccgcccaacgtgtcgtccgccgtcaccggcgtcgcgctctgcggcacgctcgccggccagctcttcttcggatggctcggcgacaagctcggccgcaagagcgtctatggattcacgctcatcctcatggtcgtgtgctccatcgcctccggtctctcgtttggccacacgcccaagagcgtgattgccacgctctgcttcttccgcttctggctcggcttcggcatcggcggcgactacccgctcagcgccaccatcatgtcggagtacgcgagcaagaagacccgcggggccttcatcgccgccgtgttcgccatgcaggggttcgggatcctcttcggcgccatcgtcgcgctcgtcgtctcggccggcttccgtcacgcgtacccggcgccgtcgtacgcccagaaccccgccgcgtcgctcgcgccgcaggctgactacacgtggcggctcatcctcatgttcggcaccatcccggctgggctcacctactactggcgcatgaaaatgcccgagacggcgcggtacacggcgctcgtcgcccgcaacgccaagcaggcggcggctgacatgtccaaggtgctccacgccgagatcgaggagcggccggaggtggtcgagagccaggtggtcgccggggagacctggggcctcttctcacggcagttcatgaagcgccacgggatgcacctcctggcgaccaccagcacgtggttcctgctcgacatcgccttctacagccagaacctgttccagaaggacatcttcagcaaggtcgggtggataccgccggcgaagaccatgaacgcgctcgaggaactctaccgcatctcccgcgcccaggcactcatcgcactctgcggaaccatcccgggctactggttcaccgtcgccttcatcgacatcgtcggcaggttctggatccagatcatgggcttcttcatgatgaccgtgttcatgctcgcgctcggcgtgccctacgaccactggacgcacccggcgcaccacaccggcttcgtcgtgctctacgcactcaccttcttcttcgccaacttcgggcccaacagcaccaccttcatcgtgccggctgagatcttcccggcgaggctccggtcgacgtgccacggcatctccgccgcgtccggcaaggccggcgcgatcatcggcgcgttcgggttcctgtacgctgcgcaggaccagcacaatcccgacgcgggatactcccgcggcatcggcatccggaacgcgctcttcgtgctcgccggcacaaacttcctcggtatgctcatgacgctgctggtgccggagtccaagggcttgtcgctggaggagatgtccaaggacaacgtcgtcgacgagaccgcccaagaagcgatcgcccaagcgtgatgtcataaacatgccgtctcgacgtgagtgactgaaaaaaaatgtatgctttattactctattggtgtgattacttaatctagttttgtatacttttgtagtgtctctccttttacagttgtggatttgtggggtttctctttctttctttttttttggttgaaacaattaaacttgtttgtgagattttgtgaactttccctgcaactgatataaatggcatacattcatttcaattgtattgtaaatggcgtgagcggctttgcaaaccgctaataatattgttacactttcgtt

SEQ ID NO: 30210 - DNA, 907 bp, Oryza sativa
  Clone ID: UC-OSROCYP030G02_FLI
catcctcctactagtttctttcttgtttctttggaatttttttgatctcttgaagagatccggttcttggattaagttttggacaagaaccgtactgtgaccatgtcgtcgccttcgcgccggagctccagcccggagagcaacaccagcggcggcggcggtggcgccgacgagcggaagaggaagaggatgctgtcgaacagggagtcggcgaggcggtccagggcgaggaagcagcagaggctggaggagctgatcgccgaggcggcgcgcctccaggccgagaacgcgcgcgtcgaggcgcagatcggggcctacgcgggggagctgagcaaggtcgacggcgagaacgcggtgctccgcgcccgccacggcgagctcgccgggcgcctccaggcgctcggcagcgtcctggagatcctccaggtggccggcgcgcccgtcgacatcccggagatccccgacgacccgctgctccgcccatggcagccgccgttcgcggcccagcccatcgtcgccaccgccatggccgacgccttccagttctgagccaccatggagagctcgcacgccatggccattggcatcaatggcatggttgcagctgcattacaactagtagtactagcctctgtggttgtgtctgatgatgcttattatgtttaattatggtttgcttcatgttgttttcattaatctagaccattaataagcaatgtgtgttgtaatcttgtctagtcttatgtgagatgtgttcatctccagtgctccttgctaataagggtggaagagaacaatccgatttgatgtaattcttggagagcacatgtgtgctggtttgtgatgtgatgaactgatgattgtaatattttgacattgaacctatgctataatgtttgcagcaatg

SEQ ID NO: 30211 - DNA, 1161 bp, Oryza sativa
  Clone ID: UC-OSROM202001A12_FLI
ttgcgccccttatgcattagagcccccggagtcccctctgtttcgcagataagtcctttggttcccatctttttattacattcaggtcctcctagtttcttttcctttcgagtctactccttgcattcttgcgaggaagcccctcgggttggtcgaattttagtttccactccctctcctcgcggagtcgttgctgttcttgttcttggtcgaggttgaggttggtggcgtagatccgatctgaggaatgtttacctatcctttcctctaacgttcgccgtactccgatgaagttgaacgtgctccgccgccgccgttcccactccttctccgtcgccttcctctactggttctacgtcttctcatgaactcatcgccttcctcccaagaacaccatctccagcctctaattgattatatcttgatttctttttcatcctcctactagtttctttcttgtgttctttggaatttttttgatctcttgaagagatccggttcttggattaagttttggacaagaaccgtactgtgaccatgtcgtcgccttcgcgccggagctccagcccggagagcaacaccagcggcggcggcggtggcgccgacgagcggaagaggaagaggatgctgtcgaacagggagtcggcgaggcgatccagggcgaggaagcagcagaggctggaggagctgatcgccgaggcggcgcgcctccaggccgagaacgcgcgcgtcgaggcgcagatcggggcctacgcgggggagctgagcaaggtcgacggcgagaacgcggtgctccgcgcccgccacggcgagctcgccgggcgcctccaggcgctcggcagcgtcctggagatcctccaggtggccggcgcgcccgtcgacatcccggagatccccgacgacccgctgctccgcccatggcagccgccgttcgcggcccagcccatcgtcgccaccgccatggccgacgccttccagttctgagccaccatggagagctcgcacgccatggccattggcatcaatggcatggttgcagctgcattacaactagtagtactagcctctgtggttgtgtctgatgatgcttattatgtttaattatggtttgcttcatgttgttttcattaatctagaccattaataagcaatgtgtgttgt

SEQ ID NO: 30212 - DNA, 1318 bp, Oryza sativa
  Clone ID: UC-OSROM202001E02_FLI
gatctttgttagctagagtgttgagcaatggcgtccaagctgggtatggttgtgctactgatctcgggcctctttgctgcccgttgcgcggccgtggtgaccaccggcgaacccgtcgtcgccggcctctcctgggggttctatgacacgtcgtgcccgtcggtggagggcatcgtgaggtggcacgtcaccgaggccctccgccgcgacatcggcatcgccgccggcctcgtccgcatcttcttccacgactgcttcccgcaggggtgcgacgcgtcggtcctcctgacgggttcccaaagcgagctgggtgagatacccaaccagacgctgcggccgtcggcgctgaagctcatcgaggacatccgcgccgccgtacactccgcctgcggcgccaaggtgtcctgcgccgacatcaccacgctcgccacgcgtgacgccatcgtcgcctccggcgggccctacttcgacgtgcctctggggcggcgcgacgggctggcaccggcgtcgagcgacaaggtgggcctcctgccggcgcccttcttcgacgtgcccacgctcatccaggcgttcaaggaccgaaacctggacaagacggacctggtggcgctgtccggcgcgcacaccatcggactaggccactgcggcagcttcaacgaccgcttcgatggctccaagcccatcatggaccctgtgctggtgaagaagctgcaggccaagtgcgccaaggacgtgccggtgaactcggtcacgcaggagctggacgtccgcacgcccaacgccttcgacaacaagtactacttcgacctcatcgccaagcaggggatcttcaagtccgaccagggcctcatcgaggacgcgcagaccaaccgcaccgccgtccgcttcgccctcaaccaggccgccttcttcgaccagttcgcacgctccatggtcaagatgagccagatggacgtcctcaccggcaacgccggcgagatccgcaacaactgcgccgctcccaaccgccgctcctccgacctcctcaacgctgccgacgacgaccaaggcttcgccgccgacgcctaattaacttatggagtaattagtgatcgttttatgtttatgttttgtgctagtaataataattaagaggatgccatctgcgcgtggtgtttggtttccatgcattctctgcttagttagaatggttttgcttcataaaaagtaaagttactactcgattcctcggtcgggacagagtaactgcatgtcaaatgtatcatcatcatcagttagtgctacatcatcacaactgtctttgtcacagcataaaccc

SEQ ID NO: 30213 - DNA, 2395 bp, Oryza sativa
  Clone ID: UC-OSROM202005C09_FLI
gtcagctccagccactgctcccatggcgaccgttcctacgccgagcgaggcccacggcggcgcgacgccgacggccgccgacgtggagatggtggaggcgagcgagctccgtcggcggggcaagcccagcggcgaccgtgcgacggggccgtcccgagacggggccgccgcggcggcggaggaggcggcggcgccgtcggtggagcgcgtgttcgcggacaggcccgtgccgtcgtggcgggagcagctgacggtgcgcgcgttcgtggtgagcttcttcctggtcatcatgttcagcgtcatcgtgatgaagctgaacctcaccaccggcatcatcccgtcgctcaacgtctccgccggcctcctcggcttcttcttcgtccgcctctggacggcggccatcgagagggtggggctcctccggcagccgttcacgcgccaggagaacaccgtcatccagacctgcgtcgtcgccggctacgacatcgccttcagcggcggctttggtaactacatattgtccatgagtgaaagaatcgctgggctgggaaccgaggcaaataatgctcaaaacataaaaaatccccatctaggatggataattggttttctgttcttggtcagcttcattgggctctttggtcttgtgcccttgagaaaggttatgatcattgactacaagctaacttatccaagcggcactgcaactgccttcctcataaacggctttcacacgccccatggagccaagattgcagcgaagcaagtaaagaaactcggtatattcttcatcctcagcttcttctggggtttctttcagtggttctacacagctaccgatgattgcggattccataaattcccatcactaggccttcaagctttccaacacaagttcttctttgacttctcacctacttatgtcggagtgggaatgatttgcccacacattgttaacgtatctgttctccttggagggatcctctcatggggcatcatgtggcctctcatagccaagaaaaggggagattggttttctgctgatctccctgacggtagtcttcatggaatgcaagggtaccgggtcttcatagccattgccttgattcttggggatggcctctacaactttctcaagatgattattctcacagccttctcgctaagatctcaaatcaagaagaaaaatgctagtacacttccagtctctgatgatggcatggttaccactactgcagctgtctcatacgacgaggagcggcgcaacgaactctttgtcaaagatcaaattccatggtacgttgcatatggaggctatgctgttgttgctgccatttctatcggtactgtcccgcagataatcccacagctgaagtggtaccaaatcttggtagcctatatcgtcgcgccaattcttgccttctgcaatgcctacggaactggcctcactgactggtctcttgttacaacctatggaaagcttgcaatctttgcatttggtgcatggaccggtgcttcacatggtggtgttcttgctggcctggctgcctgtggtgtgatgatgaacattgtgtctactgctgctgacctgatgcaggacttcaaaacagggtacctcacactggcctcacccaggtcaatgttcgtcagccaagtcattggcactgcaatgggctgtgtcattgctccctgtgtgttctggcttttctacaaggcctttgataatattggcatcagtggcagcgattacccagcgccaaatgctgccgtcttccggagcatagcgatactaggtgttgatggcttctcctcgcttccaaagaactgcctcaatctctgttacgcgttctttgctgctgcaattgtcgtcaacctgataagagatcttgtgccaaaggtgtcaaggtttataccgatcccgatggctatggcgatacctttctacataggatcatatttcgcgattgatatgttcatcgggacagtcatattgtttgtctggcaacgagtggacagggcgaaagcagacacgtatggacctgcagtcgcttcaggcatgatatgtggtgatggaatttgggttttgcctcagtcggtgcttgctcttgccaaggtgaagcctccaatctgcatgaagtttctgtcgagaaggacgaatgacaaagtggatgcttttcttacaacattgggaaaataagttgcaacaacgattctgatgaagaaaagattcagttgaacattattacattagcccgtgtatatattggataattttctttttttttccagcagatccatgtcagtaagaatccaatgaagtgtggcatactatacgatagtagataaataagtgtgtacagagacaagaatgggaataaattatcttgtttacgtt

SEQ ID NO: 30214 - DNA, 958 bp, Oryza sativa
  Clone ID: UC-OSROM202006D09_FLI
ccaacgtccgcctaaagaaaaacacgcacacacttcttctgcttccctccccttgtttccgctccacttcccttccaagcaagaaaaccgaggcttcagcttagctaggaccgaccgatccgatgtgcggcggtgcaatcatctacgactacatcccggcgcgccgccggttgtgcgcctccgacttctggcccgacgccgacgactccgacccccacacccccgctcccgagaaaccgccgcgcgcgaagagggagcggaagaaccagtaccgcgggatcaggcagcggccgtgggggaagtgggcggcggagatccgcgacccggtgaagggggtgcgcgtctggctcggcacctacccgaccgccgaggccgccgcgcgggcctacgaccgcgccgcgcgccgcatcaggggcgccaaggcgaaggtcaacttccccaacgacttcggcgccgcccccgcgccggccgcggcggcggcgaaggccgtccctcgcgtcgcgcccacgccggccgtgctcccgccgcccaagatggaggcggtgtccgagggcgccggcgcctgctcctccgacgaggtcaaggagctgtccgaggagctgctcgcgtacgagaactacatgagcttcctcggcatcccctacatggagggcggcgccgcctccgccgccggcgccgaggaagccgcggcgcccgccgggctctggaccttcgaagactacgagctgccgtcgctagcgctctagtaaaaatgtcacaataaaaatgacatgtatgtgaaaaaatttttccctacccgtagtaagtaaccagtgtctttttttaccgtactctatgcgttatttttgttgaaattaatccattgttgaagttgtaactgtgcatggtcggcgccagtctcagtgaagcttttgctgaatccaagtttttctctaatgtaaatatgaaatttccagtt

SEQ ID NO: 30215 - DNA, 1473 bp, Oryza sativa
  Clone ID: UC-OSROM202008A09_FLI
cataaatccgcgatcaaaaacaccaagcatagcgtggttagcccacagctgggttgctgctgtccccagcaccacccaaaaactgcagcaccaaaatgaggcatcaacagcaggatcgtaggcatcaaattgagtatgagttctttgggccttatggaccagcagttctgttattggcactgccatgcgtggtcctaggactggtgtacgcctgcaactcggagggctgtctgcagctgtcgcagctttttcagctcccgctgtctcagtggtccctggcactgctgccaggtttcccatcaaaccaaccgctgtacagtcatgaggcgatggcagctgtggtggcctggttcgtgctggtgctgctgctgcacgtgctgcttcctggggccgaagcacagggtgttctgctgcccacaggccgcaggttggcgtacaagctcaacgccttcaaggtgtttgcagtcacgtacggcacggccgccctgctcagctttggcctgggcgtgctggacctcacctggctggcctcacacttcctgcccctcaccagtgcagccatcatcttcagcagcctgctggcagtggccgtgtacgccgcctccttcgcccccggtcgcctgctggcacacgggggcacctcgggcgtggtcccctacgacttctggatgggccgagagctcaacccccggctgtggggtgtggacatcaaggagttttgtgagctgtaccctggcatgatcggctggggcctgctgaacctgtcgtttgcctaccagcagtgggtcacgctggggcggctgaccaactcgatgctgctggtgaatgcctttgagctatggtacatcgtggacggcctggtcaacgagaggtccatcctgaccaccatggacatcaccacggacggctttggcttcatgctcgcctttggggacctggcctgggtgccattcaccttctgcacccaggctcgctacttggcagaccacccgcaacaggagctgtcagggctggggctggtgggtgtcataggggtgcagctgctgggctacaggctgttccggggggcaaacgggcagaaggacgcgttcaggcgggacccgggccacccctctgtggcgcacctgcagagcatgcccactgtgcggggcacgcggctgctgattagcggctactggggcatggcccgccacatcaactacctgggggactggctcatgggcctggcctggtgcctgccctgcggctttggcagcgtggtgccctacttctacagcgcctactttgccagcctgctggtgcacagggagcggcgggatgaggcggcgtgccggctgaagtacggggcggactgggacaagtactgcagcctggtgccgtggcggatcgtgccgtacgtgtactgaccatgagggagtggtgtgcttgggtgctctgtgttggtgtggtgtggtgtgtgactgacacgcgagg

SEQ ID NO: 30216 - DNA, 1344 bp, Oryza sativa
  Clone ID: UC-OSROM202010G03_FLI
gtctaattgcgccccttatgcattagagcccccggagtcccctctgtttcgcagataagtcctttggttcccatctttttattacattcaggtcctcctagtttcttttcctttcgagtctactccttgcattcttgcgaggaagcccctcgggttggtcgaattttagtttccactccctctcctcgcggagtcgttgctgttcttgttcttggtcgaggttgaggttggtggcgtagatccgatctgaggaatgtttacctatcctttcctctaacgttcgccgtactccgatgaagttgaacgtgctccgccgccgccgttcccactccttctccgtcgccttcctctactggttctacgtcttctcatgaactcatcgccttcctcccaagaacaccatctccagcctctaattgattatatcttgatttctttttcatcctcctactagtttctttcttgtgttctttggaatttttttgatctcttgaagagatccggttcttggattaagttttggacaagaaccgtactgtgaccatgtcgtcgccttcgcgccggagctccagcccggagagcaacaccagcggcggcggcggtggcgccgacgagcggaagaggaagaggatgctgtcgaacagggagtcggcgaggcgatccagggcgaggaagcagcagaggctggaggagctgatcgccgaggcggcgcgcctccaggccgagaacgcgcgcgtcgaggcgcagatcggggcctacgcgggggagctgagcaaggtcgacggcgagaacgcggtgctccgcgcccgccacggcgagctcgccgggcgcctccaggcgctcggcagcgtcctggagatcctccaggtggccggcgcgcccgtcgacatcccggagatccccgacgacccgctgctccgcccatggcagccgccgttcgcggcccagcccatcgtcgccaccgccatggccgacgccttccagttctgagccaccatggagagctcgcacgccatggccattggcatcaatggcatggttgcagctgcattacaactagtagtactagcctctgtggttgtgtctgatgatgcttattatgtttaattatggtttgcttcatgttgttttcattaatctagaccattaataagcaatgtgtgttgtaatcttgtctagtcttatgtgagatgtgttcatctccagtgctccttgctaataagggtggaagagaacaatccgatttgatgtaattcttggagagcacatgtgtgctggtttgtgatgtgatgaactgatgattgtaatattttgacattgaacctatgctataatgtttgcagc

SEQ ID NO: 30217 - DNA, 911 bp, Oryza sativa
  Clone ID: UC-OSROM202014H11_FLI
tccgcctaaagaaaaacacgcacacacttcttctgcttccctccccttgtttccgctccacttcccttccaagcaagaaaaccgaggcttcagcttagctaggaccgaccgatccgatgtgcggcggtgcaatcatctacgactacatcccggcgcgccgccggttgtgcgcctccgacttctggcccgacgccgacgactccgacccccacacccccgctcccgagaaaccgccgcgcgcgaagagggagcggaagaaccagtaccgcgggatcaggcagcggccgtgggggaagtgggcggcggagatccgcgacccggtgaagggggtgcgcgtctggctcggcacctacccgaccgccgaggccgccgcgcgggcctacgaccgcgccgcgcgccgcatcaggggcgccaaggcgaaggtcaacttccccaacgacttcggcgccgcccccgcgccggccgcggcggcggcgaaggccgtccctcgcgtcgcgcccacgccggccgtgctcccgccgcccaagatggaggcggtgtccgagggcgccggcgcctgctcctccgacgaggtcaaggagctgtccgaggagctgctcgcgtacgagaactacatgagcttcctcggcatcccctacatggagggcggcgccgcctccgccgccggcgccgaggaagccgcggcgcccgccgggctctggaccttcgaagactacgagctgccgtcgctagcgctctagtaaaaatgtcacaataaaaatgacatgtatgtgaaaaaatttttccctacccgtagtaagtaaccagtgtctttttttaccgtactctatgcgttatttttgttgaaattaatccattgttgaagttgtaactgtgcatggtcggcgccagtctcagtgaagcttttgctg

SEQ ID NO: 30218 - DNA, 2731 bp, Oryza sativa
  Clone ID: UC-OSROM202016F06_FLI
catcctatcgattttgcagtttagccctcgaagaagcaaggatttcgagcccggtccctaggctcgatccggccgtgtcctttgctccgatcgagcgcgcgaggtctcgtaaggtccatcctgagcttgttgctgtggagtgcgcgattccgcgctcgatttcgtttcttccggcgcagatttcgtgttttttggcctagatttggcttgtgggtgaccgcctaggcgtttctcgcgtgtttcggctttttgtctgggatcgatttgtggctggatttgcttgttcctggctgcggagcttggatcttagcattagaaaccctcagattggggatttcctgccggaggaagctttttggaggagctgcctttgggaggaactcttccagttctgagggtttcggtgtttgttgctcgcctggctcgagaagaagctgggaaatctcgtattttagggcgggttctagtagatttcgtgtagtggagagcaaaaagtttgtgtggttttggtggtcaagtctggtggtggaagcccctcaggccggagatttcctccttccggtggacgaccaaaggagccgcccttggaaggaatttcttgccatcccagaggttggggatttcctcacgcccaggaagccaagcaagggctgccttagcgaggaactcttccaattggacgggtttgcgcgtagcggtgcggctatataagtggaaatctgcatccctgggaaggatacaattgttttgaggctgggaactttggaattggtttgcataaggagttcttggaatggggaatcagtgccagaacgggactcttgggagtgattaccacaatcggttcccaagggagcatgccgttgggtacgttcagggggatagctacttggacttgaagaagttcgatgatacttggcctgaggtgaacaacttcaagcctactgctgctagtattctcaggcgggggttggatcctacatctatcaatgtccttgggcggaagacagcggacctaagggagcattatatcattggtcggaagcttggtcagggccagtttggcacaacttacctctgtaccgagatcaatacagggtgtgagtatgcttgcaagaccatcccaaagcgcaagctcatcaccaaggaggatgtagaagatgtgcgccgtgagattcagataatgcaccatttgtcgggccacaagaatgttgttgcaatcaaggatgtctatgaggatgggcaagcggtgcacattgtgatggagctctgcgctggtggggagctctttgacaggattcaggagaaggggcattacagcgagcggaaggctgcagagcttataagaataattgtcagcattgtggctatgtgccattcgctcggggtgatgcaccgtgatcttaagccagaaaatttcctccttttggataaagatgatgatctgtcaataaaggcaatagattttggtctatccgtgttcttcaaaccaggtcaggttttcactgagctggttgggagtccatattatgttgctcctgaggtattgcacaaacgttatggaccagaatctgatgtgtggtcagctggagtgatactttacgttttgctgagtggagtgccaccattttgggcagagacacaacaaggaatatttgatgcagttctgaagggtcacattgattttcaatctgatccatggccaaagatatctgacagtgcaaaggatcttataagaaaaatgctctctcattgcccttcggagcgtttgaaggcccatgaagtgctaaggcatccttggatctgtgaaaatggagttgccactgatcaagctctggatcccagtgttatctctcggctcaaacaattctctgcaatgaacaagttaaagaagttggctctgagagtgatagctgagcgtctttcagaggaggagattgctgggttaagagaaatgttcaaggcagtggacacaaaaaatagaggtgtaatcactttcggtgagcttagagaaggtttaagaagatttggcgctgaatttaaggatacagagattggtgatataatggaagcggcacacaacgacaataatgtaacaatccattatgaagaatttattgctgcaactctacctcttaacaagatagaacgtgaggagcacctgctggcagcttttacatattttgacaaagatgggagtggttatatcacagttgacaagcttcaacgagcttgtggagaacataacatggaggattcactccttgaagagattatttcagaggttgatcaaaacaatgacggccaaattgactacgccgaatttgtagccatgatgcaaggcagcaacgttggactagggtggcaaacaatggaaagcagtttgaatgtagcattaagagacgcacctcaagtacattgatgcacgaatgtatagattttgttctcttctcttgtccattcattcttcactacccaattcgggtctgtgacttgtatgagaagagatcaagtcaattcatttagttggtatttattccaagcaagtgtgagttgataagtagcgtagtctctatggagacaatagcatgagcatatagtggtggtatattggttgatgtagttgcaaggccgcctagcaattaaaaaagaacccaaaagaggtgcattcgctttgttggttgttctttcaacgacctgtattacgcaatgaaagtcgtcatgtttgcgt

SEQ ID NO: 30219 - DNA, 1229 bp, Oryza sativa
  Clone ID: UC-OSROM202016H01_FLI
cttgtctcgctgtggctcgctggacacaacacacacccacacccactcccccactctctctccggttcatgtcctgctgctccccatgtcgcccccactcgagctcgactacataggcctctcgccgccggtgcccgccgccgccgatgccgccgccgacaacgacctgaagggcaccgagctccgcctcggcctgcccggctcccactcgccggaccgctccccgcccgccgccacgctcgaccttctccccgctgccaagggcgccaagcgcgggttctccgacgaggcgcgtccgctgccggcgtccgccgccgccgccgccgccgccgggaagggcaagaaggcggcggccggcgaggaggatgaggatgcggaggaggaggacaagaaggtcgccgccgcgccgcaggcgcctgctgccaaggctcaggtggttggatggccaccaattcgcagctaccgcaagaacacgatggctactaaccagctgaagagcagcaaggaggatgctgaagcgaagcagggccaggggttcctgtacgtcaaggtcagcatggatggtgccccctacctcaggaaggtggacctcaagacctacaagaactacaaggacctgtcaactgcgcttgagaagatgttcattggcttcacaactggcaaggatggcttatctgagagccgcaaggatggtgaatatgtgctgacttatgaagacaaggatggagactggatgcttgttggcgatgttccatgggagatgtttgccaactcttgtcgcagactcaggatcatgaaaggttcagatgcaattggacttgctccaagggcagttgataagtccaaaaaccgcaactagaatggtttctgccccacagtcaaaagcaagatggagatcaaatgactgtagggaattttctgaaaaccaagaagtctaacagttttaagatggagtctgccttatggtctgtactacatggtttgctattgtgaaagttaaaaaaaaaggtgtcttgttatgttagcttcgccaaatctcctagggacataaactctatttgattgtgcccaagtctttgtacgtgtgttaatgctattcgtgtaaatggtttggacaccatgtgctactgctatgattgagcacccctacctactttgcaaaatgttgtcaatgaactgtttgttcgctacataaatgttcaatgaagcttgcaaatgtattgtccacc

SEQ ID NO: 30220 - DNA, 1114 bp, Oryza sativa
  Clone ID: uC-osroM202017C02_FLI
caattctgctcaattggactcatggggagggctccatgctgtgacaagaacaacgtcaagaagggaccttggtcgcctgaggaggatgccaagctcaaggagttcatagagaagcatggcaccggcggcaattggattgctctccctcagaaagcaggattgaggagatgtggcaaaagttgtaggcttagatggctaaattacctgaggcccaatattaagcatggagagttcacagagcatgaagacaggatcatctgcaacatgtttgccagtattgggagcaggtggtctataatcgcgtcgcagctccccggcagaacggacaacgacatcaaaaactactggaacaccaagctcaagaagaagctcctcggctcgagcgccgtcgccgccgccgcgccgccacggatacagcgtcatcagcagagccaccaccggtcgtctctcctcctgccgaactcgccgtcgctcaatcccggcggcggctacccaggcttcttctccggcgccggcggcttccatcctcaggaaccagctatgccgttaaccctaccgaccaccacccaggaattcatgctgggcactcactctggccttccaatggtgagcgcctctgcgctgctcaaccatctgcacggcgcatcacatcatcatcagctgcttgtgaaggaggagatcagcagcaacatgatcgtgttcggctccgaccagcagagctgcagctcgtcagatgggctggcggcgccacacagccacaaccaccatggcaacagggagttcatccttgatggctacagctatggcgtcggctacggcagcagctgcatcgatcaggtcgacaacgacaagctgttccagcatcatcatcagcaggatcaggcacaagaacagcagcagcagctggtgtacaactacgacgagatcaagcagctgctgatgaacacatcaaccacaagtaatagtattaatgctggtcaggatcatggcggcagcatggaagcagggttgatcggctcacaagggaaggtaaccatgatgtaaattaaactgatcgattaaagaggaggggaaggcagcagctgggcacggcaagattaaggatggattaatt

SEQ ID NO: 30221 - DNA, 1054 bp, Oryza sativa
  Clone ID: UC-OSROM202018E07_FLI
gcaaagtcctcaaggcgaacggcctccatcttctccttccagctcctcccatggcgtccctcgtcgccatcgccatcgccatggctctcatggtggttcaacctggccggcagatgactgcctttgctgctcggacgtcgccggcggcggcggcggaggcgttctggcgtgccgccatgcccggcgctcccatgccggacgccatcgtcgagctcctccaccatgagcacggcgttgctagcgccggcggcaaggccaacggcggcggcgacggtccaccgccgccgatgaacttcaactacgacgactacagggccctgcctcggagcgacgccccttccccggatgcattgaaccgcgtcgccgccgtacagaacgccgacgagaacggcgtgtcctcgccgccgccgccgccgccgacggtgttcttcctcgaggacgccgtgcgcgtcggcgagagcctgcccctaccgcgaccggcggccgacgcaaccgccgccggcgcagcggcggccacggcgttgccgccgctgcggctgtacaccgtccggtcggtgagggcaatcgaggggtccagcttcgtcgtgtgccgcggcgagaccacggcgggcgccggcgtgtacgggtgccgcgatgccgccaccggcccggcgagggcgtacgcggtggacgcggccggcggcggcggcggggacgcggtgatcgccgccgtcgtgtgccacgccgacacgtcccgctgggacccggaccacgccgcgttccggctgctcggcgtcaggcccggcggcgccgccgtctgccgcgccgtcgccgacgcgcacatcctcccgacgaacaaggattgagtacttctcgccatgatcgaggactcctcgatcgatcttaatcttattgccatgcataattagtgtgttaattacgtgcttaattgtatgtgtgaagtgtgcattagtcacagtttgtaatgtaataatgtttcgcttgttcgactgtatgatctcgagttgggtgatatatacgttgataaaataaaggaaaaagtttgtgttggttc

SEQ ID NO: 30222 - DNA, 1749 bp, Oryza sativa
  Clone ID: UC-OSROM202024B11_FLI
caacgaagaaggaaaaaaaaaggaggaaaagaaaagaggaggaaagcgaagaggttggagagagacgctcgtctccacgtcgccgccatggccgcccgcgccgccgccgccgcgttcctgctgctgctcatcgtcggcgcggccaccgcggcgccggacatgtcgatcatctcctacaacgcggagcacggggcgcgggggctggaggaggggcccacggaggccgaggcgcgcgccgcgtacgacctctggctcgccgagaacggcggcggctcgcccaacgcgctcggcggcgagcacgagcgccggttcctcgtgttctgggacaacctcaagttcgtcgacgcccacaacgcccgcgccgacgagcgcggcgggttccgcctcgggatgaaccgcttcgccgatctcaccaacgaggagttccgcgcgaccttcctcggcgccaaggtcgccgagaggagccgcgccgccggggagaggtaccgccacgacggggtggaggagctgccggagtccgtcgactggagggagaagggcgccgtcgcccccgtcaagaaccagggccaatgcggaagctgctgggccttctccgcagtaagcacagtagaaagcatcaaccaacttgttactggtgagatgatcacattgtcggaacaagaacttgtagaatgctcaaccaatggacagaacagtggctgcaacggtgggctcatggatgatgcctttgacttcatcattaagaatggaggcattgatactgaagatgactatccttacaaagctgtagatggcaagtgtgacatcaacagggaaaatgctaaggttgtgagcatcgatggctttgaggatgtacctcaaaatgatgagaaatcacttcagaaggcggttgctcaccaaccagtcagtgttgctattgaggctggtggccgcgagttccagctctatcattcgggcgtcttcagcggtaggtgtggcacaagccttgaccatggtgtggttgccgtcggttatggcactgacaatggcaaagactactggattgtccgcaactcttggggcccgaagtggggtgagtctggatacgttcgcatggagcgcaatatcaatgtgaccacggggaagtgtggcattgccatgatggcatcataccctaccaagagcggagcaaacccacccaagccatctccgactcctccaactcctccaacaccacctcccccatccgcccctgaccatgtctgcgatgataacttctcttgcccagcgggcagcacctgctgctgcgcattcggcttcaggaatctctgcttggtttggggctgttgcccagttgaaggtgcaacctgctgcaaggatcatgccagctgctgcccgcctgactaccctgtctgcaacacccgggctggaacctgctcagcgagcaagaacagcccattgagcgtgaaggctttgaagcgcacgctcgctaagctgaacaccgcatgagctcatcgataacatgtaatcggcgaggagaggggatgaggcagcgtggagcctttctgaaatttctgcttccgtgcctccatatatcgttgtcgcattttgaggggacagcttatttactctactgcctgccttttatcttacagtgatctgtgtacatagctcgatccaatttgtactcttatttatcttctccaatttgtactctatataatttatcatctcaagaatacattaacgaagatcctgttttaccgttcc

SEQ ID NO: 30223 - DNA, 1251 bp, Oryza sativa
  Clone ID: UC-OSROM202024G05_FLI
ctcatctccctccttccctcctataggaatccaaacccgccgcatcccggttcatgtcctgccgctccccatgtcgccgcccctcgagctcgactacataggcctctcgcctccgccgccgccgccctcctcctcctccgccgccgccgcccgcgcggacgacgtcgacctgaagggcaccgagctccgcctcggcctccctggctccgagtcgccggaccgccgccctgcggctattgccgctgccgctgccactgccaccacccttgagctgctgcccgccaagggtgccaagcgcgtgttccccgacgaggccgcgctgacgccgcccactgccgccgccgggaagggcaaggcggcgagggagggggaggaggtgggggctgaggaggaggacaagaaggtcgccgcgccgccgcagccggctgcgaaggctcaggtggtgggatggccaccaatccgcagctaccgcaagaacacgatggcaaccaaccagataaagagcaacaaggaggatgttgatgctaagcagggtcagggtttcctgtacgtcaaggttagcatggatggtgcaccatatctgaggaaggtggacctcaaaacttacaagaactacaaggacatgtctttgggtctcgagaaaatgttcattggcttcagcaccggtaaggaaggtgctgagaaccagaaagatggtgaatatgtgttaacctacgaagacaaggatggtgactggatgctggttggtgatgttccatgggagatgttcaccgactcttgccggaggctcagaatcatgaaaggctcagatgcaattggacttgccccaagagcaggggaaaagtccaagaacaggaactagaatggttattgcccacagttgaaagcaaaacggagatattaattaactgcagggcagttcctcaaaaccataatttaatagttttacaggatcaccatatgatctgtattacatggtttgctattctgcaagtaaaaaaaaaaactcttttaagactctgttatgttaggtttgcaacatctcctagagatgtacgctctattcggttgcacgtgtctttgtatgtgtagtatttccatccatgtaaatggttggtatgcagtgcgctaccgctattattgagcactcctacctatcctgcaagtgttgtcctgaaacgtatgttcccgtcacgtaagtgtttaaatgtttttaagaggttcctgaagatgtattatttatatgacttc

SEQ ID NO: 30224 - DNA, 647 bp, Oryza sativa
  Clone ID: UC-OSROM202028E07_FLI
accgcgacggtcgcatcagccgggaggacctcaagtcgttctacgccagcggcgcggccaccagcgagcggttcgacgacgaggacatcgccgccatgatcgccgcagccgacgtggacaacgacgggttcgtgcagtacgacgagttcgagcgcctgctggggcgcgccgccgcgggggcggggtgccggcccgcgatggaggacgtgctccgggtgatggaccgcgacggggacggcaaggtggggttcgacgacctcaaggcgtacctcggctgggccgggatgccggcggccgacgaggagatccgcgccatgatacgcgtggccggcggcggcgacggcgatggttgcgtggggctcgaggagctcgccatcgtcctcggctgctcgcccacaaattggaccgcatcttctcaaactctgcattgatgcattgattgggagacttcaatttgttggttggtggtgttgtggtgatgtgattgttgagcgattttcgagtttcgagaagcgtgagggatgtttaattgggcgtaactgctcccgaaaataggggtattaaaaactccccgatgcagcttcttccatagaaaaaagttgaaaagtttgtattgaagctgagcatcgatggtgtgagttgggggt

SEQ ID NO: 30225 - DNA, 1079 bp, Oryza sativa
  Clone ID: UC-OSROM202032A04_FLI
cacaccttcaataacttgcaaggataactcaaactacttgaatcagatcagacaaaaacatcataagaatatcacgatgtgtggaggagcactgatcccgaacgactatggcgacaagccgccgccgccgccgtcggagtcgtcggagtgggacgccacaacgaagatgaagaagaagaagaagcgtggtggcggcggcgacgacgactgggaggccgccttccgggagttcatcgctggcgacgacgacgacgacgacggcggcgtttccatgttcccttctggtgcagggacgatggagacgaccacagaggtggcgccggcggcggcggtggtggagaggccgcggcggcggcgaagggtgaggcggagctacccgtaccgcggcgtccggcagcggccgtgggggcggtgggcgtcggagatccgcgaccccgtcaagggcgcccgcgtctggctcggcaccttcgacaccgccgtcgaggccgcgcgcgcctacgacgccgaggcgcgccgcatccacggccacaaggcaaggaccaacttcccgcccgacgagcctccgctgccggcgccatcgcaggcgccgttctgcttcctgctcgacgacgacgacgacgacgacggcgtggcccgtggaaacagcccggcgtcgtcgtcggcgccggacagagcctccgcttgcacgacgtcgtcgacggtggcgtccggcgagcgaggcgatgagctcatactgctggagtgctgctccgacgacgtgatggacagcctcctcgccggcttcgacgtgtccagcgaaccacgcagtgttttgggaatggttaattagcagcgcgcacgcctgattagatcggtacatgtgaagtacaagagaagtagttactactagctaggagcaaattaacttggagtgcaagaataaaatatgcatgtctctgcactactactgtagtgttagcaagtttgctcattgttctgttgtatcctttcatgtccatttcagacttcccaatgctacataaggatgtacatatgtatgatgttgtgtgccttgttaatcaatgaatgtaaatatcttt

SEQ ID NO: 30226 - DNA, 1054 bp, Oryza sativa
  Clone ID: UC-OSROM202033C03_FLI
cacagcctaataaacccctcgagaagacaagtgtaatcgccaggggaagcgcgcgagatggacgcagctggcgtcgccgcaaagccgtcgctgtcgaggaagccctcgccgtcgttccgcctccggaacggcagcctgaacgcgctgcggctgcgcagggtgttcgacctgttcgaccgcaacggcgacggcgagatcacgctcgacgagatggcgtccgcgctcgacgcgctcggcctcggcgccgaccgcgcggggctggaggccacggtcgggggctacatccccgcgggcgccgcggggctccgcttcggcgacttcgaggcactccaccgcgcgctcggcgacgcgctcttcggccccgtcgaggaggaggagcccgggaagcaaggggaggacgacgacgagggcgacatgaaggaggcgttccgggtgttcgacgaggacggcgacggcttcatctccgccgccgagctgcaggccgtgctcaagaagctcggcctccccgaggcccggaacctcgccacggtgcaggagatgatctgcaacgtcgaccgcgactgcgacggccgcgtcgacttcggcgagttcaagtgcatgatgcaggggatcaccgtgtggggcgcttgacggcggcgagcgaggccgccgtccttcgtcctctccccgtgtgtcatattctgaagcatctgaagattgatctaggagctataacattacccttggattgtttcagtcaatactgattcagtgtttgttgtatgttggtcataatgcaggtaatgatgactgtaatttcagtactgtttgtttaactcttggttttacccttcactaatctaggcatgtagccagataggtcttgtgcgcatctgtgtcattgtgttcctcctaatccaataagctttctgtatgtaagaagaacaatgtgacctatatcagaacaatggtctttttgttaattaaaattgtaataagcgtgtgcttggttactggtggaatgttttttttccctttgtatctataacatgttttgaacaggtatcattggttt

SEQ ID NO: 30227 - DNA, 1406 bp, Oryza sativa
  Clone ID: UC-OSROM202033D05_FLI
ctccactcctctcgtctcgcgtgagtactcgcgacctcaccgccggcggcgacgagcggcggcggcggcggttgaggaaggaagggggagggagagcaggaaatgcggatgctgtccaaggcgtgctcgctcgtggcctcctccctcccgcggtgctcatcctccgctgcccccacgatcagagggcagccgtcgttgctgccaagcgtgcgcaaggaatggcttggcaagccgctgctgtacggaatcggcacgctgctcgtcatgcctctgaggacgctgcacggggtgggacggatgtttggcgctgggcggttcctctgcaacatgaccagcgtctcgtcgtcgctgcaaattgagctcgtaccctgccttcaagataactatgcttacatcctacatgatgttgatactggaacagttggagttgtggacccttctgaagcaacgccaatcataaatgcactagaaaaaagaaaccagaacttgacctacatactgaacacccatcatcactatgaccatactggtggcaacttggaactgaaggcaaaatatggtgcaaaggtgattggttctgcaaaggatagggatagaattccaggcattgacataactcttagtgagggtgacacatggatgtttgctggtcatcaagttcttgtaatggaaactcctggtcatacatcaggtcatgtgtgctaccacttccctggatctggagcaatatttacaggggacacattgtttagtttgtcatgtggaaagctttttgaagggactccacaacagatgtactcttcactccagaaaattatagcacttccggatgagacaagagtgtattgcggacatgaatatacattgagcaattcaaagtttgccttgagcatagaaccaggaaataaagacttacaggaatacgctgcaaatgccgctgatctccgcaagaggaatacacccacggtgccaacaacaattgggagagagaagcagtgcaatccttttctgaggacctcaagtccagagataaagaataccctgtccatcccagaccattttgatgatgcacgcgttcttgaagttgttcgacgagcgaaggataacttttaactaaccataaaaaaggaaaatttcacgtccatgacccaattgtcatgttgaggagagaagcagacaaagaactccacaagagaaacaaaagaactacaaggtatatgatgactacataagatcgagctagtttgtttctaaaatgcttcggcaaaattgtgtcgcggtgtatgtagcttttggcagtggttgtaaaatgtcgtccaatagcagctggtgattctttctatcaactacaaataagtgtgatctgttatcatcaactctgtaaaaagaatgcgagttagagattg

SEQ ID NO: 30228 - DNA, 1519 bp, Oryza sativa
  Clone ID: UC-OSROM202036H08_FLI
gtggaattctaccacctttgaatcgaaattcttgttattcaagcatgtttgcaagaactactccacgcgttcgtattagcgctccagtgaaaaaagccaattttggatctgtgagaaactcacatagtctgaaacaaagactgcaacatttgatcccagaaaaggccgcagaaatcaaaaacattaaagataagcatggagacaaattgcttggaacttgcactgtgtctcaggcatacggtggtatgagaggagttaaagctatgatttatgaaacatcactcttggatgctgacgagggcatccgattcagaggatttaccatccctgaagttcaacaaaagttgccaaaggctccaggaggtgctgaaccccttcctgaaggattgttgtggcttttattgactggagaagttccaactcaagcacaagtttcagaactcagcgctgatcttgctcatcgtaacaaagtccctgagtgggtgttcaagttgttgaaggacctccctccagatatgcatccaatgactcaatttatcatcgctatcaatgctcttcaaaaggaatctctctttgctcaaaaataccaagagggtatgccaaagagcaagtactgggaatacgcccttgaggactccctcaacttgattgccagacttccaaccgttgctgctgccatctacagatacacatacaagaatggtcaaatcatccaaccagatagcaagcttgattggtctgccaacttttccagaatgctcggacacaacaacaagcaatttgacgacctcatgagactctacctcacaatccacagcgaccacgaaggaggaaacgtttctgctcacgccactcaacttgttggatctgctttgtctgatccataccttgcttttgctgctggtatgtgcggtttggctggacctcttcacggattggccaatcaagaagtcctcagatggattgtcaacttgaagaagaagtttggagacagaaacatcactaacgaagaactcaagaaggctctctgggataccctcaactctggacaagtcgttcctggcttcggacacgctgtgctgagaaagactgacccaagatacacttgccaaagagaattcgccttgaagcaccttcctaacgatccattgttcaagttggttgctcaactctacgaagttgttcctggtatcttgaaggagcacggaaagaccaagaacccatggcctaatgtggatgcccactctggagttctgttggttcactacggaatgactgaagaaaactactacaccgttctcttcggtgtttccagagctattggtgtcttatccaaccttgtctggaccagagccctcggattcccacttgaaagaccaaagagtgtcaccactgaatgggtcagaaactggtctcacaccgcccctatggctaacgatgatcaaatcgccacctccaaggccgattaaacaagtaaacacgatgttgtttcggtactttataacatagttttcccaat

SEQ ID NO: 30229 - DNA, 1646 bp, Oryza sativa
  Clone ID: UC-OSROM202037B11_FLI
gctgctgctgctgctgtcgctggcagcggcggacatgtcgatcgtgtcgtacggggagaggagcgaggaggaggcgcggcggctgtacgcggagtggaaggccgagcacggcaagagctacaacgccgtcggcgaggaggagcggcggtacgcggcgttcagggacaacctccggtacatcgacgagcacaacgccgccgccgacgccggggtccactccttccgcctcggcctcaaccgcttcgccgacctcaccaacgaggagtaccgggacacctacctcggcctcaggaacaagccgcggagggagaggaaggtcagcgacaggtacctcgccgccgacaacgaggcgctgccggagtccgttgactggaggaccaagggggccgtggctgagatcaaggaccagggaggttgcggaagttgctgggctttctcagcaatagcagctgtagaaggcatcaaccagattgttactggcgacctgatatctttgtctgagcaggagctagttgactgtgacacttcatataacgagggatgcaatggaggtctgatggactatgcatttgatttcatcatcaacaatggtggaatcgacaccgaggatgactacccttacaaaggcaaggacgaacggtgtgacgtaaacaggaaaaacgcaaaggttgtcacaattgacagctacgaagatgtaacaccaaacagtgagacgagtctgcagaaggcggtagcaaaccagcccgtcagtgttgcaattgaagccggtggcagagcattccagctctactcatcgggtatcttcacgggtaaatgtggaacagcactagaccacggcgtcgctgctgttgggtacggcacagagaatggcaaggactactggatcgtgaggaactcgtggggcaagagctggggtgagtccggctacgtccgtatggagcgcaacatcaaggcgagcagtggcaagtgcggcattgccgttgagccatcctaccctctgaagaagggcgagaaccccccgaaccccggccctactccgccgtccccaaccccgcctcccaccgtctgcgacaactactacacttgccccgatagcaccacctgctgctgcatctacgagtatggcaaatactgctacgcctggggctgctgcccactcgagggcgccacctgctgcgatgatcactacagctgctgccctcacgagtaccccatctgcaatgttcagcagggaacctgcctcatggctaaggacagtccactggcagtgaaggctctgaagcgtaccctggcaaagccaaacttgtctttcttgtttggcaacggcaagaagagcagcgcttgagcaatttcagaaccgtatcagaccgtccagagccagcgtggttgcatcatcaaatgatcagctggtaactgacgaagacgattgcgcagctcggcggcgaaccctgcgcactaagtatatctgcttttataatagatttctcgtgtacataaaatctaaaaaaacgggttcagttggttacagaactgccaaatttgcttctgaatgtatatgtaaaattcagctaggtttgctcctaagctcctagatgccagttcgacggaactgcaaattgatattggaacaagataaggtcattgcc

SEQ ID NO: 30230 - DNA, 970 bp, Oryza sativa
  Clone ID: UC-OSROM202038D01_FLI
ctccaaaaccgtgacgctctctccacacgctataaatgtggtgctcgtgtcgccgagatgaggcttgaagcggctcgcttagtaataaaggcagcaaggcctagccactccccgcgcgcgcgccgaagattctcagcaagattctgagccgtcgtcggccgttcgtccgtccaaggaaaggagagccatggtgggaacctcctcctggtcgtcgtcctcgtcgtcgtcgctcggctccctcgacgacgacatcatcgtcgcgtgcgtcgtcaaggcagcggacgccgccgtcgagggggcgtgcgtcaagttcctctgcagctacggcgggaggatcctaccacgccacgccgacggcgcgctgcgctacgtcggcggcgacaaccgcgtcgtctccgtcgaccgctccctccctttccacgagttgcaacggaagctgagggagatgtgcgggtgggaggcggtgtgcctgcggtgccagctcccgacggaggacctggacgcgctcgtctccgtcaacggcgacgacgacctcgccaacctgctggaggagtacgacgcggccagccgggaccgcctccagccgctcaagatccgggcgttcctgttcccaaggacgacagcgacaacgaccgcgccgctatcgcgcagcccgtcgcccaccgctgcgtccaggacggcaccccgtgcccactaccagcatcagactggcagcgcgccgtcgtgcgcatcccggtgggcggcgcgtcagatgtcgttgcctcctgctcgcgttccgcaccagcagcagcattacaaccggcacggcggcgacgcgcggccgcaacggtacctagtccagagtgccagcagccgctggtaatagcgatcagattgcgaaccggccgcggtctagtatctgcgtgccttacacgtactcggtactcgcgtaaccctgcgctgtacgtactaatgaaggtgtttaattagc

SEQ ID NO: 30231 - DNA, 1258 bp, Oryza sativa
  Clone ID: UC-OSROM202040D04_FLI
gcagaatcaatgcagcgttctacccatgcttttctttctgtacttcctgcctaaactttgcctataaatctgcacatccatggctcgtttcttgcaacaaagccacagccttcatcatcatcagagagagaaggagagagaggaagagattgcagtgagtgagtgagtgagtgaagcagccatggcggcggcggcgagggcaacggcgcgggtcgggcttgcgctgctgctcgcggtggtgggcgtcggcgcgcaggactacgacttcttcttcctggtgctgcagtggcccgggtcgtactgcgacacgaagcagagctgctgctacccgcgctccggcaagccggcggccgacttcggcatccacggcctctggcccaaccgcgacgacggcagctacccgcagaactgcgaccctgacagcgagttcgacccctccaaggtgagcgacctgctggggagcatgcgctcggagtggccgacgctggcgtgcccgagcaacgacggcatccggttctgggcgcacgagtgggagaagcacggcacctgcgccgcggcggcgctcggcgacgagcacggctacttcgaggcggcgctccgcctccggtcgcggctgcccgtgctcgccgcgctgcgcgacggcggcgtgtcgcccgacggcggctactacacgctgtcccagatcaagggcgccatccagcgcggcgtcggcgccgagccgttcgtggagtgcaaccgcgacgagtccggcaacagccagctgtaccagctctacttctgcgtggacgccgccggcgagcgcttcgtcgactgccccgcctcccccggcggccgcccctgcggcaaccggatcgagttcccggcgttctagagctctgagctctctctctctaaccagcctcttctcctagctctacggggaagactctaccttcgaagcatgtcctttgtcactgacacgtgggttcgatgaaccatgggtgtgataaatgtatggtgtctttgaaggtataggatctcaattcgggaaaacgtcgacgacaaagaattgatgatgatttaatccatttcagtaatccatgttattgattacggagtaattattaatctgaccgtgtttttttttaattctgttgttgcaataaaagtatggccatgtaatgtttctctcttttttccccgcataatttgaacaagtttaggggggaagtggaacatataaatcaaagaaagaaatgaaatttacatgaatttttac

SEQ ID NO: 30232 - DNA, 1116 bp, Triticum aestivum
  Clone ID: UC-TSFL189005H09_FLI
cgccaccgactcctcctccagcgaggacgagtcggcgccgccgccgctggccccgatgccgacgaccaaggaggagcgccggagggagcgcaagaagcgccgccgcgtcatggaggccgggaggagggacgactcggggccgccgcagccgcaggcaaccggggcgcgcacgccctcggtgcggtaccgcggcgtgcgccagcgccgctggggcaagttcgcctcggagatccgcgacccgatccagggccgccgcctctggctcggcaccttcgacaccgccgaggaggccgcagcagcctacgacgccgccaagatccgcatcagcgggagccgccgcccggctgacggcgccaccggcttccctttctccttcccgccgccagagcctgccaagccgaccgtcttgcgtcttcccatgccgcagcctgccaagccgaccatcctgcgtcttcccatgccacagcctgccaagcagattacctcgccgccgcctcctcctcctccgcctgagcctgccaagccggccatctcgccgcctcctctgccagctaagccgttcgccctcccgttgaagctgaggctgaagctttccttcaatgcacaggtcaaggacaagggttggaactggtgctctgcaggcgatgtcaaggaggaggaggacggggattgtgatggcgaggcaaaggttggggatctgagcattgcaggcgaggtcaaggtggagggtgggggctgcgcaggggaggtcaaggtagagggcgggggctgtgcagatgggtcgaaggaggccggcagtagctctgaggtcaaggcggtcaagccgatgtgggcgatgatcaccgggaaacgaaagaagcggtcaggctgcggcacccgtgtcggcgccctccacgcctcctccgtctgcgtcgaggaagttggtggaacctgaggcagggtccaactatccccgtaattactatcgttagatcttctactcttctgcctagcgtcgtcgtcccatcttctttggtattgtgtaatttttgtcaagtactaaactccttgatgtgcaaactcatgaccatcctgtgatatgattgtggatgatttaatgtatatacacccttcaat

SEQ ID NO: 30233 - DNA, 279 bp, Triticum aestivum
  Clone ID: UC-TSFL189010D01_FLI
ccggactccatggcgagggcaacgacactggtgctcgtggccgcgctcgccgtcctcctcctcctcgcctccggccccgcgggcgccacggccgcctggacctcgcccaaggacgtggcaacggcatctcccaacgagaaggtcgcggcggcggcggcggaagaccacgagtgcgagatgagggccggcgagaagcagcgggatgagtgcatggcgaggaggacgctcgcggcgcacaccgactacatctacacccaagatatcaaatggtttgttggc

SEQ ID NO: 30234 - DNA, 910 bp, Triticum aestivum
  Clone ID: UC-TSFL189012E11_FLI
tctcggcgaagctgacccctcgccaggccgcgagggctgggttcggtggcagggtcagcgtcagctcgggcaggaagtgcggcggccccgtgcgggcgtcgctcttctcgcccaagcccgcggtggccatggacgcgaggccgaccaaggtgcaggagctgcacgtgtacgagctcaacgagcgcgaccgcgagagccccgcctacctccggctcagcgccaagcagagccagaacgcgctcggcgacctcgtccccttcaccaacaaggtgtacaacggcagcctggacaagcggatcgggatcacggcggggatctgcatcctgatccagcacgtgccggagcgcaacggcgaccgctacgaggccatctacagcatctacttcggcgactacggccacatcaccgtgcaggggccctacctcacctacgaggagtcctacctcgccgtcaccggcggctccggcgtcttcgagggcgtctacggccaggtcaagctcaaccagatcgtcttccccttcaagatcttctacaccttctacctcaagggcatccccgacctgccaaaggagctgctctgcacggcgcccgtcccgccatcccccaccgtcgagcccacgcccgcagccaaggccaccgagccacacgcatgcctcaacaacttcaccgactagctaccttagctaggtagcttgcccaaaaatatctattgctcgtgctactagttgaactagcgtgtgttgcagcttcaccgactagctagctctagctaggtaccccaaaatatatctatgtacgccaattgcttgtactcctactggtgttgaatgaatgtcggtgtgttgcaacggtggaataatttcgagtacggaaacatgaattctcaataaaatgttcatatttgtttgtt

SEQ ID NO: 30235 - DNA, 911 bp, Triticum aestivum
  Clone ID: UC-TSRO9316039E04_FLI
cgctctccctcccctcctggtcctggagccgcgactcatctgaaccctaaaccgtagatcccggcgcagcaggagcgagatatcctccagcaagcaagcatgagtcgccacccgagcaccaagtgggcgcagaggctggacaaggtttacctgacgattgagctgcccgacgccaaggatgtgaagctcaacttgaggcctgatggccatttcaacttctcggcaaaggcccctgctgatggcatgcagtatgagcttgaccttgagctctttgatgctgtcagcgttgaggagagccaagcggctgttgccccgagggctatatgctaccttgtcaagaaagctgaggccaagtggtggcctaggctgctcaagaaggaaggcaggccgcctgtgttcctcaaggttgactgggataaatggcaagatgaggatgatgaagacgctggatttggtgactttggtgatatggacttctcgaagctggacatgggaggtggtgatgacgatgatgatgatgagattgaggaggatgatgatgaagacaatgtggtcgacagtgctaacaaaggtgatgtagatgctgagacagagccggggagcaagggaggggaagctccatcagctgctggtgaagaagcaaagccataagattggaggcgatggcatcgatcgttacaacttatgatggttatgagatctgtttctagacgcgaggtagaattttggtgtgcccctgaagttgggtagtagaggtgggtgttggtagcttttggcccggggctatctgtagtgttcaacgttattctgcaccttttgtttactagtaaattgtatgtgctttgcacgtcacttaaatatataaaagcatgggaaaatacatttgaatatgtatttcctttcctagaatc

SEQ ID NO: 30236 - DNA, 493 bp, Triticum aestivum
  Clone ID: UC-TSRO9316075C11_FLI
gtcgagtcgtcgaggcaacaaggtcccaagggggacgccaactccaactccatggctgccgcctccgaggtctctgtggactggaggggcaggccttgcaggcctcaaaggcatggaggcatgaaagctgctgtgtttgtcctagggatccaggcgtttgagatcatggcgattgcggcggtggggaacaacctcatcacctacgtgttcaacgagatgcacttcccgctgtccaagtcggccaacatcgtcaccaacttcatcggcaccatgttcctcctctccctgctcggcggcttcctctccgactcctacctcggcagcttctggaccatgctcatcttcggcttcgtcgagctctccgtaagccaccgtaaaaccagcaaaaaaaaggatcatttcttttgtttttctaccaaaactatcaaaggcacgggaaaaaattcaggcagggaaaggctagtgcgtgcgactttaaagttttaactgactg

SEQ ID NO: 30237 - DNA, 1968 bp, Zea mays
  Clone ID: UC-ZMFLB73001A06_FLI
ccggcgcgcgaggcccccgcgtctccgtcgcccccctcgccgtcgccgacatgggcaactgctgcccggggtcgtcgtcgtccgcggagcccgcgccgccgcagccgccggacccctccggctcgtcgcgccccgtggcttcgcctgcctcggtgtcgccgaccgcggcgcccgcgcccgccaggcccccggcccccatcggccccgtgctgggccggcccatggaggacgtgagggccacctacgccgtgggcaaggagctcgggcgcgggcagttcggcgtcacgtcgctgtgcacgcacaaggccacggggcacaggttcgcgtgcaagaccatcagcaagaggaagctgtccaccaaggaggacgtggaggacgtgcggcgcgaggtgcagatcatgtaccacctgtccggccagccgggcgtggtggagctcaagggcgcgtacgaggacaagggctccgtgcacctcgtcatggagctctgcgccggcggcgagctcttcgaccgcatcatcgccaggggccactacaccgagcgcgccgccgcctcgctgctccgcaccatcgtcgagatcgtgcacacctgccactccatgggcgtcatccaccgcgacctcaagcccgagaacttcctcctcctcagcaaggacgaggacgcgccgctcaaggccaccgactttgggctctccgtcttcttcaaggaaggttgatttgcttgctctcactctcctccatggttgcattgcatcatcacattcatatctgttgctctgcatatgcattgcaatgcgatgcaggggaggtgttcagggacatcgtcggcagcgcctactacatcgctccggaggtgctgaagcggagctacgggcccgaggccgacatatggagcgtcggcgtcatagtctacatcctgctctccggcgttccgcccttctgggcagagtcggagcacggcatcttcaacgccatcctgagggggcaggtcgacttcaccagcgacccatggccgcgcatctcgcagggcgccaaggacctcgtcaggaagatgctcaaccctgaccccaagcagcggatttctgcatacgacgtcctcaaccatccgtggatcaaggaggacggcgaggcgccggacacgccgctggacaacgcggtcctcggccggctgaagcagttcagggccatgaaccagttcaagaaggcggcgctgcgggtcatcgcggggtgcctgtcggaggaggagatccgtgggctcaaggagatgttcaagagcatggactccgacagcagcggcaccatcaccgtggacgagctgcggagagggctggccaacaagggcaccaagctgagcgaggccgaagtccagcagctcatggaagctgccgacgccgacgggaacgggacgatcgactacgaggagttcatcacggcgacgatgcacatgaaccggatggatcgcgacgagcacctctacaccgcgttccagtacttcgacaaggacaacagcgggtacatcacgatggaagagctggagcaagccctgagggagaagggcctgctggacggccgagacatcaaggagatcgtggcggaagtggacgccgacaacgacgggcggatcaactacaccgagttcgcggcgatgatgaggaaaggagacccggagccgtccaaccccaagaagcggcgcgacatcgtcctgtagaggaggggcgtggagctcgggagcacgtcacgtacgtacggctgctggcaggaatcttcgtcttcgtggtggcggagaaattaagcagacgcgtgcgcgttctatctctggacatgtataatattgcacgcgacaggagcggaggagctgagggggggagtgaccgcgcattattaatatgaaaaaatggcaaccgggtgtcggttattcttgtctgcatgtcgttactcggatgttatagtagaacgaactgttcgtactgc

SEQ ID NO: 30238 - DNA, 1600 bp, Zea mays
  Clone ID: UC-ZMFLB73001B02_FLI
atggttgtgattcttatttggttggaaacttgtcaaaacttggttttcaagaacctacaccaattcaaaggcaggccatgcccattcttctttcgggtagggaatgctttgcgtgtgcacctactggttctggcaagacattggctttcttgtttccacttcttatgaaaattaaggatcaaaaggtggtgttaaagccgtgattctttgcccaacaagggaattggctgcacaaactgtgagagaatgcaagaagttggttaaggggaggaagtactatattaaattgatgaccaaagagctgtccaaatcagggaatttcaaagatatgcactgtgatatccttgtttccacccctcttcgtttggaccatgctgtgaagaaaagagaccttgatttaagtagtgtggaataccttgtcttggatgaatctgataaactttttgagcttggatttgttgaagtggttgattcagttgtagaagcctgttccaatccttcaataattcggtctctgttcagtgccactttgcccgattcaattgagactcttgcacgcactataatgcatgatgccattcgagtcattgtcggcagaaagaattcggcctcttcactgattaagcaaaagttgatttttgctggaactgagaggggaaagttgctaactcttcgccaaaactttcaagagtctctcaatcctccagtattgatttttgtccaaagcaaagagagggccaaagagctttacaaagaactggcatttgatgacattagagttgatgtaattcatgcagatctcagtgagcagcagcgtcaagatgctgttgacaatttgagagctggaaagacctgggtactgatagcaacggaagtcattgcccggggaatggacttcaaaggtgtcgcctctgtgataaactacgattttccggagtcggctgctgcctatattcacaggatagggcgatccggaagagccggtaggtccggggaggctatcacgttcttcacagaggaggacaagccattcttgaggaatatcgccaacgtgttggtatcttcaggctgtgaagtgccttcctggataatggcactgccaaagctcaagcgaaagaagcacagagtggatagggacccaatctcctacctacctgacgaagtttgagagcggcttggtaagatgctctatttatttatttttgtggggagggggggatatataacacaggctgtccagagtggtactttaaccatgcacttccgagaggtggcacgttggcttcagttttccctgtttgagcagtgcaccgatcagtttgtttagccacaacccaagacgagggatcagtatatctttgttaattggagtacgttacagtttgtgtggacgattggtggtgaatccacagagtagagcagctcgtttctgtttggcctagcgtagtcagattgcaattagggtccgtttggttgggctgtggctgtgaaaaaagttgttgtgggctgtgagctgtggaaaaagctgctgtaggctgtgagctgttaaaaagctaaaaccgtttggtggaaagcactaatagtcgttaaaagttcttcg

SEQ ID NO: 30239 - DNA, 1648 bp, Zea mays
  Clone ID: UC-ZMFLB73001B09_FLI
gcggcggccttgtgctagtacccacctcgcgatcgacctccctctcgaactcaaagatggccggcaccacaaggtgtagtatcagaggcagcaacgctcccggcttggccctgccatgcttgctgctgctgctgctgctcgcgggcgcaggcgtctccaacggccagctccaggtggggttctactccaagtcctgcccggacgccgagtccaccgtggcgtccgtcgtccggcagtccgggtccgccgaccccaccatcctcccggcgctcatccggctccagttccacgactgcttcgtccgcggctgcgacgggtcggtgctcatcaagggcggcggcaacaacaacaacaacgccgaggtggacaacggcaagcaccagggcctccgcggcctggagatcatcgagggcgccaagacgcagctcgaggcgcagtgccccggcgtcgtctcctgcgccgacatcgtcgtgctcgctgcccgagacgccgtcgccttcaccggcgggccgtcgttcgacgtgcccacggggcggctcgacgggaaggtgtccaacctgcgggacgccgacgcgctgccggacgtgcacgacggcatcgacgcgctccgctccaagttccgcgccaacggccttgacgagaaggacctcgtcctcctcaccgctgcgcacacggtgggcacgacggcgtgcttcttcctccaggaccggctctacaacttcccgctgccgggcggcgggcggggctcggacccgaccatcccgccgggcttcctgtcggagctcaaggcccggtgcgcgccgggggacttcaacacgcgcctggccctggaccgcggcagcgagaacgtcttcgacacctccatcctccgcaacatccgcaacggcttcgccgtcatcggcaccgacgccgcgctctacaacgacacggccacggtcgacgtcgtcgactcctactccggcctgctcagcaacttcttcgggccctacttccggcaggacttcgcggacgccatggtccgcatgggcagcgtcggcgtggtcaccggcagcaagcagggcgaggtccggaaggtctgctccaagttcaactgactgattccgctcccgccaatgcaatgcaagcgcgtaccgtccatagatcgtcccttcattcattgcacacagctagctggctggccggccccatccatataagcatgaagagcacgtacgtacggtggggtttggttgcctgctttcatggcagtgtttctctcttcttcatccattcgttccattcatgagtacagagtacacacatcgcgtagatctctcgtctcactgtgcaaattaaagggaggttcaagcagtgcttcactagctgtgtatgtatagtatcgacgaaacggaaactgcacaaggttttgaaaaagcaatttgcttagctttaagatctgtgcagctctccttctgatgcggtacacatatatatagctacactgtggcgtatatatagggtataacatgaattactcggccttgtgtttacatagaaattactacatgagtcttgttgttcggttttggaaattcatttgctgttgtgtctactgtaactgtaaaaagtgttgatttttatattgcaatatatattcatctgcttaatt

SEQ ID NO: 30240 - DNA, 793 bp, Zea mays
  Clone ID: UC-ZMFLB73001C10_FLI
caaactatgctaatttggttgaccaagaagagctgcaaaagttgctcatagcatcccagcaacagattgaacaatcaaaggcgaaggatacagagctcgaagcgctgaaggaacaacttggccatcttattctggaaagggacagcttgcttgatgacatggaccaaagaaagacggacctattggaggctcaactgctcgttgaacagctcgagcaacgggagcagatgctagaagcgcagattgaaatgttgcagctggagaaagacagccttcagcaaaagaccttggagatggacgagacaatcgagcttctagccagatcaaaccaaccagatataaatccacgaatgggcgacaaccaccatcgcggcagcagtgagttcagcaggcggctcgctcagtccgacatgctcctctcccacgcgaggcatgagcattctcgcaggcacgcggccggaagctcgaggacgcaccacggccggcaccgatgaagctcgaggatgcttgctagtagaatgctggtgcgtcagccgccagacaccgcttgtgtttgtagcggactagcggcgcggcttctctggccgggactgtacagaagctgcaccgaatggcagtggccagaagaaacttcccacgtctgtaagatctgcgcgcctgtaaatctgatagtgcaatgtacgcgttgttgtcatttgggccattgtatgttcttccgcgaggcttttcagcgagatctccctgaaagaagacaaacaactgaaaagtgacataatcccacagatttgtttct

SEQ ID NO: 30241 - DNA, 2314 bp, Zea mays
  Clone ID: UC-ZMFLB73004G08_FLI
ctccatggaccttggggtataccacctggtgattggcttgctggtgaattggtctcttggactggtgttagtcatgctgtttcaattgctgaatagttcaatatgggttcaagaactcttacctttcctgtttctcctggaacgtggtgcaacaaatgagagctccaacggcttaaaaatttggattatgctttggttggacttatgagatgaaaaattatttttatggtctaatagcctgtggaattgctgaaacattgacttttttgactggaacaagtggtgttctcctgactggttgctggtctattggtgcttctgtagaattgaaaagttgaattgtgggtaaagtatctacatatgtttttaccagcacacggcttgagtcatccatgaattaatcattatgttttgcaatttaactttattaagacttaggagatgaaccatgaatatgatagtcctgacagctgtgttaggctacttcatatgaggtacgtggagtctacttgtcatggtatcatgtgggcacaggaagctcctcgtccagccaaagaaacaatacattttttcttattaacaaaaagtaaccgaacaatgctgttatgtaaaacagcagcagtcggttaaaattcgaactctcttgcgaagcaaactgtgcaggaatgtttaatgatcataatgtgatggtcctgtaagaatcgtgcagttgttccaaatatgggttaaacttagtttacctgttacattgtcatgtggttgtgggcactgtgaaagctctttggccactcacagaagccctagaataagaatattgctaatgatgagaagtaactaaaacaatatcatacaattgcagtgctctctccaatagtttggagggtatgctccttggaagatttttggtaggaacagggatgggattgggtccaccagtagcttcactttatataacggaggtttctccttctacagtgaggggtacatatggtagctttgttcagattgcaacctgccttggaattatagtatcactactcattggtacacctgtcaaagatattgatagatggtggagagtgtgtttctgggttgccgttatcccagcaactttacaagctctcggtatggagttttgtgctgagagccctcagtggctttataagtgtggaaaaataagtgaagcagagatgcaatttgaaaagcttttaggtccccttcatgtaaaatctgccatggcagaactttctagatatgaaagagtagatgatggagaaagtgtcaagtactcagagttgttctatggtcgccacttcaatgttgtttttattggcacaacgctctttgctttacaacagttatccggcataaattctgtgttctatttctcatcaactgtattcagaagtgtgggggtgccctctaaccttgccaacatatgcatggggatttctaatctatcaggatcaattgtagcaatgcttctaatggacaagctaggtagaaaagtgcttctttcagggagttttcttgggatggcttttgcaatggggcttcaggctgttggagcaaaccgtcagtatcttggttctgcatgtgtatatctttcagttggtggcattctgttgtttgtcttgtcattttcactaggagcaggccctgtcccaggacttcttttgcctgagattttccctaataaaatccgagctaaggctatggctctctgcatgtctgtacattggatcgtgaacttctttgttagtttgatgttcttgcgtcttctggagcaacttggtccacagcttctctacacaatattttcgtcagtctgtgtggtagcctcaatatttgtgaggcgccatgtgttggagacgaagggaaagactttacaagagatagaggtttcactcctgcaaccacaataaaggtacatatttgacgtggctggaaccttgggcaggctgtttgctgaacagaaacaagctggccctgcagaagttgattcctgaagtcatcggcaacgccctacaaatggtctcagggaagttccagatatgcgcctgcgacagctagggcggtgtttccatagagcatcatgtactgaagttatgcctgtatcgcccgccctagataggatattttcatacttgtgttgtcatctgttctatctatgagtcgtaatatcagaaaaaaaaggtactactgttttaccgttgatgagcacagttgaaaaaaggaactatcatcttcattttacatgtatgtactcagtaaccatactccgaataataacactgcatggagattccttgtt

SEQ ID NO: 30242 - DNA, 1853 bp, Zea mays
  Clone ID: UC-ZMFLB73008B07_FLI
gtgcggttgatagctcggatcttctgctggccgagttcgtcttggaggagaagagagagagagagagagagagagagcgccgggatcggagccaggaagcatccagcagcgatggcgggcggaggggtggcggcgctgggcgtgaagacggagcgcgcggcgcagtacaaggggcgcatgacgctcgccgtcgccacgacctgcctcgtggccgccgtcgggggcgccatcttcggctacgacatcggcatctccggaggcgtgacatccatggacccattcctggagaaattcttcccggtagtgttccaccggaagaactccggcgggaagaacaactactgtaagtacgacaaccagggactagcggcgttcacatcgtcactctacctcgccggcctcgttgcctccctcgtcgcgtcccccgtgacgaggaactacggccgcaaagctagcattgtctgcggcggcgtgagcttcctcatcggcgcggccctcaacgtggccgccgtgaatctggctatgctcatcctcgggcgcatcatgctcggcgtcggcatcggttttggcaaccaggctgtgccgctgtacctgtcggagatggcgccggcgcacctccgcggcggcctgaacatgatgttccagctcgcgacgacgctgggcatcttcacggcgaacctgatcaactatggcacgcagaacatcaagccgtgggggtggcggctgtcgctgggcctcgcggcggtgccggcgctgctgatgacgttgggcgggctctttcttccggagactcccaacagcctcattgagcgcgggcgcgtggaggagggtcggcgcgtgctggagcgcatccggggcacggccgacgtggacgccgagttcacggacatggtggaggcgagcgagctggccaacaccgtcgagcacccgttccggaacatcctgcagccgcgcaaccggccgcagctggtgatggccgtgtgcatgccggcgttccagatcctgacgggcatcaactccatcctcttctacgcgccggtcctgttccagagcatgggtttcggcgggaacgcgtccctctactcctccgtgctcaccggcgccgtgctcttctcctcgacgctcatctccatcggcatcgtcgaccgcctcggccgccggaagctcctcatcagcggcgggatccagatgatcgtctgccaggtgatcgtggcggtgatcctgggcgtgaagttcggggcggagaagcaactggcgcggagctactcggtcgcggtggtggtggtgatctgcctgttcgttctggcgttcgggtggtcgtggggcccgctgggatggacggtgccgagcgagatcttcccgctggagacgcggtcggcggggcagagcatcacggtggccgtgaacctgctcttcaccttcgccatcgcgcaggcgttcctgtcgctgctgtgcgccttcaagttcggcatcttcctctttttcgcggggtggatcaccgtcatgaccgtgttcgtctacgtcttcctgccggagaccaagggcgtgcccatcgaagagatggtgctgctatggcggaagcactggttctggaagaaggtcatgccggacatgccgctcgaggatggctggggcgcggctgagggtcatgcggcacctgccagcaacaatcccaagggatgactggagtgaagcatgcatggttgcctggttggtttcgtggacactttatataataactgaagaaaacaagacacacactaacatgtaggcggctgcttattcttattgtattttgtataaagcaggctgtgtgatatgcagggataaaaacgaacgagatcgttccaaat

SEQ ID NO: 30243 - DNA, 4244 bp, Zea mays
  Clone ID: UC-ZMFLB73009C12_FLI
gtgaaacgggagggcaagaggctaaacagagatcttttacgaattgcacctgtttatataggaggctcctctgaaaatgaaaagtcatatcgtggttgggaatctgttgctgggctaagtgatgttattcagagcatgaaggaggtggtgatgttacctcttctctaccctgagttctttagttctctaggtcttactcctccaagaggtgttctgctgcatggccaccctggtactggtaagacacttgttgtaagggcactcataggggcatgttctcaaggtaacagaagaattgcttattttgctcgaaaaggtgctgattgtttgggtaagtatgttggtgatgctgagagacagttaagacttcttttccaggtagctgaacgatgccagccttctatcatattttttgatgagatagatggtttagcaccttgtagatccagacaacaagaccaaacacataattcagttgtggcaaccttgctctcgttgcttgatggtttgaaatcacgaggctcagtcgtagtgattggggctacaaatcgtcctgatgctattgatcctgcccttaggagaccaggaaggtttgatcgtgagatatactttccactaccaaccttcgaggatagatctgctattctgtcactgcatacaaaaaaatggccaagtcctatttcaggtgcattcctgtcatttgttgctagccaaactgttggatatgctggtgctgatctgcaggcaatttgcacacaagcggcaataaatgctttgaaaaggacatgcccattacatcaaattttacaatatgccgagaaaggagttcctcatgggcgagttcctctaccaacagttcttgtcgaggataaagattggctagctgctcttgcagctgctccgccaccttgttcaaaaagggaagcagggattgcttcaaatgatttggtttccactcctctagattcctgttttgtaccaagcctttttaaaccattggtacaccttcttatttctatgtatttggatgagcgtgtatggttacctccatcccttcttaaggcatgttgctctataaaggaagtggtattctcatccatggaaaagaatactgtaccccacactttatggccaacttatcttagttctttgatccaacaaaaagatattgcagatagaattggaacaatcttgtcaagctgtggccttatatctgcacaactaggaaatcgtggttcaatgttgctgagtgatgttaaaacacaggagaatttttgtggcagcagattaaatcccactggtttgcatatgaaaggagggctgccacataagttatcaggctttcgagttttagttgctggagcaccaagatcaggccaacaacacctaattcgttgtgttcttcatggttttatgggccagattgtaatacacaagcttgaccttgcaactatggtgcaggaaggaaatggtgatatccttagtggtctgacacacattctcttgaaatgtctaaaccttggaagatgcatcatctacatgcctagaattgatctgtgggcagttgataaggcccataatcaaatagaagataatatgctcaatactgggtcaggtcgtttagcatcctccaccgctgatcacaaaaaatgttcagaagtttggaatgcattgattgagcaaatggattcattgttagcttctgtatcaataagtgttctgtccaccagtgacatgaggtttcaagatcttcccagtggagtaagaggtttcttcagcacacatgttgtggatcagtgccttgtttcttcagaacatacaatacctagattttctgtgaatattgacaaccactctaattgggatgagatggttgattcatgtgctttgcagttatcacatgacttgattcgacatcatgttcaatttttgcatgatgaatctcataagaatgataatcatcaacaaaaagaagtgtttgcttccatgaatattagtgcagaaggtgaacttaagtccagtgagaatgagcgacccttgtgtggagttgcttctaaggagaatccaattcagctggctgcaggcagagctcagcaagagcctccaccatccaatgtggaagataaagtagaaaatgatcaatttttttttgaaggcatagttcaaagaaatccttctagtagacttgtaaaaggcagcgagtcatttgctattgttgcttttggaattcagatactgcagcatcctcagttctcaaaactttgttgggctacgtcaaagctacgggaaggcccctgcactgatataaatggaccatggaaaggctggccatttaattcctgtttgttgcagagcagcaccttacctggtaaatcactaaatggaggggacaatgttgtaaagggaaaggaaaagtctgtctgtgtgagagggctggttgctgttggcttattagcttatagaggtgtctatgggtctgttattgaagtttgtgctgaggtgagaaaggtgttgggactgttagtcggacagattcaaactaaaattttggaaaagagaaatcaattccggtattttcgaatcctatctcaagtagcttatctagatgatattgtgaacagttgggcatacacctaccaaagaacacatgttgatacccggacaggaacatcccgcatgaagagttcaagtgccaaagaatgtcaaaggaccaagtatgctgcaggaaccaatgtacaagttgctcctgttgccatccctgctgaggttcaagacattccagcccaacacactcaggatcatgaagttgttcctggtcctactgaggtgcaaggcaatccggttaagcatactgcagaacaacctggaagctattcgatggactgtgaccttgataatcatgtgaactctgtttccagcaaggatgcagtagaacacgatcatgtccattcagctttacctgatgtgcataggggcaatacacatgcagatacagtaacaaatgacggagaacctattggagcaaacaacaatgggaaagtgtccaggttaacctacggtgaagataaattcagaccaggtattcaaagatctgaaaaccacacagaatctatggaaggtttaagctgtttgcaaagggcaggagattccgttggatccccagcaagtattaacaatacagaattaccaaagaacaatgtttcttctgaagctcatattgatgataatgagttgaggagaaatgatcttgtgaatgatgttgaatcaaattcgatcgatggtaaacatgacaccatgatgaatctttcagttccaaaaatttcatgtctctacaaatgttgttctccatgtttccaatctatttataagatggttcatggtattatttcaaatactctaaggcctaatctgcattgcttaacagctgatgatatgcatgacattctgtcatcatggtgcttgaatctattagggtctgttagaaagttgtacagctcacatgatgaggccagctgcacagaagtttttgttagaatgtccaataaagaaacccacttagagcattgtgcttgtcagagtgatatctatctttcaagagaatgtgtatgccacttggaaagcaatggggatgttgaaactgcaaatactgattgtcatcctctatcaggacaaagcttaagttttttctttaaagatggtgtatggatgccgttggatctcactgcggaaacaaaacttcattgcagcttcaggagattctgtgtttgctcgatattaggaacagtttctatgctcagctagatcctcagttcatgatattgtctgatgcagttgcaaaagtacatatagtactctaatgctctaagtgtggctccagttgtgcacataacacaacatcatcaggatgtctttggttgattggaacttctcatccttgatgcaacttttgggcaagcttttattgcacataaattgcctctacctgttatggtcattagtggaaaactggctgttgtagttgcttcgtagactgaatatttaaaaagaagctaagatattagtcttcattttttttccaacgaagttacccatgtaggttggactgttgttgctgctggaaatttcacggttagatgatgactgagtgactgacgccatttcagttctcattgtaatatgtattatggcccaattaagcatcaagttgaaacatgattgaatcttatactcacattttgtgttgt

SEQ ID NO: 30244 - DNA, 1829 bp, Zea mays
  Clone ID: UC-ZMFLB73009H06_FLI
ctgggggaggccacggtgaacctggcggactacgccgacgcgttgaagccgtcggcggtgacgctcccgctcaagggcagccccggcacgctgctgcacgtgaccatccagcgggtggtgggtggcgccggtgggtacggagacgacgcgagtgagagcggcgacgcctcgccggtggcaaagacgccacagagaagaacgacactgcagaaccagctgagccggtttgaggacgaggacggcgagaaggctagagcggccacggatgcgatgagtcctgtgcaagatggattgttgataacaaaacctccaggcatgaggtttccatcaagaagaaatgtgcctatgtctgttgacccagtgggccatctccacaatggcagcagtttcgatgctgtctcggtgtcaggttcagatgcaagttctgggagatatacccccaaaattagtgcgaccatgcacaactcatatcttcaggatagtagcaatgctctctcaccatttgccaacaatggcactgtgaggaacccattgaccagttcgggtgactggtcaggaagctcagctcctgatgctagtacagatgggtcaacgagcaattctggtgaggcagggttaagaggggaggatgacgacgtggagaagctaagaagtgaaatagccactttaaccaggaaattggatgtctcagatatggagttgcagactctccgaaagcaaattgtgaaggagagtcggcgtgggcaagatctctccaaggagatgagtagcctcagggaggagagggatgcactcagaagagaatatgaaggactgagaggggcaaagaagatgatccatgattcaaatggctcagggaaacggctctcagatgggtatgacccatggtcacaggttgaagaactgaagcaagatctgaatcatgagaagaatctaaatgcagatcttcgtctacaactgcaaaagatgcaggaatctaactctgagctgcttctggctgtgaaagatcttgatgagatgttggagcaaaagaacagagacatttccattttgcaagaggatacacaagaggatccacaggaggcagaatatgagcatgcactgtcaaatgtgcataattctggacgcaaaattgccttatctgaaacgagttcataccaagagaaggaagatgagcttatgctggatgcactggcaaagaagcgtgatgacatctctacctctgagcttgaaaagaaaatccttgagctgagcaatgaaatcgagttgtacaagaaagatcgtgaggatattgagatgcaaatggagcaacttgcacttgattatgagattctaaagcaagagaaccatgacatatcttcgaggctggagcaaacacaactgagggagcagctaaggatgcaatatgagtgttcagctcatttggctattataagtgatcttgaggccaatgtggagagcttggataatgaactccagacacaggctaaaaagtttgaggccgacatagcagaaataatgagtgcaaaggtggaacaagagcaacgggccattaaggctgaggattctctgaggaagataagatggaataatgcaactaccgcagaacgacttcaggaggaattcaaggtgttgtcttcacaagtatcttctgctttcagtgcaaacgaacaacagcttgtgcaagcaagaaaagaggttgcggagctgcagctgcagaagagccagttagaagagttacttcagaaggcccaaggagatcttggatcagttcaggatcagcaccgggtgaaggtccagcagttaataaccctagtggatttcaagtc

SEQ ID NO: 30245 - DNA, 2526 bp, Zea mays
  Clone ID: UC-ZMFLB73015D08_FLI
cattcggtgaagctcactccctcacccaacgctccatagtccacactcgccgtgctccccatgcagcaaccgcttgtgctcctccttctcttcttcatcggctcggccaagtatgccgtcgcctcccgcgccgacgccggtgcggctacctacattgtctacctgaaccccgcgctcaagccgtccccctacgccacgcacctccactggcaccacgcgcacctcgacgccctctccctggaccccgcgcgccacctcctctactcgtacacgaccgccgcgccgtccgcgttcgccgcccgcctcctcccatcccacgtggcggcgctcaccactcaccctgccgtcgcgtcagtgcacgaggacgtgctcctgcctctccacaccacgcgctccccatcgttcctccacctcccgccgtacagcgcgcctgacgcggacgccgggggcccggacgtcatcatcggggtgctcgacaccggcgtctggcccgagagccccagcttcggggacgccggtcagggccctgtgcctgcgcggtggcgcgggagctgcgagaccaatgccaccgacttcccgtcctcgatgtgcaaccgcaagctcatcggcgcccgtgccttcttccgcggctactcgtcgggggccggcgacggctctcgagtcggcgccgacctaatgtcgccgagggaccacgacgggcacggcacgcacaccgcgagtacggcagccggggccgtcgtggcgggcgcaagcctcctcgggtacgcgccgggcacggcgcggggcatggcccccggggcgcgcgtcgcggcgtacaaggtgtgctggaggcaagggtgcttcagctccgacattctggcgggcatggagaaggccatcgacgacggcgtcgacgtgctctcgctgtcgctgggtggcggcgcgttcccgctctcgcgcgaccccatcgcggtcggcgcgctcgcggccacccgccgcggcatcgtcgtctcgtgctccgctgggaacagcgggccgtcgccgtcgtctctggtgaacacggccccgtgggtaatcacggtcggcgccgggacgctcgaccggagctttccggcttacgcccagctcgccaacggcgagacccacgccggcatgtccctctactccggcgatgggctcggtgacggcaagatccctctggtgtacaataagggcatccgtgccggcagcaactcgagcaagctctgcatggagggcacactgaacgccgcggaggtgaagggcaaggtggtcctctgcgacaggggcggcaactcgagggtggagaaggggcagatagtgaagctagccggtggcgtgggaatggtgcttgcgaacaccgcccagagcggcgaggaagtcgtggcggacagccacctgctcccggcggttgccgtcggcgctaagagcggggacgccataaggaggtacgtggagtcggacgccaacccggaggtggcgttaacctttgccggcaccgcgctcgacgtgcggccggcgccggtagtagccgcgttcagctcccgtggacccaacagggttgtgccgcagctactcaagccggacgtgatcggcccgggcgtgaacatccttgccgggtggacggggtccatcgggccgaccgggctagccgccgacgagcggcggtcagagtttaacatcttgtcagggacatccatgtcgtgcccgcacatcagcggcctggcggcgttcgtgaaggcggcgcacccggactggagccccagcgccatcaagtccgcgctcatgacaactgcctacaccacggacaacaccgggtcgcccctcctcgacgccgcgaccaacaccacggccacgccgtgggccttcggcgcgggccacgtggaccccgtcagcgcgctctccccgggactcgtctacgacgcctccgtcgacgactacgtcgccttcctctgcaccgtcggcgtcgcgccgcggcagatccaggccatcacggcggaggggcccaacgtgacctgcacgcggaagctgtccagcccaggggacctcaactacccgtccttttcggtcgtgttcgaccggaggtcgtcgcgcagcaccgtgaagtaccggcgcgatctgaccaacgtcggcagcgccggggacacgtacactgtcaaggtcaccggacccagcgacatcagcgttagagtcaagccggcaaggctcgagttcaggcgggccggagacaagctcaggtacaccgtcacgttcaggtccgcgaacgccagaggacccatggaccccgctgcgttcggttggctgacgtggagcagcggtgagcacgatgtgcggagcccgatatcgtacacttgggggatgtagcactgatctccacagctgatccgagcatttatcttaccgccggagtgaattgggtctcagggatgccggaaatatatatcttcaataatgatacgaattcgcttgttatttactcggcccgtttcaaaatatatatggtttaaaaaataacctgtttgcaccgcg

SEQ ID NO: 30246 - DNA, 2848 bp, Zea mays
  Clone ID: UC-ZMFLB73015F12_FLI
cgcgaatctatccatctatctaatctacttacgcacgaacatgcgtaacatcggcatgctgcgggcgctggtcctggcgctcgcggtggccgccgccgccgccgccgagaagaggaggacgtacatcgtccacatggccaagtcggcgatgccggccgagtacgcggaccacgccgagtggtacggcgcatcgctgcgctccgtgtccgcctcagcctccgccgccaagatgctctacgcgtacgacaccgtcctgcacggtttctccgcgcgcctcacgccgcaggaggccagcgacctggcgtccgccgagggggtgctcgccgtcaacccggaggcgcggtacgagctgcacaccacgcggacgcccgagttcctgggcatcgccggccagggactgtccccgcagtccggcacggcgggcgacgtcgtcgtcggcgtgctcgacacgggcgtctggcccgagagcaagagctacgacgacgccggcctcgccgaggtgcccgcgtggtggaagggccagtgcgaggcgggacccggcttcgacgcctccgccgcctgcaaccgcaagctcgtcggcgccaggttcttcagcaagggctacgaggccgccatgggccccatggacaccgaccgggagtcccggtccccgctcgacgacgacggccacggcacgcacaccagctccacggccgccggcgccgccgtgccgggcgccagcctcttcggcttcgccgcgggcacggcgcgcggcatggcgccccgggcgcgcgtcgccgcctacaaggtgtgttggctcggcggctgcttcagctccgacatcctcgcgggcatggacgccgccgtcgccgacggctgcggcgtgctctcgctctcgctgggcgggggcgccgccgactactcgcgcgacagcgtcgccatcggcgccttcgccgccacggagcagaacgtcctcgtctcctgctcggccgggaacgccggtcccgggagctccacgctgtccaacgtggcgccgtggatcaccaccgtgggcgccggcacgctcgaccgcgacttcccggcgtacgtcgtgctcggcgacgggaagaactacacgggcgtctcgctctacgccgggaagccgctgcccagcgccccgatccccatcgtgtacgcggccaacgcctccaactccaccgcggggaacctgtgcatgcccggcaccctcgtgccggagaaggtggccggcaagatcgtcgtgtgcgaccgcggcgtcagcgcgcgcgtccagaagggcctcgtcgtgcgcgacgcgggcggcgccggcatggtgctgtccaacacggccgccaacggccaggagctcgtcgccgacgcgcacctcctgcccgccgccggcgtcggcgagacggaaggcacggcgatcaagtcgtacgtggcctccgccccgaaccccacggcgacggtcgtggtcgccgggacggaggtgggcgtgcgcccctcgccggtggtggcggcgttctcgtcgcgcgggcccaacatggtgacgccggagatcctgaagccggacatgatcgcgccgggggtgaacatcctggcgtcgtggacgggcaaggccgggccgacgggcctcgccgccgacacccgccgcgtgggcttcaacatcatctccggcacgtccatgtcgtgcccgcacgtgagcgggctggcggcgctgctccggagcgcgcacccggagtggagccccgccgccgtgcgctcggcgctcatgaccacggcctacgccagctactccggcgggtcgtcgctgctggacgcggcgacgggcgggatggccacgccgttcgactacggcgcggggcacgtggaccccgcgcgggcgctggacccggggctcgtctacgatctgggcacccgcgactacgtggacttcctgtgcgcgctcaagtacagctccaccatgatcgccgccgtggcgcggagccgggagtacgcgtgcgccgagaacaagacctactccgtgggcgccctcaactacccgtccttctcggtggcctactcgacggccaacggcgacggcggcggggactcggccaccgtgacacacacgcggacgctgaccaacgtgggcggggcgggcacgtacaaggcgtccacgtcgctcgccgctgccaagggcgtggccgtggacgtggagccggcggagctggagttcacgtcggtgggggagaagaagagctacacggtgaggttcacgtccaagtcgcagccgtcgggcaccgccggtttcgggcggctcgtgtggtcggacgggaagcacagcgtggccagcccgatagcgttcacgtggacctgaacctgatggacggatggattataccatacgacagtggtttttggcgcctcagcctcaaagaaaggcccataatccatcatccatgtgacggcctcgttccctacactacgcagtcaaaaggaccgaagtgtagggtgggaaggtttggagggggtacggtgcaaattggaggtttcttctgtgttgctattattactactaataaggtcattaatcctatcagcgtccgtaggttgtgatttttggatggaaatgggatcggggtggacggttggatggagattgatggtgcttggttgattggaatggaattattagagaggagaaggttttataggttgaggcttgcaagttgggactggaccagagtgtgactgtgcgagggcaggagcagtttcgcagtgactgattggaacctgctgtagtgctgtggggaactgtcgcctcgcctatcagaaatggtctccacaaatgttttccgttctacctttttgaaaagtctcaaattattac

SEQ ID NO: 30247 - DNA, 1797 bp, Zea mays
  Clone ID: UC-ZMFLB73016G07_FLI
tttccctttccccgccgctcctccgaagccaccaccgtgccccgccccgcgagggcacgaaagaggaggaacgcggccaccgccggcgagggttcgggctccgctcccgacggtttgcaacccgggagggagccgaccgtgcgcgcgcattgggcccgcgcgggggaagcggcaggcgcgtgccgtttttatttagcccgctccgctccgcgcccggcggctgcggggtgtggtgctcctgctgattttcttctcggcgccatggaggccggctactgcaaccgcaagaagaccgacggcatctgcgacggcgtctgcgacagcgagcttggttcaaagtcagtcctgagcatgtcgaggctgaagtgcgcgctgcggacattcgatctgagggttctcttgattctgctgatcggtgtgccaatcctgctcttcgcgatatacgtgcacggccagaaggtgacctacttcctccggccgatatgggagaagcccccaaagcccttcaaagtactcccccactactaccacgagaacgtctcgatggccaacctctgcaagctgcacggatggagagtcagggagaccccgcgccgcgtcttcgacgccgtgctcttcagcaacgagctcgacatccttgacatccgctggcacgagctgagcccctacgtgtcggagttcgtgctgctggagtccaactcgaccttcaccggcataaggaaggacctccacttcagggagaaccggcagcggttcggcttcgccgagtcgcggctgacctacggcaccataggcgggaggttcgtgaagggagagaacccgttcgtggaggagtcgtaccagagggtcgccctcgaccagctgatcaagatcgcgggcatcgcggacgacgacctgctgatcatgtcggacgtggacgagatcccgagcgggcacaccgtgaacctcctgagatggtgcgacgacgtccccgaggtactccacctccagctccggaactacctctactcgttcgagttcctgctcgacgacaggagctggcgggcctcggtgcacaggtacagggccgggaggacgaggtacgcgcacttccggcagacggacgacctcctggccgattccgggtggcactgcagcttctgcttccgccgcatagacgacttcgtcttcaagatgaaggcctacagccacgtggaccggatcaggttcgggtacttcctgaacccgaggaggatccagcacgtgatctgcgagggggccgatctcttcgacatgctccccgaggagtacacgttccaggagatcatcgccaagctggggcctatcccgagcacgttctccgctgtccatctccccgcctatctgctggagcacaacgagcggtacaggtaccttctcccgggcaactgcgttagagagagtggctagtagctaaggctgtaaggcagctagctgtgttgctgtctgcatcgccatggcctgaggcgcaccgacgtcgctcgcggatgcatgcatgcgtggaggagcgccctgccgttgccggggttgttgtatctggatatacgactggctgggctgacttatatatttagatgatgaatgaatggtcgcttgaccgctgctggttcagttcgtatgagattttgtaccatggaaggccttcacagcagcatagcatgcttggtcgctgcttccttgttgttttgcaggcctgggtttttattcattgcttccatgattgatgtatgtatgaatgaactcaaactatttgtaggtgtcataccgagcgacattcat

SEQ ID NO: 30248 - DNA, 1406 bp, Zea mays
  Clone ID: UC-ZMFLB73016H05_FLI
gcggagcgcaagtagatagctgctgcgtcttcctggcctgagggtttcggattcatcagccgggccgccggggtcgccatcgccgccgttgggacggcggcggcggagtttggcgtcgagttcttcagagggttaggttaggtgcacgcgtctctcgcgttcctccttcccaactcgaattcctttctttccatacccgtccccatgacgttcgttcttccatgattcccttccatatttgctccagccaggccatccgcggctgcgtggctgctctcctgctattttaatgcctgccttctctccctctcacgcctcataaaaaaaactaataattccttgggatctgaggggatccgcgtggggttggtaggatcgcgggcagagattttagccaggactggaggaaaaccagtccgctctctctccatgagcttcggcggcatgttcgacggcgccggctccggcgtcttctcctacgacgctaccggcggcggcacgggcatgcacaaccccggccgcctcgtcccggccccgcccctgccgaaacctggcggattcggcgccacgggtctctccctcgggctgcaaacgaacatggaaggggctcagctgggcgacttgggtcgtatgggcctgattggcggcggcgggagcgggagcggaggcgacggggactcgctgggccgcggccgtgaggacgagatcgacagccggtcaggcagcgacaacgtcgacggcgcctccggtgacgagatcgacccggacaacagtaaccctcgcaggaagaagaagcgataccaccgccacacaccgcagcaaatccaagaactcgaagctgtgttcaaggagtgcccccaccccgacgagaagcaaaggatggagctcagcaagcggctcaacctagagagccgccaggtcaagttctggttccagaaccgccgcacgcagatgaagacgcagatcgagcggcacgagaacgcgctgctgaggcaggagaacgacaagctgagggcggagaacatgacgatccgggaggcgatgcgcaaccccatctgcgccaactgtggcggcgcggccgtgctcggggaggtgtcgctggaggagcagcacctccgcatagagaacgcgcggctcaaggacgagctggaccgcgtctgcgccctcgccggcaagttcctcggccgcccaatctcctctggcagctccatgtcgtcgtccctgcaaggctgctccggcctcgagctcgccgtcggctccaacaacggctacgggcccggtcccctcggcgcgtcagcgctgcagcccctccccgacctactcggcgccggccttccgggccccgtgggctcggccgccatgcgcttgcccatgggcattggcgccctcgacgttgcgctgcacgg

SEQ ID NO: 30249 - DNA, 756 bp, Zea mays
  Clone ID: UC-ZMFLB73018F08_FLI
aagaagttcctcacgaaggtccaatgtgtgatcttctgtggtctgatccagatgatcggtgtggctggggtatttctcctcgtggtgctggttataccttcggacaggatatatcagagcagttcaaccataccaatagtctaaggctaattgctagagctcaccagttggttatggagggattcaattgggctcatgagcaaaaagtcgtgactatatttagtgcacctaattattgctaccgctgtgggaacatggcatcaatcttagaagtggatgattgcagagagcatactttcatccagtttgagccagccccaagaaggggagagccagatgtaactcgtaggacacctgactatttcctgtgacgcaaaagtgatgtggatcatgcagagcgaagttgtgctggaatgttttgacttggacggcatggaattcatggttgcttctctggtgttcatcccgcccgtcgtgatcggttgaccgcccgagcaggatccggcctctccaaggccgtggcttcctggctggtgccgcctcgcccacagatcgtgcagtgccatgccatgtggtctgggggcaggtctgggattcgttgggcgctcgctattccctcgtttcgctgtcgcaaccagctaatgctgtgggttgaagctgagatttcagtggtctagggccaacataaacaattgggcctcctttatacatataatatttttagtatacatttatataatgttataatatattgat

SEQ ID NO: 30250 - DNA, 2258 bp, Zea mays
  Clone ID: UC-ZMFLB73001C11_FLI
cctgctacaaataaaaattcgtggggcggccaaaccctaaaacgccccacagcgcaagcgagcagatcctcctccctttctgcttcctggcatcctctctgcctccccgcgccgatctcgagcacctggggagaccgcgagacgtgcgcctgatttttctcatcgcagcagccctcaagttccccacctcttttttcttgcagctttcaattaatctggttatttagctacatctttattttactttcattttacctttaatctgtttagttccattgcatcttctgcggttgcggttagtattgctgtttcttgctccttgtttcttgttcttttgcttctaaccatggacgcaggaacctactccatctcatcagagaagagccacacggcggcagcggcgcggccccctcttcaggaggccggcactcggccctacatgccgtcgctgagcacaggatcgcgcaacccgtcggccaagtgctacggcgataggttcatcccggacaggtcggcgatggatatggacatggcgcactacctgctcacggagcccaggagggacaaggagaacgcggtggcagcgtccccatccaaggaggcgtaccggaggctgctcgccgagaagttgctcaacaaccggacacgcatccttgccttcaggaacaagccgcctgtgtctgagaacgtctcggcagccatcacagcttcctctcaccatgccaagctggtcaagcagcgtcgacatattccccagtctgcagagaggactctggacgcaccagagcttgttgacgactactacctcaacctgcttgactgggggagcaacaacgtgctatccattgctctgggcgacacggtatacctgtgggatgcctccagtggatccacgtctgagcttgtgaccattcacgaggacagtggtcccatcaccagcgtcaactgggctccagatggccaccatatcgctattgggctcaactcatccgatatccagctctgggacaccagctccaaccgactgttgagaactctcagaggtgtgcatgaggaaagagttggctcactggcatggaacaacaacatcctcaccactggcagtatggatggcaagatcgtgaacaacgacgtgagaattaggaaccatgttgtacagacatacgaggggcacagccaggaggtgtgtgggctcaagtggtctggatcagggcagcagctggctagtgggggtaatgacaaccttctgcacatttgggatgtgtcgatggcatcccccatgtcaaccgctggccgcaaccagtggctgcacaggctcgaggaccacatgtccgctgtgaaggcactcgcgtggtgtcctttccagagcaacttgctggcaactggtggtggcggcagtgatagatgcatcaagttctggaacacacacactggagcatgtctgaactctgttaacactggatcacaggtctgtgcccttctatggaacaaaaatgagagagagctgctgagctcacacggattcacacagaaccaactaaccttgtggaagtacccatcaatggtaaagatggctgaactcagtggccatacctctcgtgtccttttcatggctcagagccctgatggttgcacagtagcatcagccgctgcggatgagacccttcggttctggaacgtatttggagaccctgaagtggccaagcctgcagccaaggcttcccacactgggatgttcaacagcttcaaccatattcgataggaacaagtcatgagaacgatcccttctgttggaaatggccgtgcatcatatgtgaggtcgattcctattgatgagatctatccacattgagtaagcacacaacatcagcgagcattgccatcatatgcatcattcagcgatgctaatcagaaatccaggatcagggccgtaaaagggttggactatatgtatctgcaacatcgcaagcaacagggaggctgtctcttcagaaattttcaagaggacgtgtcagaaacatactcaggaggccgtctcttcattcaaagagtatcttttacacgacttcttgagtataaaaaactcatttgtacaatcctacctgtctattgaattgtctttagaaaaaaaaaagagactttattgtatgtactttttttatcttttatgtctgaagaactgttttccccttttcttttagaagtaggagccggtaaagctactctttcaatttgtcacaagcattatttatttttat

SEQ ID NO: 30251 - DNA, 1327 bp, Zea mays
  Clone ID: UC-ZMFLB73001C12_FLI
cagatgcggaagaacagtgcaaatcatcaaacatacagaagaatgaaccttctgtgatagatccatggtctccttctactaggaatactttactggagaaaattaatggtggcttgaggaagttttctggctattataagagtaacaaggtgtactgtggaaaggtgcctttgacttcttcgttgaatgttttaagaaacaagggcatcaagttaggtggtagaaagtatcaaatcaaaggatctactggcactggtgcttttgctaaagtatacaaagccactgttgacagtaatgcggaagaaatggttgctttgaagattcagaatccctcatttactttggaattttacatgtattgccaacttgatctgcgtatatctgatgtcgagagaccaagctttggctacgcacatgaaatgcatatcttctctgatgtcagtgtgttagtttgtgattacctgccgtatggaactctcctggatgtcataaattctcacttagtagtcggtcgatacatggatgaagttctatgcatgtattataccatagagatgctgaacatgctggaaacactgcatagtgttggcataatccatggtgatttcaaacctgacaacatccttgtttgctacccgagtggagagatcacagaggacaatttccgaagtgaaaaacgagtagagaggaatcaggggctctgccttgttgattggggccgtggcattgatctggctcttttcccctcctgcacggagttccacggggactgtggaacctcaggattcagatgcatcgagatgcaagaacatagaaactggacttatcaggtcgacacatacggcctctgcgtcgttgtgcacatgatgctacacgggtcaggcatgaacgtcaagaaggttcccaggattggtggaggctacgaatggcaacctaaacagccgtttaaaaggtactggaacgttgatctgtggcagaagctcttctcgacgctgctgaacccgccctcgaacgacagcgacgtggccgcgctccagagcctgcgagcgtcattccggcagtacatgtgcagcaaccggcagctggtcggcaagctgaaccagctgctggcgaaacaaaaggcctcgctgtgctcgtcctaggctgcgtgacaaagccgaaacgcggctggtgcctgtgccccccatgtaatgtaactccggctaggctaatacgaactcacatgtatccttaagtaatttactagctagttacccgtgatttggtagggttgttatatatcattaaaataagtattaagatatttatttaaatataattattgttt

SEQ ID NO: 30252 - DNA, 1262 bp, Zea mays
  Clone ID: UC-ZMFLB73001D02_FLI
ctcctttgtgagccttgcaagctgagctttggtcaagggctcacaaaggagcagaagaatgcttattttgatgagtatgactacagggttaagcttctccagaagaaacaatggaaggatgagatccgcaggttaaaggagatgaagaagagggggaaaactgatctggatgattatgggtatgctaatatcactggtgaggacgatcaggatcctcctccagagaatgtgtcagttcccttacctgacatggtactgcctccttcatttgattgtgacaatcccacataccggtaccgctttctagagccaacttcgactgtcctagcaagacctgttttagatgcgcatggatgggatcatgactgtggttatgatggagtgagcgttgaagagacactagctatccttagcaggttcccagcaaatgtagcagttcaggtcaccaaggacaagaaggaatttagcatccatttggactcttccatcgcagcaaagcatggagagaacacatcatctcttgctggttttgatatccagactgttgggcggcagcttgcatatattctccgtggggagacaaaaatcaagaatatcaagaagaacaaaaccacaggagggttctcagtaactttcctgggcgacattgtggcaactggactgaagattgaggaccagctctcccttgggaagaggttgtcactagttgctagcactggcgcgatgcgagcccaaggggacactgcatatggagctaacctggaggcacgcttgaaggacaaagactatccgatagcccagtccctctcaaccttgggtctctctctgatgaagtggcgtcgggaccttgctctgggcgcaaacttgcagtcccagttttccatcggaagggggtcgaagatggcagttcgacttggtctgaacaacaagctgagtgggcagatcaccgtcaggacaagcacctcagagcaggtccagattgcacttctgggtctcgtaccggttgcagcctccatttaccggagtttccggcccagtgaaccatcctttgcttattagcttgtcaggagtctcagtttaattatttcatgatcacatcgtttctcttagcaattttgcttttcatatcaaccatgtttcctgctgtttcagttcactcctttgtaattggcagatcgtttcctatcataattttgggtgaagagggttgcgagatttatctggaactatagctgaataaataatgtggagggatgttgatc

SEQ ID NO: 30253 - DNA, 1411 bp, Zea mays
  Clone ID: UC-ZMFLB73001D07_FLI
tgtagttctgttcctcttcctccccactcactcctgcgcttcctcgccgcgcggttccttctccctgatcctcctttggcttcgcggttcatggcgatgtggagggccgccgctaggcagctggtcgaccgggcgctcggctcaagggccgcgcacacgtctacaggcagcaagaagatagtcggggtgttctacaaggccggggagtatgccgacaagaaccccaacttcgtcggctgcgtcgagggtgcactcggcatccgcggctggctcgagtcgcagggccatcagtacattgtcaccgatgacaaggaaggccccaactgtgaactggagaagcacattgaagacatgcatgtcctgattaccaccccattccacccagcttatgtcactgcagagaggataaagaaggcgaagaatcttgagcttcttctcacggcaggaatcggctccgatcatattgatcttccagcagctgctgctgcgggcttaactgtggctgaggtcactggaagcaacactgtctctgtggcagaagatgagctcttgcgcattctgattctgctcaggaacttcttgcctgggtaccaacaggtagttcaaggcgaatggaacgtagcaggcattgcccacagagcttatgatcttgaaggaaaaactgttgggactgttggggctggtcgtattggcaggctcttgcttcagcgtcttaagccctttaactgcaacctgctttaccatgacagacttcagattgacccagagcttgagaaagaaattggggccaaatttgaggaggacctggatgctatgcttccaaagtgtgatgtgattgtgatcaacacacctcttacggagaaaacaagaggcatgtttaacaaagagaggattgcaaagatgaagaaaggtgtaattgttgtaaataatgctcgaggagcaatcatggatgctcaagcagtcgcagatgcatgttctagcggtcacattgctggatacggtggtgatgtgtggttcccacagccagcaccaaaggatcacccctggcgctacatgcctaaccatgccatgacccctcacatctctgggactacaattgatgcgcagctgcggtatgcggatggtgtgagggacatgctggataggtatttcaagggcgaggacttcccggtgcagaactacatcgtcaaggaaggccagcttgccagtcagtaccagtgaccgcgcgagatgttgctgtgctgtgtaggcttttctggtgagaagctgcgaggaagaaactcctgttgcgtacttgcgttactgtatgagtagctctgagaaatctgtcagcggccacctgtaataaaagaatgccttgctggtatctcaccgtggagatcaataagtcccttttttttccttctctgtc

SEQ ID NO: 30254 - DNA, 1713 bp, Zea mays
  Clone ID: UC-ZMFLB73001E08_FLI
gtcggatctggttctcgtgttccggctataatcaagataattactgatttttttgggaaggaaccaagacgtaccatgaatgcaagcgagtgtgttgcgcgaggatgcgctcttcaatgtgctattctcagccccactttcaaagtgcgagaattccaggtcaatgatgggtttcctttctcaattgcattgtcatggaatggagactcccagaatgcaccccaacaaacccttgtattccaaaaggggaatgcaattcctagcactaaagctcttaccatctttaaatccagcacatttgaagttgatgttttgtatgtcgacccagataactcacaaattccacaaaaaataagcacttacacaattggccctttccaaacctccaacggagagaaggccaaactgaaagtgaaagtgcgtctcaacatccatgggaccgttacagttgattcggtgataatgctggaggaggatgtggaagttccagtctcatctgcaaatgaagctccaaacgatactatgaagatggacacagatgatgtgccaagtgatcctgctgctggatctgatgtgactatgcaggagcagcctcctgcagctggaaatggagcacaagataatgaggaaaagtctgtttcgatggaaactgatgcaaaggttgagccgtcaaaaaagaaagttaagaaaactactgttccggtccatgagttggtctatggggccttggctgcagctgacctgcagaaggctgtagagaaagagtatgagatggctcttcaagacagagtaatggaagaaacaaaggagaagaagaatgctgttgaagcttatgtgtatgacatgcgtaacaagctatatgacaagtacagtgattttgtcacacctgaggacaaggaaggtttgatcggtaaacttcaggaggttgaagactggctctatgaagatggcgaggatgagaccaagggagtttatattgctaaactagaagaacttaaaaaggttggtgatcctattgaggtgcgcttcaaagaatgggagattagaggttctgctgttagccaactgctatactgcataaaaagcttcagagaagctgcactgtctaaggaccagaagtttgaacacatagacatgtcagaaaagcaaaaggtcattagcgagtgttcggaagcagagacttggctaatggagaaaaggcagcagcaggatgctctgccaaagcatgctaatccggtcctccttgctgctgaccttaagaagaaagctgaaacacttgacaggttctgcaagccgatcatgacgaaaccgaagccagttcctaagccacagactccgcctccggcagaaacccaagctcctgagcctcagacaccggagcagcagcgatcaaatggcgaaagcacaaccagcgagggagctgcagaggagcctccagccgagcagatggagacagacaaacctgagggagccacagatccctcggcttagctttgcaggtgatggaacatttgtgtgattgaccttatacttggttgggggtgaactaagcaagatggttgttcgccacatttgagaatgtgtgttgggacgttttttcgttatttctgtttcttgacggaggtggttggatggttgaaggatgagagcagtagggtacacttcgtaaatggcgattccgaatttttcgtgtttgtttaatactttgattgt

SEQ ID NO: 30255 - DNA, 2440 bp, Zea mays
  Clone ID: UC-ZMFLB73001F04_FLI
cagaaaatgatcaggcttttgtcagggtaaatgtgagaagtggaacaaaaagttcacggcatgaagttgtatttcagcttgattgctggtccagcccatacagggtggagaatcgctccatgttcttgcctatacggtttcggcagtttggtggtgatgatcattcatggcgtaatctgcttccgaattcatcagcttccttctttttggaggacctgagcagaaggcatctattggaagttttggttgatggaactgaccctatgaactccatgacatatgacatcaatgtcgtaatggatcatcagccccttactaattcagatgcccttaagaaggccttacgtgtcactgtcttgaaggaggggaaattgaatgttattcaaattattgattggctgccagataatagaaatcgaggacagataactgaaaggatgttatcaccaatctttcagccatcagaggtcgactatgggcagtcatctcctgatctggatagtgaatttcatgttactttggaactaacggagcttggcatttctgtaatttaccatatgcctgaggaagttctttacctctcagtgcagcaactgttacttgcatactcatctggaattggctctggagtaaatcggctcaaaatgcggatgcattggattcaagttgataatcaattaccatttgttcctatgcctgtacttttctgtcctcaaaagattgaaaatcagtcagactatattttcaagttctctatgacagttcagaccaacaattctcttgatttttgtgtctatccttatgtcggtgtccaggttcctgagaattgtgtgttctttgttaacatccatgaaccaatcatttggcgcctccatgagatgattcaacacctaaaattcgataggatatatagcaatcaaccttcagctgtttcagtggaccccatactgaaaattgggcttctgaacatctccgagatccgatttagagtgtcaatggcaatgtccccaagccaaaggccaaggggagtatttgggttctggtcgtcgttgatgactgcattgggaaacatggagcatatgccggtccgtatagctcaaagataccgggaggaattgtgcatgcggcaaagtgcacttatgaactctgctatatctaacattcaaaaggatcttcttagccaacctcttcagctactttccggtgttgatattcttggtaatgcgagtagcgctctgagtaacatgagcaaggggatagctgcattgtctatggacaagaaattcattcagggccggatgagacaggatagcaaaggtgtggaagactttggggatgtcataagagatggaggtggtgctcttgcaaaaggcatcttcagaggtgtcacaggcatattgacaaagcccatcgagggtgcaaaatcttctggtgttgaaggttttgtgcaaggagttggaaagggtataattggcgcagctgcacaaccagttagcggagttcttgatcttttatcaaaaactactgaaggtgccaatgcggtaaaaatgaaaatatcatcagcgataatggctgaggagcagttgctgcgtaggcgtcttcctcgagctattggtgggaatagtttgctctatccttatgacggacacaaagctactggccaggctatcttgcatctagctgaatgtgctacattccttggtcaaattgatatttttaaaatccgaggaaagtttgcttctaccgatgcttatgaggatcattttttacttcctaaggggaagatttttttaatcactcacagaagagtactattgcttcagttaccaatgatgacccagcgtaagttcaatcctacgaaggatccttgttcagtaatatgggatgtattatgggatgatttggtaacagtggagatgacccatgggaaaaaagatcctccagattcctggccttctaagcttattttatacttgaaagctaaaccttcaaattcgaaggaaattgttcgtttggtcaagtgtaatcgaggttcagatcaagcatctatcatttactcggcaattgacaaagcttataaagcttacggtccaaactcgttgaaggaattcttgagatggaaggtaccaaggccatatgcccctcgcaatagtagtggccgaagtatccaagacttatcatttggttaaaaggtcaacacaaatgcacactttagtgttaaacacagtagaatcttaggatgaaggtattttaggttgacacttttggttaccaggcaaatgatatattctacatatacactataggtatcagaggataggtactttgccttcatgtaaatagatatattttaggaggcgccggtattcatgtaaatgtgaacatctctgttataaagaaaaaaaataataatgcaaattatgcaagattcattgctgct

SEQ ID NO: 30256 - DNA, 3530 bp, Zea mays
  Clone ID: UC-ZMFLB73001F11_FLI
cttgcattcacagttgcacgccggccgccgccaaccccgcccccacgtcgcgcgcgctgtctccctctcgcctctctcgtggagacgactgggcgacagccgacagccgctgtcgcccaacgcaagctgcccaggtcttcttcgggctcttcgccggcgacgagcacagccaggtttaggtcgagcaggggccgatgggggaagaggcggagagcaactgcaagcgcaaggcgccggactcgagcgtggaagagcagccgagcctcgcgccggcgccggcgcagtcgcaggcggacccggcggccaagcgcccgaacatctcccgctcttgcgtccacgaggtagccgtcccgaatgggtacgagtcggttaaggacgaggcggtgcacgggacgcttgccagcccggccttcaatggggagatggccaagcagtacccgttcaagcttgaccccttccagagcgtatccatcgcttgcctggagcggaacgagtccgtgcttgtctccgcgcacacttccgcggggaagaccgtcgttgcggagtacgccattgccatggcgttcagggacaagcagagggtcatctacacctccccgctcaaggccctgagcaaccagaagtacagggagctcagtcaggagttcacagatgtcgggctgatgactggcgacgtcacgctccatccgaacgccacatgcctggtcatgacgacagagatcctcagggcgatgctctacaggggctccgaggtgatcaaggaggttgcctgggttatattcgatgagatacattacatgaaggatcgtgagagaggggtcgtgtgggaggagagcatcattttcttgccccctgccatcaagatggttttcctttcggctaccatgtcgaatgcgaccgaatttgctgaatggatatgcagcctgcacaagcagccctgtcatgttgtgtatacggacttcaggcccacaccattgcagcactatatgtttccaataggtggttctggtctttaccttgtagtagatgaaaatggccagtttagagaagataactttgcgaagctacaagactcctttgctaagccaaataatcaactggatggaaggaaaggtggtggacctaaagcgagtggccgaattgcaaaaggtggaagcgcctctgggaattctgacatatacagaattgttaagatgattatggagcgcaagtttcaaccagtcataattttcagctttagtagaagagaatgtgagcatcatgccatgtctatgtcaaaacttgacttcagcactgaagaagaaaaggaatgcattgagcaggttttctgtaatgctattggttgtttagtggaggaagacagaagtttacctgctatagagttgatgttgccacttcttaaacgaggtattgcagtacaccattctggactacttccaataattaaggagctagtggaattgctctttcaagaaggtcttgtgaaagctctctttgctaccgagacatttgccatgggtcttaatatgcctgcgaaaacggttgttttcacgtctgtcaaaaaatgggatggcgatagtaaccgctatattggttctggagaatatatacagatgagtggaagagctggccggcgtggcaaggatgaacgtggtatctgtgttataatgatagatgagaagatggaaatgagtgttatcaaggacatggtgttaggcaaaccagcacctctagtcagtactttccgtctgagctactacactattctgaacttaatgagccgtgtggagggccaatttaccgctgagcatgtgattaggcattcattccatgaatttcagtatgagaaggcattgccagaaatagctcaaaagattacacggttggagaatgaagctaccttgcttgattcttctggcgagactgatcttgctgaatatcacaaattggggcttgatatatctgaactggagaagaaaatcatgtctgagatgattagaccagagagggctttgttgtatttggttcctggaaggctggttagagtgagggatggttcaacagactggggatggggtgtggttgtaaatgtagtgaagaaacctccagcatctgggactctccctcctgcattaagtgcatcgcgcagcaacaactatacattcgataccttgcttcactgctcctctaattccagcgagaatggatcacgttcaaagccatgccctcctcgcccaggggaaaaaggtgaaatgcatgtggtgcctgtaccattgcctttagtatctggtctaagcagtgttagaatcaacattcctcctgatctacgaccacctgaagcaagacagaatatactttctgcagtgcaagaactaggaaagcgctacccccaaggtcttccgaaactacatccaatcaatgacatgggtattcaagaacctgaactagttgacttggtacataaacttgaagaccttgagcagaaacaatgctctcaccgacttcataagtccggtcaaagtgaacaggaactatcatggtaccaaaaaaaagcagatctgaatactgaaattcagcaactcaagtcaaagatgcgggattcacagctacaaaaatttagagatgaacttaggaaccggtcccgtgttctgaagatgctggggcatattgatgctgacggtgttctccagttaaaaggacgtgctgcctgtctaatagacacaggggatgaactgcttatcactgaacttatgttcaatggtacatttaatgatcttgaccatcatcaagttgcctcccttgctagctgctttgtaccttgtgataaatcaagtgagcagatacgcctaagaaatgaactttctaggccgatgatgcagcttcaggaggctgcaagaaaaatagctgaggtacaacgagaatgcaaactggaagtaaatgtggaggaatatgttgaatcaacctgcagaccctaccttatggatgtcatatactgttggtcaaggggagccacctttgcggaggtgatggaaatgaccgacatatttgaaggaagtgtcataagacttgctagaaggctggatgaatttctgaatcagttgagagctgctgctgaagccgtgggggaggttaaccttgagaagaagttcaagaatgcaagtgagagtttgcgtcggggtatcatgttctccaactcactgtatctgtaattagcactttagcagcaatagtaccatatgttagccgacaaatgctagcggcgggttttgacctgaagcaaaatatgcgttgtctgtaggagagggcattgccagatagcctctgtaaccttgtactctagttcctagactaaattaatttgttatcatgtatacatcagggtaggcgtgatgctgtcttaagaaatccaagtgataccaatttaagggcctgttattgaatagtgagggattctagctccctcaatcctctctgttactcttgcttccaaacaaatcctaaaggtctaatatcactgttggttatgctct

SEQ ID NO: 30257 - DNA, 1401 bp, Zea mays
  Clone ID: UC-ZMFLB73001G12_FLI
gttgcagttgcagcggcctcctcctctgcttcctccctcctcctcctcaccatggtgctggctgcgcacgatccccctccccttgtgttcgacgctgcccgcctgagcggcctctccgacatcccgcagcagttcatctggccggcggacgagagccccaccccggactccgccgaggagctggccgtgccgctcatcgacctctccggggacgccgccgaggtggtccggcaggtccggcgcgcctgcgacctgcacggcttcttccaggtggtggggcacggcatcgacgcggcgctgacggcggaggcccaccgctgcatggacgccttcttcacgctgccgctcccggacaagcagcgcgcgcagcgccgccagggggacagctgcggctacgccagcagcttcacgggccggttcgcgtccaagctgccctggaaggagacgctgtcgttccgctacaccgacgacgacgacggcgacaagtccaaggacgtcgtggcgtcctacttcgtggacaagctgggcgaggggtaccggcaccacggggaggtgtacgggcgctactgctctgagatgagccgtctgtcgctggagctcatggaggtgctaggcgagagcctgggcgtgggccggcgccacttccggcgcttcttccaggggaacgactccatcatgcgcctcaactactacccgccgtgccagcggccctacgacacgctgggcacggggccgcattgcgaccccacgtcgctcaccatcctgcaccaggacgacgtgggcggactccaggtgttcgacgccgccacgctcgcgtggcgctccatcaggccccgcccgggcgccttcgtcgtcaacatcggcgacaccttcatggcgctctccaacgggcgctacaggagctgcctccaccgcgccgtcgtcaacagccgggtggcacgccgctcgctcgccttcttcctgtgcccggagatggacaaggtggtcaggccgcccaaggagctggtggacgacgccaacccgagggcgtacccggacttcacgtggaggacgctgctggacttcaccatgaggcactacaggtcggacatgaggacgctcgaggccttctccaactggctcagcaccagtagcaatggcggacagcacctgctggagaagaagtaggcatgctatttgggtatggaagatggtggatgtaagcaaacaaagccaaattaagcagagtaggttaattaaggttggctgatgatccatttagggaaggagctgatctccctgactccctcctccaattttctcaaccaaatttatatagtataataataataataaaatagcaagtaatagttgtatcgtattattattaattaatttattagctggtaggcaagtagtatt

SEQ ID NO: 30258 - DNA, 812 bp, Zea mays
  Clone ID: UC-ZMFLB73002B04_FLI
ggaacttacaatggtgttttaccacttcttatgttgatgaactgctgtcaattcagaagataagtgctgagactatgttgtatagtgtatgggatgctaactcaaggatgtgtgactctatggttataaaaaggaactatgtacaacagctaaggcaagaggtcaaattgggaattgtcttgaaggagcaaatggattaccttgatcactgggcagcgctgcaaacagagcattcttcttctttatccagcgcaactgaagctcttaaagcaagcacattgcgtcttccagtttcaggaggagctaaggccgatgtacttactgttaagaatgctgtcagttcagcagttgacattatgcaagcaatggggtcatccgtttgccatttgctatcaaagttacaggcttcacactctctggttacagaactttcagctgttgctgctaaagaaagtaccttactcaacgagtacagagaactcttggcaacagcagcagcactacaggtccaagagtcgagcctaaggacacagctcatacaagaaacagagtgaacaggttaaggtcctgtatttctaactaggaagatagaagtaaacaccattcgttagtttcagtgactgctgcatatgtgtacctttgatgtcgttttgtttttcctttgctcttccttttcccccccacttattagctagctcatatttctttacatttctactcccccccccccccctgttcttttctgttcgaacaacttacatggaagataagggaagcaacatggaaatggaatcatggatttactccatgac

SEQ ID NO: 30259 - DNA, 1253 bp, Zea mays
  Clone ID: UC-ZMFLB73002B07_FLI
cgcctccttcccggcgcggggcgcggtggcggtcgcggccaagaaggccgcggcggcggttgctacgcccaagcaggccaagggcgccgtgcccattggatcagagacggcggcaggccgggcggtggagaagaaggcgagtttggcgcggacacctgttgctcgccggccgatgcttgttaagtctggatcagtggatgcggctgccccaaatgacacagttgttgctgtccaagagtcagatgaaaatacggacaaaccattgaaacaaacacagccagggaaaacagaggatgatgtgcactccaccacatcaagtaccaatactccccgtgcagcagctcgtaagagtgctgctgctgctgctgctggttttagtttcagattggaggagcgtgctgagaagagaaaggagttcttccaaaagcttgaagaaaaaatccatgcgaaggagctggaaaaaacaaatttgcaggagaaatctaaggagagccaagaggctgagatcaaactactgaggaagagcctaacatttaaagccacacctatgccaagcttttacaaggagcagccacccaaagttgagttgaaaaagattcccccaacacgtgccaggtcaccaaggctcggccggcacaaggcagccagttctgctactgctcctgctcctgcagatggttctgtatcatgtgggagcccacggagcactgcaaattcgggcaaggtaaatgaaatcatggagaacatcaaacctcgtgtccctgctagaaaatctattcagaggccagtcacgaaaactccattgcaagtgtctgccaccacaaaggctgaaccaagacccatagctacaaagccgaaaatcgcaaactcgaaacctaaggtttcaagggcaaaggttgcgcaggcgcaaggaaactcagctgaagtccctccttcagaaccttctgcctcggaagagctagtagtcgaacatggcgttggagaagctacaggtcctgatctggcttcacaattggttgcttcgaatgaagtcccagtccatggttgatcaattgcgcattttgcctatttatttccttcttgcagttctgtgaatagtgagggtgtgtgcttcattgaaagttgaatcgctcaaagtgccatggtttatcgtttctggagtaggcatccaaatttttttttcagcttgtcattgagcatgccatgtatattgcttgatattgtgttcatgtttaaaattcccaatcttgtgt

SEQ ID NO: 30260 - DNA, 1883 bp, Zea mays
  Clone ID: UC-ZMFLB73002B09_FLI
cgacgctcgcggccgtgtttctctcgcctcgctccctcggatcgcccgttcgcccccgcccatcgctcgctcatcagaaggagggcctagccttccgcagcagcgctcgtcagactccgccgcccgcaattccccccttgccccggcttttaatgggctttccctcccaccgaaatggccggcgatccctgcacccgcgccgccggtgaccgccccacctcctccgtcgccttcttctccgccgggggcgggctcggcctcggcccctccagcctgctgctccacctgctcctcctccactccctcttatagcctccagcctcccctcgcctcccgccaccccctatggccgccgttttcttccaccacgtcgtcggcgacctcaccgtcggcaagcccgaggtcgccgagctgcacgacaccgacacgctcgacgacgccgcgcgcgccatcgccgccagccccgagggcgccgtgcccgtctggcgccccagggccgcgccggacgacccgccctcgggggccaggttcatcggcatgatctccgcgctcgacatcgctgccttcgtcgcctccgcgggggtcggggatcgctccatgcgcgccgtcgtcggcgaggtcgtgcagcccaatcctgcgctgctcagggagatcgatccgggtaccaggttgatcgatgctctggaactgatgaggcatggagtgaagcgctttcttgttcgcaagagtgggagctggaaaggcattaccaagagattttcagtgctttataatggtaagtggctgaagaacatggaatcaacatctccaagtgcagccagcagcagcagcacgcagctatccccacgttctggttctgcagaaaagttctgctgcctatcaagggaagatgttctccggtttctcattggatgccttggtgctcttgctcccatcccgctgactcagatatcttcccttggagccatcaatccgcagtacagttacgtggaagcatctgcgcctgcgatggaagcaattcagaagatccctcaagacccatgcgccgttgctgtagtggagacgatgccagatggaactcgtagcatactaggagacatctctacttacaagctgtggaaatgtgactatgtttcagctgcatgggcactggcaaacctgtcagctgggcagtttgtcatcggtgccgacgagaatgggtcaacacccatctcagtcttcccagagcctcccatcagcccatcgtcaccggtggaggagatcagtcctgggcgctcgccaagggcgaagaagttcagcagcaggagcatcgggtttctgaacaacacccagatgtcagcgtggcggacacggagcatgtaccaccggggcaggagcaccccactgatgtgcaagaccacaagcaccctcgcggccgtcatggcgcagatgttgtcccatcgggccacacacgtctgggtgacggacgcagagtcggaggaggacggcgtcgtcgtcggcgtggtgggctacaccgagatcttcaatgccgccaccaggagcacctgcccaagtccgacagcatcttgatgcaccacatcgtgctgtacagtatactgctgttggttgatccgttggtgccccggtgcacgctgttgcactgaactgtacaatgtactttgctcatttgttggtttgtctggagagtttttagtcttttagatattcttggtctgcatggagcaggacttggtggtatattgttgcattcgttgtggacggtacgaataagaattcgggtttgcctcggagtctagtccattttgcatgctcgcctgcagcagtgcagctgtcgatgtactctatgactgtatatggaaatggaatgttctctgtttcctttc

SEQ ID NO: 30261 - DNA, 1308 bp, Zea mays
  Clone ID: UC-ZMFLB73002C03_FLI
gtccagcgtcacgctcacggtgaagggcactctggttgcatcgccaaaccgggcggattggagcgacaatgacaggaggcactggatcgtgttccggagcatcgacaagctcaccgtcaacggcggtggcgccatcgatggcaacggcgagaaatggtggcctcactcgtgcaagatcaacaaggctctcccttgcaaggaggctccgacggctctgtcattccactactgcgtcgacctgaaagtggaggatctgaaaatcgtgaacagccaacagatacacatgtcagtcgaggattctgcaaatgcgctgctggcgcggttgtccatcacagcgcctggcaccagccctaacactgacggcatccacatcactcgcagcaaagatgtacgcgtcacagactgcaagatcaagacaggggacgactgcatgtcaatcgagaacgggactcacaacctccatgtctccaaagttaactgtggtccagggcatgggatcagcatcggaagcctaggagacgacaactcaagagcagaagtctccggcatcaccatagattcagtgcaactacacggcacaaccaacggagcacgcatcaagacgtaccagggaggcagcggatacgccaaggacatcacgttccaaaatatggttatgtacgacgtcaagaacccgataatcatcgaccagaactactgcgacaaggctaagccatgcggagaacaagagtcagcagtgcaggtcagcggtgtcgtcttcaagaacattagagggacgaccagtaccaaggacgccatcaagatgaactgcagtgagaacgtcccatgccaaggcattaccttgcagaacatcgacctgaaaatgcaggacggcaagggcaacacaagaagcacttgtcagaatgcaaaatggacagaatttgggacagttcgcccgcagccttgcactgccataaagtagggggcaattgaagtctgttgctcgtgctttgtagtctgtacagatggagtagtcatactcatgtatatatataccgccaactctagtaacaccgtacatgcggtcatgtataatattgttttgcactgtagatgcattgtttgtagatataagtttaaaatagaaaatgagataacgagtgaaataggaagtctactagagatagtttaagatccataaaaacttcaacttataactcacttgtcaaaaaaacttataactgcgtatttgttaattggttcattcatgaccgaaatgtatagtacgtcttttatggaaataaagtagcaacagctgatatttctagg

SEQ ID NO: 30262 - DNA, 2338 bp, Zea mays
  Clone ID: UC-ZMFLB73003A01_FLI
gaactcccgatctggcaatccccacccacgctcccgagcaactttctactcactccggcgtcgcttcgaatcccagcgcggcggcgtgacgcgtgaatgcgtgatcgacgcgcggcgctgctcctccgggaaaccgcatggacgccgccgaccctctctgcgccatcacctcgcctgcgcggctccttccgcggacccttggccccaccccctcgaaggtccgcggtgcgctcctcgaggccatcgcactcgcccggtcgcggaaagggtctgaggagctggttaagcaggctgcaatggtgctgaaggagcacggggacatccagactctctaccatgatgatgcaatgaaagccatgccccccacaaatgtcagcaaagggcaacagggaagaagggcagcactggatcgcaaacgggctcggttcactatgaaggacactggaagcaaagcggtgcctgttgtggatcgatctaagttattgaatatttcggatccagtcgcattcttcatggccttggatcggcttgaagaagctgaggatgagatcaaacggctaaatggagaggcagaaaagcgcatattgatttttgatcctttagacgaacccattagacagcctggtttgcgtgggagaaaatcattccgcagtttcaaagtaactgaggatgctactactcaagatcccattgaggtactggcttcccaaacagcaactatgacaggatctcagttctcacaggatgttatgcatgctgttgctgacaaaaatgaacagtctgttccttcacgatctggtgaagctatttcagatgtttcaggaaaagaagattcattagctgagaaggatggccgtgatgatttggcttatttactgacctcgatccaagatttggatgaatctgaagaggaagcatttatccggaagaccttagggcttaaagaaataaggaagggaagagttagtctctgtaactccattcctggagtcaggtccttaagaagcgatactgaacaaaaaggttcaatgaaggttcgccctccagaaagtcatttgcctcagactcgccaagatcgaatttcagagttggagaaacatttatttcctggaggtgcagcaaatgctaaatgcacagatgatgaatctgaagggtcaccagatattgtgatgggtgaaccatcattagtgcatgattcttccgaggttctgatgaccaatgagaactctactggaagtgaaattgacaggaggaccccaaatctgtgtgccagagcagcagaccacgctcttgatcctgaaccaaacttgcctgatcatgcatacgaaaggcaaaccagaggctcctcacttggtttgtgcaaaaacacagaagttgccaatgaacacgaggaagatgatgtacacatagaatatccaactactggcgggtctacttatcaaacagaagtttcttctcatgatttggagggcagcttgacagaagaattggtcagtgaaccaggtaggcatgcggctccagatgatatctataggacttcacatgcagctgaggatagcattcaacatctagaagtggtcaaacagggtggtgttctacaagacaagtcaagccagtcgttggagatgcctctggaagatattgatccactatatcggcctcagatgcatggtggaagcactaagaaatcgacacctgttctgtgcaatgcactgtccccgatcgaacagaagcaacaagcagctcaagaagggaaaaggaagcaacaggcaaagagggtaaaaaaagtgtctgatgaatctagccatgcactggaaatatcccaagcaaatttcgaaccggagaatgaacctcataatgttgacgtgaacatggagcaaccgacagttatgagtagcgccaaggggcaaaagggagctcaaaggagaaacaagaccaaaaaattgaatcaaagaaaaatccttggagatgttgaccttgcgcggcagtctggagtgagaagaagctcaagaatacgctcgaggcctttggagtattggcttggtgaaagattactatatgggccgatacaggacactttgcctgcagttattggcatcaaagcatactctcctggccaggatggcaagaaaacattgaaagtgaaatctttcgtgtctgaacagtattcagatcttgtcgctcaatttgcgaagtactaaacaagacaccatttttctaagaggatcacgccttgtgacttgttgctttgtcacctgactttatgatgttacatgtgttggtggaaccatagtactgcacaatgaaaaggcacacgtcctaccgaatggttgccagt

SEQ ID NO: 30263 - DNA, 1142 bp, Zea mays
  Clone ID: UC-ZMFLB73003C06_FLI
gccttgagggttcagtcctctgtctccctcctccttccctgaactgagctgcaagctgcagccgcaggcttggctggttgggtcaactgtgccgcgcccttcctcttgttcctgctcaatctcacctctttgatggcttcatcccactgctgccagtgcagcctcttcttcactggcaggcaggttcctctagtctgtagtctcttctgaccggtggttgttgcagtttttaaccgttcttccctctgacagccaggcataggtggcaaaatccagcgccctgtagattcagctccattccctgctgcctgcagctccctgtcaatctttggaagccggccgcagagctttcagttcttgccgctctcctctgctctctcgctcgctcttccgctcacctctgcattcccccctccctctgtctctagtttccttgctggcaaacggacgaaggaaacgggccaagatgggagctttaagcagcatcggcgtcgggctggccgtggtgtcctcgctactcctgctggcgctcaccgcggagctctactacatcttcgtgcacaagcgccggcagcggcggcgcgccgcggccgtctccgacgcggcctcgtctccgtcctcctcctcccgcgagctgctccagctcttttgcttcaagaagccgccgccggagctcgcgtccacctacgccgtcccggagccggcgtccgccgtggccgtgtcagtcggcgacgacgacgacgacgacggcgagacggtggaggcgcaactgatgcggctcggcagcgtcgtcgggcccacgcggctgctgttcaccatcaaggaggagacccgggaggacctcgagtccgaggacggagggcgaggccggagccggagccggagccgcagcctcggtgagctgctgcattgcgccgagacaccgccgttcttcacgcccagggcctcgccatcgcccgtgccgacggcctcgatggacaactcctacaacccgctcttcgaatccccggcggccagcccggtccctacccatgccccgacggtgtcgccgccgccaaagttccagttcctcagggacgccgaggacaagctctaccgccgcgcgctggcccaggaggaggcgatgagggcgcggaggtcgc

SEQ ID NO: 30264 - DNA, 876 bp, Zea mays
  Clone ID: UC-ZMFLB73003D08_FLI
gtcaagagttaagcatgcttcaagacaaggtcgatggtgatggcacaacagctgatactgcagctagaacccttctttccattttccagcatagttctgaacgcattgctcattgctttggaagcagcaaccagacagcagctcagaacgtgaacgatgagcctcagccttcattggactcgttcgagcaaaccgtgttgaacttagaggagatccaagatgacggtcaatcgatcaatgtggcaccaccctatatcgaaggaccagcatgtcggatcaagctaaagagagggaggggtatgagaaattttcagagggagatcattcctggcctccttctagggaggcaagagatatgcgaggacttggaagttataggctatgcgccaaagaaagctcggtccaggaaaccccgcaagggtccaggcgcatcctcagctcaaccgaggccgtgcaaacgtggagctgtcaagcgctgaccaggagcatctgcattccgtggcagggtgccataaggcaggcgattcagaacaggagagtccattctaaaccatgtgaatattcgtgtgtatcaagcctagcttcaaactctggtttgctggtgaccatttagttggggatattctttcctttcccctcttgttatatctttcctggagtgatcaggttgttagattcaagattttttttttttttttgcctttatatttgaaagtctagcggcgaagacagtcatagtgccacaatgatcagtctcgaaattccaggcttagatcagagtcgacgaagaaggcaagatggttgttcctgatgataacctagcactttctatcttgggttataccttggattaatgcgaaaacagtatacttgctt

SEQ ID NO: 30265 - DNA, 1212 bp, Zea mays
  Clone ID: UC-ZMFLB73003D09_FLI
gcatgctcgtggacatttgggaagctatactattgacagctttggatcgtgtgaaaactgttgtcggcttgtcgctgaaggtgtccgggagatttggttgagtagccagtagcgaagataccggtgcttatggacaggatatcggtacaatcttccaaatttgttaaacacgattgttgcggagcatcctgttgaccgaagcacattgctccgcataggcatgacaaatccacctttcatactagagcatctgaaggagatatctgccgttttgcgtcacccctgggtttattcgttcctccatgttcctctgcaatctggaagtgatgctgttttaacggcgatgagtggtgaatacactgttggcaagttcagaaaggtagttgatgctttgtgtgagcttgtccctggaatgcaaattgctacagatattatctgcggctttcctggttagctaaacaagttcacggcttagcatttcattcttagttatcatttatgagtacatctgaacgacattttattaactgaatgccccaaaagacgttgctgctaatagtttgcactaaactgacatcccattttgaggtgagactgatgaggatttctctgagactgttaacctcgtaaagcaatatcaactccctcaatacacaacgttccgtaaatctacaagttttggttgttgacattcttttcctacatgtacatcgacaacgtggtttttctagggacgccctgctgctaggatgaagaaggtatcgagcaatgaagtgaaaaaagcggagtcgtgaactgacttcagttttcgaatcattgtcaccgtaccaaggaatggtaggcaaagtagagaggatctggatcactgagatcgcgaccggtggtgttcgcttggttgggcataccaagggatacatccaggtgctggtaattgcccctgatagcatgttaggagcgtcagcaaatgtgaaggttacatctgttcggcgacgtctttggtgaagtggtggaagaaggatctgttgcggcaggagaagcaccgaagcgaactagcgcgacttgtagtggtggttcttgagcgagcgtgtcgatggtcgattttggcggtttgttttgtttactcggtctgttctgtatggcgttgcaaaattgtgctactgtacaaatacatggttgcgaacaggttaacgcggagtcttctgatgctgcgtc

SEQ ID NO: 30266 - DNA, 1645 bp, Zea mays
  Clone ID: UC-ZMFLB73003E10_FLI
tgccgcccggtccccggggctggccggtgctgggcaacctgccgcaggtcggcgccaagccgcaccacaccatgtgtgctatggcgcgggagtacggcccgctgttccggctccggttcggcagcgccgaggtggtggtggccgcgtcggcgcgggtggcggcccagttcctgcgcgcccacgacgccaacttcagcaaccgcccgcccaactccggggccgagcacgtggcgtacaactaccaggacctggtgttcgccccgtacggctcccggtggcgcgcgctacggaagctgtgcgcgctccacctcttctccgccaaggccctggacgacctgcgcggcgtcagagagggcgaggtagcgctcatggtgagggagctcgcccggcagggagagcgaggacgggccgccgtggcgctgggccaggtggccaacgtctgcgcgaccaacacgctggcccgggcgaccgtgggccggcgcgtgttcgccgtcgacggaggggagggcgccagggagttcaaggagatggtggtggagctgatgcagctcgccggggtcttcaacgtcggggacttcgtgccggcgctcgcgtggctcgacccgcagggcgtggtcggcaggatgaagcggctgcaccgcaggtacgacgacatgatgaacgggatcatcagggagaggaaggccgccgaggaaggcaaggacctgctcagcgtgctgctggccaggatgcgggagcagcagccgctagcggagggcgacgacactaggttcaacgagactgacatcaaggcacttctcctgaacctcttcacggctgggacggacacgacatccagcacggtggagtgggcgctggccgagctgatccggcatccggacgtgctcaggaaggcccagcaggagctcgacgccgtcgtcggccgcgaccgcctcgtctccgagtcggacctcccgcgcctcacgtacctcacggcggtgatcaaggagacgttccgtctgcacccgtccacgccgctgtcgctgccccgcgtcgccgccgaggagtgcgaggtggacgggttccgcatccccgccggcaccacgctgctggtgaacgtgtgggcgatcgcccgagacccggaggcgtggcccgagcctctcgagttccggcccgcccgcttcctcccgggcggctcgcacgcgggagtcgatgtcaaagggagcgacttcgagctcatcccgttcggcgccggccggagaatctgcgcgggcctcagctggggtctgcggatggtcacgctcatgacggccacgctggtgcacgccctggactgggacctcgccgacggcatgaccgcggacaagctggacatggaggaggcctacgggctcaccctgcagcgcgccgtgccgttaatggtccgcccagcacccagactgctgccgtctgcttacgcagagtagaaatcgatgctcgccggccatccatgccgtccgtatgcatggatgcatggtcaaataaataagcgttgtacgtgggtatcagtgtcacaaactcacaatgtgtatcatgtattgcttcgtcagtggcgtgtgtaagcgtccgatttttttttgtattttattctttttccagaaaaaaatcgccgttgaaatcgcataac

SEQ ID NO: 30267 - DNA, 3335 bp, Zea mays
  Clone ID: UC-ZMFLB73003F06_FLI
atgagttgtctaggactggaggcacttcccactgattattggtgttgttccaactgctcatgtaaattttgccatgaacattctagtgatgatgctgaagacactgctgatgttgattcttcattgcatacttgttcccagtgcgaagagcagtgtactgatccctgtttatacttactctgtagttcttttgaatttcgaaatcttttgacactttttattccattttcattattatcttactatattattttgatgttcaatcatgtctttgagtattttatacgataatgtctgcagatcatggagcctgctctcctgatattgattccatagctactaatctttctagtcagacaggcaatttattctgccaacaaagctgcagactggtaacgcttgtcagattattgttcttttttccttgaccttgtttctggatatgctaccttgtggttttcatgatcataatttaaatggtgacacttgctattttactttcatgtttgaggcagatatcgttcccttttttaacggctcatgttgggtttgggactaaaaggcttttgctgttgttttatgtttaagaccttaatcactaatgagatgtttggtttgaggaataagctagtccatcatcttcgcactcctcacttttttgtttggtttgcgaaatggaatgagttgatccattatcacctcatttgtcatagttagttagttagtactaacacgaggaatggggccatctcaccaaatttgaggaatagattcatgatgcaccaccgcatcttggatgaagtgattcctcaaaccaaacacctcctaaatatctgcaccatcccgctctgttagcttcctttcttgatcatatgcatatatgtttttccttctaatagcaatatcatagcaatgtacatatattcaggttgctggtttttatttacatggatttcattactacaagtgattacatatagtaaggtactatatgagtgtggtattttgtcatggggcggcaacccagggcatggaggcttagattggataagattgagttagttacttgggattagattagataatattgagttagttacttgggatccaagtcttcctatctatataaggatgaactgtacctccttaagaagaaaaaggaatgaagaagaattagtcctagatctctccaatagtctagtccctcccatgctgactctgcccggctaccttcccggcgctgactaggattcataacatatggtatcatgagtcaggtatcctttccatgacttctgctgcggacgatgtacgcacatggcgtgaggagctcgctcgtgccagggcagatctggagcaggcccgatctgctatcctccagctagtgatctactcacggcaaaggtggagtctgactgccgatcagcggcgacaacgcgactgcaggaggctgtgcatgggttcctggcgtgacgtccagtgtggcagcggcttgccgtcttcaggctacgacacgtggcttcctggcgcggcgtcaagcacagcaagcagcggcttgccctcttcaggttgcggcacttggcttcctgacgtggcgtcaagcacgacaagcggcaacacggttgcaggctacggtccgccgttccctggtgcagcgacttgcatcggtattgcgcgttgaacaacacgcggcacgtggggcgacaaggccttcagcagggttggccgatccttagccatgtggacagcaagaacaagtctggttgggtggtgctgtctccactggaactcgcggtagctcaggccgtaagactggtgagctgccacgtcttggcctttgcagcctggaagaggttgttcccatgggatccagggtggcatatgttaggttctttattttatttgttaataaattaaagcggagatgtaaaaggcttatagttagggttgcactttcacatgcatatcaagttagacagcaaggttgtttccatgcaccgagaacgagctgtcttcaaagggtgggggaatgtcatgtggtggcagcccagggcatggaggcccatagggataggctcagggttaggattagtgaataaagattagataagattgacttagatacttgggattagattagataaaataagattgagttagttacttgagagccgagtcttcgtatctatacaaggatgggctgtacctccttaagaagaaaaaggaatgaagaagaattagtcccagatctctccaatagtctggtctctctcaagccgactccgcctgactaccttccggcgctgtttatcacccctatgaactaggattcaaaacatatttgaactattatttagtgacttgagaaccttgtcattttaatccagctattaaaagctctactcttcttttggattgagtcgctatatttttatttctgaaactagacagttggtatttagtcataagaaatgtgtaatgcaaaaacaccatggaagttgtgtatttttgaaaatgctgtattaaacactattttttaccatcaaatcaaacacacatcctgtctagatcctttctatctatttgtggttttatttatcttctagtttattaatgtatgtataccctccctacaagccgcaactgacccaagaacttccaaacttcaaatggtatagttgcataatctgaaattactagttctgtgatgcagctgtttgaggaattgcagaatcttctcgcagtcaagaaggatcttgaaccagaatactcatgcagagttgttcaacgcatccatgaagaggtaccagaagaagtccttgctttggacaaaagagttgagtgtaactccaagattgctgttgcactctcattaatggacgagtgcttccttccgattgttgaccagagaactggcatcaacttgatacgcaatgttgtgtataactgtgggtatgcagctatctttctacaagcttgctgtaatccatacagtttcaagtatcctttgtacaacatgcaagctgttggtactatggccttttaattcattccacactattctctctcccccgccctctgtgtattggcggggccatcgggatgagctgatcagacaatattactgaagttattgctcattgttgtcatctttgtgcaaggcataatggagaagtgcatagctcttcatagattgacctgcgtgtattaaacgggtttcctcataaatttaactgtcttttagtattgtggagatagtaaagattttagccctgttgattttggatattgaatcattatttgttattctaataatatatcaatcttcatcgttt

SEQ ID NO: 30268 - DNA, 1624 bp, Zea mays
  Clone ID: UC-ZMFLB73003F12_FLI
cactacaagtactatggtaaagatgatcatgtagaggctttttgctacaaaaagaagaaggcatataaggctcagacttgtcgttcttcacaacttgctaatggtgccagtactggaggttctcaggaaagttgtactgatttagtcactcaagagatgttgatgctccttcgttgccttgttgccttttcactaggtgttgctagttatgtgactctgtctttgactctgctaggttgtgctgttgcttctcagttttctactgagggaccaccttccacatccactataggttcccatgccaatcttgcacatggacatgcctccatgtcactacattgactatcctgagggccctgtgcatccagttagtccaggctatcactctgtatctactgaaaatctccaacatgaacgatggattggcactagctatttgaggggtaggcatcctatgggaaatctacgacatgctgatacatttgaatacagatgggaagcacctacacctttcaggagatatcgatctgttacaccaccaaatcatgctataagtgcatatgggccagaagcatcttcacctacggaagcatatctatcagctccaatgaaatcacgttcacaccacagccttataaatggttggcatgcatctccagttagttcaacagattctgatgaaagaatatgctcccttatatctgtgtatggacaacaagcacagctacagaaacagacatgtcaatcagctaaattgggtaaaaatccacagttcggaatatctttacatggaagtgaaagtgaagcccatccaacaagggtatctccatcagattctaccgaacaacctccatctccatgcttcagaattcatccaccaactactgtggaaaatcttctacactgtcgtgtatctgcatgtggaccagaagcatcactaccactacatctggctgtaacatcatcaactagtcgatcaacagtagttgcttctcaggttaagaaaaagatgcaagtaccaatattctatgctgaagctgtcattggcccaactggtgaaagaattgaatacattcgtcgtaccagcaggtcgagcattttgataagcaattctgagggcacaatgtatattgagatcactggaagtgctgcaacagatgttctaactgcagagcagctgattaagaactttatggccgaagcagctgccgcctcccctggtcacagttacgacttcattccatcatatttgccagcacccagatctgcccaagctgatatttttgcttcccctgagacaagtgaagtgtccagtttgccagaacggcgcctgcaaatgatttactgaatatccccaacagttttgtttctgcacataccaccaaagatagccaagcaccaataccggcaacacaggaatataccagagagtaaattgagaagatgttttgatatccaccctgagactatgcaagctttacaatttcaaccctttcatctggattacttctagactctttgttttgttgtagccttgattcattccatggattgaaccttagaaactagagcctgagcatatgcttctgtatatggattatggaagcaaagttttggttgattc

SEQ ID NO: 30269 - DNA, 1141 bp, Zea mays
  Clone ID: UC-ZMFLB73003G04_FLI
cgggacatgaaacctgagaacttcctattcaaatcaaaaaaggaggactcgccccttaaggctacagattttggtctttcagacttcataaaaccagggaggcaattccgtgacattgttggaagtgcctactacgtagcaccagaagtactcaaacgcaggtcagggccagaatccgatgtttggagtataggtgttataacctatattttgctgtgtggaagacgaccattctgggacaaaacagaagatgggatatttaaagaggtcttaaaaaagaagccagatttccgccgcaagccttggtcaaacattacttcgagtgcaaaagattttgtacaaaaattactagttaaggatccccgtgcaagactaactgctgcacaggcattatcacatgattgggtgagagaaggaggaaaggcatctgaaatacccttggatatatcagtattacataatatgcgtcagtttgtgaaatacagtcgtttcaagcaatttgctttaagggcattagcatctacattaaactcagaagagatgtctgatcttcgtgatcaattcaatgccattgatgttgacaaaaatggaacgattagtcttgaggaactgaagcaggctcttgcaaaggatgttccatggagattaaagggtccacgtgttttagagatcattgaagcgattgacagtaatacagatgggctagttgattttgaggagtttgttgctgcaacactacacgtgcatcagctggtggaacatgatactgagaagtggaaatcattgtctcaagctgcatttgataaatttgatgttgacagagatggctacatcacacctgatgaacttagaatgcatacaggaatgaagggttctattgatcccctcctggaggaggctgacattgacaaagatggcaagataagcctagatgaatttcgccggctcttgaagactgcaagcatgagcgcacgcaatgtacaaactcctaggggtgttcgcaagtcatagttttctgttttttgtagttcacataactgaactagagagcagcagcacatgtgattggagaaaggcttttccatgtaaattagacaatcaataatacacatgaatggaggtaatccgtagttgttccttg

SEQ ID NO: 30270 - DNA, 2070 bp, Zea mays
  Clone ID: UC-ZMFLB73003G07_FLI
gcctgacttgcgtcttcttgcttcctcctgtgccgtgtttcatttctttgacacaacgacgtccgggcagccgcctcctgtcgccagttcgccactctctggttgctgcacgcctctagtcggcggggccaagaggtggaaaagggcaggatgaagtccggcgagcggccgaagcagatgcggggcgtccggcaggaatctcggcggttccggcttctggtcatcgtcgccggcttcttcctcgtctccctgaccttcgtcgtcatctccaagcccgattccatcctgtccagcctgaacggcaagctgccggtggaccaggcgccgacgtccatcctgatccagcagaaggttaactcgccccccgccaccgcacttgagacctccaccgacgcactgcgtggagaccctagagtggtcgatgacgaagccgatccaagaccacaggggttcaagggcgaggaggaagagagccgggtactgagcgagccggacgcgaccagcgggatgacggagctgacccccgacaaggacggcagcggccgtaaatccaacgaggaggtgctaggcggcggaggtgacggcgaggggaaaagtaaggaggaccgcggccacgggccggagaagcataaagtgacgctcccaaccgtttccaactacactattcatgacaccgaggacacccaaaatgccaagcaagacgatacaagtaatgaccagcaggggagcaagcccctgtgcgacttctcaaatttcagagcaaacgtgtgcgagatgcgtggtgacgttagagttcacccaaatgctgcatcaatcatgttcatggagcctgggcattcgcagagagatgagctgtggaaaatcaagccgtaccctcggaaaggggacgagttctgccttagccatatcacggagctgacggtgaaatcaagcaaagtggcccccgagtgcagcaagtaccatgacgtgcctgctgtgatcttttccctgacaggctacactggaaatctgttccacgacttcactgacgtgatggtccctcttttcacgacagcaagcgagttcaacggagaagtccagttccttataacggacatggcgctctggtggacaatcaagtaccataccgttcttgagaaactgtccaagtaccctgtgatcgatttcagcaaggacggcgaggtgcactgcttcaagcatgtcatcgtcggcctgcatgcctacatggagttcacgatagactcgtccaaggctccgcacaactactcgatggttgactttaacagattcatgcgcggcgcttactcgctgggcagggacagtgtcaccgtgctgggagagtaccctaaggtgaagcctaggctgctcatcatcaagaggcaccgcacaaggatgttcctcaacctggacgagatcattgcaatggctgaggagctcggctttgaggtggtcatcgacgaggccaacgtgagctctgatatctccaagttcgcggcgctggtgaacacggtggacgttatgatgggcgtccatggagctgggctcacaaactgcgtgttcttgccgcagaacgccacgctgatccagattgtgccgtggggagggttggaatgggtgtcccgcaccgacttcggcaaccccgcggagctgatggggctgcactacaagcagtacagcatcggcgtgcacgagagcagcctcacggagcagtacccgagcgaccatgagatcttcaagaaccccatttctttccacaagaaagggtttgacttcatcaggcagaccttcatggacaagcagaacgtgaagctggactgcaagaggttcaggcctattctgttggaggcactggacaacctcaacgcgtaagaccgtaaaagcttgtgcttgtgctcaattggtactgggcatggcaatagagattccttcctgtatacaattccttcttttttttttacaattcgttccttttagtaaaatctattgttcgttctgtccctccctgagaaggttcgcattgtggaaaatttaggagaaattggcttataaaagttgttgtatacacactgt

SEQ ID NO: 30271 - DNA, 2771 bp, Zea mays
  Clone ID: UC-ZMFLB73003G09_FLI
tagttcttccatccagatgactaatcttaggtaaaatatgacacaattagcggtgaaccaaacatgcagcagtgtccttttttatgaggacaatgtaggagcggtcgattccgcccatgtcagctctcccggagtggaaatcgttttgagagacttcactactttgctattatgaaacatgccgcatatgctataatatcatttgattgtttaaaaaaataaaaagaaaaaaaaatatatttatagggacatggagggatgattttgcctctattgttgtttgtgcatgcactttgatcgctgatgttcgtctccctataaaattgactctcaatgtccctatatatatatatatatatatatatatatttcctttttcgatttattaaacgataaaatgatatcataacgtgtatgacatgtttcagacgaatcctctcaaaacgatgacaaagcgatgaatcccaatttttaccatggcgggccacgctgcaaggcgcgagcgcatgccggccggcatggcggcccacgcgaggcccacgtgaggctcaccgcgcgtcgcccacgcgcccgtccttcctcccccgcgacgccgcagcagcacggcccgcactcgcactgcaccaggcaggcaggcagaagcaggcaccaccaaccaatctcctcgtctcccactcggctacccacatcccccggagctccacaaaaatctcccctcccaggctcccacccgcgcggagggggctgcaccgcagcagccgcgcggcgccactgccttgccctcatccaaacgcctcgctttggccggcccccgccgcccggcccgccccccacaaggccactcacccaaaaaatctccactcctcgaccgcaccgagcagaggatcacatggcatccgccgtttcgcttctcctctcgcccccgcgcctgctctaccgcgacggcacatcccgcctcctcagcatcccgcaccggcgggtcctcctcgccgtccccaacaacgcgacccctcgtcggctcctcgcccccgcgccgcgcgcctccaacaacaacgacaacagcggggccgtggaggcgcccgaccgcctcgtggccgcggtcgcctacctatacccgttcctcgacggcgcgcaccacgggcgcttccttctcacgcagttccccttcttcggcgcgctgctccgcccgctggcccccgcggctcggctcttccactcatcgccgctcacaccctttctcctcttcctcacgctctacttcgccgttgtgcggaaccagcaggcgttctcccgcttcgtccgcttcaacgcgatgcaggccgtcgtgctcgacgtgctgctcatctttcccgacctgctcgcgcagtcgttcgcgccctccggtggggttgggttcgagatcttccagagcatggagagcacggtcttcctcttcctgttcgtctccttggtgtacggcgggggcgcctgcctgctcgggaagacaccacgtctgcccattgtcgcagatgcagcggagcgccaggtgatgtgactacaattcgtttccttaggaccatgttgatggaaagggaatctgatgatatgcagaaaacatcccaatggttcgttggcgcttgcagcaaatcacaagcttagtataatttacaattgtcttgctgtttatataggtctagttgccgattgaatgaatgtactgtggaaggttgatacaaaaacgttgcaatactaccatatttgttgaattgacaaattttgagagagcagtacatgtacactgttttacaatctgaattgcatttacaaatgaggaggaatgtctgaattggggagctttatgactaccctcccctgagcagcttcctttgtacctgaatggaggcttaggtcagtaattgtgatttcaatataaataagagcattccatcaattgtcaatttcgtcgacaaagtcctggtctgttgtcggcttgtcgccacagtttgaatttcagtttgagctggagatcttgcttctctcgccccgaagcttcttggtcacatgtataatatcttcacattcatgatcctgtcaggtaaggttaaaaagaagtagtaaagaaatggctgattctgtgaataagccatgacataagtctagcaactttgcaagcattaacgtgctgatatactttaatgtgctgttattaccttcaaattgtcatgtatattattaggttctgttgctcttctgtccatactgatctctacagatatactagcttgagatgggtctactcccgacctttttagagcttgtgtcaatctatttagaagtctgatgtaaataatgttttctcttgttagttgcagatatagcaaaattaccatcataaacaacagtagtttcggaacaaacccttgagagtaagcatcagaaagactttgagtatcctcttggagagtttgtttctcgttcttgctcagtgttttgttgtctgcatcagaggttgacatgctcaaccatggtggatgtttgccagtactgcgatgaacgtgataacgtggctatgttagtacccatggcatggaggagtcctcgtgattcttttctggttgggctgactcgtacttttggaccttctcttgcaagaaccttatgtattcaataacctgcgagcaaaatgttccacatgctaaaatacttgctgtaacgtgctgatcaggattccggtctccccagttgctgagatcatgttacattgaaatattttttagtattatattttcgtc

SEQ ID NO: 30272 - DNA, 1142 bp, Zea mays
  Clone ID: UC-ZMFLB73003H02_FLI
gtcgtccgtaaggaggccgagaactgcgactgcctccagggttttcaggtttgccactcgctcggcggtggcacggggtctggcatgggtaccctgctcatttctaagattagagaggagtacccggatcgaatgatgatgacgttctccgtcttcccatcccccaaggtgtcggacacggtggtcgaaccctataacgccacgctctctgtccaccagctcgtggagaacgccgacgagtgcatggtgctggacaatgaggcactatacgacatctgcttccgcacgctgaagctgactactcccagctttggtgatctgaaccacttgatcagtgccaccatgagtggtgtcacttgctgccttcgcttcccagggcagctgaactctgacctccgcaagcttgctgtgaacctgattcccttcccacgcctgcactttttcatggttggctttgcaccgctgacctcgcgtggctcccagcagtaccgctccctgacggtccctgagctgacccagcagatgtgggactccaagaacatgatgtgtgccgcagacccacgtcatggccgctacctgacggcctctgccatgttccgtggcaagatgagcaccaaggaggtagacgagcaaatgataaatgtgcagaacaagaactcgtcctactttgtggagtggattcctaacaacgtcaaatcgagcgtttgtgacatcccccctcgtggcctctccatgtcttccaccttcgtgggtaactccacctcgattcaggagatgttccggcgtgtaagtgagcagtttacggccatgttcaggaggaaggccttcttgcactggtacacaggcgagggcatggatgagatggagttcactgaggctgagagcaacatgaacgacctcgtctccgagtatcagcagtatcaggatgctacagccgatgaggaggccgactatgaggaagaggaggcggcggcggagtgaggccttctgccatcagttggtgcggggttggctttgtggttttctttgcacttgatgctacctcaacgtatgcaatatctcctgcttgatatatctgctgcttgtgtacgctaccgcgtacgttctgcactcttaataaatatatatgttagttccgtacc

SEQ ID NO: 30273 - DNA, 1339 bp, Zea mays
  Clone ID: UC-ZMFLB73004C06_FLI
tcaatggtgtcctctctgacaaacctggcaagggagtcaagctatgtagctcaagaagcatagaaatccaagtgcctgatactgatgacaagaatccagagcagcgccgtgtacctgtgtcaattgacgtcccagaccccgacttccatgatttcgataaagatcgaacagagaaggcatttgacagtgatcaagtgtgggctacatatgacagcgaagatggcatgcctcgcctatatgtaatggttcagaaagttctttcgatgaggcctttccggatccgcatgagctttctcaactcaaagtcaaatatcgaactggcacctataagctgggttgcctccggtttccagaagacatgtggcgatttcagggttgggagatatcaggtcagcgaaacggtcaacatattttcacacagagtgagctggactaaaggtccccgaggcgtcatcaggattgttccccagaaaggggatacatgggccttgtaccgcaactggtctcctgattggaatgagcttacacccgatgatgtgatatacaagtatgagatagtagaagtcgttgatgatttcaccgaggagcaagggctgaccgtcatcccgttgctgaaggttgccggattcaaagctgtcttccacagacacatggatcccaaggaggtcaggaggataccgaaggaagggctgttccagttctcacatcgagttccttctcgtcttctgaccggtgaagaaggcaacaacgccccgaaaggttgccatgagctggaccccgccgcaactccagtggaccttcttaaggttatcacggagctcaaggaagatgcggtgggcgcagactgctaaataggagaagggggcaactctgaacactgaagataggtagctggatgtctggacgatcagatcccacttggttaatgacacggtgcaagcacatgatggtatctaaagctctactacgtcatcttatttttggctgatgacttggacaatactgccagggcaagcagcctgcgtgacggagttctgacccttttaattcttaggcatttctaacatttgatttcatctctacacgaactgattaaatggccattgggaggagactgcacacggcatcatcggtgaggaggttagtcgacgggaggttgtttacttgtttgtgttgccgctctgtaatgtactgtaggaggcaagtctgagtcgagggacaagagctgcaaggcttggcttgcccgtgtaccccgcatttgtgtaccctgtttttttacttgtgatgttgtatttccttcggttttatagtaattcatcgccatgatgttgaacctgat

SEQ ID NO: 30274 - DNA, 5167 bp, Zea mays
  Clone ID: UC-ZMFLB73004D08_FLI
aacaaacagagaaacacttcgtcgctaacctatcttcctcccgcagccgccactttctgtctactctcctcctcctccatccctagcgctaacaatctggtatcaaaggtcaggcaaactggatcccgtcggcaattgccctcggcgtcctcgcaccgctgctatggagtacaacgaatcgaaccgccaggtgctcgaggaattgcggctcatggaagcaaggctgtctgagaagttcgctggtcgttgcgacagcatagagcggcgcgtggaggagcggtgcgatgaactcaattcccacttcacgacgcgctgcgacaagatccaagatcaagtcgatgttgctgcactccgtggcgaggaacgtcttatcgccttggaggaaatgcgcaccgacatcgagcagtggcgccccgatctaatcaagcggatcgaggacgtggcgttggaggtggtgcgcgccaacaagttcttcgagcgggaacgtcgagcggagcccgtcgacaagcccggcatcttcggcagctacacggcgccgcccctgcgtccacccgcaggcgcacctcccgctgctgggccgtacggccacctcttcgagacattccaccgggagcgtgaatcggggtatgaatttaccccgactcatggcccggtcaagggtacgcgtccaccccatccttctcgcctctctggttttatgcccgagcaatactatccatatgagtcggcacgcgatactgggcgattggggagcgggcgttttccaccgatgagtttccctcgctttgatggatctcgtccacaactatggcgcacacagagtgaaaactattttgagatgtatgacacagagtaccatatgtgggtcaagatagcgtccatgcatttcgagggcaaagctcaccgatgactgcaatcggttgagcgcaaattgcgttacatgtcttgggaggaattttgtgggctcattcatgatcgctttgggaaggagcaacacgagtcgttgattaggcagttgtttcacattaggcaaagtgggtctgtcgcagattatgttgaacagtttgcttcactggtagatgagttagctgcctacgagtctcgcacagatcctttatattatacaatgcgttttatagatgggctcaaacatgaaatcaaaacagttattatggttcaacgacctcccaatctcgatgctgcctgcgctctggctcttgtgcaggaagaggcgctggagtccacgcgtcgctggcgtgtggagcctatatccaaccggatggcttggccacacgcggccacttcaactgaagcaggtcgagctgatggtgtatctatgggacctgagaagcctaatactgacaacagaaggggaagttcatcagctgaaagaatagcatcattgaagagctatcgtcgtgcacgcggtctgtgcgatcgatgtgctgaaaaatggtttccaggtcacaaatgccccactactgtacaactgcaagtcatagaggaagtctgggatttactcaatgaggatgaggtctctgcaacagtggaaacgacgtctgagcaattgctgatggctatatccaatgcagcatggtcagggatcggttccattacgactcttcgtctccaaggttccatacagcagcatgagttgatgattctcatcgattctggatcttctcacactttcattaatgacaagtggctgtcagaattaaaaggggttcggccattacacaatcagctcaatgtcagagtagctaatggacaaatcctcacatgctcccatcatttaccccaggctgtatggcacatgtccggtcaccagtttgtcaatgatctcatttttctgcctttaccatcagtcgatttggtagtgggcatggattggctgcaattgcatagtcctatgagagttgactggtccaacaaatggatgattataccttatcgtggcactttggtttgcttacaaggtgtttgtccatcatttccttcaggtgccatggtggaattgcgtctgttaccagaaccacacgagagcggtaattcggacagcaatgaagacaccgtgattgatcctcgagttaagaaagtgttagcacagttctcggaggtttttgctgaaccagctgggttgccacccagcagacagtgtgatcatgcaattccactggtctcgggggctcatccttttaatgtgcgaccatataggtatccaccagccctcaaagacgaaatagagacacaagtgcagcagatgctggaacaaggcgtgattcagaagagttatagtccttttgcatcacctgtattgctggtcaagaagaaggatcagacatggcgcttttgcgtggattaccgatatctgaatgccataacaatcaaaagcaagtacccagttccggttttcgattagctaatggatgaacttgctcacgcacaatggtttagcaagctggatttaagagccagatatcaccagattcgtttgctaccgggtgaggaacacaaaacaacatttcagacacatattggtcatttcgagtttcgggtgatggcgttcgggctcactggtgcacctaacacatttttggaggccatgaacgacactttagccccagtcttaaggaagtgcgccttggttttctttgacgatattttaatctacagttcgtcttttgaagcacacctgacccatctgactacagttctcgaactcttacacaaagataattggaaagtgaaattatccaagtgtgcctttgcccagtccagcattgcctatttgggccatatcatcagtgctagtggtgtctccacagatccggctaaaatcatggtagtacagtagtggcctaccccttcctctgccaaggagttgcacaacttcttaggtctggcgggtttttacagaaaatttgttcgccatttcggtatgatcagtcggcctttaatggatctgctcaagaagaatactctatttgtttggacaacggagcaccaacaagcatttgaattattgaaaacagcactaagctcagctccggtgttagcactcccagacttctctcttccttttgcatttacactgatgcatgcaaaactggagttggtgctgttcttatgcaacgaggacatcccctggcatttttaagcaaggcattgggaccgaagaatcaaggactgtcgacctatgaaaaggaatacttggctatactcattgctgttaaccagtggaggtcgtacttacagttagcagagttccacatttatacggatcatcaaagcttagtgccattgaatgaacaacgcttgaatacagtctggcaacagaaactgtacactaagttggctgggttacaataccgtattatatacaaaaaaggctgcgataatgtggctgccgatgcattgtctcgatatcccacttcggaacagctgctgcatatttctcagtgtacacctacctggattgatgaggtggtacagggataccagcatgattctcaggcccaagaattattaacacaactgactatatcatccaacaacgacaactctccgtttactctagtccagggtgtcatccgacataaggggcgtgtgtggctaggcaacaatacaacgttacaactcaaaattatagcagctcttcatgattctgctctcggaggtcattctggatttctggtaacctacagaaggattaaacagctattttattggaaagggatgaagaaagatatccatgcctatgtccagacatgcaatatctgccaacaggccaaaccggacaggaccagctatcccgggctgctcgcgcctctacctgttcccccgcatgcatggcattctatatcaatggacttcattgaagggttaccgaagtccggaacaatggattgcattctggtggtggtagatcgattctcaaaatatggtcatttcttggcgctggcccaccctttttctgcagcaaaggtagcaaaacttttcttggataatatctataagcttcatggtatgccggacaatatagtatctgatcgggatagagtgttcacaagtctgttctggcagcaattattcactctcagtggcacccaattatgcatgagttcggcttatcacccacaatccgatggccagacggagcgcgtaaaccagtgcattgaaacttatttgcgatgctttgtgcacgcctgtcccagcaaatggtaccaatggttagctgttgcagagttctggtataataccaactttcattcagctctgaattgttctccatttgaggtgttatatggacagccccctcggcacttcggcttgcaaccagggagtgcagtgactgtttcagatctgtctacttggcttcacgatcgtgaggtggtatccaagttggttcagcaacatctgttacgtgcccaggaccgcatgaaacgtcaggcggataaacgacgttctgaacggatttttagcgtcggcgatcaggtgtacctgaagttacaaccgtacgtacaatcatcagtcacaactcgggccaatcaaaagcttgcttttcggttcttcggcccctacaaaattttacagcgcatcggcccagttgcttacaagcttcagttgcccgcttcctctcagattcaccccatttttcatgtatctcaactcaagtcggctgtcaaccgtccacaacacatcgttccattactacctgagactaatgattcacttcaggtgcccatacaggttcttcaacgtcgattaatccggcgtggtggttctatggtgactcaagtcaaagttgcatggtctggaatggacaccgcaatggctacgtgggaagatgttgatgcactgaaggcgcgttttccttatgcaccggcttgggggcaagccgcgtttcaagaccgggggaatgtcagctctgctgtaccggaagacacaagaaccatggccaagaaggatctgacggcgaagacagaaggaggcgatgtctcagctcggcctcgacgtatcaagcgcggcagcgtccgagtaactgggccggaatgggccaattgatggctggctgggccggtctgtaatatgggatatagacatatgctggaaccgtgaacagacatcgaaaatctgagaacaaacagagaaacatttcgtcgct

SEQ ID NO: 30275 - DNA, 1093 bp, Zea mays
  Clone ID: UC-ZMFLB73004E04_FLI
gctcttcaaaagaaatcgactagctacatcttttagttaactacaaactagatggtggcgaaagggcctctagcctagctgttaaggctttcgagtccaagtcctgggttcgattactatcgaagacgaattttttcgggcttggttaaaaaaatcccctggctgtgcctcatccgctctccggatgggccgttgcagcgtggacggttgacaccggctcgttagtgatgggaggccagagtttggggattttctgggggaccattgttttggtctattcttaatataataccgggaggacggtcatttcctccctggctgagttttacaaactagatgttgacatgcatattcatgtgaagagtttagttttatgcagccgtatctcatcataatctgtagcttgaactgaaatgtagattgtccaagatatcccaaatcccttgccggaaaatttaccaatggttcttataaagccacctgaagcatgctcaactgctgaagtttacaagcgattcaggttggaacaaacaagtcaagctgatcccatgaccctgctcgaggaaataactcagaatgggatatcacaagatgtttgtgttaatgacctagagcctccagcttttgaggtgttgccctcacttaagaggttgaagaaacgaattattgcagctggccgggatgattatagtgctgtttttatgtcaggaagtggaagcacaattgttggtattggttcaccggatcctcctgcattcgtgtatgacgatgaagactacaaggatgtttttgtgtcagaggcttgcttgctcactcgcgacgagaacgagtggtacagggaaccaatctcggccaatgccacgtctggcaaagaaggtttgcaagcctcggttgctgactgatttaagtcaggttctgtatcagttttgtgactattatacagatacaggatttgatcaacgcctcgacatggtaggaaagaacactacggtataggcggggattgttcacaagacaatctggttctggaatggaccattttcagtatagcaactattgatttgagcaacagtcagactaatggttccaggag

SEQ ID NO: 30276 - DNA, 918 bp, Zea mays
  Clone ID: UC-ZMFLB73004E09_FLI
ttcataggctgccttcctgcctgctgatctcgcacctcaaacccacacacagcagcataggttgagatagatggccagtctgtggaagaccaaggttctgcctggcctcaacaagatcttcgacaaggatggcaagaaggctgcagctgcaggcttcttcaagtccttcaacaaggaggagattggcaaggagattgaggagaagaaggcagaactggagcccaaggttgcggaggcttatgaagcatctcctcctgaggtcaaggctctgttcaaggataagaagccagtcaagatcagcaagaagaactcgactgcagttaccaagttcctcgatgagctggctaagattgacttccctggagccaaggtggtgagcgaggcggtggccaagtccggcgcctcgcccctgtctccggcgatcaccttcatcttggacaaggtcgcaccgtacatccccaaggaggagcccaaggcggaggacgcggtggctgaggccacttcccgggaagtcgccgtggaggtggaggatgccgagccggctatagctgatgcagcggccgagacaccatcggaggcgaagaagggagaggaggaaaagccggctgccgaggaggcggcgccaccggcagcggctgctactgaggagaagtaatactccgatccacagccatgcctctccctacgtagctgcagcagagtgaaaagtgattcagtcagtcagacatacacacttgcattggcacgcattattcatggacatgtacgttgctgccccgtgtgtgcgtgtgcgtgtgcgtgtgtgtgggggttctttgttttttattttggggcgattgttacaaatgtgtaattatttatatcgatatgtttgtttcattgatggaccgcatttaataagacaattctttcttgtgt

SEQ ID NO: 30277 - DNA, 891 bp, Zea mays
  Clone ID: UC-ZMFLB73004G06_FLI
gggaaagactgttgcgagatgaacgacaaggagatgatgtgccaggagcagtgcgacgagctgtccgagaccgagatcagcagccaggaggcgtccaactcctccggcccggtcagcctcgacctctcgctctccgttaccgacaacagcaacggtaacaacagcaacagcggcggcgcgcaggccgacgccgcccgcgagccgtcccgcgtgttcacgtgcaactactgccagcgcaagttcttcagctcgcaggcgctgggcgggcaccagaacgcgcaccggcgggagcgcacgctggcccggcgcgcgctgcggctcgacgcagcgggcccctactacggctacggctacggctactacgccgacgtggcgtcgctgccgctgtacggctcctgcctgtaccccatcggcatccaggcgcacgcgtcggcggcagcgctcccggagcacgaggacgcgcgcgccggcgccgacgagctgaggaggcccgcgcgggggctgctgagccccatgccgttcctcgtggccgacgacgaggagatgctcttcggctggcccggtagcttcaggccagacgccgctgcgccggcggactcggccggcggcgtcgccgtgcacgcccgggaggagcccgatctgacgctcaggctgtgaactgcgaactgatccgtcgactagactggttaatccgtcaggctgtttcttttctttttttaaactgatcggtccatgtctggcgctggtcagatcgcggcggtctcttgcttgaccggattattcttattgtttcgtgggtgcgtgcaagaatttttgtacagcagttggatgtgcaagagctcgagatctctctttgttcgatgatcttgctatgctattgcacatgttcgt

SEQ ID NO: 30278 - DNA, 1470 bp, Zea mays
  Clone ID: UC-ZMFLB73005C05_FLI
tcttaccccaccatcagagaatgtctcgcagagaatatgcgtactttccataaagaaccaagaaatagtacaggcatcaggcaacagatcttggacattcttacgttcgagacattatggttttgtgttattgaacaacttggatcaactaataatggtgtcaaatctgttctcatcgacatcatccaacaaataccatatgttctttccagtctgaaatctgcacatgttatttgcaggttcgtattgatgccgctggcagtatttgtcttcctagcctataaatactggaaaacacagataacaatagatgcagttgagaagttcctgcgaatgcagaatatgctcgttccgatgagatatgcatacacaaacatcattgctatcaccggccatttcagagacaagctcggacaaggaggctacggtactgtatacaagggagtgctactgccaggtgaaattcatgttgctgtcaagatgctaggcaactccaactgtaacggagaagagttcatcagtgaggtcgccaccattggcaagatccaccatgtcaatgttgtgcgcctcattgggttttgctccgaggaaaatattagggcacttatctatgagttcatgccccgtggatctctcgataagtacatcttctcgtcggagaagacattctcatgggacaaactcaacgagatcgctctgggcattgctagaggtcttaactacttgcatcacgggtgtgatatgcagattgtacactttgacatcaagccacacaacatccttcttgatagcaactttgttccaaaagttgctgattttgggctagccaaactgttcccaagagatgacagtttcgtgccactgagcgctatgcggggaacgataggttatatagctccagagatggtatctcgaagctttggtatcatctctagcaaatccgatgtgtacagctttgggatgctactattggagatgacgggcgggcgaagaaacgcagatcctcatgcaggaagctccagtcaagcatactacccatccttggtgtacaggcagctgagccaaggtgatgcgaacaggatcagtgaaggtgttgatatgcacgagttagagaagaagctatgtatcattgggctttggtgcatccagatgaagccgcaagatcggccgacgatgagcgaagtcatagagatgcttgaagctggtgtcgatggcatccaaatgcctccaaggccatacttttgtgatgaagagggtgacagttcttactctacaatctctgaactcgatacaatagaagagtagtagtggtagtaaaatgcacttgtgtctatgtgctcttaatgtatcagactattaagattgcaaggttgccataagctaaggtactggttgtatacttttattgagagtgtgataatgtgatatcatataaaatacctccatgaagttttttacaaagaactcctc

SEQ ID NO: 30279 - DNA, 1427 bp, Zea mays
  Clone ID: UC-ZMFLB73005C07_FLI
acagccccgtgctagctcacccgccggggctcgccacgatgagaggcctcctcgcgtgcgccaccctcgcccgccgcgccgccgcctcctccgcgcccgcgcgcgtccgccacctggcgggcgccgcggaggcggcggaggccgagctcaagaggacggcgctctacgacttccacgtcgcccacggcggcaagatggtgccgttcgccggctggagcatgcccatccagtacagggactccatcatggactccaccgtcaactgccgcgccaacggcagcctcttcgacgtcgcccacatgtgcggcctcagcctcaagggccgcggggccatccccttcctcgagtccctcgtcgtcgccgacgtcgccgcgctcagggacggcaccggcaccctcaccgtcttcaccaacgagcagggcggcgccatcgacgactccgtcatcgccaaggtcaccgaccaccacatctacctcgtcgtcaacgccggatgcagggacaaggacctcgcccacatcgaggcgcacatggaggccttcaacaagaagggcggggacgtcaagtggcacatccacgacgaccgatcgctgctcgcattgcagggtcctcttgctgcacctactctgcagttgctgacgaaagaagatttgagcaaaatgtacttcagtgacttcaagatgattgacatcaatggatatgcatgctttctgacgagaactggctacaccggcgaagatggttttgagatctctgttccgtcagagaatgcagtggatcttgcagaggccatcctagagagatcggaaggcaaggtgcggctgaccggcttgggcgcccgtgacagtctccgactggaggcaggcctgtgcctgtacggcaacgacatggagcagcacatcacgccggtggaagccggcctctcatgggcgatcggcaagaggaggagggcagagggcggtttcctgggcgcagacgtgatcctgaagcagctccaggaagggccaaagatcaggcgcgtgggcatggtcacgcaggggccgcccgcgcggagccacagcgagctggtgagcggctcgggggagaggatcggcgaggtgaccagcggagggttcagcccgtgcctgaagaagaacatcgctatgggctacgtgaagtcgggaatgcacaaggctgggacggagttgaaggtggtcgttcgcgggaagtcctacgacgccgtggtcaccaagatgccgttcgtgcccaccaagtactacaagccctcgtagattatattcttgtacagagggacgccttgcgtttctcttttgtcgttgcggcttgttcttggcagattggttaagcattgcaactgtaacttctgtgagattgtcttacggttcacatttcatgtatgcctgcctaataagccttcttttcccaaatac

SEQ ID NO: 30280 - DNA, 1184 bp, Zea mays
  Clone ID: UC-ZMFLB73005C09_FLI
ggtctagctaaaagtgttctggattcaagcaagcctcaaacagattcattggatggacaagtgacaaatgacctgaagaaagctggcagccttagattttacaaaccaaaattcaaatatattttttgtgatatggatggtacgctgctcaacagtaaaagtcaagtttcagcaaggaatgcagaagctctaagggaagctaggtcaagaggagtaaacatagttattgccactggaaaggcacgtcctgctgtaatcgacgctcttagtatggtggacttatctggaaggactggggctgttggtttatggtttggaagggagacggatttataaaagaaatttggaccaagaagtatgtagagaggcactctcatattctatagagaacaagataccatttgtagcatttagtcaggatcattgttattcgatgtttgaccaccctttggtcgattctctccattacatataccatgaacctaaggctaaaatagtgccatctattggtcagcttttagaaacagctgagatacagaaagtattgttccttgaaactcctgagaggatttcgtctgcactgagaccgtactgggcaaaggcgatagagggaagggcccatgttgttcaggcacagcctgatatgcttgaacttgtaccacctgcaacttcgaaaggcaatggtgtgaaggttctgttgaaccacctttccattagtccagatgaggtaatggcaattggtgacggagaaaatgacattgaaatgttgcaactagcttcgtttggggttgctcttgcaaatggatctgacaagacaaaagcagcggcaaatgtaattggcgccacgaatgatgaagatggagttgcacaggctatttatgaatatgccttctaagagcaacgaatcattttggactgggttaatttcttctgatttcccatttttcgtggactcaacacagaacaattgtagtggttccaacttgcaagtacacaccgctccaccggagcgcaatctcgctctggtgttacagtttctgaactgtttgcaactgtaagacattttttagttggcatgaaccgaaatccagctaccagctcgacatactcttggctggatatgtaaccgctaaccgaattactatttttttctcatttttttatgcaaaagctttccttttttt

SEQ ID NO: 30281 - DNA, 907 bp, Zea mays
  Clone ID: UC-ZMFLB73005D04_FLI
ggaaagggctacggaaagcgttcgtttttagctcatgctgaattttaccgtacctgtaagctgaaggcggaagccgcacacccgtcaaatgcatgccctgctctagaacgtacattggtggtgcacatctggacaccttgacgggccagcttgctcagcgtcgtgacatagtggaaatgtctgattctggtgaattgtgcaaaggacttgctgatgatgtcgaagttcctatgctttcaaaactacgccggcaactggttggtaaaggttctcaccgccgtttagtctattctgtggattttggtgcccatgaaggtgctatggttaatttccttgatcactacgatgcccatctggtgatatttgaaaaacttcctgatggagtgtttgccgacccatttgagctacagcattttgttgagcgcaaagttttcgttgatgttgctgtttttggagacgccaaccttgaactgcccacagctctatccaatgggtcatctgttgagatccattttgatctcaggcgaatcatttcaatcaactgtaaccttgtaatagagatgcctctccatgctagatacccgcctcttgatgccagtggctatgccacagtggagtttggtagcgcagatctattcctccgctacagaaaaaaggacatccattctggttcctgtctttgggtgatcaataatctcaaagctgcacccctggagaaagctgcatggcgcataccctgtggagacgaggcccacataggatttgtatctagcatcacgtttctttcagctcttgtttgctccatgtccattgtcttggcttctctcattttttgacgtcttagggtcctatcagaccttttttttgtttacataaatactgaagtgcgagacaggagaattctctt

SEQ ID NO: 30282 - DNA, 1655 bp, Zea mays
  Clone ID: UC-ZMFLB73005E10_FLI
ccgacgccgaattgcgccggttcagggtggagtacgagcgctgtcttttcgagaacacgtacggagtggaggccacggacgaagggcggaaggaggtgttcggcgccgacttcgccgcgtgggcgcggcctgccgaggccgacgacactgtttgggccgacgcggaggaaagcctcacccctcccgccgcagcaccagggaaggacctgcttaaggagttcgaggaggaggccggcgacggcgacagcatccagagcctcgcgcttggggcgcttgacaacagcttcttagtcggcggcgccgggatacaggtggtcaagaacttccgccacggcttgcacgggaagggcgcgtcggtgaagatctcgggaggccgtggcggcagtgggagcgcttattcgacgccgaagaaggcactgctgatgcgcggcgagactaacatgctactgatgagcccaggagaggctctgcattccaatggtgttcaccatgttgacgttgagactgggaaggttgtcgcagaatggcggtttgagaaggatggagctgatatcacaatgcgagacattgccaatgacagcaagggagcgcagttggaaccctccgggtcgacattcttgggcctggatgacaacaggttgtgtagatgggatatgcgcgacgccagaggccgggtgcagacaatcggtagctcatcagactcaccagtgctgaactggtcacagggtcatcagttctcgcggggcaccaatttccagtgctttgcaagtactggggatggttcaatcgttgttggttctgtggatggcaagatcagactctattctaagagctcgatgcgtatggcgaagacagcattcccaggccttgggtccccgattacacatgtagatgttacttatgatgggaaatggattctgggaacaactgacacatacttgatcttgatatgcactatcttcaaggacaaagatgggaaagaaaagactgggtttagtggccgaatggggaataggattgctgcaccaaggcttctgaagctcactccacttgattcagttttagccgggaccgacaacaaattccacggcgggcaattctcatgggtaacggagaacggaaagcaggaaaagcaccttgtcgctacagtcggcaaattcagcgtcatttggaattttcagcaagtcaaggacagcaaccatgagtgctaccgtgatcagcagggcctcaagagctgctactgctacaaagttgtcctcaaggatgaatcaatcgtcgacagccgcttcatgcacgagaagtttgcgacgagtgactctcctgaagctccgctcgttgtcgctacgccaatgaaagtcagctccttcagtatagcaaatcgacgctgactccgaagctcttttccccagttgtgcagaaataatctgagaagttgcaggtttttgttcagtttgttcctttttcctcttttagacggtttggttagttctgttggtacagaactgatcgaggttcctcccgagaagaactggtttttgtgtcgtgtgcatgtctggtcatttgtagcgggctagcggctcggtaaaatggtgtgtatgtctgttggataaaatgtaccatgtgacaaaaaaaaagtaattttgatttgagactct

SEQ ID NO: 30283 - DNA, 1889 bp, Zea mays
  Clone ID: UC-ZMFLB73005F09_FLI
gctgtctgcaccagtttatgcaacagaacccgtgtttaggcttggccttttgaccatgtatgaccatttcctgtctcgatggcaagtttcagactttgacttgtttactctagatgatgttgatgctgcattccaaaatgttgtgagactgaagtactcacaaaattaccttctgaatggtgaaggagttgttattgctccacatgtggctgggcatcttttgggggggacagtttggaagattacaaaagatggggaggatgttgtgtatgctgttgacttcaaccatcggaaagagaggcatttgaatggcaccgttcttggatctttcgtgcggccagctgttctgataactgatgcttacaatgctttgaacaaccaaggctatagaaaaaagcaggatcaagatttcattgaatcattaattaaagttctggcaactggtggaagtgtgctacttcctgttgacacggctggtagagtgttggaacttcttttgttattggatatgtactgggatgaaaggcgattgcagtaccctatctacttcctgacaaatgtgtcgacaagtaccgttgattatgtcaagagttttcttgaatggatgggtgatcaaattgcaaaatcttttgaaagcagtagagccaatgccttcttgttaaaaaaggtcacgctgataattaacaaagaagagcttgagaaattgggagatgctccaaaggtggttctggcatccatggcaagtttggaggttggcttttctcatgacatatttgtggagatggcaaatgaagcaagaaatctagtgctctttactgagaagggacagtttgggacactggctcgaatgctccaagtggacccaccccctaaagctttaaaggtcactatgagcaagaggattcctttggtgggtaatgaactaaaggcttatgaagaagagcaagaacggataaaaaaagagaaatcgctaaaggctagccttgtcaaagaagaggagctaaaggcttctcatggatcaaacacaaaggcttctgagccaatggtcattgatgcaagctcatctcgaaaatctgtgaatgcttcacattttggtgggaacaatgatattctcatagatggatttgtccctcctttaaccagtgttgctccaatgtttcccttctttgaaaacactgctgaatgggacgactttggtgaggtcatcaaccctgatgattatatgatgaaacaagaagaaatggataatactctgatgcttggccctggagatggattagatggtaggatcgatgatggctcagcacgcctgcttcttgattcaacgccctcaaaagaagatgagaagcttattttgcttcccccatcgtcaacaccaccaccccataagcctgttcttgtgggtgatctaaagttgtctgattttaaacaatttttggaaaacaaaggctggcaggttgaatttgccggaggtgctttacggtgtggcgaatacatcatggtgcgcaaagttggtgattctatcctaaagggcagcacagggtcccagcagatcgtcatcgagggccccctctgcgaggactattacaagatcagggagcttctgtactcgcagttctacttgctgtgaggcaacgtacggcaaagcttaggctttatttacattggttataaattattagattagatgttgactgtaagactatcctggtgttttctgtttttacattgtttgtttcccctttcacaagcttaggcttgtgttgtccgaaatttggcgtgggatgaccgtgacaaagttttggcatcagtttccggatgaccgtggttagtatgctgaagcttgtttcgtccttcatcattatgggcatgtgttctatattgatcgt

SEQ ID NO: 30284 - DNA, 161 bp, Zea mays
  Clone ID: UC-ZMFLB73005F12_FLI
gtgcacggcaatgctattgtaacctggatttgaatgtatccatctgagctaggttatgtttcaggagctttcttaaactaacgttgttgctgagcagcatgaaatctgattagcgcaaatatgtttcctagattttttgagtaatgcctctgaagactctt

SEQ ID NO: 30285 - DNA, 167 bp, Zea mays
  Clone ID: UC-ZMFLB73005G07_FLI
gcgaagtggatactctagccggcgagctttgctcccggctgtaatatataggaatgtgtagtctcttgaccttagtgtattttctctgggttatagggttcttgtaaagttaccacatgtacttttgcccttttagaccctatggaatagtaaacttactattttct

SEQ ID NO: 30286 - DNA, 1643 bp, Zea mays
  Clone ID: UC-ZMFLB73005G09_FLI
ctggaatcctgcgacgaggggaccgaaatggcctcgtcctcctctgactccggccgcatcgccggaaccctagccttgcgtacgagctcggccttagcggcggcgtcgctaatcccggggctcccggacgacgttgcagctgtcattctctgcctgctcaccttccccgaccagtcccgcctccgcgccacctcgcgcgcttggtgcttgctcctctctgcggctacgctcctcccgctccgccgtagcctccgtctcccgcgccgccaccttctctgcctcttccccaccgacccatccctcgcctccccgatcctgctcgaccccgccgcacctaccacctggtggcccctcccgccgctcccctgttcgccgcagctttacggcctcgccaactttaccgccctcgccgttggccgccacctctacgtcctcggcgggtcttgcttcgacgcccgcagctaccctttggggcaaccctccgcctcggcggcggtctaccggcttgaccttgccaactctcgacattgctgggaacgccttcccgacatgcagctcccgcggggaagcttcgcgtgtgcccacgcgcccagtgctggcgggctcctcgtcgccggtggcgggtcccgacaccccatgttcccctccaacggcagccgcaccggcagcaccgagtggtatgatgccaccacgcactcgtggcaccttggtgcctcgatgcctcgtgatcgggctgggtgtgttgggttcctggcacgcggagcaggggatggtggtgaggatgagttctgggtgatgggcggctatgatggatacaccacgttgggaggagtggtgccaaatgacgtgtactgtcgggacgcggtggcgttgggactatggagtggtaagtggagggtgattggagacatgtgggaggaaggggagaggaggcgtcttggtcccattgcagctttatctgcagatgatggaagaattaccgaggtgttcatgctagacggcaatgatgtcttcaggtatgacttcgcttcaaataggtggctgaaagaggcaaccacgagaagaaagatcccaaacactgaatcttgcggcttcgtaccaatgaacggggaactgtacgtgctcagatctgcaaaagttcgtgttgaatcctctggtccgtggaggcagctgaagaagaagctggctatggagtttcaggtgtacaaccctggggcaaagaaatggagagtgctcaccacgtatccacctgttgatgcacccattgatttcaggactgcagctctgtgtacagttgagttgtagatccattagtagtcaccattaactgtacatattcaggtggcaagcgcaacaatcgattgcaaatatagacatgaaaatgcctaatgcttcaagtgctcccagcagatagtttgttctagcgtgtttatatacagtagagataacattctggagtatatcgcaagaattggtgttttttggtgctgaatgtgattgctgctaacaagatatgaattgtaccagcctgttattattgcgtcagaatcactgtttagctacacagccgtttcgcctatttacatgccgtgtaactggtgtacattggattgtgtctgtttaatcaactgtttatgctgctt

SEQ ID NO: 30287 - DNA, 666 bp, Zea mays
  Clone ID: UC-ZMFLB73005G10_FLI
ttgccggcctctccaagaacccgaacacggacacccagtggaggtacttggtcctcggccaagcttgcttccacctcgggctcatcgaggacgctatggtgctgctccagaccgggcgccgcctcgcttcggcggctttccgccgcgagagcgtgtgctggtcggacgacagcttctcgtcgtcgtccgccaccgctgccgcggctccctccgtcccgtccggcaaaacatccaagtcgagttcggcgtttttcataatcccggcgacggagtcggaggccgtgtcccagctcctggcgcacgtgaagctcctgctccggcgccgcgcggctgccatggcggcgctggacgccggcctgcctgccgaggccgtgcgccatttcaccaagatcctggaggcgcgccgcggcgtgctgccgcacccgttcgccgccgcctgcctcgtgggccgcgccgccgcgttccaggccggtggccgtccggccgacgccatcgcggactgcaaccgctcgctggctctggaccctgcctacatcccggcgctccgtgcccgcgccgacctcctccagtccgtgggcgcggtcgccgactgcctccgtgacctcgaccacctgaagctcctgtacgacgccgcgctgcgggacggcaagctcccggggccccggt

SEQ ID NO: 30288 - DNA, 326 bp, Zea mays
  Clone ID: UC-ZMFLB73005H06_FLI
gggcagcggcccggccatcatcctcggcagcttccagcagcagaactacctggtggagtacgacctggagaaggagaggctggggttccgccggcagtcatgcacgtcgtcgccgtcgtgaggtctcacgacgtcggcatggcggggatcggagtggaggccagtaattactccagagtccagtccacgtaacgctccaaattccaattccaaaagctggctgcttgatcttttgttagtgctcgtgtactgctaataaaaactaaatttactgtcatctactactactattaagttattgaaagacgtggcttgctttgggtttc

SEQ ID NO: 30289 - DNA, 1928 bp, Zea mays
  Clone ID: UC-ZMFLB73006A07_FLI
gatcaattggcaactttgctggtcgaattaagtccaaaatcttctactgggtcaatactgtagatgagcggtttggtgatatggttttgctgatcaaggaatgggcaaaagcacaaaacattaacgatccaaagagcgggaccctcaactcttattcgctttgcctacttgtcctctatcattttcaggtgttgtttcttatacctaagtatctctctatgtgttcctacttatttatggtttcactaatgctacgtttggacgtcgatattggagaggatggaattgaattgggttgaataccaaatcatacatggtattgaaatgagatgtaattccaattctattgtttggatgtcactgaattggagtttggaattgtgcggtctaattccacgcaataccgtggggcgaggctttgtattgggagagggggtttctagtcatagtccaattccagggaattgggcctctaattccaaatctcaattccacgtgcaaccaaacaacataatttaggaaagctgtttcgaattctcaattatgtgcttctatttctacatccaaacgaggtataaatgacttgcttattaacttgtatttttagacatctgagccaccaattctaccacctctgaatgagatttatgaagggaatattgcaggagatgttacagaagcagcactttttgatgagcaacatcttgatgaggtttgtgctgcaaatatagaaagatttagactccagaacaagggccgaagaaatgaaacttcaacttgtcgtctacttgggactttttttcagaagtttgctcatatcaatgccttaacagataatgtcatatctacttactcgggccagattgagcgaatccagaacaacccaagttggatgaggaaatcttaccatttatttgttgaagatcctgtagagagacctgataatgccgctagagcagttagtatgaaaggccttgacctcattgctattgcattcaatgatgcttgtcacaagtttaagtctctggaacatatcgatcggaatgaattattggcactgttgtgtacccctgttgttcgcttgaaacttggtgtgagagtcagagagaactcttacccaaaatctccaaggaataatgtgcatagcaggattagaggacagatgtggcgtgatcgaggccaagcacccagcgcgagagggtttactggaaccagatcagtccatgaaaatccactagcgaacactacagcacatgaaacagcagtgcaataccacaaccatgtgcagccgacaacagttcggcaaacagccatccgcaatcaagtaacaaatactgcagtgcatcagaccgcgccttaccagaaccatactgctcgacaggtgtatcctacttggtcccagacagctgaaccctaccagaatcataatcagcaggtatacgctactgggtttcaaacagggccataccaaagccataatcaagtccatgcttatagagcagggttgccacctggaggaatatatgagatccacaatcaacaggtgtataatgcagggttccaaaccgacggtccgcaccagaatcagcagcggcgaaagggatacccatcaaaccatcagaataacaggctttctgcgacggcagcgaggtacgagcccgttcgtggacagtttaacaacggatcgacatgggactcaaggtcccaagcaccgggcagtgcagctctgcgaaggtagccgtcagcatctcaggaggatagtagtaacaggcaaatcggctggattttgactgctgggcagctcttccttgtgtaaaaaattctagcacttctttactggtggacaactcttccttatgtaaaaattgctgttagcagtcggttcgtagtatgtgtcaattaattttttttaaggtgtgattgggttt

SEQ ID NO: 30290 - DNA, 1461 bp, Zea mays
  Clone ID: UC-ZMFLB73006B03_FLI
ccacagtatgctatgagtgtgtccttctaggataacctgtaagacaaatataatataatgatatataggtccttgttcctgtcaatatttttaaaagttgtttactgtggtatgaaataaatccatgagaggtttgagctgtgtatgttgtctgggttttatagttactcttgcactagttttctgtccatgatatttttcatcatattttctcgatgagatcaatcaagagcagaaaaatgaacagatatctgagtgctacattagttcatggtctttttcagttgtgtcagttgttttatgttggaaaactgactcctatttagaattctatattagtatgtaccttttgttatgccacatgaacctatggcaacagcctaattccatagcccacattaccttcaaggcaaaacctttccacaataatagtcccttgaaaacttttgccacgacaatacttcactgctacttggcccccctttggaatgcaggaattgtataggattcagttgtcacatgaaaaacataggaaagaggaagacatctcgcatttcaatggggggctataagttcaatttttattatatatatccgattaattgaatatttagttcattacaggtccaagaaagtgcttgaacttggatctggttatggattggctggacttgttattgcagccagtacaaatgctgacgaggttgttatttctgatggcaacccacaagtagctgagtgtatccttcttaatataatgtatgcacaatggagaatggagtttttgccaatattgtgaacagatcaatcattccaaaacttagcccgttttgttttgttttgttttgtacttttcttatttcaaaaaaacatttgttggcctttgtaaaccattaacccgcagacattcagaagaacatatccatcaatgcagagacttttggtgagaccaaggttaaatctttgatactgcattgggacaaagagcaagcttcagaaatgttgaatacttttgacatcattgttgcaagtgactgcacatttttcaagcaattccataagggccttgcccgaacagtcaaatccttgctgaagcattcggcaacctcacaggccatcttcctgagccccaaaagaggtgattctctagacaaattcctgggaattattaaagagaatggtctcagttgtgagttgatagagaattatgatcctactgtctggaatctgcacaaaaaattggtggctggtgaggatagaacctggcctaattatgacaaggagcattgctaccctcttctggttagaattggctattttagtgagttctaattttcttacatttttttatcttggatgatctattttgacatgaaggaggcagcaaaatgagatttagaagtatggaatctacttaattgtctagacctgaatatatgagtgaatggaaaacagttattc

SEQ ID NO: 30291 - DNA, 632 bp, Zea mays
  Clone ID: UC-ZMFLB73006C06_FLI
gaccaggccttcagagtttagtattttactattattcgtcaccaccctgctacatgattacttgtatataaatagagggcacacgacaccatcctgtaggttgtagtcttgtgatcttgtccttggaggtacacacaaagactggtagacacagacgacctctgccgatggctggtgccccaaaagctcgacttgtatataattgcaagttatagattatattgcatacaggtgacatattagtttatatgtatttttcagtgtttttatatctaattttagaggagcagactgttcaaccaatgatggcaggtggtcgtgtacttgatccattttgtactcgccttgaccctaccatggtagaagcactggtctgcaccaaagattggatagctggagcaagaaaaggttatatagtagtaccttatatttatttacaatttaattagtcattagttgtgatcaatttgtaatattgtgaacttgtgatctttgtgatcaacctgttatattgtgaacttgtgatctttgtgttcaacttgttatactgtgaattgtgaatttgtggtctttgtgatatttgtaaactttgttgtattgtgaacttgttatattgagatattttcatattt

SEQ ID NO: 30292 - DNA, 2575 bp, Zea mays
  Clone ID: UC-ZMFLB73006C10_FLI
aaaaaaaagccaaaatggcggggggaggtcgtcgtctcccctccctgcgatcccctccatccgcgacgccatctcggccacttcatgatcactagggtttcgctcttctacccataagccctcgtcccgatgcgctggtggaagcgctcctcctccccctcctgccccgcctcctcatcctcagcatcgacccccgcttcccccgcccgcgcctccaccccccgtctcatcggcggttggggtagcggccctagctcacgccgcgatggcagcggggccagcaacgatccgcagccgcggctgatcagagcgcggcggatgcgctacgtcgtcgatgacctcgaggtcggggtctccgcgctcggcgtggactctccggcgaggagggacgcggcggcggggtttgcgcttgagacagtgagctccgcgccgatctcgtggtctccgagcaacatggaggtggcgccggcgagatcctcgtcgacccccgtgctgctgccgcatccgctgccccttccaggcgagggggaatcgccgtgccgcgggccggggaggccgcttccgccaccggtgccaaggatgctcgacggggaggggaaagggcctgcagcggacgctcccggtgttttagagactgggagccaaaggatgacgccgttactcgcacggagagtggcggtccaaactctaccaaagggctcatgagcacaacgactttcggttaaatgggactacctgttgtcagcggagaaaggcttttaaagagaagttccaggataagaactgtgatgaaactttgaacttcagattgaacattcctgctaaaagtgctccaagcagtgggttttcaagccctgtacaaagtcctcgaagactgagtaatgtagatttctcatctgctgcaatctctatccaagataccaatgtatggtcagcacggtctctctggtcttctgatgcgatgggatcttcacctccttgtgattcacctgacaagtttgcaggtggtcaggagcgttctcctctctctagtccactgagaagtccagttttaaaatcaagaaacccaagtgcacctccatcaccaatgcatccaaagttgttcccggagaaccatgtttctcgccctgatggcaatggaagtgctagttttcacccattaccgctccctcctgcttctgtaagcccaaagcagacaaatgctagccaccagttagttccaaaagctgagatgccttcggtggctggtcaatggcagaaaggaaaactcttgggtagtggcacctttggatgcgtgtatgaggccaccaataggcacactggagctctttgtgccatgaaagaggtgaatataattccagatgatgctaaatcagtcgagtctctgaagcaattggaacaggaaattaagtttcttagtcaatttaagcatgaaaatattgtgcagtactatggcagtgaaactatcgaagatagattctacatatacctggagtatgttcatcctggttcaatccataagtatgttcatcaacactgtggatcgctgacagaagcagtcatccgtaacttcacacgtcatattctcaagggtcttgcttttttacatagccaaaagattatgcatagggatatcaaaggggcaaatttgttagttgatattaacggtgtagtgaaattggctgacttcggaatggcaaagcatttgagtactgcagctcctaatctttcattgaagggaacaccatactggatggctcctgaggttgttcgggctacactcgataaaagtgcaggttatgatcttgctgttgatatttggagccttggctgcacaatcattgagatgtttacaggaaagccaccttggagtggtcttgaagggccggctgcaatgtttaaggtgttgcgcacggacccaccaattccagataacctgtcccctgaagggaaggattttctgagatgctgcttcaagagaaaccctactgagcgaccaacagcaaacaagttgctcgaacacccatttatccaaactttgaaccactacagcccacatagcgttgtacattcattttcgggaattaaatctccagatactgtgcacagcagtgcaagagataaagtaccctggaaaagtgattcatatatgagagggaaacatgcaaatggtgaaacaagcagtgctcggtcgtcagagtcattggcttatcggttgatgacacccctacccaacttgggaaccaatagtttgtcacctccacctttgagttcggcctccagttctggctctgcagcacatacaccgaacagtatgcatttttcagtcccataccatcagcctagtcctttgccaaagcctaacgggaaggaagcaataaatttggtttcgcattgaataacagcatgccacctatcacaacatctgggcaaagtccacataaacagcgcaagtgtatccgtccctagcgtctgacccttgtactgccagtaatagctaacaattttctgggtcgtgtaaaaataatttccatgtaaagagatcaccgcgatatgatcacagggaaatgctgct

SEQ ID NO: 30293 - DNA, 546 bp, Zea mays
  Clone ID: UC-ZMFLB73006E10_FLI
gccattggtggttcagatataagggtctaccaagtagctaatgttaaggccgaatggaatcttatcaagacattacccgatttatcaggaacagggaaagtaacttccgtaaaattcggagtagacgcgaaatacatagccataggttctatggaccgcaatctacggatatttggtctccctggagatgatcaaatggaggaatcaaacacagcggccgagtgatgggaattcatggtgcctaatttgtttcttctgccatcatcctcattatactgtggtgatggatagactgattgcacatggatacatcaccgtcacaagagggaagggtcctggcggggattactggtctgagcttcggtcggtgtaaaacaagctgtgatattgttgtactgtaggccttactaattcttctgatgaggatacaatttgttttgttgagtacgatgctaaacagctaaagttctctgcgcagattccagtgattcaaaacgaactacttgcttctcagcttcttttattacataggtcaatggaagcact

SEQ ID NO: 30294 - DNA, 1707 bp, Zea mays
  Clone ID: UC-ZMFLB73006G01_FLI
atcgatgcacgcaggccgtagaggaggggaggctgtacgtcgtggaccaccacgactgggtgatgccatacctgaagcgcatcaacgagctccctgcgagcgaggagaaggcggaggtgtcgcagaggaaggtgtacgccgccagaacgctcctgttcctggacggcgaggactcgtcgatgctcagaccgctggcgatcgagctcagctcgccgcacccggagaaggagcagctcggcgcggtcagcacggtgtacactccaccggacagcggggacgacggcatcacggccgggaggttctcaacctgggaactggcaaaggtttacgcctctgccaacgacgcagccgagaacaacttcgtcactcactggtatgtacgtacactcgttcgtacgtagagacaagacgaggtcaatgtgtgtctctgtgtgtgtaggctcaacacgcacgcatccatggagccgatcgtgatcgcggcgaaccggcagctgagcgtgctgcacccaatccacaggctcctcaagccgcacttccggaagacgctccacatcaacgccgtcgcacgccagatcatcgtcggctcgggtgaccagaggaaggacggcagcgtcttccgtggcatagacgaggtcacgtacttccccagcaagtacaacatggagatgtcctccaaggcgtacaaagcctggaacttcacggaccttgctcttcccaacgatctcatcaagaggtaataccagtactagatacgaaacgaaatgacatgtattcgttcacataccatagcaacagcatgctatacatgacgaacagaggtctggcaaaaggagatccaaagaagccagagacggtggagctggcgataaaggactacccgtacgcggtggacgggctcgacatgtgggcggcgatcaagaagtgggtggctgactactgcgccatctactacgccgacgacggcgcggtggcgagggacagcgagctgcaggggtggtggagcgaggtcaggaacgtggggcacggcgacctggcggacgcgccgtggtggccggcgatggactgcgtcgccgacctcgtggagacctgcgccaccgtcgtctggctgagctcggcgtaccacgcgtccatcagcttcgggcagtacgactacctgggcttcgtcccgaacgggccctccatcaccacgcggccggtgccgggcccggacgccggggcggaggtcacggagtcggacttcctggcgagcgtcacgccggtcaccgaggcgctcggcttcatgtccatcgcctcggggccgatggggctcaagggcacggaggtgtacctggggcagcgcccggacacggagcagtggacgcgcgagcggagggcggccgaggcgctggcggagttccgggcgaggttggaggaggtcgcgggcaacatcgacaggcggaacgcggaccctgcgctgaagaaccggacggggcaggtggaggtgccctatacgctgctcaagccgacggcacagcccggactggtgctccgtggcatacccaacagcatcaccgtttgagcagcagagcgccgtcggcagctgtcagctgtgtacagtacagaataataaggtggtcgtgtttggcgctatctccaccacataaacgtgaaaatgtttttttttgaattatatggacatgcagggccgcagcccgtaagcctggcccc

SEQ ID NO: 30295 - DNA, 2327 bp, Zea mays
  Clone ID: UC-ZMFLB73006G07_FLI
cttcattgccttttggtttatgttcttccagtactgaagggaatttattctgaccaatgctttgaaataggtgttgaaacaagatcttctggaccaaagacagatgtcctcagagcaaagataacttctgatgagcagatgtgctgtgacttttgcaaagtgccagtgtttgattatcaccgatactgcccaagatgttcatatgatttatgccttgattgctgtcatgacatacgtcattctcgggccaatgttgcacgaggagaatatactgaaggttatgttgaagataaaggtagagattcttttaatagaagagcaaggttggaaccatctgctgagagtgtcaatgacaagtcattatcttggccaatagatataaataatattgacattaaatctttattccctacatggagagtcaacaatgatggcagcatcacttgtggacctcacgaggctggtggttgtggctcctcaaagttggtattaaggcggatattcaaaataaattggattgctaaacttgtaaaaagttctgaagaaatggtcaatggttgcaaagtacatgatttggaggatggatgcttgtcttgcagtgatggcagaagatcggagtttactggtcagcaaaacctcggtctctcaaaatgctcaaacagtgatgagattggtaggaattgtttgtactcacctgtattggaggacttaaaatatgaaggcatcattcattttcgtaagcattggaaaaacgcggagcctattattatcagggaagcatttgagccttctctatcatcaagctgggatcccttgagtatttggagaggtatccaggagatcatggatgaagaaatggatgaagatgtcatagtcaaggctgtggactgctcgaaccaatcagagatatcgagctcaaacagtttatcaaaggctactcagatggcagcaaaggaggagatggccacttgttgatgctgaaattgaaagagtggccccgacccagtgtcttggaggcgtttctgttgtgccaaaggccagaatttattgtcaactttcctcttgttgattttattcatcctagatggggtctcctaaaccttgctgccaagttacccccagatgccttacaacctgaattagggatgaaactgctaattgcacatggaagtcaccgagaacttggtaaaggtgattcaatgacaaatctaatgattaacatgagcgatgtggttcacatgttaatgcatgcaactgaagtgcattaccaatgtcccaagagggtaagggtacagtctgatgtatctgaaatgattgctaatggaactagtgtccatgtaaatgctcatactcctgttcaaaatttgaatctggatattgaagagcaatcacacaaacactcgaaatcacacatcgaggagccaaacactaataattcagaaggatccctggctggtgctgtctgggatgtattccgcaggcaggatcttccaaagcttaatgaatatctagctgctcatcgggaagaatgtgcagctagatgtcaagcagtgtcttctgttaagtatcctatttatgatcaaactgtgtaccttaacgattatcataagaagatgttgaaggatcaatatggaattgaacccttcacattccaccaacatattggtgaggctgttttcattccagctgggtgtcctttccaattgaaaaacctccagtccacggttcaattggctctcaattttttgtcacctgagagtttgccagagtcagtccggctgtcccaagagatccgttgcctgccaaatggccatcttgcaaaactgaagatgcttgaggtaaaaaagatctccttatacgcagcaagttctgctgttagagaaattcagagaataacccttgatcccaagttcaatcttgatcctagttttgaggatcaaaatttgactagggcggtttcagagaacttggcaagagtaaacaaacggaaggtatcttgcagttgagattgtgggggcctggtgaaattatgacatgccattcagaggattgaagtagatatagtgcttgtacatgtattatattgtgtcatatgaaaggaacacattctaattcttattgggttacacattgactttacctgtatattgtgggttaggaagagtaacagttaagcttctgaggaacaagataaaaaggcgctggaaagctcatgtagaattgttagcacaataatctctgttggtagcatctgaagaataattaattagaccgaaattgttacattgtgaacacagggttcaagatttaaatactatattttcacc

SEQ ID NO: 30296 - DNA, 1534 bp, Zea mays
  Clone ID: UC-ZMFLB73006H01_FLI
gcggtctgctcgttcgatctgtgcagcagatctgaggtcccgggcgaccgtgaagcagcttcaatcgtcggcatggcgctcgtattgcatagtggggctggaaacaagaatgccttcaaagcacttattgctgcagaatacagtgggatcaaggttgagttgaccaaggattttgagatgggtgtctccaacaagacccctgagtttcttaagatgaacccccttgggaaggttcctgttctggagactcctgatggccctgtttttgagagtaatgctatcgcacgctatgttgctcgcttgaaggatgacaaccctctttttgggtcttcccgtattgaacaagcccacgttgagcaatggatggattttgccgcaacagaagttgatcctggtgttgcatggtacttgtatccaaggcttgggtacctcccttatgttagcacaactgaggaaacagctatttcttcattgaagaggtcgcttggtgctctgaacacacaccttgcttcaaacacataccttgttgggcatgctgttactctagctgacattgtaatgacatgcaacctctaccatggaattgcacggatcttgaccaagaccttcacgtctgatttccctcatgtcgagaggtatttctggaccatggttaaccagcctaacttcaagaaggtcattggtgaggtcaagcaggcagagtctgcacctcctattccgaaaaaggctgctccttctaaggagccaaaggcaaaggatgtcaagaaggaggctccaaaggaggcccccaagccaaaggtggttgaggcaccagcagaagaggaagcaccaaagccaaagccaaagaatcctcttgacttgctgccaccaagcaagatggtccttgatgactggaagaggctatactcaaacacaaagactaacttccgggaggttgccatcaaaggtttctgggacatgtacgacccagagggctactctttgtggttctgtgactacaagtacaatgatgagaacaccgtctcctttgtgaccctgaacaaggttggtggattcctgcagcggatggacctgtgccgcaagtacgcctttgggaagatgctcgtgataggctctgagccacccttcaagctgaagggcctttggctcttccgtggccaggatgttcccaagtttgtaatggacgaggtctatgacatggagctctacgagtggaccaaggtggacatctctgatgaggcccagaaggagcgtgtcaatgcgatgattgaggaccaggagccctttgagggcgaggccttgcttgacgcgaaatgcttcaagtgagtgtgcttgcctggagacagaactgtttagcccttgaatttgcctatggaagagtttgcccttttactagtgtcgatgttgatctggtataccttgctatgaactggttaaagtttgtgctggtttgggattttttgtgcatcttgtgatacctcaagtcttcatcatttaaatgtttagccgtaataatctggttattttttcttct

SEQ ID NO: 30297 - DNA, 1187 bp, Zea mays
  Clone ID: UC-ZMFLB73007A09_FLI
aaccattgtagccaacatgtttttatgaatctgatatagcatcttgtcccttcataatttttttaagcggtaagcatttgaaaattctgaatcttggagatggacaaggtagaactagtggtgttactgctgttcttcagagcactgatgatgattctgttgatccacatctggagcggataaaaaatcaggccggtaatgaggaaagtgatgaagaggtattgcttcccttagttaacgactcaatataagtttactttctgtcgattgcatgtacatttttgtgtaacccctcttcaaagtaggatgaagattttgtggcagacaaggatgatagtggatctccaaccgatgattctgatgcagaaggctctgatgctagtatgagtggaggagaaaaggagaaaccttccaagaaggaagctagtagctcaaagccgcctgtgaagaagaagcagaagagtgggccagatgaaggttctcaaaaaaagaagccaaagaagaagaaagatcccaatgcccctaagagagctatagctccattcatgtacttctcaaaggctgagcgagctaatatcaagagcagcaatcctgaactggcgaccacagagattgcaaagaagctcggagaaaggtggcaaaagatgacagcggaggagaggcagccatatgtggagcagtctcaggtcgacaagcaacgctatgcagaagagtctgcagcctaccgtggtgcagccgctcagcagggctctggtgctggatcggaatgaaggtttaatcgtctcgacagttaacttgcaaggctggatgattgagtcgtcagaataaagctggaatacccaaaaacctaagctgaatgtcatcgtttgacctgttgggttgttccggaattcaaccaggattcattctagttcatcaatgcttatattaattaggcaagcaatctggtctggaatcgatcgaggccgttccctggaaccgaacatacccctaagcaaatcctgccaggtaggacaaaatgtagcagcaggtttaaacaaatttcagagaagtacaagtattttttgcataagaagtacacaattacaactgttttgacatgtatcatagaactacaattaattcccttttggcgccatgaaaatacagcacctttgatacttgactaatactatgagaatagcttt

SEQ ID NO: 30298 - DNA, 842 bp, Zea mays
  Clone ID: UC-ZMFLB73007D02_FLI
cagaggatcaccgagatcgccggcgtggtggtgacgttcgacccgaagccgatcccgggcgactggaacggcgcgggcgcccacaccaactacagcaccgagtccatgaggaaggagggcgggtacgaggtgatcaaggcggccatcgagaagctgaagctgcggcacaaggagcacatcgcggcctacggcgagggcaacgagcgccggctcaccggcaggcacgagaccgccgacatcaacaccttcagctgggtacgcttctaattgtgcaactgctgtaccgtggaggatcggcgaaacccgtgtgcctgccaactgttgttgctttgtgccgttgcagggagtcgccaaccgtggcgtcggtgcgcgtgggccgcgagacggagcagaacggcaagggctacttcgaggaccgccggccggcgtccaacatggacccctacgtggtcacctccatgatcgccgagaccaccatcgtctggaagccctgaggcaccccgtggccgtgtcgtgtcggtttgctccgcgtacggcgctggccgttgcatcgcagggcccagcggttgcgcaactattttcccttccccgttctgtttgcttgtactactactctaccgctagtcctgcatagcattttagctagaacacaacaacagccaaaaaaaagtattgttgcttgcttcgacgcttgccaccacttccattccatgccgtccgtccgcttccttcctgtgtaatcctcctccaataatagacgtgccatgttgcatcctctattcctctgcattgtataaaagtggtgtaattcttttgctacgcctccaatgtctgtggctttt

SEQ ID NO: 30299 - DNA, 1402 bp, Zea mays
  Clone ID: UC-ZMFLB73007D08_FLI
agcaagtgtctgctcactcagtcctgcgcaagagctcgctctcggagaaaaaaacgcgggaggcgataatggagggaggtgccggtgcgagcgagaaagggaaggtgctggtcacgggggcgtcgggcttcgtcggctcctggctcgtcatgaagctcctccaggccggctacaccgtccgggcgaccgtgcgcgatcccgcgaacgttgggaagacgaagccattgatggaccttcccggagcaacggagcgcctgtccatatggaaagccgacctggcggaggaaggcagcttccacgacgccatcaggggctgcaccggcgtcttccacgtcgccacgcccatggacttcctgtccaaagaccctgagaatgaggtaatcaagccgacggtggaagggatgataagcatcatgcgggcatgcaaggaggccggcaccgtgcggcgcatcgtcttcacttcctccgccgggacggtcaacctggaggagcggcagaggcccgtctacgacgaggaaagctggaccgacgtcgacttctgccgtcgcgtcaagatgaccggatggatgtacttcgtgtctaaaaccctggcggagaaggcggccctggcgtacgcggcggagcacggcctggacctggtcaccatcatcccgacgctcgtggtcggcccgttcatcagcgcgtccatgccgcccagcctcatcaccgcgctggcgctcatcacggggaacgcgccccactactcgatcctcaagcaggtgcagctcatccacctcgacgacctctgcgacgccgagatcttcctcttcgagaacccggccgcggccgggcgctacgtctgctcctcgcacgacgtcaccatccacggcctcgccgccatgctcagggataggtaccccgagtacgacgtcccgcagaggttccccgggatccaggacgacctccagccggtgcgcttctcgtccaagaagctccaggacctcgggttcaccttcaggtacaagacgctggaggacatgttcgacgccgccatccggacttgccaggagaagggcctcatccccctcgccactgccgccggaggggacggctttgcctcggtgcgcgcacccggcgagacggaggcgacgattggcgcttaagcaacaatcacccggctctccccgtcgatgatgctatcagctatctatctcttcgagctccgctgccaatacggaacttacttccatgttcaacgaattgttttatcccctggattacgtattgtttttatgttttatacccaaacaacgaatgtttctcagtattttactacagctagcccctatagtagagattctattatatgaataagctatctgtagaggctctggtgcaatatatatttcgagttatttggatt

SEQ ID NO: 30300 - DNA, 694 bp, Zea mays
  Clone ID: UC-ZMFLB73007E03_FLI
cgtcgaagaggatcctgaaggagttgaaggacctgcagaaggacccgcccacctcctgcagcgcaggtcctgttggtgaggacatgttccattggcaagcgaccatcatggggccttcggacagcccatttgcaggtggggtattcttggtgaacattcacttcccaccggattaccctttcaagccaccaaaggtgtctttccgcaccaaggttttccacccgaacatcaacagcaacggcagcatttgccttgacattcttaaggaacagtggagtcctgctttaactatctcaaaggttctcctgtcaatctgctcactgctcacggacccaaaccctgatgatcctcttgtccctgagattgctcacatgtacaagaccgacagggccaagtatgagtccaccgcacgctcctggacacagaagtatgccatgggctagaagcaaggctaaaagctggccaaactggtgaatgtgccggaccccaaatcgttatcacctaaataaccagtcaagtcgcaagtatgaatggacttttgaggaccattgtgccctgttgaactcatgtattaccttgtgaagtccgttgtgtctggtttctacctgaccgtttcgttatctgatgctgtttctttaatatctgatgctgcttcattaaccatacttctatatggtttgtggtgttgctgttt

SEQ ID NO: 30301 - DNA, 1447 bp, Zea mays
  Clone ID: UC-ZMFLB73007G03_FLI
cacaagcgcactctagcaatggcttctgaggttgtccgccctagcgacgccgagctactaaaggcacaagccgacatatggcggctcagcctctcctacctcacgcccctgtcactgaggtgcgccgtggagcttggcatccctacggcgatctaccgccatggcggggctgcctcagccgctgagctggtcacggcgctgtctctcccctccactaagctgccgttcctccgccgcctgctgcggctcctcgccgcgtcgggcgtgttcaccgtcgacaagcagagctcggaggaggagcggtaccgcatcagccccgtgtcctacctcctggtggacggcatccctcacgaggaccacatgaaccacaccgctctggtgctcacctgcacctcgacgcgctacatcgaggcggggatagggctggcggagtggttcaagagggacgtggtcacgtcaccgttcgaggagctgcacggggcgactctgttccacgagagcatggggagcctcgacgcagatttccacgacatggcgagcgaggccttggacgcccacgacaacttcggcatcgagatagctatgcgggagttcagggacttgttcgaggggatccagtccatgacctactgctgcggtaacttcggtgatgacaagggtgccagggccattgtcaaagccttcccacacataaaatgcactgtgctggcccctcccaagatcattgccaccaaaccggccgatggagcgatgataaactatgtcgaaggtgacatgttcagtttcattccacctgctcaaactgtcgtgctaaagcttgtgctgcaccacctgaccgatgaggagtgcgtcaagctcctggctcaatgccggaaggcgattccttcacggaaggatggcgggaaagttataatcggtgatattatgattgaccactctgggcctatgctggaaactcacctcctgatggacatcggcatgatgaccatgacaaaaggacggcagagagatgaaaaagaatggagcgagctcttcaccaaagcagggttcagcgaatacaagatcctgaaggaatttggagctcgtgttgccttcgaagtctatccgtgagattgcacctggactatacatatatatttacatacatatatgtatgtgtgtgggtgccttgcgtggcttggcgtgatgatgtcataaataaagagggtgggtgtgcttgcggtattcatggatggccatggatctgagcacatgacgttggatgctttcttaaggctctcgtggatcttctatatttggaagaagctgtaaaataatatatcgccatctagtgttggcgttggcttgtatgtactttgtacctgctttgttattttgtgtaatatcgagtaacctaatgtatacttgcttactactatcactaccgaaatctatctctttgccgagt

SEQ ID NO: 30302 - DNA, 802 bp, Zea mays
  Clone ID: UC-ZMFLB73008A07_FLI
tcgtcgcagcccccaaggccccaactacccccagtctcggaagagaactatccagaagcgcaagactccaaagccgtcgccttcctatccatcccttcctcgccgcgggggtcgcctgagatcacataaacaatggtgaaggctgttgctgtgcttggtagcagcgatggtgtcaagggcaccatcttcttcacccaagagggagatggccctaccactgtcaccggaagtgtctctggcctcaagcctggcctccatgggttccatgtgcatgcacttggtgacaccaccaatggctgcatgtcaactggaccacactacaatcctgcgagcaaggaacatggagcaccagaagatgagaaccgccatgccggtgatcttggaaatgtgacagctggagcagatggtgttgcaaacattaatgttaccgacagccagatcccactgactgggccaaactcaatcattggcagagctgttgttgttcacgctgatcccgatgatcttggaaagggtggacacgagctcaggaagagcaccggaaacgctggcggccgtgttgcttgtgggatcatcggactccagggctgaactgaaacaaatggtcgttggacttcgggggcgcctgggagtgccgtcaccagcaggctagaataacatcccgaagacatcgtgaaataataataataagagcgcctgatatgtgatcagtggtgtactcgccattaagcacctgtggcaaccgatgagctgaactgtgttggactgttggctaaaatgctggttcgcctgagcatgtgtc

SEQ ID NO: 30303 - DNA, 1802 bp, Zea mays
  Clone ID: UC-ZMFLB73008B02_FLI
cgcggaaaaaaaagggaggagaggagggagaaagggaagaggaggccgaaatctcctccccctttccaaatcctggctcaataatctctccatcaggggatcctaaggctgatcactgatcaggtcggaggactcggcgggcgcagccatgaacgagaaggcgtccgtctccaaggagctcaacgccaagcacaagaagatattggaaggtcttcttcggcttcctgagaatagagaatgtgcagactgcaagtcaaagggtcctcgatgggcaagtgttaatcttgggatctttatatgtatgacatgttctggaattcatagaagcctgggggtgcacatatctaaggtaagatctgctaccctggatacatggctgccagagcaagttgcatttatccaatcaatgggaaacgaaaaagcaaatagccattgggaagcagagctgcctcctaactatgatagggttgggatagagaattttatccgtgcaaaatatgaggacaagagatgggtaccgaggaatggaacattgcgaccttcctccggtgttcgagatgataagagccaagagtctccagctagtgctaataggagtggacatcatagatcttcatttgagcaaaaccgagcttcaccagctcttccgagcaaagttgcacctgtagcttcaaggataccctctcaggcatcacctcagcccccaaaggtagaaccaccagttcctaaggtggtttcacctcctcagccacaaaaatctcctgccaaagttgaggcaacaccccctaaagttgagaagccatcagttgcgccgcctcctaaagttgattatgctactgatctctttaacatgttatcaatggatggaacaacagagaaagagtcagagtcatctccaaacgatgataatgcctgggatggcttccagtctgcacaaccagtacctagctcggaggaaaaagattctgccaaaccagcagaaagcatgacccagtctacacctggaatagaagacttatttaaagattcgccagttgtgtcattatcctcagctccagctgtttcccaagtaaatgcaaagaatgatatcatgagtttgtttgagaagtccaatatggcatcaccattcgctgtccaacagcagcagctggcgtttatgtctcagcagcaagctcttctaatggctgctcttaaagctggaaattcaccacaaatagttccagggaatgccaatcaactaaacactaacgtttctaatccccctcttggaaccttgcctttccaaaactggacaaatcttggctatcaaaatcctgggttgactctagcagcagcacagaatggtgccaccaaggtttcgaacaacaatcaagacctctcttctggtacctttggttttggcacacctgggatgcacaacattactccagctgtcccagcaaatggtgccacggcagcaggtgctagcaacaacggcactgcatcaactgcctcttccactctcccctcacaatctggcaaagattacgatttttcctcgttaactcaaggatttttcaccaagcgatgagtgcctagtgggcttgaaagccaaacggatcaccgggggagcttgcacatgctttatttcgaggcagattttattctggtggatatatatatagttgtcacatgaccttgtagctgtcagacaataagagtggaaatatgcggctaaatagctcatgttgtttgtacaagtgaagaattccttgccgttttatgtcaacggttttgactcgaggactacgccttgttcagct

SEQ ID NO: 30304 - DNA, 1876 bp, Zea mays
  Clone ID: UC-ZMFLB73008B10_FLI
cgcacacacacacaaccagatctcccccaaatccacccgtcggcacctccgcttcaagatgcagatctttgtgaaaaccctgactggcaagactatcaccctcgaggtggagtcgtctgacaccattgacaacgttaaggccaagatccaggacaaggagggcatccccccagaccagcagcggctcatctttgctggcaaacagcttgaggacgggcgcacgcttgctgactacaacatccagaaggagagcaccctccaccttgtgctccgtctcaggggaggcatgcagatctttgtgaaaaccctgaccggcaagactatcaccctcgaggtggagtcctctgacaccattgacaacgtcaaggccaagatccaggacaaggagggcatccctccagaccagcagcggctcatctttgctgggaagcagcttgaggacgggcgcacgcttgccgactacaacatccagaaggagagcaccctccacttggtgctgcgcctcaggggaggcatgcagatcttcgtgaagaccctgaccggcaagactatcaccctcgaggtggagtcttcagacaccatcgacaacgtcaaggccaagatccaggacaaggagggcattcccccagaccagcagcggctcatctttgctggaaagcagcttgaggacgggcgcacgcttgccgactacaacatccagaaggagagcaccctccacttggtgctgcgcctcaggggaggcatgcagatcttcgtgaagaccctgaccggcaagactatcaccctcgaggtggagtcttcagacaccatcgacaatgtcaaggccaagatccaggacaaggagggcatcccaccggaccagcagcgtttgatcttcgctggcaagcagctggaggatggccgcacccttgcggattacaacatccagaaggagagcaccctccacctggtgctccgtctcaggggtggtatgcagatctttgtgaagacactcactggcaagacaatcacccttgaggtggagtcttcggataccattgacaatgtcaaggccaagatccaggacaaggagggcatcccacccgaccagcagcgcctcatcttcgccggcaagcagctggaggatggccgcaccctggcggattacaacatccagaaggagagcactctccacctggtgctccgcctcaggggtggcatgcagatttttgtgaagacattgactggcaagaccatcaccttggaggtggagagctctgacaccattgacaatgtgaaggccaagatccaggacaaggagggcattcccccagaccagcagcgtctgatctttgcgggcaagcagctggaggatggccgcactctcgcggactacaacatccagaaggagagcacccttcaccttgttctccgcctcagaggtggtatgcagatctttgtaaagaccctgactggaaaaaccataaccctggaggttgagagctcggacaccatcgacaatgtgaaggcgaagatccaggacaaggagggcatccccccggaccagcagcgtctgatcttcgccggcaaacagctggaggatggccgcaccctagcagactacaacatccaaaaggagagcaccctccaccttgtgctccgtctccgtggtggtcagtaagtcatgggtcgtttaagctgccgatgtgcctgcgtcgtctggtgccctctctccatatggaggttgtcaaagtatctgctgttcgtgtcatgagtcgtgtcagtgttggtttaataatggaccggttgtgttgtgtgtgcgtactacccagaactatgacaaatcatgaataagtttgatgtttgaaattaaagcctgtgctcattatgttctgtc

SEQ ID NO: 30305 - DNA, 1711 bp, Zea mays
  Clone ID: UC-ZMFLB73008C01_FLI
ctgactaacactttccaacctggaagtctctgccacattccatgagaggttgcacatgcactttttggagaggcctggtatgtattgtagcccaaggtagcggcagggaaaagtgcctctggctcccaagaaaggtgagatcacttgatcaaggtctatgtcctcacaacgaattgggtggatggagcttttagcaaagtttacatgggtctgacactttgctgaaggcgtcaaggatggatttaagtgcctcgtgcctcgatatcttcgttcaaaaaaaagtgcctcgatatcctcttttacttttgacttatttctttgtcttcttactatcccgttctacaccttctacatgcttgcacagtgtttgggtttgtctaaaaggtatccctagattggacaaatgtgtcatgtctctctctctctctctttaaatgaaggccttattctctgctgaatgaactggaagaatccttgctcgttttattgtttatttttaaatagtagttcagattaaagtactaatacacctttttttttgtaaacagcttgatcaaatagtggttgaaaatgttctggcattcgacgcaggtttctgggttcgactggcagctagaattgatctctgcaaatcagatgatgataaagcatgatttcacatatgtagaaaattttactttctatggatggtgttatcttttatctcaaattaatctaactttgcagttggtttctctcttttgccttctcagaaagattatgaagagctggcggaaaatgtcatgaacattgttgaccggcttgttcacaagactaatcaaaagattgaacaatcaactgatgtgctgaaggcaattattagtcctgcaatgcatgaaggagatgtgaagtggccaccaagagatccagatacactcaaattgatggagaaagaaataacacgccgagaacaagaaggacaacttgatgagggatttctgtcagaagttagtgctcagttgaggcaattatctttatatgtgtttaggctaaacaagacggagataagccagggcttcaggctatgctgcaaaaggtgttgcagttatatgcttctaaatctctccaaaaacgtagttatgcatacaaaggggggcaagttgtagttcctgaaaagtttctcgaatgtgtaatacaggctcctgagaacgagtggaataaggtgttgcttgacgggcttacagtaggaaaaggagacgtttcgccagatgatctgtatgccgttattaacaagagaattgagagagtcttgattcgtacggaaggtggttcttaccaacaacgcatactggttgagtatctaaaagagatacatgctagagcagaggaagttgtcaaagtgcttcaaggaccaacaatataacatctcctgatcttgtttacactacacatgatttcctgtttgcgcgtagtcggttgggacaatgacttaattttgttggagttgctcggcagacagctaagagcagtttcagacatgcctgatgcttggacctgatcaaactaggagagcacaggaaatcgagagaagagagaagccaggagagggtcttcttacgtgggtattatttgatctttggtttggcaggccatgtattaattcgtagtgattatgttatctttcctactcgatcatttctattttcaaaatagatttgcctatttgatgaat

SEQ ID NO: 30306 - DNA, 1886 bp, Zea mays
  Clone ID: UC-ZMFLB73008C06_FLI
caagccgggaggcacgcttgagagccacacactgagacctcacgcgcggatggccgccgccgcgggcgggaccggcggctgcggctgccacattgtagcggtgccgttcccgggccgcggccatgtcaacgccatgatgaacctgagccgcctcctcgcagcccggggcgcggcggtcaccttcgtcgtcaccgaggagtggctcggactcatccgctcctcctccgccgccgccgctgccgagccggccggcatccgcatccgcaccatccccaacgtcatcccttccgagcacggccgcgccgccaaccactcaggcttcctcgacgccgtcgccacagagatggaggcgcccttcgaccgccttcttgacgggctcgaaggcccgccgcccgcggcgctcgtggccgacgcctacgttccctgggtggtcggcgtcggcaaccggaggggcgtccccgtctggtcgctcttccccatgtccgccgcctttttctttgcctactaccacttcgaccgcctcccggcctggcttaccaactctgagcacgcgccggaatccggtgagactattggaaactctgatcagagacttgggcactatatcgctgggcaggcttcaagttcaatacggttgtcagatctcgagcccttaattcacaacaagagaacagtgaagcatatcctaacaactatctctagcatcagaaatgctcagtctctccttttcaccaccatgtatgagcttgaggccagtgtcattgactcgctaaggtcagtactctcttgtccagtgtacccaataggcccctgcgttccatacatgatgcttgaagaccataccgtgtccagtggcaaagttgccaggcaaggagattatttcacatggttggattctcaacctgtgaactcagttttgtatgtctcccttggcagttttgtttcagtctcagcctctcaacttgaagagatcgcattgggcctaatagccagtgaggtcaggttcttgtggattcttcgagaacaatcccctcgggtgcaagaactcttctctggcatcaataatgggatgatactgccatggtgtgagcagcttgaggtgttgtgccatcattcagttgggggcttcatgacccattgcgggatgaactcgacacttgaaggcgtcttcgctggtgtgcctatgcttgccttaccactgttttttgatcaaccgattgatgggcgattaattgtggaagagtggaagattggccttgccgttagggattgggctagcaagggtggtctgatcgggagagaggatattgcacgggctgtgaagaagctgatgtcttctgatgaaactgggacaaaggcgctgagggaacgtgctcttgagttgaaggaggcttctcgcagagcagtcaatgagggtggatcttcatactgcaatctgagttcattgatggagacggtatgcactccaaaataattggaattgtatttggtatgtgctaaaacactgtagtggtggtgtaacctgtaaccatcatgcttcaaatatcaattctacaatcaacccttgcgcagctcaactctttagaatttgtgcaactttcggaaagggtgatgatgcgattgatgtacgatttgttcaatacgttgttattttgtccgagctccatttggattgtacttatagcaaaatgtcttcgtttcaagatagctgcgaattagcttgaagtttcaaatttacagcagcctttgaattgtacttatagcaaaatggattgtacttaccattttgatcctgaagacttgagcagcctttgaaggacaagggtgtttgggtctggtttttgtaaggaaaaataacatttgatcaatgaattttggtgtttaat

SEQ ID NO: 30307 - DNA, 2340 bp, Zea mays
  Clone ID: UC-ZMFLB73008C07_FLI
caagtttcctgaatggaaacaggcactatctttactcatcaccagaagacaatgatcttggatgctgatgctgggaatcatagaaggaagatcgttgctttcgtgggaggacatgatctatgtggaagccgatatgatacaccaaagcacactctatttcgaactcttcagacatttcacaaggaagactactacacccaaattttgcggttgaagatgctcgcggcccaagagagccatggcatgacttgcattccaagatcgacggtccagaagcatacgatgtcctgaaaaactttgaggagcgctggttaaaggcatcaaagcgcagtgccgctaagaaactgtcaaaattgtcgaggtcgcataatgattcgctgctgtggatcaacaagatacctgatattatttctattgacgacgaaatctattcaaatgacgatgatccagagagatgggacatgcagattttccgatcaattgattcgaattctgtcaagggttttccaaaagatccacgggaggccactagtaagaatcttgtttgtgggaaaatgtactgattgatatgagcgtgcatacaacatatgtgaatgccatccgaggtgctcaacatttcatctatattgagaaccagtacttccttggctcttcatttaactgggattcacatagagatgttggtgctaataatctgatacccactgagatagcactgaaaattgcaaacaagatttattcgaatgagagattttcagcttatatagtagttccaatgtggcctgagggcaatcctactggtactcttacgcaaagattctttattggcagaaaatgacaatgcaaattatgtatgagataatctataaggccatgaaagaagtaggactagatggtacatatgagccacaggattacctgaatttcttctgccttggtaaccgtgaagccgaggacactacttgcacatctagtggaccattctcaaccagtaacccacagaaaaatacaattatgctgcagcttggatatccaatcaggaccaagctcggaataataggagattcatggtgtatgtgcactcgaaaggcatgattgtggatgatgaatatgtgataattggatccgctaacatcaaccagagatccatggaaggaactagagatacagagattgcaatggctgcataccaaccccagcatacattggcaaatatgctttctgctcctcgtggatagattttcgggtacaggaaaatacagtgtacgtgttgaaactgttatcctgccccaggttgggatagacggtggtacattcgtgttggtagaactgtgagaagaaaagatgggaaaactttgctttcttggctgtgatgattatctgctcaaacaagacatgcaaattgcaaaactcttaaaggatagtattagttctatttgttcatatagttctacagctagttgtttcttgctttgttcatggattgcaatactggataagatcatgatggatgttgtgtgtgttttaatcaccatttctaaaatttattctattggtaagacgattctaagatataggtcggagatggattccttgcatatacataaatagataaagaagcaaccggtttataacaaaaatatgtcttctattttgcctgttgcccaattctcttttagtgtagcctacttacaataattaaaagaagagttggtgtctgtttgagtagacaactaagtgcatatataagtacgtgcatgattttgattactaattgtgattttgatgatctttcttttgaagacggtctaacatataagcgcatgatttagatgaacggaattactattgtgccatttctgaagaatcttactgatttctcttgccttcttagaacaacatgggaagaagtgatgatgacagtccatcgccgccaagaggtcacaagagaagaacttgcagcccaagtcctcgtggtagttatggaggccatggcaagcgccccacaactaatcttatggtgacgaatcttggtccggattgtaggattctaactctcatcaagtgactcctcccctcacgatgactttgcggacagatgtctcaattatagtggtggagctacgaacaacaatccgatgtcctgatcgagagcgatggagctaatgtttgaacttgtgtgtttgaacttgtgaactaaaaatgtgaactatggatgtgaatttatgtgaatttgtgaaattatgtatttgaacttatgtgaatttgtgaacttatgtatttggacttgtgtgaatttgtgatatgaatatatatccatgtgtttgaaatttgtattgt

SEQ ID NO: 30308 - DNA, 854 bp, Zea mays
  Clone ID: UC-ZMFLB73008D08_FLI
gagtactatttatcttgaattgaaccaaatagtaattctgtatatacattcacaccatcgagcattgctcggcgtgcaaggctttacacacatgacaaaaattgcaaaccaaccaactcggcacacacagacacagagatgaatcgcaaacaactcacacacaagctaaccactaataagcatgactacactgccactgaactctaaacatgatcgccagagccccgccaaacgaaaaccaccagctacgacctgagcttgagtgattccaggccgtggatccccttcttcaggatcccatggaccggccaaccaccactcctcaccttcgatctctccaccgcaccaccgtctcgctcgcacgcgtcgttctctgccacgcaaacgcctttgcccttcccgccgacgtgcgctcttcctgcgtcggccgcgcgcctgccgaagctttcgaacaggtcgggcgagtgctgcagcacctcgctcgccgacgagtaccccatcagccggtgaagcttgccgtctctagtacccgtcctttcgtcgacggtgttgaaggacgagttcctcgacacgtacagcggctgctgcccgtcctcggtgctggtcgagtggccgatgccgaacgagagcccgtactcctcggagtaggacaccgggtccgcctccccgaagaagccgccggcggcggcggcgttgtggccgccggaagcctgctcgtactcgtcagtgctgtactcgtcgcccccgaacggtgactgcagcctcttcctggcgccggggtccctgtaggagtaggagaggacttcggagcaggagccgcaccgcagccggcgcgttcccctgctcgggacggc

SEQ ID NO: 30309 - DNA, 1027 bp, Zea mays
  Clone ID: UC-ZMFLB73008E02_FLI
gttggatcgcagctccttcgtcgtagcgtccgatacgccaggtttcctttcgcgagcaacaatctttggcaatggcgtccacgtcgagctcgacgccagcgccggttgaggtggacgagaggggccggaagcggaagcgtgcggccggggcggaccccgcggcgccggcgcagccgtccaagtggcggacgcggcgcgagcacgagatctactcgtccaagctcctggaggcgatccgcctcgtgcgcgcggggcccccctccgccgccgccgccggcacggcggcggccccgccgcgcagcagggccgtgcgcgaggcggccgaccgcgcgctcgccgtcgcggcgcgcgggcgcacgcactggagccgcgccatcctcgcgtcccgccgccgccgcctccaggccgcgcaccgcgcgcgcctccgcgcccccgcgtccccgcccgcgcgacacggtgccccctcggcctcggcggcgaagggcgccgccacgccgcctctggagaggaaggccaaggtgctgggccggctggtgcccggctgccggaagctgtcgttcccgacactgctcgccgagaccacggactacatcgcggcgctccagatgcaggtccgcgccatgacggccctcgccgaggcgctgtccgccgtctccgccacctcctcctccggcgccggctcctcctcgccgccgtgatcgaagccgaagcctcaacattcgtgcattcgttgtaaatttttccctctcttttctccccccacgaatttttcctcgggattagttaacctctagctttctctctctctcccctctagttttccttgtcgtcttgtttctcccagttcggtgagtggttagtgtgacgatgaagaagaagatgatgatggcgtcccagtgattaacccgtgcggtaatgtgatagaagaagtcgtaggctgtctccgctcctcccttcctccctagctcaggattcttttgtagcttgggtttattctcatctgcttcgatcgctcttcgatgaatgc

SEQ ID NO: 30310 - DNA, 1022 bp, Zea mays
  Clone ID: UC-ZMFLB73008E05_FLI
gcaacgctgcccctgccgcgtcgtcttctggaccgcttctccactccgcccagctcgcagtcgcagctcgctcaaagcagcacagcagcaagcagaaggaagaaaaagagcagcgagagccgagaagagaagcgcgccgccgctcgagctcatcccgccgccggacacaccgcatggccatgaggcacagggcgcggtcctcccccacctccccgctcaccccgtcctccagcgcaagaacaaacaagatacttggtttctctgtatctctcatcctcatcaatctggcttcaattatggagcgtgctgatgagaatctccttccagcagtttacaaggaagtcagtgcagccttcaatgctggtcctgcagatctgggatacctcacctttgtaatgaactttctgaagtcaatagcatctcccttggcaggtatccttgctctgcactatgatcggccaatagtgcttgcaatagggactgttttctgggccttatcaacaggggctgtcggtgttagccagcgttttgggcaggttgcattctggagagccgtaaatggcctagggcttgccattgtaataccagcgcttcagtcgttcattgctgatagctataaagatggtacgcgtggtgcagggttcggtttgttaagcctcattggcgctgtaggtggtataggtggtagtattttggcaacaatcatggctggaaaggactattggggattcccaggatggcgtgttgcatttatgatggtcgcacttgtcagcttgataattggaattcttgtgtacttatatgcgactgatccaagaagaatacctggcaatcgccttcttgacgaagatgagtatgagaggtgtgctattcttttcatctcacctagctggaggggttcattaatcaatactactatggtagcgaaatagaactcacatagcttgtaattttgtgacatattagatcatgttttgatgtatatgttagaatataatataagtgaattgtccacctcctcc

SEQ ID NO: 30311 - DNA, 697 bp, Zea mays
  Clone ID: UC-ZMFLB73008E08_FLI
caaaagagaaacgaggttcacgtcaaaatgtccaccgaaagaaatcattcgcaagattgaggaagctgcaaaacctctaggatttggtgtccagaagaaaaactacaagttgaggctagagaaagtaaaagcagggaggaagggaaacctgaatgttgctacggaggttgcgccctcccttcatatggtacaagtccggaaagcaaaaggcgacactctggagttccaaaagttctacaagaacctttccaagaccttaaaggacgttgtctggaaatctgaagacctgcaaatgcgagctgcttcttagcatccactagatggcgagatgttcgtacgtgtcagattccattcccgtagcatgatgtgtcgtcagccgtttctgttcactgcactctgcatggtccggtgggcgcgtggcttggcattttcagagaccgcgttgctcgttgcagcccgggatgaaggcgatgcagtaggttttgtggatgtggtgagctctgtatatgcctattgatgagtcatgttgcaagctgtaacgacactatgatccgtgaagtgtagaagcagccaagtatgttctttctatgctgccccatttcccggcagtttccatgcattttgaagaaaaaaatagtggctaactcattgatatttgtatttggtcatcattaataaatcgcctctccatctgtgc

SEQ ID NO: 30312 - DNA, 558 bp, Zea mays
  Clone ID: UC-ZMFLB73008F02_FLI
agattgctttgaagatctctcaacttcctttggcttcaggcaagcaaaagaggattgctgtgattactcaaggtgctgatccagtggttgttgctgaggatgggaaggtgaaaacgttccctgtgatcctattgcccaaggagaagcttgttgacaccaacggcgcaggtgatgctttcgttggaggcttcctctcacagttggttctaggcaagggcattgaagactgcgtgagggcaggttgctatgccgcaaacgttatcatccagcgcccgggctgtacttacccggagaagcctgacttcaactagtgcaaaactgaggcacgtcatgagagggactgttataggcacacttaattgttaaccagtgcgtggttcggtgtctacacaccctgtattcttccgaggcttctcttctgatccggccaatatttttgccgtgaaatttgtgttctgcaactatggacgtctcctttgttgctgtataaggcatgatttgccatcattctgttgcttcggtgatgcttgcaatgcaatgagaatgtgttggaacgag

SEQ ID NO: 30313 - DNA, 890 bp, Zea mays
  Clone ID: UC-ZMFLB73008F03_FLI
cggcgcgggcggacaaggagcaggcggaggaggagctgtgccaagccacaatgggtatctcgcgtgactcgatgcacaagcgccgggccaccggtggaaagcagaaggcctggaggaagaagcgaaagtatgagcttggtcgccagccagccaacaccaagttgtcaagcaataagacagtgaggagggtccgtgttcgtggaggtaatgtgaaatggagggctcttcgccttgatactggtaactactcatggggaagtgaagctgttacccgcaagacccgtatcctcgacgtggtctacaatgcatcaaacaatgagcttgtgaggacacaaacccttgtgaagagtgccattgtgcaagttgatgctgccccattcaagcagtggtacctcactcactatggagttgacattggtaggaagaagaaaacccctgctgcaaagaaggataatgctgagggacaagaggttgaggcagcagctgaggaaacgaaaaagagcaaccatgtcacgaggaagcttgagaagcgcaaggagggacgtacccttgacccacacattgaggagcaatttggcagtggacggttgctggcatgcatttcttcccgccctggacagtgtggccgagctgatgggtacatccttgagggtaaagagcttgagttctacatgaagaagctacagaggaagaagggcaagagcgctgtagcttagagcattctcatggattgtcttgcaccgaaatgtgtgtcctgatgagtacactttttttggttaatcgtctcaagttcagagcgttatgccatgttttcagacctgattagtacactgttttctaaaagcgattgagctctagtccaatgtattgataatatctgctgttgtcct

SEQ ID NO: 30314 - DNA, 736 bp, Zea mays
  Clone ID: UC-ZMFLB73008F10_FLI
tttcccaaaccctacccatacccccgccgccgccgccgccatgccgcccaagctcgacccgtcgcaggtggtggaggtcttcgtccgggtgacgggcggcgaggtcggcgcggcgtcgtccctggcgcccaagatcggcccgctcggtctctccccgaagaagatcggcgaggacattgccaaggagacggccaaggactggaagggcctgcgcgtcaccgtcaagctcactgtccagaaccgccaggccaaggtctccgtcgtcccctccgccgccgcgctcgtcatcaaggcgctcaaggagcccgagagggacaggaagaaggtcaagaacatcaagcacagcggcaacatcggcctcgacgacgtcgtcgagatcgccaggaccatgaggaacaggtccatggccaaggagttggccggcaccgtcaaggagatcctcggcacctgcgtcagcgtcgggtgcaccgtcgacggcaaggaccccaaggacctgcagcaggagattgatgacggcgaggtcgagatcccgtccgcttgaagactagacatcgaaggggacttccattggtgctgctgaagtgttgttgttctgcatgctgtcgatgtacctttttcaagcaacgcgagccatctatttcttttgtctagctatgttagtgatatcttgtgagagacctcaatgttaccaccgtatctttgtctttgttggatggagagatttaagcaccttacc

SEQ ID NO: 30315 - DNA, 1009 bp, Zea mays
  Clone ID: UC-ZMFLB73008G03_FLI
tgatcgcgcgggggtcgaggagaggggaagcgcggcgccgcggttgcctgccaccgcaccgccgcaggagaaggaagaggagcccgtatccctccgccccgctgcccgccggaccgatggactccgagcactggatctcgcgcctggccgccgcgaagcgcttctacgcggcgcagctcggccacagcgatcgggccgggatggatgagctggagatggacgaggaggtcaggcccgagttcccctgcccctactgctacgaggaccacgacgtcggatccctctgcgcgcacctggaggaggagcacccgttcgaaccccaagccgcggcctgccctgtctgctcagagatggttacgaaggatatggttaaccatattactacgcaacatggatatttattcaagaatcgccgccggctgcgcagattcatcattccaggcagccaggccctctctttgctgagccgagatctacgggaagcccacttgcaggtgctcctcggaggaggcggacagagatccagcgacaacagcagcagcagcagcgccacgaacatttcggctgatcctcttctgtcgtcgttcggccttggcttccctacctcagacgcggagcaagcatccaagtcgactgtttccattcctgatgatgcaacgacggtgaaagaagcgcccgctcaggcacggaagctaagtatcgattcgtcgctcacaagtgaagaaagggagctgaagcggaagcaagcccgcgtcagagccacgttcgtgcaggacctgctgctctctactctattcggcgactgatgacgaaccagagcgagcctggtattatcactggaaggtgcagagttgatgtgggcgtgatgtatctttctaagttattgtaagccggtctctgtcttcacaactgacgatctgtgtgtggtacgcaccacgcacgcaagtcgcggttgtgcgtgtacgtctgaactctggagcattggtttgttgtaccaacataatgagtc

SEQ ID NO: 30316 - DNA, 1009 bp, Zea mays
  Clone ID: UC-ZMFLB73008G04_FLI
tgatcgcgcgggggtcaaggagaggggaagcgcggcgccgcggttgcctgccaccgcaccgccgcaggagaaggaagaggagcccgtatccctccgccccgctgcccgccggaccgatggactccgagcactggatctcgcgcctggccgccgcgaagcgcttctacgcggcgcagctcggccacagcgatcgggccgggatggatgagctggagatggacgaggaggtcaggcccgagttcccctgcccctactgctacgaggaccacgacgtcggatccctctgcgcgcacctggaggaggagcacccgttcgaaccccaagccgcggcctgccctgtctgctcagagatggttacgaaggatatggttaaccatattactacgcaacatggatatttattcaagaatcgccgccggctgcgcagattcatcattccaggcagccaggccctctctttgctgagccgagatctacgggaagcccacttgcaggtgctcctcggaggaggcggacagagatccagcgacaacagcagcagcagcagcgccacgaacatttcggctgatcctcttctgtcgtcgttcggccttggcttccctacctcagacgcggagcaagcatccaagtcgactgtttccattcctgatgatgcaacgacggtgaaagaagcgcccgctcaggcacggaagctaagtatcgattcgtcgctcacaagtgaagaaagggagctgaagcggaagcaagcccgcgtcagagccacgttcgtgcaggacctgctgctctctactctattcggcgactgatgacgaaccagagcgagcctggtattatcactggaaggtgcagagttgatgtgggcgtgatgtatctttctaagttattgtaagccggtctctgtcttcacaactgacgatctgtgtgtggtacgcaccacgcacgcaagtcgcggttgtgcgtgtacgtctgaactctggagcattggtttgttgtaccaacataatgagtc

SEQ ID NO: 30317 - DNA, 1008 bp, Zea mays
  Clone ID: UC-ZMFLB73008G11_FLI
ccgcaacccaccgagaggcgagaccggcggcggcaaaaggacgatacaaaagcagccagggttgctggcaacagcgtcggtcgcccgcccgctcgccatggggaggtcgccgtgctgcgagaaggcgcacaccaacaagggcgcgtggaccaaggaggaggacgagcgcctggtcgcgcacatcagggcgcacggcgaggggtgctggcgctcgctgcccaaggccgccggcctcctgcgctgcggcaagagctgccgcctccgctggatcaactacctccgccccgacctcaagcgcggcaacttcacggaggaggaggacgagctcatcgtcaagctgcacagcgtcctcggcaacaagtggtccctgatcgccggaaggctgcccggcaggacggacaacgagatcaagaactactggaacacgcacatccggaggaagctgctgagcagggggatcgacccggtgacgcaccgcccggtcacggagcaccacgcgtccaacatcaccatatcgttcgagacggaggtggccgccgctgcccgtgatgataagaagggcgccgtcttccggctggaggaggaggaggagcgcaacaaggcgacgatggtcgtcggccgcgaccggcagagccagagccagagccacagccaccccgccggcgagtggggccaggggaagaggccgctcaagtgccccgacctcaacctggacctctgcatcagcccgccgtgccaggaggaggaggagatggaggaggctgcgatgagagtgagaccggcggtgaagcgggaggccgggctctgcttcggctgcagcctggggctccccaggaccgcggactgcaagtgcagcagcagcagcttcctcgggctcaggaccgccatgctcgacttcagaagcctcgagatgaaatgagcgcgcttctaccctctctgtgtagcttctcccccccgtcgtcctcgtttttgttttgccacacctcacatggatgatgaattgatgat

SEQ ID NO: 30318 - DNA, 807 bp, Zea mays
  Clone ID: UC-ZMFLB73008H02_FLI
tatttgttcaaggatatatgctatcaacacttcaaagatgccacattacttccacaaagttgcatcacaaccaaggagctcggaaccgtgatgcggtctctcgggcagaaccccaccgaggcggagctgcaggacatgatcgccgaggtggacagcaacggcagcggcaccatcgacgagcaggagttcctgggcctgatggcgcgcaagatgagggacgcggagtcggaggaggagctcagggaggcgttccgcgtgttcgacaaggaccagaacggggtgatctccgcggccgagctccggcacttgatgaccaacctcggggagaagctgagcgagcaggaggtggccgagatggtccgtgaggccgacgtggaccgcgacggccacatcaactacgacgagttcgtcaaggtcatgacggccaagcgaaggagcaagaggacggaggagaaggcgacgcgcggcaagaagaaaccggcggcggcgccgtccgacgccggcaagcgtggccagaaatgcgtgatcctgtgagccggagcttcggttgtccagtacatgctggtgcagtggtgctgcgtgcgtgtcacccgctcgacctctgcttccggcacaccagctgcgggaagctccacttgttctgcaggtgaatgtagctgtttgtaaacttatcagagcgtgtttgggagcatgattgaatgggaaaatccacttgagtaagggattttagtcatctagatctcctctaatctccttgctcccaaacaagccattaaataagaaaaacggaggaagtaactgtttgtc

SEQ ID NO: 30319 - DNA, 669 bp, Zea mays
  Clone ID: UC-ZMFLB73009B07_FLI
aggcaacaataccagcacagtcccaggtttgtctgaaagacctagtggaacgtttaacacaagcgttactgaggcatggaataatatcagcctactccagcaaacagcattaggacctcaaggcatagatgatctcgacacgctgcaaaaacgcggcgaagaggtgctggaacggctacagcatggcgcggaccgaaggctaccgagagctgatgaccaggcgcagtcgagttcttgtgtagaactgcagagggacaggcgcaagaagcggaaggccccggacgtccagcagatgatggagacctatttgaatttcaggatgaagcaagctcacgtcaaagaacaaagagcgaaggacgctggccagttcacgatttcaggctgtatcaaggctctgcacaccatggccgatgtgtcagacgaggtcaaggtgttagcctctgatgttttcaaggacgctgagaacagggagatctttctctcctatgaacccaggctgcgcagcttgtggctgaagagggaagttggcaagctactctcctgatagtggtgttttgtttgttacctgtgtcagtgagtcagtctgacattcgattctggagggagctattgaaggtctaggcttcattcacaaactctattaaaccatctccgtcagtttgagagaac

SEQ ID NO: 30320 - DNA, 522 bp, Zea mays
  Clone ID: UC-ZMFLB73009C09_FLI
tcagacctcaagaagatcgaccgcggtgttcgccgccacttccacgacgacataacagtcatagtagtgttccttgattccagcctcgtgagcaaggcgagcacgcaccgaggccccactctttccctgcgaggcggcggtgccagcgctggtctgcgcagcaacacgcttgcaccaacgtcaatgtggctatgaggaggctacaccctgactggaggacgttttctttcctcgtgtcgaatgtgttatatatgtacttgtaccggccaaggtcatccatctcccctcaatggtgtaaagaactaggagaggcgtggaagctcctctccagcgtctttgaatcccctcaatggtgtcaaggtgtggactcaagtcaatagcttcgctgttctgatgatgctctgtggaaactcgaatccttccacctgaaaaccaagtagtatgtcttctagtgctggaattaaccctagtgcatatatacatatgaaataaaaaaaagccaaaaggaggagtaacttattt

SEQ ID NO: 30321 - DNA, 811 bp, Zea mays
  Clone ID: UC-ZMFLB73009C10_FLI
ataggcatgtgaaagtgaactcgaatgctcctgtctgtgaagattttttaaagggatattgtgctgatggtgatgagtgtcgtaaaaagcacagctatgtatgcctcgtctttgaggcaacaggagagtgcccacaaggatcaagatgcaagcttcatcacccgaagaagaaaagcaaatccaagagaagcaaagtagacaccgtccaaaacaacagttggggtcggtattttgagacaaacgttggccatggcagtggagcaagaatagtttatttggaggaagatgagagacagaaaccagagcaagtctctggtgaggagtttgctgacttcattgaacttggtgccggtattgaagtccctgaagatgcagacacttcggatgacatacagctgatggaactggacttagggaatctcgaggtgcaggctgacaataatgacgcgataatcaagccacttcggatcatgagaacggcaagagtttgatgagttctttggttggatacagctgcagtgttcctgggtcagggtggtattttacgctatgtttgacgtggcatataggcgctgactggagtttctatttctcgaagactggttctgacgggggcaatcggtttttgcttggttgaaggtttgattttgttcatcttgtacatcttttattaggaaatatattaggaccatatggcagtggtagaggccatgagggttactggctgttaacccgtgttttttcaacattacccagagttgaatgtaacaaacagtgctttacaatatgaaatgaatgaaggtttgcatac

SEQ ID NO: 30322 - DNA, 1108 bp, Zea mays
  Clone ID: UC-ZMFLB73009C11_FLI
ttcagaggccacatggaggatcaaggactgcctaccagattctaattggccaacaaaaggcgacatcaatgtcattgatcttaagtttaggtataggcacaacactcctctagtgttgaagggcatcacaataagcatacatggaggagagaagattggagttgtcggcagaactggtagtgggaaatcaacactgatccaggcactgttcagaatagtggagccttctgaggggagaataatcatcgacggtgttgacatctgcactttaggactccatgaccttaggtcacggtttggtatcatacctcaggaacctgttctctttgaagggaccattaggagcaacattgatccgcttgagcagtattccgatgatgaaatctggcaggcattgggccgctgtcagttgaaagaagccgtagcttcaaaacccgaaaagcttgatgcttcagtcgtcgacaatggtgagaactggagtgttggacaacgtcaactgctatgcctgggccgggtgatgctaaagcacagcagaatactgttcatggacgaggccactgcttccgttgattcccagaccgatgctgtgattcagaagatcatccgggaagactttgcagcttgtaccattatcagcattgcgcacagaatacctacggtgatggactgcgacagggtcctggttatagatgcaggactagcaaaggagtttgaccggcctgcaaatctgatcgagaggccatctctgtttggagcattggttcaagagtacgcgaaccgttcgtccgacgtttagcatttcagggtggcataattttttgactcgagatttgggaggaaacaatgattggaaatttctcggtgtggtgaacgagcaatgctgcattcatgctccaaataaaactgcgagccctcaaaatttcgcgaaacgtaattgggtcatgtggaaggccagaggagaagccacgatcggatgaaggagacatcgagatgactaggatagtaagtagttatcgagatgtatttgagcggtttaagctgaaattttaagactgagctgaagacgatgtatgaatctatgtattgttcaactagaatattactgcgc

SEQ ID NO: 30323 - DNA, 1287 bp, Zea mays
  Clone ID: UC-ZMFLB73009D01_FLI
ggaagggaagggagcacctgcctgctcctgcgcggcggcggttgagcggcgtggaggaggcactacccgttcttctgggctgtcaggccttccgtaccgccgccgccgtcgccactcccactcccacagccgcgcacgcgcttctcctcctcctcctcactgcgctccaccaagagatccgccgcaaagacgtcaatggactcgtcttcagtcggtgaacccttctacgtcgtccgcaagggggacgtcatcggcatctacaaaaccctcagcgaatgccaagctcaagtcagcaattcggttcgcgacccttctgtcaccgtcttcaaaggctactcgctgcgtaaagacaccgaggaatacctcgccgcgcgcgggttaaggaacgctctctacgccattgatgcaacagatgcacgagatgaattgttcgacgatctagttccctgccctttccagcaacctgatggagctgcatcgtctactctgaaaagatcacaggagattgaaatcggaccatcaaagaagcatcccaaagttgatgagcaggtaccattacctgatagtcatctctcttgtattcttgaatttgatggtgcctctaaaggaaatccagggaaagccggtgctggagcaataataaggcaggtagatggttccgtgattgctcaactacgtgagggtctgggcattgcaaccaacaatgctgctgaatatcgtgcattgatcctagggctaacatatgcagccaagaaagggttcaagtatattcgtgctcaaggcgactctaagcttgtttgtaaccaggtccaagatatctggcgtgttaagaatgataatatggctagcttctgcaagaaagtgaaggagctaaagggaacatttcatttatttcaaatcagacatgttttgagggaatataattcggctgctgatgctcaagctaactttgcagtagaacttcctgttggtgaagttcaagagcagtcgaacttcccatgctagcagttgtgttgtggtcaagtgtggtttgtgcatcgctaaggttctgggactgaagctatgtcacatttgttcagttctcattgacacaaaaggaagagacgaaacaacagttgtattggaagtggtagtgggtctgatatatctgcggagtattgaacagacagatgcaatattgagtagattcttaggaaatttaatcgtctcaaacttctagatagtgcgagttgatttgtccaggaccagtgtttgctgatatacgatgtttgtattcagaacagtatt

SEQ ID NO: 30324 - DNA, 1736 bp, Zea mays
  Clone ID: UC-ZMFLB73009G01_FLI
gctccgctgggccaccagctttgaccgccgcctcccttcccctccgctactgctcctccccaccccactcccccgcaggagcggcggcggcggcggcgaggtcgtaccccacatcggcgagcggcggcggcaccgccggaggcaaaggcaagatgttcgggcgcgcgccgaagaagagcgacaacaccaagtactacgagatcctcggggtgcccaagtcggcgtcccaggacgatctcaagaaggcctaccgcaaggctgctatcaagaaccaccccgacaagggcggtgaccccgagaagttcaaggagctcgcacaagcctatgaggttttgagtgatccagagaaacgtgagatttatgatcagtatggtgaagatgcccttaaggaaggaatgggcggtggaggatcccatgttgatccatttgacatcttctcatcattttttggaccctcttttggaggaggtggtggaagcagcaggggaagaaggcaaaggaggggagaagatgtagttcacccacttaaagtttctctggaagatctttacaatggcacctcaaagaagctctctctttcgcgcaatgtcatctgctccaagtgcaagggcaagggctcgaagtctggtgcctcaatgaggtgccctggttgccagggctcaggcatgaaagtcactattcgtcagctgggcccttccatgatacagcagatgcagcagccttgcaatgagtgcaaggggactggagagagcatcaatgagaaggaccgctgtccagggtgcaagggtgagaaggtcattcaagagaagaaggttcttgaggttcatgttgagaaggggatgcaacacaaccagaagatcaccttccctggtgaagctgatgaagcgcctgatactgtcactggagacattgtattcgtcctccagcagaaggatcactccaaattcaaaagaaagggtgaagatctcttctatgagcacaccttgtctctgaccgaagcactatgtgggttccaatttgttcttacacatctggacaacaggcagcttctcatcaaatcagaccctggtgaagttgttaaacctgaccaattcaaggcgattaatgatgaggggatgccaatttaccagaggcctttcatgaaggggaagctgtacatccatttcacggtggagttccctgactcgttggcaccagagcagtgcaaggctctcgagacagtacttccaccaaggccttcatccaagctgacagacatggagatagatgaatgcgaggagacgactatgcatgatgtgaacaacatcgaggaagagatgcgcaggaagcaagctcacgctgcccaggaggcgtacgaggaggacgacgagatgccgggcggagcccagagagtgcagtgcgcgcaacagtaagcagactatcatcaaggcaattgggaggggtggtgcccttaaagcatgggagtgatctctggttttgctgtcgccgagctgggaaataggaagctgaatcgacctcgcaagcggggaatgtatccttttttgctgcaacataaaaaatgctacccaggcatagctgggtaccttttaacttctgtttgtgggatttgctagagtgatggtttcgatatatagggggacttgaatgtctggaatgctacggtataacgcacatttgggtgcaatgtctgttgcattgctgtctgaatgacatcgttggtacatttattttcatgt

SEQ ID NO: 30325 - DNA, 1883 bp, Zea mays
  Clone ID: UC-ZMFLB73009H01_FLI
ggatgacgccgataagttgctcgccattctgtcgtccagcccgcagaacgtgctgttgatggcggaggctggttacttccgcccgttgatacagtacctcaaacaaggttcagacatgaacaaggtcctcatggcaacggccatctcgaaaatgttcctatctgaacatatgaaatcttccctcggcgaggatggagctattgaaccgctcgtggacatgtttaaacatggaaaccttgaagccaagcactcggccttaggcgccttgtgtaatctctctagctctctacagaatgcagaactcctgataaattctggcataacaggaccgctgctccagctccttttctccgtgacgtcagcactcatggccctcagagagccggcctcggctatactcgcagctatagcacaatctgagcgtattctacttcataaggatgtagcgcctcagatgctctcgcttcttaatttatcgagtccggtgattcaacttcatctcctgagggccttgaacagcatttccgggcacgcgaatgctaaaagagccaggagtaaaatcaggcaaaatggaggagtgcagctgcttctacctttcctgacagaaaagaatgtgggtatcaaaatcgccgcgttgcacttaatgttccatttgtcgaaagactcttctcaagaattggctgagcagttcagggagacccatctggatatttttgtgaagatcatctcttcccctacttctcgagacgagaaggctgcagctgtcggtatcctgagcaacctcccagcgacagacaagaaggcaactgagattctgatgcgggcaaacttgctccctattctgatcaccttgtttgaggcaaacatggccgctgccgtgacacctcaaagaatgtggttgcttgagggcatcgctggtgtgtttatccggttcacagtcacctgggacaggaagctgcagagttcagcagttggacacggggtggttccttgccttgtgaagttgctttcagaaggatcggtggacgccaagtctaaagcggcaacatccttggcccaactgtcacagagcacgatggcgctgcgcaagtcaaaaacgccaaggtggctctgcgttcctccatcggccgaatcctactgtacagtccacagctgccagtgcacagtcaaaagcaccttctgcttagtaaaagccggcgccgtccatcctctggtccagacactggaaggcgaagagcgcggagctgatggagcggcgctggaagcgttgggcacccttatggaggacgaggtctgggagaacgggagcagggtgatagaaagggcgtcaggcatccatgctctgctgaggatcgccgaagccggagagccgagctcccaggacaaggcgatatggatgctggagaggatgttccggctcgaagcccacagggagcggtacggcgagatcgcgcaggctctgctcatcgatctcgcccagaaaggagaccctgccctgaaaccgatgatcggcaagatactggctcaccttgagctgctgcaaacacaatctagctacttttaagcgtgctggcgggcgtcgctgcagataccagatcgccagatttgtgggccgtgaagtgtgcatacctgtagctttaggagccatagcaaactgtgctgatatttggcgttggtaagttcaaatctgaactgaccatgcccaactattaaagggcacatggatcgttatttttcttgtaagtagatacagcgagttttgctccaaagaggaagaagatgcagactgtaatgaagtgtaaagtgatgatagtggttatagataagatggagtactgtgtatacaaacaaattgccatctccacagcaaactcgttcaacag

SEQ ID NO: 30326 - DNA, 2059 bp, Zea mays
  Clone ID: UC-ZMFLB73009H05_FLI
aattaaaaaatgaggtcccagttccacacttccacccacctccagagccaaaagagccggcggtggccggcagccaaaacccacgtcggatttcgccgccgccgccaggagctaggggacaaggcaacgccggcaggtgcaacatttatgcgtgtaccgcccggcagccacgcgtacacttctgccgcagagctaaacgcgccactccgcggcaagctgatctgctgctcccaagtcccaccagccaccgcaccgagtgccaatggcgactgcagcgacttctacgccggcggcgtggcagtctactctggtctactctggtctacgccatgcagggacctgcccgtgcttctcgcccagccccgctcgctccccgtcatcgtcacctacaggccgaattgggagggaggccagtacgcaggcgaagatgagccacggtttgaggcgcttctactggcaatggagctgggagctgaatatgtcgatgtcgagttcaaggtcgccgacaaatttatgaagtatttgtctgggaagaaacctcaaaactgtaagctcatcatttcagcatacgactacaagaccactccatcggtacatgaacttctgaatttagtagctcagatacgagcaacgggggctgacattgtgaaaattgaaaccactgctgctgacattgtagacacatcaagaatgtttcaagtacttgcacattgccatgaaaagcaggtgcctatcattgggctggtgaggaaagaacatggttttatttctcgtattatttgcgcaaaatatggcggataccttacttttgcatctcttgaaaatggaaaagaatctaccactgagcagccgacagtagcagacttgataaataagtacaaaatacggcagataggcccagatactaaggtctttggtattattggaaatccagttagccacagtaaaagcccaattgtgcaaaatcaagctttcagatcagtgggtttcgatgctgtgtttttgccatttttgtcagatgacttggttcagtttctttataccttctcagcaccagattatgccggcttcagttgcacaatgccccataaagaaactgcacttaggtgctgtgacgatgtcgaccctatcgccagggacatcggagctattaatacaatcattagaagacctgatggaaaacttgtaggctacaatacagattattctggtgctatttctgctattgaggatggaataagagcatcacaaccaacagattcgatcacttcaccactggctggaagactttttgttgttattggggctggtggtgcaggaaaagcactagcatatggtgcaaaagagaagggagcaagagttgtgattgcaaaccgtacatttgcacgagctcaagaactcgcccacatcattggcgggactgctttgaccctgtcagagttggaaagctaccatccggagaaagggatgattcttgcaaacgcgacatctgtggggatgcatccaaacgtcgatgaaacccctttatctaagcacgcgctaaaatcctatgccgttgtcttcgacgcggtcttcgtgccgagagagaccagacttctccgagaagctgcagtgtgtggagccacagtcatcgacggtttggagatgctaatcaggctagtgatggttcagtttaagcttttcacggggggcatgacagctccagaaaggttgatgcgtgaggctatcctgacgaagacacattgagggtttgttcaaataacaagatctctacactacagatgtccctgcaaaaaaaaaggtcccagttgtacatgtcctccttcttgcttcttcctcggcgtctgggaagcaccgtatctcattttcaacccaagcaaggagaggaggtgcaggttcgggcctcgtcctgcttctcctgctgcctgccatgatgcagtgtcgtttgttgttcagtagacggtatgctctagttcaacagagtaaagatgttttgttttctcaggttgcaaaacaacgaatggtcatgttcaataaggaatggaatgtgatttggatc

SEQ ID NO: 30327 - DNA, 1868 bp, Zea mays
  Clone ID: UC-ZMFLB73009H07_FLI
gggaaacaacaggaggaataaggatactgaagcacgggcaggatttgcacaaggtggatcatgttcatcgcataatggttttataggctctggcagcaatgcctctggccactcaaaggaaagacacgaacctgaggatgataaagttgtcttgcagaggaagcaacatgcacaatggaacattgatatcattagctcctccaagtcaagaatggcagagtcttcattttcttctgtgagctctattaagaagcaacctcaaccaaattttttgctagaaagcaccaatagtttgaatcaccgtggaagcgaagcttctggcactgtgacttccactacaacagcgggtgcctcttcaaccccggccactcagttagttttgaataaaggacctgtatccagtgctgcaacccagaatgagaagccactacctctgcaggtgcttgtaccatccaaatctgaagtgcagaagcaggcttccctaactggcagtgcaactaccgaggccgtttcagtatcaaggcccttgactgccccacaagtccctgcagcaaaacaaagtgcaccagtcacttcaacagctcagaatgcaccttttctttctcgttcaatgagtgctgttgggcggttggggaatgaaccatctgccaatgctcctagtttcgttccccgttcacgaacatatcgcaatgccatgatggagaaaagttctggtggtggaagctgtttcacacatcagcaaggttcatcggagcaagcagttgcaccatggcaatcgatgtttacatcgcaacctttcattcggccatcagagaccttgtcttggaaagaggaaacattattgagatctgggtttacatttggaactgtgaagcccgagtcactgaacccatatcagggcagagaagagaactcacagcaagcgagcagcaacagcagtgattgtgcgccatcgagttcaaacatcagaagcgagatcgagaagctgaatttgagcggaagaccacgaagcaagcaactgttgtcagaaatttcgaccagatttactccctatcagccacaaggcttggtcgctgatgagttcccacacctagacatcatcaacgacttgctggatgaggagcagagtgacagaagaagggttcttcaacctgattttgttcaacagtcctatatgcctcatggtgccagcacacctgattatggtgagccatacttgtttgaccagtccgagcaatacttcgatgaggagcctccaaggttttatagtccattgagcagtgctcctcggaggttgagggacctgagctattcgcactttgatctcccatcacactccagcagcagccagtttgatgatctgatgatgagtcagtggccatacagccgcactgacatctccatgcctagttttgggtcagacacaagtggctacccctatcaggtgtgggatctcgcgaatggatcaagcaggtacccatcgtatcgccctgccaatgggcattgagagttttaatgattgcattgacaataatgtgtggttaagtccatgatgttcgcttctgagctgagtgtaattgtaatagttccccatagcagtgatataaagaattgttcctcagtttccttgttcaatcaatagttatatgacccccctcctccctcttttctctagttcagttttgcccagtggtaataaatctaagtcggctaaaatgatctggctaatcgtgttgtgaaatgtgtatgatgcaagcaaatggtagggtgtttttaagccatgccagtgcttcagctgatactacattaaactgggagtattctttgtttctccctctgacgagtgacgacgtgttattgatcgtctc

SEQ ID NO: 30328 - DNA, 1028 bp, Zea mays
  Clone ID: UC-ZMFLB73010A05_FLI
cgcgctagcccaccacgcaaggttcctcgtcttcgatcacatggagaacaggagcctcaaggaatgcctccacgatccgctccggacgccgctggactggcggaccaggctgcaggtcgccattgacgtcgcggcagcactggaatacctctactaccactgcgaccccccggtgttccacgtgtccgtcaactccggcaccgtgctcatggacgccaacttcgtcgccaagctatcggatgtcggcgtggtcagccacgacgtgaggctcgccaccactgactccttccaaggtctctctatccgctccccaactcttcccaccccccacgacgtggccgcgctcacctatcttcttgctgcgttgttcgctcgcctgtgcctgtgctgtgcatgcagaccgggtcgagcggaggcgggcgggcctggcgttccagtacggcgtgctggtgctggagctggtgacggggcagtccccgggcgccgacggcgagctcgtgcgctgggcgcaggaccccggctccgccgcctccgtgcaccggatggtggacgccgacctcggcggcgtctacgacgcccgcgagctccgcgacctcgtcgccgtcgccaggctctgcaccagggacagggacgacagggacgagggcgctggcgtcgtcaccattccgcagatcgtcaggtacctccaggggaagctggagcggatcggatgccaggccaggttcggatgatgatgatgacggtgatggttcgcctgcgttgcgtgcgcgggcgatcagcgtatcatcatcgtctttgttcttctttaacagcctgtctgtaccatcaaatgtacaaaagcgcgtggcttttcttctgtggatgcccagaatctgttggtgtcgatcagtcgatagaggaaccaaagtgagttgctgactgcaattggaagcggagtgcagttttctcttctgatggacatttttttcgagatgttttgctgtgctttttgtgacgtgacaagaacagagattgccatggcagttttg

SEQ ID NO: 30329 - DNA, 2352 bp, Zea mays
  Clone ID: UC-ZMFLB73010B08_FLI
ccaccctcccacgatccccacatcgctctctccctcgcccaccagcccttcccgtcctcgatgcgctctgcaacttccaccctcgccgcgacgagctcggccggccgagctccgcgccaacctccagcttgatctcctcgccatgagccttgccaacctctcgcgccgagctacgcgtttccccgcagatctcctcaccatgatctccttgccatgatctttccctcgctctgccatctgcccccaaattcccctccccgctcgctcgcgtcgcgatagcaagcaacgcgcaggtgctgaaactcgtgtactgttgatggatgatgactgttcccatggatagtgctagcgcagccccatcctctgcgcgggaccttgccatggatagtgctagcactagcatgaagcactttcagttttataataattgaaaaaaacctggcgcctgggctcatatttatgcaatagggaaatcacatggttgcttatatttcctgttttctgtgatgagactgttgatgtgaagatatatcaattcaagcacacatagctttaaccttcataatttcttcaccagttataacagttttcatttttgagataccacatgtcttttaaacagcataacttccttttacccaattattggtttacacaactaatttttacatttgcttctattactaaacttaaatttcacactcagccttgtgttaactaccttgaggtattatggtttatttctcgcattaggtattcttctgagtactggcataaggtcatttttttcattaggaacttcctgagaggcttcttcttacatacaaacctgaagaattggaggacattcctgagcctgcttctgttgaagaggaaaatgcaccagttgaagagcctgttctggtaccacctgttactgaagttgtttcacctcccaagaccgaggtggccgatactggtgacttactgggcttaaatgatccaaatcctgctgtatcagctatagaggaaagcaatgctcttgccttggctattgttccaacagatggggcttccacaactggtaacactgcatttcaagataaggggtttgatcctacaggatgggaactcgcccttgttactgcacctagcaacacgacttcatctgcgtctgtcggtcaattggtgattgatttctcgatttgggccgattggagcaatcgttggctattctatcggcatgaataattgatgagacaaactcaatgtcaaacatatttctttgagttttcttcattgatagagtcaaaggcataaagataggacgacaactgacagcacacccctgactaagcagtggagaggtaaagcatcacagtagtctggaggaaaccgacaacacaccggtgaccaagcagtggagaggaggagcatcacagtagtctcgcattgcttatggattgtggggaatggaaccactctgttcaacagcaattctgtttggcaaaatattgtcaaggacacaagggatagaggttgttttttaaatgccactgatgagaaggagttgttgaatgcaattttcaagcttgctgttgagtatcctcacgcggacaatttagctggcgaggagacaaggcagcgattgagtaccaggatgagtctattcaatgtcgctgaggcaacaattacaagatcctagaagaaaacccgtggcagctctacactacaataagggtgataaatatgtctcgcccaatggaagacatgatcaaggtagcaagatgttgaccccatgggtccttttggtggaataatgatagagtgcggcaccaatcaacctattgagaaagtgcttgcagctgaagatgcagcgcgaggatgctgcagcattcgaacagtgccaacgagctgctcttgcgccggaagctggaggagcagcagcaggctgccgaacttcagcacgccattgagctccagagccgccgcctcatggatctccagctgctcggcctcaaggctcgcgcagctgcgacagcagcagcggcatcggcactgccaacaccagttgccaatgcctttgcgtccaaccatcctttgagcaccatggcagtcgagtcgccactagagtccggagagcagctcaagctgagcagtgggtttgctctggaggggaagctcaacggtggcgacaaggaagaatctgcttgcgaggcgagccctgacgccgctgatagcgaccaaaggtggattaaacaacccatttcatcattcttcttccttgttagttatgattcccacgcttgcctttcatgaatcatgatcctatatgtatattgatattaatcagttctagaaagttcccccccc

SEQ ID NO: 30330 - DNA, 869 bp, Zea mays
  Clone ID: UC-ZMFLB73010B10_FLI
cagagaataccacggttccgtcgccagggcgtccatccgatccgcgacgatccacaggccacagccatggcgatggcttacaagatggcgacggaggggatggacgtgaaggaggagtgccagcgctggttcatggagatgaagtggaagaaggtgcaccgcttcgtggtgtacaggatcgacgagcggtcgcgcgccgtgctggtggacagggtgggcggccccggggaggggtacgaggagctcgtggccgcgctgccaggtgacgactgccgctacgccgtcttcgacttcgacttcgtcagcgtcgacaactgccagaagagcaagatcttcttcatcgcctggtcaccggcggcgtcgaggatacgggccaagatcctgtacgcgacgtcgaagcagggcctgcggcggctgctggacggggtgcactacgaggtgcaggccaccgacccctccgagatgggcttcgacgtcatcagaggccgcgcgcaatgagagcgtgattggcgttggtgtgatgagctgagcctcccgatgatgccggtctgacgaggcttcgcgtgtgtttgctttccccccggttcttccgagagatggtgcagtgcaggggcgtggtgtgctgatgctgatgggtggagttactggagtagaagctgagggagtggcagcggattaatgaaacgtccatctccgcgacgtagaattccactgaacaatgctccagtgcaccataagctgctgcttcagatttgtttagaaagcaacgcctctctacgtacaattccgaccagagttgttatgggcttgtgaatgatccgttttttttttttttgttcgaagaatatatgtcggagtttgtgtgttct

SEQ ID NO: 30331 - DNA, 511 bp, Zea mays
  Clone ID: UC-ZMFLB73010D08_FLI
cttgcagttgctgtgccagatgagggtgcccagacccttctggttcaggccattgaggcttttggtgggaagtgcaaccctgaggcgctgaaggaggttcccgttgtcctcaaagccctctacgatggagatatcctggacgaggaaaccattgtggactggtacaatgatgctgtcgcagctgggaaggactcccaggttgtcaagaatgccaagccgttcgtcgagtggctccagagtgccgagtctgatgaagagggtgacgacgagtgaagaggccacgctgctctactgctaatggccgaacttgataatattatttcaataagtttgttttgcttgcctggtgtcggtgtttaaaactgttaattgtcgtgtggcgcagcatactcttctgttgctgcatgtgtcgtcgtcagtttggttgtctgttggatgtcacagtttattatggattgctactatacaagtatttgtttcggatgtgttgtataacctttcgggatgtaac

SEQ ID NO: 30332 - DNA, 2757 bp, Zea mays
  Clone ID: UC-ZMFLB73010D09_FLI
gtggtggggtaactttgttacaatcccattatgtggaaaaggtattgagtcgctttggctttagtgactgtgatcctgctccaacaccttatgaccccagtgtgctattaagaaagaatcggagaatagcaagggatcaattgacatactcccagatcattggctcgctcatgtaccttgcaagtgcaacaaggccagacatctcttatgctgtgagtaagctaagtcggtttgtgtcgaaaccaggagatgatcactggcgtgctcttgaaagagtgttgcggtatttgaaaggtactatgacatacggtattcattataccggaaacccaaaagtgctggaaggctattgtgatgccaactggatttctgatgctgatgagctttatgccacaagcggatatgtgtttctgtttggaggtggcgctgtttcctggaagtcttgcaagcagactatcttaacgaagtctacaatggaagcagaactctcagcattagacactgctggggctgaggccgagtggcttcgtgatttcctgttggacttaccggtggttgaaaaaccgataccggctatttccatgaactgtgacaaccaaacggtgattacaaaggttaacagttctaggaataacatgaagtctacaaggcatgttaagaggagattgaaatctgtcagaaagttgaaaaactccggagttataactgtggattatgtccacacatcaaataatctggcagatcaattcactaagggtctatcacgcaatgtgatagaaagtgcatcgagggaaatgggtatgagacccatgtgagatctactctagtggtaacctgctctatgtgatcggagatcccgtgaagtagagtggagaaacaagctaggagtagattgtgaggaaagatcccttctttaactcatttctgatgcacatctttcctatctgtaaggcaggatggtttttaccttaatgtattccaagagtcttataaaggtgagatgttgtcctacagaacatcttctgaggaatacacctatatgagtcagactgctagtcacagtctatgggatttgggtaatccctaaatactcatgaaaggcactgaagtgtgacttatatgcttctaaacagcgggaatacccttctgcagcctagtatcggcaaaggatttgagtgaatcttaattcgcacaaaactgtcaattcaaggcatagtccattgttcagttgtgaataagtgaaactcttattctagatggatgttcaacttaacagtctccatcgaaacactggtatatcaaaggattgtgattctgatacttcatcattacaaaccctagagtttggtggggattgttggatcttttatgggcttggcccatttattgaataaactctatggtgtgtaatggtggagaataccaatagtaccacattggaagtccaagggtcttttgccttgacttatatggtgggatttattccacttaacttgagaagtcaagaaatggacaagggcgtgccacacgcgcgcgcgcgcgccgccgccgccgccgccggccgggccgggccgggcgtggcgtggcgtggcgaggcgaggcgaggcaggcaggcaggcaggcgagcgggcgtggtgtggttgtgttaatttttagcactcactaaccgcgtcagccgagtgaccctgtctcttcgtctgccgagtgaccctgtctcttcgtcagccagccgagtgacccttctccttcagctgccgacttatggcgtgactcggcaagagctggccgactcatgacataactcggctagagctggccgactcttggcgtgactcggcgacctttctccttcagcttccctctgcgagaggttaaatagaggagcacccctgtcactcggtacacacgagaaacactttcagtctcacaatccagcagccgagtgagggtatttccatctcgtgactctgcgcgcacagagaagcgagagggcaggtgcctccgaagccggtgccgttcgagaccttgcacgagggatcggcaattaggtttttggggagcgtctacgcgactgcccaaagtcttcttcctgctgacatgacaagtgaagttggacaaggatctagatcctcggagcgcatggcaggtgttaagtgcctccgcgaaggtggtgtcaggttctccgtcaacggtcggcacttcttcttcacagtcctaatcagcaacgttggtggcgcgggtgatgttaggtctgtgaagatcaaaggaacggagctaggatggctccctatgggccgcaactggggccaggtgtggcacatcaactgtgacatgaggggacagcctctatcgtttgagctcagctcaagcgatagcaagacgctgaccagtttcaacgtcgtgcccaaggattgggagttcggcaagacatacacggggaagcagtttcttctgtagagaatggagtgccgcaagatcagcttacagttcctcatttttcttctgatcctacgagttgggctgtggtgtatgtatattcctctgcagaagaagcaatatcgttattaggagaaaatcacttagtgcagggctcagatagttactatggctcataacgccttttcatgtacccttcatagttgtctaaagaggcttgatgtatcattcaaaataggaggccggattcgggtatgtccggtgtattacaatatattttttttcctggcaagcaatgataaaatgtctctccatttctgt

SEQ ID NO: 30333 - DNA, 484 bp, Zea mays
  Clone ID: UC-ZMFLB73010F05_FLI
gctggaagctatgataaacagaatcccatcgagtgccttgagcgtcatcttaaaatggtagcattagatggatatgacggcatgggaccacatgtcaagtttgcccaattctttgttcgaaatgcccagttgctagagttaatgaagttcagaatctttagaaactaccactgtgaacctgggaaaaccaaggcatggattgaggatcagcaaaggcaactgcaagtcaggagcatgacttcccgacctgtgaagtttaagtttgtacatgattctagatataatcaggatgtttactgtggtgaggatatcagtgacctgtcagagcacatccacgatgacccatttgatcaatggtttgaatcagagaaggaagccccccggcatgctgaaggaaaagaagatgctatagtttggaactccagccaaaggcttgattcatttgatcaaagctgaataagaacctcgtcctgaacttttattt

SEQ ID NO: 30334 - DNA, 1173 bp, Zea mays
  Clone ID: UC-ZMFLB73010G09_FLI
cttcatttccgtaaagctgagtttgatcctgatgattgttttactgttttgctcaaagccatgtgagaaagtttgcccagctgatgcaatatcactaaagcattccatggttgatggagagcgcacactatctgatcccttacgtggtaaatatgagggtggtgtaattactgagcggtgctatggatgtggtcggtgcttgccagtttgcccgtatgacagaataagagctgtgtcctatgttcgagaccctactatgactgctgaattattgaaaagagatgatgttgatgcaatagagatacataccactggaaaaggaactgatatgttcaataccctctgggacaacttgagtgggtccatcaataatgtgaagctggttgcagttagtcttcctgatataggtgaatcaactgttgacctcatgaacacaatatacacaataatggagccccattttaaagggtataatctttggcagttagatggccgacctatgagtggtgacattggccgaggtgcaacaagggagacagtttcttttgccgctcatgtggcttcaatgtcagaaagacctcctgggttctatcagttggctggtggcaccaactcatacactgttgattacttaaagaaagctggtcttttccaatcatcaaattggaattcagggaccgcaacctctgaaatggccagttctcaccaagctttaataggagggattgcttatggtggctatgctcgcaagatcgttggacgggttttgcgcaaaataccagaacagtttggccgtgtgcacatcgaggatcatcctgatcatctactggaggctctacaagaagccatgtcattagtaggacctgtgaagggttatatacccagtcattccaagcctttcatgaaacaagtagatagacaataggaagtaggaaaagcgcaggatatacccttcaacccagttttgggcgaagataaggcgcatcgtactttagctgtgacagtgaggagttcaatgtggtcattgggccaggaatctagtggttgctgtcggtcgctcgttctagatggattatgggctatggaacctggagtgccgtggtgctgcaaacatctcatgtttcattctgaaatctttttagatgtataatacgtagtagttgaattttctgt

SEQ ID NO: 30335 - DNA, 561 bp, Zea mays
  Clone ID: UC-ZMFLB73010G11_FLI
ctcaaattgatgggtggcgaggtccaatacatcagagagtcagagcggagtttcttcctcatcgtcctcgagcagccccaacctcgtccagcagctggtagagaaatcgtctgatatgttaagatccgtgctgaccccacctaactttctcggccgattacataacttagccccctgataagagggtgcctaatttacgagaagcctggaaacaaatcaaagctgccatggcaattcaatgactgaagtgttgttgatgaggctgttttcagtgcaccgctatccatggccatgctgtggtttcaagaccagagttggcggatagttacgtacacaggcggcaaatgtgtctcttagccgctgtttaagtgcaccgctgtaagtttgggtgtccatgtccatgctgtggtttcaagatcagagtccatggcggatagttatgtacacaagcgacaaacgtggttcttagcttaggttcatgaccagttccacgtagtacatatagcttatatgtatatatacaatctattttttactatgcataaggagttgtttcagctt

SEQ ID NO: 30336 - DNA, 552 bp, Zea mays
  Clone ID: UC-ZMFLB73011A02_FLI
aggaggtcgacgagcagatgatcaacgtgcagaacaagaactcgtcctacttcgtggagtggatccccaacaacgtgaagtccagcgtgtgtgacatcccgccgaggggcctgtccatggcgtccaccttcgtcggcaactcaacttccatccaggagatgttccggagggtgagcgagcagttcactgccatgttcaggaggaaggctttcttgcactggtacacgggcgagggcatggacgagatggagttcaccgaggccgagagcaatatgaatgacctcgtgtcggagtaccagcagtaccaggatgcgactgctgatgacgatgaggaggccgagtatgaggacgaggaggagccagctgatggcatgtgaggggaggctgttaaatgtgaagcctggtgatgtcccctttcgtgttgtcgccatgttatactagtacactagcataccaccctcgtggcccattccgtcgatcgtggctgttgatgcttgtgtttccttgttctatagaaccttgcttttggtacggagctgcaatgtggattcg

SEQ ID NO: 30337 - DNA, 1251 bp, Zea mays
  Clone ID: UC-ZMFLB73011A08_FLI
tatatgtatgtgggaatacgacaacaaaggctggcctaactgttgctgtggttaaagattctatgacaaatgattatgcatttgaggctggtgccatggtccttgctgatcgtggaatatgctgtattgatgagtttgataaaatgtttacagagcatcaggctttacttgaagccatggagcagcaatgtgtttctattgcaaaggctggtcttgtagcaagtttgtcagctcgaacttcagtgttggcagctgcaaatcctattggtggccattatgaccgagcaaaaacagtgaacgagaatctaaaaatgagtgctgccctcctttctcgatttgacttggtgtttattctacttgacaagccagatgagtcactagataaaagagtgtcagaccatataatagctctccataccaatgatgttgataatttcagacccaacaagaggaccagaacagggtcacattttgatggtgatccggggcttggagttggtggaaattcagtagcttcaaggctgaggctacacccagagaaagacaaggacttcactccattatctgggcaacttcttcgcaaatatatatcttattcaagagaacatgtcttccccagaatgtcaaaggcagcagctgcaattttgaaagaattttatttgaagctgagaaaccgcagtgcttctgctgatggtacacccatcacagccaggcagttagaaagcctagtcagattagccgaagctcgtgctcgcgtggatctaagagatgaagtgactgaagaagatgctcaggatgttgtcgatatcatgaaagaatctctgtatgacaaatatgttgatgaacatggttttgttgattttactcggagcggtggaatgagccaaccgaagcaggcaaagaagtttctgaatgcattaaacaaggaatctgagttgcagcaaaaggactgcttctcgagaactgaactttacaccatagctgataagatcagcttgcaagttccagacttggacactcttgtagaaaagatgaacattgccggttaccttattcaaaaaagatcagggatgtatcagctggtgactgcgccatattaacaatgcagccaacgaggtcaagatggagagttttcttgaatgaaactagaatttgcacctgctttgtctgtactagtgcctgctctagatctccagacactctggaaggccttaatccatttcaacataattgacatgtacctttcagctc

SEQ ID NO: 30338 - DNA, 654 bp, Zea mays
  Clone ID: UC-ZMFLB73011B02_FLI
aggcgactctttagcctgataaacaacatgcccacgatatttgaggtagtgacaggagcagccaagaagcaggcgaaggagaagacacctaatagtagcagcaagagcaacaggcctagttcaaaagtgcagtcaagagcagagtctcgttcaaaggctaaggtcccccaagacgaagaagagagcggtgatgacgatgaggatgaggaggcagacgagcacaacaataccttgtgtggaacttgcggaactaacgacagcaaggaccagttctggatctgttgtgataactgcgagaagtggtaccatgggaagtgtgtcaagatcacgccagctcgagctgagcatatcaagcagtacaagtgcccagactgcaccaacaagcgggccagggcatgagcggcaaacatcggcatcgggcgacctttgataggaaggaagaaaccacctcctggcttcaagatccctagatatggcgtaggtccctagtttacgaagtctgcattttcatgtgttcattaatatatctgctgattagctgttcgacctagcagtgtctaaaacgtgccgtgtgtcttctgtgctgagtgttgacatggggcctcctccctccagcctgtaaacgctgtcactgaaggtacctctcaactgacc

SEQ ID NO: 30339 - DNA, 1846 bp, Zea mays
  Clone ID: UC-ZMFLB73011C04_FLI
atatgaacctaattggctgttaaatatgcatagcagtttgtataataatcgatttcctcaacatattgtagtttcatggttcttgttctcactacttcctccattgtatttatagcccattgctgaagatgggatgcaggaggcctctatcaagtaggtcaattacctcattaacagggacacctcttgttgccccaccacttattgatatgattagcaatgacccaattttttggtaatatatgaacatgattggttgttaaatatgcagagcagtttgtataataatcaactgcctcagcatattgtaatttcttggttcttgttctcactacttcattgtatttatagctcattgctgaagcatgggatgcaggaggcctctatcaagtaggtcaatttcctcactagaatgtttggttagagtggaatgtaaaggtctggacactctatgaattcgatgatctcgagagcatcattgataggacactaaagcgcgattttgacaccgaggaagcactctggttgcttaagataggtcttgtgtgcatcccggatagccctaagatcaagccctccatgtcaatggttgccaagatgctgcaaggtgagtgtgctgtgagtgacaggatcatgaggcctggcctgatcacagacgtcatggacctgaaagtcaggatggtagagccgatttagttcagcttgacatcatgctcgagcactgccgcaccggaccttgttggggatttcctcgattaaaatataagctccttgatatggttctgtaacatagttctgcaatgctcctttatttagttctttactttttttgttaagatatgaggtgtagcgatacaatatgtctactaacagcgtttgtgttcttgatagttcatttaggattgaatgaagttactggtatgaccttgtcgagactgaagtaaggagggatagagctaaaaactctcttggcacaactataaagttcaagctatatgggcgtgtttggatggcagcctcccatgcaactgcctggcaggcaaatgatcctagccacaccacaggcataggaaatcgaacggtcggcattgtttcctgggccagctgataaaatccattgaagtgcaagaggccgataaacttaggcgtatagtgctggatgctccatccactggacatacacttaagcttctgtcagtttctgattggattgaaatgttccttactttgagcattaagacagttccaccacattctggcgccgccttcgtctgatcctggaggcaattggagccgctgcaagtcggatcctggtggatgcagcgcaacacagatcgcaaccctccaaggactgagaagtggaatgttgacatctctgagacagtctgaaagcaaaccgaaggcaggggtgttcatcaactcctgcttcgcgcattgctagagtgagctacaggacacatggttcgcaccaaattctccatccatatataacaagaaaattgcagaggtggtaggtgattggtactttgaaagaggagctgacgtggagattgactgcgcctatccctgtgattcacagtcttgtcgcaaccttataccaattgataaggaactgaggatgtattaggagttcggcagacgattatactcaattatcatcataataaaaaacactcttctaattgttgatgatgttatgttacttgcatcagatagcaaaccaccctattgtacaatctgttggtggaaacatgtttgtgttgtgtgttccaggttgtctgtttcttggtagccttttttggctgaattggtgatatacacaaaatctatttacttgttagactat

SEQ ID NO: 30340 - DNA, 780 bp, Zea mays
  Clone ID: UC-ZMFLB73011C07_FLI
atcatcagtcagtgtattcagccgggaccagaattcaggccagcaatgtctcaaatcgtccaagacctagctaggattgtaggtgctagtggtgcggtatcagagtgacagataaagggggaacagtaaacatctagcttgactgtatgcacttgtggagacgccagaacgtttgtttcctttatctaaaaaaaaggtaaaacatctagcctcagtcgtgtggccagtgaagattcatacatcctcagcgcagtgccaggggcactctcagtatttatgttggacgatattgcggctagtgtacatgccattttggagccccatttgcttctggaaaggtgtagtggtactgtggtagtatggcacaaccagtgagatatggcttctcattgttgctagcagatattcctgagctcctctagacatgataatttcacctgcaggcagtgtatctcttgtaactaattccaattttttattactttattattacattatagctagttatgtcaaatatggtgcttttagcttgtcttgagacctatgtttctcctgggaaaagaactggcttgctgattctttgcagaggcaaagcaacctttttctgacctgtacatgaagattctcctccttgaagcgaaagcacctctgctaggtatgcgtggtgtgcttggttcctgacttttcttcgtgtggtttcttcaagatgtagaataagttatgacagtgttcaactatgctgattggggattagataaacttttgtattgatccgttctt

SEQ ID NO: 30341 - DNA, 1299 bp, Zea mays
  Clone ID: UC-ZMFLB73011D03_FLI
ggccatggcacgagatggcctgctaccatcattcttctctgatgtccataagacgacacaagttccagtcaaaagcacagtagtgactggcatctgtgcagctgctcttgctttcttcatggatgtctctcaactggctggaatggttagtgtaggcacgctactcgcgttcactatagttgctgtgtccatcttgattcttagatacgttcctccagatgaggtacccctcccatcttccctgcaagcatcattccgcttgagccaagaaaatgacgaggaaaagctgaggggtacccttggagatgatgatcatgagcaaggctcagctgaaataagtgatgttgtagtagaaccaatcactgaccccctgatcgagaagcagctatacgcaagcaatttgagtgaggcaaaacggcgtaagaccgcggcatgcagcatcacatctgtttgcataggggttctgatcctcacgacgtcagcctcggcaacattcttgcccttcccggtgagatgctccgtttgtgttttgggtggcatgctcctcctagctggtctgggcatgctctgctggattgaccaagatgatgggaggcactcctttggccactccggaggattcatctgtccgtttgttcccttgctgccggtaatgtgtatcctcataaatacatacttgttaataaatcttggtggcggcacgtggatgcgagtgggggtgtggctagtgatgggggtgttcgtctacattttctatggccgcacccacagctcgttgacggatgtcgtgtatgtccctgtggccgaggcgaatgagatatacgggtcatcctcttcgttagggtttgtggcgtaaagagagatggaaggagatgtttgttgaagcctatcttgagccagtcatggtacttctcacaaaaacctcaaagatcctgactggagcaggtacctgcttgagctattgtgttgcaggcatgggtttgaagaattcaatttgtacgtcatatttttaaaatgtgtaaattgtaacgcacggctaagcttgtgtgtctctgttggaggaatgtaaatattagtatattgcatagaactatatataggtggtgccaatatacaggtgtttaaaaaaaagggggggggtcattctaggaatctgtatgttttactacgaacttgttctaaattcctaggaattcaaacaggcatgtctgaggcgtattatgtggttaaggcctcaaaggtccaaacacattttatttcatgttgaaatgaagattacacgagcagaaatgctcacgg

SEQ ID NO: 30342 - DNA, 1165 bp, Zea mays
  Clone ID: UC-ZMFLB73011D06_FLI
gcaaacgtaaagcagatattttattaaagaatatatatatttggcatgccgcgacgacaaggcagtgcagtgcagcgcagcgcaggccgtggcgccagatgatgacagcttacaagatcacagacacacaccccaacagttgatttatacatgcaaataagcaagagaacatgggaaagcagaatggttggtattcatgcacgcttcactggcgacaaaacacaacaacaaaaaacggaacttccacatcgtcgacgactgtccatggacgcttctctctggcaaggaatctgagccatagggatccaatgtaaccaaatagagaagcaaatttgtcggcaagaataaacatcatgcagtaagggggccctctgcattgctacgcccattgagctgctctgggtggatcttcttccccaacatcttcctcatgacccgacttaattttcttgtcgctttcagtggttttggtgttggcttccttggtttcttttgatgcatcttttccatgcatgatgcatgctttgaagtggatgccacagcaacgtcaatgatatcctggcaactatactcccttggagaacttgatgagaatacttctgctgcaaataaatcagcaagtgtagttcttactttctccaccttttctaacatcagaagtggtcgttcctggatattagcacctcccccatcttccacctcacgtatcaggatttcttctgctacaaagcatgtaaagttgtcttctttcattgacaatgaatgcatcttagcaggctcaacaataggccatactggttcacatggctctgtttccaatgcaacatcttctttcacctgatcattcctgggttcctcatcatctctctcttccacaattgctttctcatcatccatgataaagagatcatcttcttcaatgcaagccacagggcaaagtgagtccacgtgatggccaagtgtgccaattgcaagtataccattaagaagcacatcatggagcagaagggcttcagtatctttctcaaccacactatgaggcacagagtccttgtcctccatggctttgctaccatggatgctgcagtactcagtattagaatgcatcctccgattcaaccaatgaaacacctttaggcccatgtctctaggaccaatctgaaat

SEQ ID NO: 30343 - DNA, 1741 bp, Zea mays
  Clone ID: UC-ZMFLB73011E09_FLI
cggctcactaccgtcctgctccacgctcctcggttcccgtgctcgtgtcatcgaccgccggggcccactcaccagtctcccaacacgcagcgagcggcagctcctcctcgtctctcaaagtcgagccgccactcgattaagcgattccaaggcggagcggtgaggtggctatggagtacaggagggtgaaggatcaggagatttatgatgatttatctcagaaggatgtggaaagcctgagtgggaggacactatctagtgccaatagaggcgcaaaagccaactctagttggaagctaaagtctgttgttactcttgcattgacattgctaacaagttctcaggcaatattaattgtgtggtcaaaaagagctggaaaatatgaatatagtgtcacaacagctaatttttcggtggaggctttaaaatgccttctatcactagctgctctttttaggacgtggaactgccatggtgtcactgatgataatagattaaccacatcttttgatgaagttggtgtatatccgattcctgctgttctttacatggtaaagaacttattgcagtactatatctttgtctacgtggatgcaccagcttatcaaatcttgaagaacctaaatatcatcagcacaggtgttttgtaccgcatcattttgaagaaaaagctaagtgaaattcagtgggcagcatttgttcttctatgtgctggttgcacaacagctcaacttaatccttcgtctgaccatgtgcttcaaactcctattcaaggttggatgatggcaattgtgatggctcttttgagtggttttgctggggtgtatacagaagtacgtcttgttactctttgtttatgttctcttatatacatttatctgtcaagtgaattcattgggggtgtaagacagttggaatgtttttatttatctttgaacactgcaggctatcattaaaaaacggccatcaagaaacatcaacgtgcagaacttttggctatacatatttggggtgatcttcaatctagttgcaatttgtgttcaggattatgatgcagtcatgaataaaggctttttccatgggtattcattcatcacagttttgatgattctgaaccacgcactgagtggaattgctgtttcaatggtgatgaaatatgctgataacatagtcaaggtctattcaacttcagttgcaatgcttctgacagcagttgtatctgtcttcttgttcaacttccatttatccctcgcattcttccttggatccacagttgtttccgtctcagtgtacctgcactcaattggaaaacttcaaccacagaaataaggtttgtttagtcactgattgctgactgctcctcgtctgttagtaatcactggataacacaggattggtgaagatggaatatgggattcattatcggtgtttggtgctttgaggctataagaaaagcttcagtggagatgagatttgattgcatagttgtgaaagttagtaggtggtcaaagtaagaaccagaaatgtatttttggaggggttctagctattatccggtctagtttttgttctattctatcaagtcgagttcgttgatcgctaaccgcatccgtgcctagtttttgatatatcaaacgcacatttattgtaatgctagtattttgaaatactaggtagtacccaattgttgtatggagctagttgtcttttcattctaatgtatagaattaccattcttttt

SEQ ID NO: 30344 - DNA, 2279 bp, Zea mays
  Clone ID: UC-ZMFLB73011E10_FLI
gcaccgcagagccgcagccaagcaagctgcgcccctggacttggcctcaccggtgaagcggagcttgaggataggcggtgctcgggagataccaagcggtcggccgcaggcgccacgtcggcggagatgacggacggtcaccacttcaacaacatcctcctcggagggcgcggcggcacaaaccctggtcagtttaaagtgcattctggtggacttgcatggaagagacaaggtggaggaaagaccattgagatcgacaaagctgatgtaactgcagttacttggatgaaagtccccagagcatatcagcttggagtcaggattaaggctggcctgttctacagatttattggcttccgtgaacaggatgtaagcaacttgaccaacttcatacaaaagaatatgggtgtcacaccagatgaaaaacagctttctgttagtggccagaattggggagggattgatatagatggaaacatgctaacctttatggttggttcaaagcaagcatttgaggtgtccctaccagatgttgcacaaacccagatgcaaggaaaaacagatgttctcttagagcttcatgttgatgatactactggagccaatgagaaagactccctcatggatttgagttttcatgtgcctacttcgaatactcagtttgttggggatgagagtcgccctccggctcatattttatgggagaccatattgaaatttgctgatgttggttcttctgaagaaccagttgtcacatttgaaggaattgcgatccttacaccaagaggacgttatagtgttgaacttcatctgtcatttctgcgactccaaggacaagctaacgattttaaaatccaatacagcagtattgttcgcctctttcttttgccgaagtcaaacaatcctcatacatttgttgttatcactcttgatccaccaatccgtaaaggacaaacattgtatcctcacattgttattcagtttgagacagaggcagtagtggaaagagatctggcattgagtaaagaactgttggttgaaaaatacaaggacaggcttgaggaatcttacaagggtctaatacatgaggtatttaccaaagtccttcgtggtctatctggtgctaaagtcacaaggccaggttctttcagaagttgccaagatggatatgcagttaaatcatctctcaaagctgaagatggactgttgtatccactggaaaagggtttcttcttcctgccaaagccacctacactcattcttcatgaggagattgagtttgttgagtttgaacgtcatggtgctgggggtgccagtatatcatctcactattttgacctccttgtcaaactgaaaaatgaccaagagcatctcttcagaaacattcaaaggaatgaataccacaacctcttcaatttcatcaatggaaagaacattaaaataatgaaccttggaggagatggtcaaggtgcaagtggtgtagttacagatgttctacgagacactgatgatgatgctgttgatccacatctagagcgtattaagaatcaggccggggatgaggaaagcgatgaagaggatgaagatttcgttgcagacaaggatgatagtggatctcctactgatgactcaggtgatgaggaatcagatgctagtgatagtggtggtgaaaaggagaaatcatccaagaaggaagcaagcagttcaaagccagttcagaaaagaaagcataagggcagggatgacgaaggacaagagaagaaaaagccaaagaagaaaaaagatccgaatgctccgaaacgagccatgaccccgttcatgtatttctcaatggctgagcgaggaaacatgaagagcagcaacccagatttgcctacgactgagatcgcaaagaagcttggggagatgtggcaaaagatgtcaggcgaagagaaacagccttacatccagcaggcccaggtcgacaagaaacgttatgaaaaagaatccgctgtctatcgcggtgaagctacagtcgatgtggattctgggaacgagtctgactagagatccaagctcttgggctggcatggtggcacgggatgaaagtctagtgccatgtgtgctattgttatgtcagcaaccgttgcctccaacattgctgacagtaaagagagtttctctcgcagcttacctctgcagggcaaaagaatgtacgagtgtagtctagtgattttgtgtaaaacaaccaacatacgtggttttctgagagatggtaagacgtcagtttaactgttgtc

SEQ ID NO: 30345 - DNA, 294 bp, Zea mays
  Clone ID: UC-ZMFLB73011F04_FLI
caccttccccaaacctaaaacattctgcttgttgagatgtcatggtcggtcgaagatgacagttacgtgctgatgagcttggacgatgcttatcagtaacttatcactctagctgtgtgccagaggatgacggttccaacctgccggtcgctgagaattctggtttgcaaagagttgtctcctatgtctttgcttgtacaaagaagtgaaagaagcaacaccctttcccttagaatttagggtccttctgtacagatcaaagtttctccaacactataacataaagaatttgag

SEQ ID NO: 30346 - DNA, 1683 bp, Zea mays
  Clone ID: UC-ZMFLB73011F05_FLI
tcccctcctgcacgcaacctcatctcgtcctccagatccaggatggccgtcctccttgagaccttgcctccccgagtgctctcggtgagctactttgtttcgatttatcaggaaatccgtttgcttcatgttgtgcaggctcatatctgattgctggattcggcaaacccgcgttggatcctgtatcggttagtccttgcctgcaaggttcttgttgttttgttttggtggtcgagcatcgcatgttctgcttctggatccagatctggagaaatcgcgaagtcgtcgtcgttcggttcggagcggatctgaggcgacgatagatggaggcggcgggatctctcggtctgcagtcctgctccacctcgatggatgatgtctctgcgctgataattattggatcaatttcgataattattagtagatctatgagatatgccgcctggaagaggcgaggtaagctgcagcatgtaaaaaagagaaaaaagatgtgacatcctagaggaggaggcctttgccatgatgggtgcgctcgcatggcaggccaggcaataataaaaagatgattattgcgtgccgggggaggagatcgcacgggggttgatgtttttggccccgggttctcctccctcatcttgttccgtgttcctgtatgcgttgcttccgctcctgttggtccgctacgcacgccggatttttgcatcgagcacggagatctacaacaaaaacatggagctacgacgcgattcccaaggtacaatcgtaattatgttcaaacaatttttaagtcgtcctgcgctccttctattacgagcaacgttttatattctgtgcttgcataataaatcgaagaaatcctgacaccaatcgaactgaagatcctgaaacgcacgttaataccgttgacgtccgcttcacccagctcgattttcagtcttgtaataataattgagaactccaatgaactgagagttactaatcgctccatgagtctgaagcgtgcaaaaatttaggtcgcagctacacaaatttacacgctgttctatattctatattctatattatatttaggtcgcagctacccgtgaatctcctattttgaaaaggtcactgcttttttatttcattctatattctatattatatttttgtaatattcagtctcgtttaattgctttcagacttaatgttagataattgtttacattttctacaattcagtctggactaattgctttgggactaatgttggagatatccatatgtatctgcgtctaagcatttttcatttgtatttatcatgttttgtcaatagggatacttgtttcttgtaagtctgttagcatgtttgaaccatagcaattggcggacgtgtgtaaaactgcagtatgatggattccactattcatcaaccgaaattatggcgcgcttcaatcgtggctacgctgatggggaactgatccgttatggtgtgcttggatcgtggctgtgtggagatgtgtggaactcattggttataatggtgatgctgatggaactgattttgctcccgttggacggcctgattggttactttgccctgttgactgtttgagaacgtaccgcccaggtttacttatacttactgctttttgacggtactgtacatacagttcgacaatttatttattggcagttcaattc

SEQ ID NO: 30347 - DNA, 1715 bp, Zea mays
  Clone ID: UC-ZMFLB73011F06_FLI
gacaaaagccacaggttcagcagaacgaaggtgctggacctgaactgtccagaactgagaatgtggattatggtgctgctgctcctggtgaagatggcatgacaagttcaccttcattggttaaaacacacgtgagctccgaagtaatagttgagagaatgggcagcctggttcttggtgagaatacaaggacgcctagaaagaagaaaactaaaactccatcaaagatgttagagcaagaggaagataacagtatgctgtcatcttgcatatctgattccattgccaagcagcttgaggatgtagttttggaagagagaaaaggcagtcagaaaaataaaatgagtaaagcatcatcaagagcacagaagggtaagtctacaaaaaggcctgcttcgacaaacatggaggaaaatgctatgaatcagtataactacttgtcaagttctgtattggtagacaatcacccctcatcatctcaatcttcagaaaaagattcaacacaggcttactctgaacaactgtgtgaagaattcagtgaagcagtgaacattggaaatgatgagacaagtgatgaaaagatgagacctgcatggaagtcttcgttgaaagttgccgggtctaagagcagtaggcagtctgttacatgggcagatgagaatggaagtgtcctagaaacaagcaaagcatatgaaagcccttcaagtagtataaaacgacctgaggaaggcatagacaattcactaaggcgtgcatctgctgaagcgtgtgctgcagcacttgttgaggcagcagaagctatttcttcaggcacagcagaagcagaagatgcagtttcaaatgctggaatcatcattctgcctgacatgcttaaccagcaagaacatgacaatggcaaaaacagtggcggagatgatgaccctgagatagatagggatgttatcaagtggcctaagaaacctgtacttctggatacagacttgtttgaagttgatgattcttggcatgacatgcctccagaaggttttagtctaactctgtctgctttcgggacgatgtgggccgcgctattcggatggatatccagttcgtctttggcctatgtgtatgggcttgaaaggggttcagtggaggagttgttgattgccaatgggagggaatgtcctgagaagacagttctgaaggatgggctctcattggagattagaagagctctagattcttgcgtttgtaacgccgtgccagtactcatatcaaacttgaggttgcagataccggtttcaaaactggagattactctgggctacttgattgacacaatgtcgtttgttgacgccctgccttctctgcgatcgaggcagtggcaggctgtggttctggtaatgcttgacgcgctctctgtgcaccagcttcccgcccttgctccagtcttttcgaattcgaagcttgtgcaaaagatgttgaacgctgctcaggttagcagagaggagtatgactccatggtggacctgtttctaccgtttggaagatccgtccaggcgatcacgcccatgtaaacgagaagccgtgtgaatctgcattccggaagctgcgtgaatcgtagggtctgatctgatatttagttttacacaagtcgctgtctagaacgagccatgtatgtatgattgattggttatctattgagcaagatgcgctctggcaatttgtggaagctg

SEQ ID NO: 30348 - DNA, 2510 bp, Zea mays
  Clone ID: UC-ZMFLB73011F10_FLI
gaatcatggtgaggcttctccgggtttcctctctttctctatctcttcctacatcgccactcgccagtgcggcggtgacctctagaatccaaagcaagctgtagtgagcagccccttacatactctctgcggactgcggtccgcaccgcacgccatctcagcaagacgagagctccaccgcgctgttcacttcttctgacgaaggatggcgggaaaagaggatgagaatgagaagccatcgttggtggcagccggcggcaagcaagatcggacagcggcgaccacggaatcccttccgcaaaggacgaatcttgagtggggaaaggcagcgtgtagcgaggatgacatccagaagtgtgtagctgccggtgccttccatcccggtgagctggtcgaatggcgagctcccgtcaaggatgagactccgacgctatccaccatggaggatcagtttgttatcctgtctctgacgcacataatttgcggtctgagggtcgatgcgagcgatttcctggtcagtgtgctcgagtactacagacttgagtggtctcacctgacgcccaactctattacggcgctgagcatcttcgcccacctttgtgaggcctacgtggaggcgcctccaactgtggaggtcttcacgcacttctacagcctctatcacaataggaaaggcgaaacgacaacactgggcgccgtctacttccggctcagggacaggatgaagaagaattatccattgtactacttgaggtcctcgcagttcatgtgggtttctctgtggttctatgccaaggtaccaaagagctgtcgcttgaccttcaggggtgatatactaaaggaggaaaacaattggaattggaaagatcttttgcctctttcctgtgagcagatgaagcaggtcggccaaatcatgaagctaagtaaccaaggcttgactggtgcagacatcattcatgattacctcaagcgccggattagccctttgcgccgaaggatgcatttgacatgcaattattctggcctctcagatcctaccagggattcagacaaagatctttctgtggaagacattgagagcaagctgagctaccttctagatcttaagaggatgggtgtgaagcagcctacaggtagactggtcagagcatcaaccaatgaccaagccaatcagcctctagacttgctgaatgtttgctcaactcacgaagctaagaaggaagcacaacctcaagtttgtgcctccctacgaagatacacaaggcaatctgctggtcccaggaaggttgcagtacctccacctcttaaaattgaccctccccccactcaaggtccggccccagaagagattctagatgccacaacaaacatagcgactgcagtttctccaaacctgggcgtagaacaaaaatctatagagcaccctactgtggctgaagagcggaaaatagcagagttagtgaaacctacgttttcagtcattggtgccaaaaggaaggcatctgccccccggtctcgttcaaagagaagagcaaagtattcattactttccgttgttacaaagaccaggatgtcatctttggacactggttctataaaagggacttctagaacaaaagaggcagtgttagcgctgaattcacggtcaataggattggctcgatgccctcctgcctctttagcagaagggacagggaacggtggactgttcatgcttgccaaagttgttgaccatactaaggttgttgaggattccatgtcgaatatactccttaatcaacaagttggagattcttctcgcaaggaggttgatcctgcacaatctatcactgagattgtccaagaccaggaggccattgaggtttcagctgccattccggtgcctaataaggaggaaataaacagtggggtgatatgggagcggatgcagaaagttcagagtgaatacgtgtcactcagtatgacagcctcctctgagcttttagaacaagcaaagaagctggtcatggagaataaacgcctgaaggacgtgcagataatgctgtcgcaacaagtgaaagacctcgaagacggcagaaggctcttaacagaaaggatgaagaaagccgagcaggagacattcaaaataatagaagaaaatatgaagctcaaagatgagaacaaagggcagaagcagatgatcgaggagctgagtaagcagaatgagtcaaccctaggggccttggtccataaatgcactctgttggaccgctacaaagaggagtctgctcagctcattagagagaaggaagagctgcaatcgcgtgtttcgcgtgtcaatgatcttgtcaagctagtctctagtactttgtgccaagagaaagacagcgcttcctaaattttatgtagcatttgtgtgtttgacaagtgcaaatgagatccacagaaggaatgtgattggaagcgaatgcagattactgatgtatagaaacatccttatcaatgattgatgtagtctaaaatctcaactg

SEQ ID NO: 30349 - DNA, 888 bp, Zea mays
  Clone ID: UC-ZMFLB73011G07_FLI
caagaagacaaggccggcgacgagaggacgacagcgtgcaagaagagaaggcccatgttaggcgcaactatagggctcaaggtcaatcagttgtggtcacacttttccatttttacgttcagctaaactgaccccctgtctcatggtgcaactgtgcaaggataggcaacaagtgttcaacaatatgtctgtggatcaattgacctgcatttcagcttttagttgaggatcaaaatctcgtgtcgttcagggccctcggtagagagacattaatgtgtcggcaccgtggatcgtcgcagttgtgggtcactgtaacggcactggtcacaggcaccatctgcctctgttcgtcctcctctattggcctcctcagcacctacagggtccagatggaaaagtttctataatacatatgtaacaaatacatactccttgttcaagagatcgtaagcaagattgtaaacggtatccaacgcagaagcacctaatatggttacagagtattactgatgggcttacctgcagactgcatgctactactcaaggatgttgttgcaaatgagttgtggagaaccgtagatgcaaatggttggagagcatcttctgcaccacacatctattggcctcacataccagctgaatctgagagcaatgggtacttgtgtgtccggtgcaacggcggcttgaccttacaaatcagtgttgtatgactaatataaaactctctctctctaaagtagcatagttcaccatgcaagttttgtgtattcatggcaacatatctgaaagatttaagattacttctaccttgattttgtagatatgaaatgttgttgtcattgcacgaatcattaatgacttgattttgctctctatatgctatcttag

SEQ ID NO: 30350 - DNA, 2342 bp, Zea mays
  Clone ID: UC-ZMFLB73011H01_FLI
gaggggggttgccgtccaaatcgaaccaggctctgaacatccgtaaagcaacccccctctccattccaaacaggccctcctgcctccgttcctgggctagctgtcaggacggctcagctccagctttgcggccctccagctctccccagttcaagttcaatattggcgagcatgcgagtttgccctcttccgtcgtcgtcatcatcatcgtcctcgcgatcccggcgtccctgtttcggcctacgcctcccgtagacaacagttgcgccctgctctccggcaagctatggccaagctgagctgcttccccgctctgctccccggcaagaggaagaagaagacacgcaagatcaccgatgctatcaaggccagcggcaacgagtgccccaaggtgaagccggtcgaagtcgaactcatcgacccgacgcttggtgcaggcgtcgtccaggacgtcgtccccgccgagctctcggtccccgtggaggaccgcaacaataaggaagcggctgatcaactggtgttggtgaaggagagcgatctgtcagatttcgacttcagcttccacgcggccatgaagcccgtccggtccgacagtgacgtggcactggacacctcggccgacgctgcggtggcggacacatcgccgaagctgaagcggtcttgctccaacatcgagactaagcgaccaggctcgcgttccgcgcccgagatgccggcccggtcgcgctcctacggcgatctgggcaacctggtcgccggcctcgccctggacgcgacggcgaccccgcacggcgcgccggaggccagtccggcgtccgtgaagacgtcgcgcactgccgaccgcgtgatgctgaagaagcggtcgtccagccaggtgctgccctcgcgcagccggaagctctggtggcggctcttcctctggagccaccgcaacctgcacatgccgcggtcggcgcgcacggcccaccgatcgttctcgcctggccgccacgacgggtacacctcggacacgttcgaggagggcccggccgccgaccgcaagaacaagacggtcatggtcgacgagtcgccgccagcagcgtctgtgcccaaccagtgggtcgccttctgcgccgagagctccatccacgaccgcgtcagcgcgtgggtcagcagcatcgaaagcgagcctccgttcgatatcgccgaggaggatgacgacaactacgacggagaggacgatgaggagaatggcgagtgtgcggcgtcgcagccgcgccatctcgagctcggggagccatcgtccgggaagggcggaaacagcaaatccaagcgctgcgcaacgacggccgacgaggtcgtccaggccaacaccgtggtgcagtccctgaacgccttctcgtcggtggcgcacatctcagggatgggcctcaaggtggtgccgatgatcgcgcccttctcaaccctccgggccgtcaacctctccagcaacctcatcgttcatatctcccctggatcgctgcccaagggcctccactctcttgatctgtccaggaacaagattgccagcgtcgagggcctccgggagctcacaaagctacgcgtgctcaacctcagctacaacaggatttcgcggattgggcatggtctgtcgaactgcacggccatccgggagctgtacctggcgggcaacaagatcagcgacgtggagggtctgcaccggctgctgaagctggcggtgctggacctgagcttcaacaagattacgacggccaaggcgctggggcagctggtggccaactaccactccctcctggcgctcaacctcgtaggcaacccggtgcaggccaacatcggcgacgacgccctgcgccgggcggtcacgggcctcctcccgagccttgcctacctcaacaagcagcccgtgaagccgcagcgcatcgcgcgggaggtggccacggacagcatcgcgcgcgccgcgctcagcggctcggacagccggagcatccggaagaggacgtcgcggcggctcacgcagagcccccgctcgtcgtcgttgaccagggcccgtggcggcggcggcggcggttcacccacaccaagaaacacctctcgtcgtcgttgaccagaagaaccaactgcgtgattcgcgttgctctttggagacgggagacggtggcgtgactgcgtgcaggcagactcagacgacaccatgattcggcacggcgccagcatgatatgagacaaaccaagtatataaagcaagtatgatgtgagagaattgcgatgcaacacataatgtacatacttgttagggagatattgcttagattaatactacgaccgatgcatctttgtacctg

SEQ ID NO: 30351 - DNA, 960 bp, Zea mays
  Clone ID: UC-ZMFLB73011H03_FLI
cgatcactgattacgcgatcatctcctctccggatacttggcatatcaacagaacattttggttgggcgggccagaacatttgtacactgatatatactaacagccagcgattaatcaatcgatcgcttctgatgcatgcagatactggcactgaagggcagggaggcagcaggggggtcgtcggagctgatcaacctgaacaaggagacggaggcgtcctgcagcaaccgcagcgaggacagctccgagatcaacctcgacatctcgcgcacgccgccggcgtccgagggccccatggaccatccgccgccgccgccgccgcaccacgccgccggcggcggcttgatccctttctacccttccgtcggcggccgacatagtattgccgccggcgtgggtatggaccaactcctgcacgcctccaccccgaagctggagcaacacggtgacggctgcgccgtcgccgtccaggccgcggagaccgccggcagcttcggcaacctcctgtgtggcgtcgacgagacgccgccgttctggccgtgggccgaccaccaccacttccattgatcgatcatcgtccatcacaaacgatggcgatcgacactgtagtgagtagaaatatcggaggaaaggaatttatttggacaattctggcgagtgcatgcagcaagggaggagagaaaaaaaaggtcgtgtactcgtgtgtgatatctggtccatattggcggggtaggcgggtagctgcctgcctagctggtcatgcatggtgggaactgggaaggggttgtaaatggggaataagtggagaggcggtgtaatttaattaggtagattttggtttgagttttgatagtattttttttatctttttgagtcttcgttttttttttctttgcgatcttcttttttctttttggttgttgacacatataaatttgtgaattggcaagcatacaggc

SEQ ID NO: 30352 - DNA, 1405 bp, Zea mays
  Clone ID: UC-ZMFLB73011H07_FLI
gttggtacccagctaacctggaagactcaagtttacatgggttgcaggcttacagggttttcatttccatcgctttgatccttggggacggtttatacaacttcattaaggtgctgatccgcacaattgcgggtttcatatcaatggtgcagcaaaattcaaaaagcatgcttcctgtttcggacaatggcagttccatgtccagtatggaggctgtatcctttgacgatgaacgtcgcattgagaattttctgaaagatcagattcccaagtcagttgcatacgggggctatgttgcagttgctgctatatctattggcacccttcctcagatcttcccgcagctcaagtggtactacattttagtagcctacgtcgtggcacctgtgctggccttctgcaatgcttatggaagtggcctcactgactggtctctcgcctccacctacggcaagctcgctatcttcgtgttcggtgcatgggctggcctctcacacggtggcgtgctcgttgggctcgcagcttgtggtgtcatgatgagcatcgtgtcgaccgcctcagacctgatgcaagacttcaagaccgggtacctgacgctggcgtcaccgaggtctatgttcatcagccaggtgattggcaccggaatggggtgtgtcatcgggccctgcatcttctggctcttctacaaggcgttcggtgacattggcgagagcggcaccgagtacccggcgccctatgccatcgtgtaccgcaacatggccatcctcggcgtggatggcttcggctcgctcccgaaaaactgcctcaccctctgctacattttctttgcggcagcgatcactatcaaccttgtcagggacctgaccccctacaaggtgtcgaggttcatcccgctgccaatggcaatggcgattccgttctacatcgggtcctacttcgccattgacatgtttctgggcagcgcgatcctcttcgtgtgggagcggctgaacaaggcgaaagcggacgcattcggacctgcggtcgcgtcggggctgatctgcggagacggcatctggaccctgccgcagtccattctggccctcgccaaggtgcagccccccatttgcatgaagtttttgtccagatcgaccaatgccaaggtggacagcttcctcggcttgtcatgattttacacagaatggcaagtagacacgccctcatcctgtaattattggtgcaagatgcaatcaccaggctacagctctgtaaaagagaagaggttttgctgtggagtgaccaaagctttgtccgtgtagtctgtgtcaagaggaaaatactcaatggccctctgcctttttttgtgcaattattaactagcgtattcacagttataggtatttttgaaatgtgaaacgttcactac

SEQ ID NO: 30353 - DNA, 1435 bp, Zea mays
  Clone ID: UC-ZMFLB73012D09_FLI
cccgatcgagttccagttctggtacatgtttgcagagcgcgcaattggtcttcttcttcagcttgtctgattcctgttccagcggtccagccactgtttttattttcttcatcttcttcttctttctgtttgattcttcttcttctcagcgatccgtctgtgactgtgtgtcctgttttaattcaggttgtggcgctgagggtgtcgattcactgccaaggatgcaagaagaaggtgaagaaggtgctccagaacatcagcggcgtgtaccgatgcgaaatcgatgcccggagcaacaaggtcgtggcgacggtctcgacggagctcgacccctacatgctggtcgccaagctgcgcaagtccggcaagcaggcggagctgtggccggagcagccggtgcagcagcaggagcagccggcaccagtaccaccagctgagagccaaaggcaggaggagcccaagaacaaccagcctgcggagccgggccgacccagcgaacctgccgaggagcgcggcgccgccgccgacacggccgaggccgccgcggcggagccgagcaacccgctaccttcgccgccggagcccaagccgagcgccggcggaggagaggccccgaatccggcggcccaggacagcaaagaaaacgccagcgccgacgacgtcggcggcggcgacgatacggccgcggcaccggcaccggcgcagcaaggacccagcgaggcgaaggggaaagcgaaatcgaagcagcatacggcggagatggaggagaggcagcccgtggacgccagagtgactgtggagtacgaccaccgaggcgtcggtgggggctacgtgagccgcatgccgccgccggcagtcatgagctacaaccaggtgcgcccgagcgtgagcgcgtcctactacgcccccgccccggctccggcgccggcgccgatgccgatggggaggcccgggccgtcgcagggctacatcgacgagcactacacgccgtcttacagcagcagtagcaacaactactactcctccaaccggtcgccggcgtacgagccgtactactacagcgctccgcagccggcgccgtatagctaccagtaccagtaccagccggcttcttcgtccgaggattactactacagcgcgccgccgcagaggagcgccttctcgccgccgcgggagggctacggcgacatgttcaacgacgagaacgccaattcttgcaccgtcatgtgaagggaggatgcatgcaaacatggaagtagctagtttacttacagttccttattaatcaagcgactctctctatatatatatatatatatttgtgtgtgttagtatattttagaaccagtaattaagtacgagtaaggagatgtattaaaagcactgttcagtcttgatggcgctgaataagttgagagctctgagcttgaatgct

SEQ ID NO: 30354 - DNA, 836 bp, Zea mays
  Clone ID: UC-ZMFLB73012D10_FLI
aaggacactttgcttgatggctacacaaatagtttctggacttgcagtgtgtcaaagcttggctattctggcactgcaataatttcaagagtcaaaccactgtcgatcaagtatgggcttggtatatcagaccatgatactgaagggagggttgtgactgtagagtttgatgacttctacctgttaactgcttatgtaccaaactctggtgatggtctaaaaagattgacttacagggtcacagagtgggatccatcccttggtaactacatgaaagaattagagaaatcgaagcctgtcatactaactggtgatcttaattgtgcgcatcaggagattgatatacatgaccctgctggaaatcgtagaagtgcaggcttcacaaacgaggaaagagaatcatttgggaccaattttttgtccaaagggtttgttgatacgtttcggaaacagcatcctaatgttgttgcctatagttactgggggtacaggcataatgcccggaagacaaacaaaggttggcgcctggattactttcttgtgtccgaatcaatcacagaaaaagtgcatgattcatatattcttccggacatctctgccagtgatcacagtccccttggtctcgtgctgaagctgtaggctgtatcacacaggctatgccaaacattcagtctgaagcctgtgccatatttctcagacagcgatgtttattcctgatggtttctggttcgtgcagatccctggcaggaacaacgacttttgtcagactattagtgaaacaaggctttgtaacgcactgagcagatttgactattagtggacaacttactgttagc

SEQ ID NO: 30355 - DNA, 910 bp, Zea mays
  Clone ID: UC-ZMFLB73012E10_FLI
tgttcttggttctggaacacaatatgctaatggatttgctgtggcggatattgaacgatcatctctaatcctatgcggtaaagcatttgctgattcagctatcgtgaaagatgcacttactgctatgacagccccaatattgtctgcaagaggaggcctccctgttccaggatggattctgaactttggtggttctactgtattattgtttgccccagtggaaatcatgatgtcctgcgtagaaatccacaatgctctattgtccattgactgtggtgcagtcatatcttccaaggggtctactgtgcttttcccaacaaaggcaagcagggagcagaaactgcttaccaaaccaactgcagtaattatcgtatcatctgatagctctggcgccataccatctgtatgtaagctctctcctggccaggctgcctaccatttcttggctggatatcacgatggaaaatttgtcccagcatacaacagagccccctctcctgctgacccacttgcacttgcaagttctttattctcacatttgaaagaagatgatacaccatcgtatctgatcaacgctaagcactctggaaagtacattgacggcaatgggtttatgaaattattaaagctggcactatctcacgatcttcctgacatcaaaactgaaggctctagagttggggaactcaaggggaagtacaggagctttctatccagcaagtttggccaatgtttacccgaggaattctctttttaggagatacaccctgaggttgcaatgaacatgtatatttactggcataggtttacattttggtttgaaaaggtgtcagtattcccattctgtctcagtttcaatgtaatactctattaccttacattgcatctttccgcctcctggtgtttggat

SEQ ID NO: 30356 - DNA, 1110 bp, Zea mays
  Clone ID: UC-ZMFLB73012E11_FLI
gcgccgcctcctctccccagcacccggagctcgcccgaccgccgctcaccatgatcatccccaagaagaaccgcaatgagatctgcaagtacctcttcaagggtatgtggttcttggtccactagactcgcagtagggtaacctgggctgattggttgtttcaccttctaggaggtgacaggtcttcaaattattttcgtattactaggagggagtgctcgtgtattattttgagttcacttttttggtccaatttcagcatctcacaaacttacgatctgatatataggcttgacacagcgagcattgtcaaatatttttgtgctccaaatttatttgccccctaaactatggattccttgttatacattcatctgcgttatgttcatgcgatttctgttagtttgatgtatttgctgctgcagagggcgtgctgtatgccaagaaggactacaacctggcgaagcacccgcagatcgatgtgcccaacctccaggtgatcaagctcatgcagagctttaagtccaaggagtatgttagggagaccttctcctggcagtactactactggtatctcaccaacgatggcattgagcacctacgcaactacctgaacctcccgtctgagatcgtgcctgccacgctcaagaagtctgccaagccacctggccgcccatttggctctggccctcctggtgaccgcccaaggggcccaggtcgttttgacggcgacaggccaaggtttggtgacagggatgggtaccgtggtggtcctcgtggtgctcctggtgactttggtggcgataagagtggagctcctgctgagttccagccatcattcaggaggcctggctttgggcgtggtggcggcagcggcttcggcgcaggcccaacctcttcttccatggagtgaagttgcccttggtttggacatggtgtttcccttcgcatgtggcctttagttttgaaggacagttattatgtactagtaatattactcggatcggccagtgctgacatatgcaaaaaaatgttctgtcgttatacattggttccagtattattgtcttcgcaaaactcttgggttttcaagttactactttttcactg

SEQ ID NO: 30357 - DNA, 1128 bp, Zea mays
  Clone ID: UC-ZMFLB73012F04_FLI
cttcaaacacactccaaactccaagcctcaataatctcgacctctgtaatgaccaagaagctcatctccatctccaccatggccgggaagcaaggttgcaaggagcagtccaatgatcggaggatccaggcttcgatccaaggagacgccaagagcgtggtggtggggttcggcggcaggctggtcacccgtgagcaggagcaggaggacgccatcatcgtcgcggcgctgcggcacgtggtgtccgggtacagcacgccgccgccggaggtcgtcgtcacggtggcgggcggggaggcgtgcgggacctgcggcatcgacgggtgcctcggctgcgacttcttcggggcgccggagctggcgcaggaggcagtgtcctgcggcacagggcaggtggcgacgacggcgtcggtcgggggcggggcagcggcggcggcgctgaggccccggcggcgtaggaacaggaacatgtaccgcggcgtgcggcagcggccgtggggcaagtgggcggcggagatccgcgacccgcggcgcgcggcgcgcgtgtggctgggcacgttcgacaccgcggaggaggccgccagggcctacgactgcgccgcggtcgagttccgcggcccgcgcgcgaagctcaacttcccgggccacgaggcgctgttccagggccacggcgacaccgcggcggcggcggacaccgagacactgacgccgtcgccgggagagtggcagctgggcggcggagcaggagacgagctgtgggaaggtctacaggacctcatgaagcaggacgaggtggaccgctggctcgcgccggttttcggcgccgcgtctagtttttgagctgttgtactgtgcacacacaagcgtggttactgacaggatcacagctagactgaccaccattcttttgctgtctattgaactagttggttcttttgtagcgtatttttttagggaaacatgattctttttttttttgccgtgtgttgattgggatatagagagtttttttcctctcttgatggaagtacttgggaagctatgttgatagactgaacatttttttgtactctggctgctgagattctttgacgaattatacggtgaacaaagcatcgttttttatat

SEQ ID NO: 30358 - DNA, 1947 bp, Zea mays
  Clone ID: UC-ZMFLB73012F10_FLI
cgtccctccccaagcgcgccgtctagggtttcacagccgtgccccgatccattcgagcgccccgcaccgccgccatggagtttgacgaatacgagtacttggagaaggcggtagagcccgctcccccacaggccaatggttccggctccggctccggcgagaaggaccgcggctcgcgccgccgcgagggcggcgaggaccgcatatcgaagcgctctcgctcgggggaggaccgcgaccgggacaggcaccgcagcggccgggagcaccgtgaccgggacaaggatgacgtgaaggaggagaggagccgcgaaagccgcgggaaggacagggacagggaagggagagaacgggagaaggagaggggtgacaggcaccggctgagagagagggaagtggaacgggagcggaggagccggagccgctcggagcggcgccgtgccgaggaagaggagatggttagggagctggagcgggagcgcgagcgcagcgagcgacatcactatcgcgaccgtgatgtcaggcgtaggaaagatgacggggcagagccagaagttgatccagaaagggaccagaggactgtatttgccttccagctatctttgaaggcagacgagagagatgtttatgagttcttctcaagggctgggaaggttcgtgatgttcgtcttatcatggaccggaactcaagacgttctaaaggagttgggtacattgagttttacgacgttatgtctgttccaatggcaattgctctgtctggtcaaccgctgcttggacaagcagtgatggttaaaccatctgaggctgaaaagaacttagttcagtcaaatgcgacatcaggtggtgcggcttcaggtggagcaagaaagttgtatgttggcaatcttcactcaaatattactgaagaccaattgagacaggtatttgaaccatttgggcaagtagagcttgtacagcttcctgtagatccaatgactggattgtgcaaaggttatggttttattcagtttgcacggcttgaagatgcaaaagctgcacagagcttgaatgggcagcttgatatcgctggcagagttattaaggtttcagctgttaccgatcatgtgggaatgcaagctagtggagcaactactggagatttagatgacgatgaaggtggaggcttggcactaaatgcaagttccagagctgctctaatgctcaaattggacaggagtggtactgcgaccagcttaactcgtggtattggtgctgctggtgtggctgtaccagctacttctgttattggggctccaggagctgcttctcttctaccaccaacagttgctgctgttggatcagttcctggggcacctgtgcttcctgttaccactcagaatgtgaccatgtctacacctacagaattcttgttgcttaaaaacatgtttgacccagcattggagacagatcctgattttgacttggatattcgagatgatgtccaagatgagtgttccaagtttggtgcagtgaagcatatttttgttgacaaaaatactgcaggctttgtgtatctgcagttcgatagcgtgactgcagcagcaaaggcccaaaatgcccttcacggaagatggttcgctgggaagatgattacagcgacatttatgtccgctctggagtacagtacgaagttcccaaacttgtgagcatatgccgggaagagttggccagacctgcatagttcgtttggagtattcgcaagtgctgtatcgttggatggtagacgaacaccttattgattgtatgacagggtagttgcagcaccgggcgtcactatcagtacaatgcttgatgtactttatttacggcgtcgcagtgaccaaaccttatttttgtccaccgaatgaaatgccctatcatctccaggcttgttggcatatggttgattttctggacgatcaccat

SEQ ID NO: 30359 - DNA, 1072 bp, Zea mays
  Clone ID: UC-ZMFLB73012G01_FLI
cttcccttcacgcggcaagcggcggccggccttccgccgccatggccaccaccaccgcgcccgtcctcctcgtcttcctcgttgccattgccacgtccgtcgccccctcattccccatcctgacgatggcggcggacgcggacaacggcaccacccacctgagcttcttcatgcacgacatcacgtcgggcgccagcccgaccgcggtgaaggtgatcaaggggcccggcgcggggtccaccccgacggcgccggcgctgggcatgacgttcggcgacaccatggtgatcgacgacccgctgacggaggaggcgtcgcccgcgtccgccgcgctgggccgcatgcagggcttctacatgctggcgtcccagaccggggcggcgcttatggtgtgcgccaacctgctgctcacgtcgggggcccacaacgggagcacgctcgccgtgctgggccgcgacgacaccggccaggacgtccgggagatccccgtcgtcggcggcaccgggacgttccggatggccacgggctacgtgctgtggaagacgccggatgggatcaacggcaccgacgccaccgtccagctggatgtctacgtcaccacggacggcaacggcaccacggacgccggcgacgccgacggcggaggcggatccccgtccgcagggtcagggtcgtcggggtcgtcgggaggctccaagtccacctccggtgccgagagtaggaggaggaggatgaccggcgggtgggtcgtcgccgtagtggttgcggtggttggatccttctgggtttggtgagcaacgacctgttgacgaaggatgggggtgggtgggtggtgtgtgagtggggtggtggtcccacatgctggtgggtgagagtgggtgcatgtgctctgctgcggcatgtcggttgccggcatcattcctatctatctgtattggacttgttctagagcttttgcttttcgcaaaaaaaaagacatgcgggtcattatgttaaagtcagaagagttttctttacaacgacgatctttatgaactgttaaagatatgagacagatatcgagcatcatcgt

SEQ ID NO: 30360 - DNA, 1792 bp, Zea mays
  Clone ID: UC-ZMFLB73012G05_FLI
tcgggatcttcaccgggttcggctccatcggccgccgccgcgcgctgcgccggacatggctacccgcggatcgccagggtctacttcggttggaggaagctactggtctggcattccggttcgtgattggaaaaagcaattcaaagaacaagatggccgctcttaatagagaagttgaagaatatgatgattttgtgcttttagatctcgaagaggagtatagcaggctcccgtacaaaacgttagctttctttaaggctgcctatgcattgtttgattctgatttctatgttaaagcggatgatgacatttacttgcgaccagatagactttccttgcttctggttaaagagcggtcacatccacaaacatacattggatgcatgaagaaggggcctgtttttactgatcctaagttgaaatggtatgagccccaatccttcttactcggatcagaatactttcttcatgcatatgggccaatttatgctttatcagctgacgtggtggctagcttggttgctttgaggaacaacaggtgagttgcagtgaatgttccacccttatcataattcataaacacaaacttacctttttttgcaattattttctacacatgtttcttaattgtacttagcaaatatggttgtttgtctccacttttgtactaccaccaaattagtctttcaaactcatgcactagtttctggggaactgtactggctggtataactggaatacctgtattaatgtttgccaaaaaaaaattcttttgcttggcaaatatacctgaaacatctttggttatattacgtgtgtgtgtgaaatttagaaacaaatcatggtaaaagcattgctctcgcaagattgagaaacaaatcatggtcaaagcattgcgtaataacaatctcttcaaatttatatgaggaattttaactgaaacctggacctgctaatcagtatgatacatggtcatgtttctttcatctataataatgtataaatctgtgttgtagcgttaagctattctctgtttcctgtaatctgtctctgtcaaagctgtactatggcaatggacaagtatcattggttgctaatgctatattgaagtcacaaaccctggagcctggggtagaactgctacaggaacagcaaggaaactgacatttttagattaagaaacaccagaagattttgtgagactcaattctcatatatttgcataacttgcattgttaaatcctgtcaaaccttgcatatgttttctccagtttccgtatgtttagcaacgaggacgttacaattggatcgtggatgcttgctatgaacgtcaaccatgagaacacacatgcgctctgtgaacctgactgcacggagtcttcagttgctgtttgggacattccaaaatgctcagggctatgccacccagaggtaaaaatgctagagcttcatcaaagaaaagaatgcacaggtggtccaaccgttgcagccgaggtgtccgagtccgaggactgatgatttctcggttggaacacaaactaacggatccgatagttgacctccgccctcactcagtagatgcgtttggagtattcgtttgattcattcatttatcaggtgcaatcaatgtggcagcgctgctcaaggcagcactgtagcaaagccactcattgcatttttttttgcagtggagccgcgatcgacgtttggaacgttcatcctgtaccgtagcaaaaaaggaattttgttgtatagaaactagaaggaatggatgcatcggcgattgatagac

SEQ ID NO: 30361 - DNA, 600 bp, Zea mays
  Clone ID: UC-ZMFLB73012H09_FLI
atggcggcagattccggcgctcgcagacaaccaagcttcaccaaggtcgaccagctgcgccctggaacccacggccacaacctcatcctcaaggttgttgactccaagatggtcgtccagagaggccgcgagggagggccccagggaagacagatgaggattgcggagtgcttggttggtgatgaaaccggcatcattgtcttcactgcaagaaacgatcaagtggatgtaattaggcctggaacaactgttgaactgaggaacgcaaagatcgacatgttcaagggttcgatgcggcttgcagtggacaagtggggaattgtgaaagctgctgaaagctcagctgagtggacagtcaaggaggacaacaacctgtccttaattgagtttgagctggtgaccgtgacggagtgaaaaccgccattgcttaggagtattgttggtttgctgtgttgttgaacctaatcatcatcgccaatcaataaggactcgtggttgatgttctcggcatcggagttgcgtattgctgtaccgttgcttgcttactgtgcgttgtggctacttttgactgctatcgaataataataaattggtgtcatg

SEQ ID NO: 30362 - DNA, 1207 bp, Zea mays
  Clone ID: UC-ZMFLB73013A04_FLI
cagagctagtcttagttgccaggcttcaacataagaaccttgtgaggctcataggcgtttgcttggaagaagacgagaaactacttgtgtatgaatacatgccaaacaggagcctcgacaccattctttttgattctcagaaaagcaaagagctggattggtggaagagactcgagattgtgagcggagttgcacggggcctgcaatatctccacgaggagtctcagctgaagatagtccatcgagaccttaaaccaagcaacgtgctccttgactctgcttacaccccgaagatatcagattttggcctagcaaaactcttccacatggatcagagccaaggtgccactagccatattgctggaacatatggatacatggcaccagaatacgccatgcacgggcaatactcggtcaagtcggatgtcttcagttttggtgttttgatcctggagatggtcacagggaggaaaaacagtaactcggaccaatcagttgacctcttaagcctagtatgggagcactggagctcaggaacaatccaagagctgctggacccattcctgatgagccaccgagctcctccagaccagatggcgaagcttgtcaacatcgggctactatgcgttcaggacagccctgcagacaggccgctgatgtcgtctgtaaacgttatgctcagcagcgacaccatctcactacaggccccgtcaaggccaacattttgcattcaggagacggaagaccattcgcgcccctactccgatgcgtataagagggcgctgaagctgcagtcgtccactgatagggcagcaatgtcccgaacgaggttacgctcacggagcttgaaccaagataagcatgcatgaacgccgacaagaatatacatatggccgaaagatatatatatatatatatatatatatatatatatatatatatatatatatatatatatatatatatatatatatatatatactgttttcaagaatctcaagtcgtattagataatgtttttttttctgaatgaactggaggggtaccccgtacggataataattttatttgaatgaaaaggacttgtcatagaatcacataaacgaaaagaaagaaaaagggagtctgtaaaaaaaatgtgaaaggcatctatgcagacttggggatgtctttgaagatgaggttgctccttaggcaccaaatgctc

SEQ ID NO: 30363 - DNA, 1048 bp, Zea mays
  Clone ID: UC-ZMFLB73013B03_FLI
cagctgcacaaattgagctgtaaagctaggcttcccaacaaggagttaaaacaacaattcctcaaatttgtgctagaagcaagaggctgttaaagaagtgctctttagcaaaggtttcgtcattcttgcctaccgctgtccctttgcttcagaatacggtgaaacagaagtccttcattggctcttctcatcttggctcacatgcagtacttgaataccagtttcttcctgagcagccaagtgatgcatatgagaggggaagccagttgcgcttctatgatgctctagcagaagtgttaaactcaagggtagattcgttttctataggatcacactttacccatgtagttgagcaggcacctagctatacatttcacagtcaatcatctggttctagctgtttgtcaaatattattgctagcatggctcaaatccaaatattattgctagcatggctcaaatccacggtcaaaaattggcatccctcaagttgtcagatttgaaagctccctcgcatcccctaaaagattgggttatcatgatgaagaacatgtcacgtggacagaaaaacacaagaactatatttatggatatactatttttttcttcttttgtattattatattcatatccttttttacctttatattattattttttatatatgttgtatttgtctaatattacttcatcataatgaggaagctaagattgctagggaggttgaggctcatgaaaagagaattaaaaaggagcttgagagttgagaagcaaggtctactaaatagaaagaaagaagaacaaatgtagagggaaatggagagacatgatcacgagagatgtaatgaagagaggttcatgcgtgaaaggcaaaggaaagaagaaaattccattagcaacagagacgtatacttataactattatggtagataaaaaatgttacaatgtctctcttctatagaacgaaactgggatatcattcattgatatatgttcgattttattcaataattattatataattgtgcaccgtcgcaacgcacgggc

SEQ ID NO: 30364 - DNA, 2032 bp, Zea mays
  Clone ID: UC-ZMFLB73013B05_FLI
gggcggcgccggcgtttgcggcggcactgtcggcggatgggctttcgttactggccttcaagtcggcggtgaccgacgatccgtccatggctctctcgtcgtggtccgacgctgatgcggacccgtgccgctggctgggcgtcacctgcgtcaacagctcgtccagcgacggactgcgcgtcgtaggggtggccgtcgccggcaagaacctgtccggctacatccccgccgagcttgggtcgctcgcgtttctacgccggctcaacctccacgggaaccgcctgtcaggaaccgtccccgcggcgctcgccaacgccaccgccctgcactccctctttctctacgataaccgactcacggggccgttcccggccgcgctgtgtgggataccgaagctgcagaacctggacctgtcgcagaacgccttgacgggcgcgctgccgctggagcttggacgctgcaagcagctggagagattgcttctcgccgagaatgcgttatccggcaacataccggcggctgtctggcaggacatggtgggcctgcagatgctggacctatcgtccaacaacctcaccggagccataccagcagaactcggcaagctcgccgcgctcgccggcacgcttaacctctcccacaaccacctctccggcggggtgcccctcgagctcggtcggctcccggccaccgtcacgctcgacctccgcttcaacaacctctccggcgagattccgcagtccggctccctcgccagccagggccccaccgcgttcctcaacaacccggggatctgcggcttcccgctgcaggtcccctgccgcgtcgctccaccgtcgtcgtcgtcgttgcccccaccgcctccgtcgtcctctgccactaccaacggcggcgcgggcggtgcacggctgccgatcaagaccagcctcatcgtgctaatctcggtggccgacgcggtggccgtcgcgttggtcggtgtcatcgtggtctgcgtgtactggaaggtctgcgaccggcgccgcgccgcgaaagacaaaggcgacgacagcgagtacgaggaagggtgcggcctgttcccttgcccgtgctgcatgcgcgccgacgcgtgcggcgactcgtcctcggaatgctccgaggtcgacggcaagtgcaacggtggcggagggaccggggagggcggctatctggtggcgatcgacaaggggttcaggatggaactggacgagctgctgaggtcgtcggcgtacgtgctgggcaagggcggtaaggggatcgtgtacaaggtggtggtgggcaacggcacgacgcccgtggctgtgcgccggctcggcggtggcaccgcggcgcccgagcgataccgggagttcgccgcggaggcgggcgccatcgggcgcgtgcgccaccccaacatcgtgaggctgcgcgcctactactggtccgccgacgagaagctcgttatcacggatttcgtcaacaacggcaacctcgcgacggcgttgcgcggccggtccggtcagccaagcctatcatggaccctacggctgcggatcgccaagggtgcggcacgcgggctagcgcaccttcacgagtgcagcccacgccggtttgtccatggcgaggtcaagccctccaacatcctgctggatgccgactacaacgcgctcgtcgccgacttcggcctcgcccgcctcctcaccatcgtcggttgcaccgacgtctactctgtggcaggctccggcggcatcatgggcagcgggctcccgtatgccagacctgccgctctaacggacagatcctgcagtgcgtatcgcgcccctgaggcacgcgcgccggggggtgcacagccgccgagccagaagtccgacgtgtactcgttcggcgtcctgttgctcgagctactcacggggaagccgccggagcatgcctcgccgtccgcgtcgtcctcgtccatgccgggtcacaatgggcaacgggagctagagcaacaggctccggagctcgtgaggtgggtgcggcaggggttcgaaggcgc

SEQ ID NO: 30365 - DNA, 2173 bp, Zea mays
  Clone ID: UC-ZMFLB73013C02_FLI
cgcttctataaaaggataagctccctgtgcaagcaaaagcccacagaacgagtgaggccaggcgacttcatactgctcgcctcgccgtctttcccccaatctgttgctcctccaagctgcgggcgatcgccgtaccccggccgccgcagggaaccccctcgccatggccttgcaggggaagaagctcatcaacaaccccgacgatgtggtgacggagttcatcgaagggttggtggagacttacccgggtctgcagtacctcgacgggttccctcagattaaggtcgttcttcgtgctgatgtcgagcgcggttcctatgacaaagttgcagtcatctcgggtggtggaagtggccatgaaccttcccatgctggatttgttgggccagggatgttgacagctgctgtttctggagatgttttcgcctctccacctgttgattctattttagctgctattcgagctgtaactggtcccatggggtgccttctaatagtaaagaactacactggtgatagactcaattttggattagctgctgagcaggcaaaatctgaaggctataagatggagatggtcattgttggagacgattgtgcccttcctccacctagagggatagctggtagaagaggtttagctggaacaattcttgtgcataaggttgctggggccgcagcagatgctggtttatctcttgcagaggttgccgcagaagcaaaacatgcatctgaggttgttggtacgatgggagttgcactttctgtttgcacattgcctgggcaaataacttctgatcgtctaggtccaaggcaaatggagcttggccttggaattcatggagaacctggagttgctgttgttgaactccagccagttgacgtagtggtagaacatgtccttaaacagatattgtcacaggaaactcagtatcttcctgtcacaagaggttgcaatgctgttctcctagtgaatggattaggagccactcctatcatggaacttatgattgcagcgagaaaagcagttcctgagttgcaattggtgtatggcattgctgttgacagagtctacactggcacacttatgacatcacttgatatggcaggattatctattaccattatgaagtccggcgaaagcattttgaagagacttgatgctcccactaaagctccagcttggcctgttggttctgaaggaaaccgtccaccagcaaagtttcctgttcctctaccaccatcaccttcaatgaaggatgacgagattcttgctccatctcaggagctgagcaagcaagggtgtatcctggaggctgttattgaagcaagtgctactgaaattatcaatctcatggatagcctaaatgaatgggacagtaaagtgggcgatggtgactgtggaagcacaatgtatagaggtgcaacagctattcttgaagatatgaaaaagcgttaccctatgaatgatgcagcgggaacaataaatgaaattggggcaacaatccgaagggtgatgggtggaacaagtggaatcttgtatgccatactctgcaaggctgcgtatgcaagcttaaagcagagctcaactgtcactgcgaataaatgggctgatgctttagaggcctccattgctgctgttagcaaatatggtggtgccagcgcaggataccgcacaatgttggatgccctaattcctgcttctgctgttctgaaacagagacttgaggctggggatgatcccgtgactgctttcatcgcgtcttctgaagcagcatcagctggcgctgaatccaccaaacaaatgcaagcgaaggctggacggtcatcatacatcgctccagatctcctggcctcaatccctgatcctggtgcaatggctgcagctgcatggtacagagctgctgcccttgcagtgaagaacaaagtgcacggttcaaagagctagtagcatacgcaatgcttcattgctagacccaaaatagactgacaggaaaaatcactggggcattttctcactccccttagatttggtttccgcttgtgcttttgcatgggccgagaaaaaaaatgacttccatattgtctcacccttctcacatcatacaaagagatgttcaaagagttcgtcgtccgtacaagttaagggaagctatgcttttgcactgccgtg

SEQ ID NO: 30366 - DNA, 1468 bp, Zea mays
  Clone ID: UC-ZMFLB73013C10_FLI
cgacgacaaaacatcgagcgtcaccgtcacgctcacgacttcgcccaaacttctccccggggagacgagaaaggaaccgaggatctcgttcccgcggcgcggcggacagaggcctcgccgtgggagatggccggccggcgcgagtcgcccctgatgcgcggtggcggggcggggccaccgctgtcccgagggtcccgcatcgccgcggcggtcgtggtcggcgtcgcgctcggctgcctgtgcgcgtttctctacccagacggcctcttccaccgtgcccctgactccgccatccattggccgcgacgggttgaatcagttgcctgtgatacatctcgggaagttgccaaactaaagtcacgtctggtattgttggaaaggaaaaatgctgaattcaagaagcagatcaatgaattgtcaatgaagcttcaattggccggacaagggaaaaatgaggccctgtataaggctggtccatttggtacagtgaaagctctgagaacaaatccaacagttactcctgatttatccatcaatcccagattggccaacatattggaacaggttgctgtgaagaaagaactgatagttgcattggcaaattctaatgtgaaagagatgcttgagatgtggttcactaacataaaacgagctgggatttcaaattatttagtagttgcattggatgacagcatagagaacttctgcaagtccaatgatgtcccagtttaccgacgcgatccagatgatggcatcgacaatattggcaagacaggcggaaaccacgctgtttctggactcaagttccgcatattgagggagtttttgcagctcggatacagtgttctgctctctgatattgatatcattttcttccaaaatccatttgattatctttacagagattctgacgtagaatcaatgagtgatggccacaacaacatgacagcttatggattcaacgatgtgttcgatgagccttcaatgggctgggcaagatatgcacatacaatgcgcatatgggtttataattctggattcttcttcataaggccgacgattccttcgattgagcttcttgacagggttgcttatcgcctttctcacgagcccaaatcatgggaccaagcagttttcaatgaggagctgttttttccctcacatcctggttatgaaggtcttcatgcatccaaaagaaccatggatatctacctcttcatgaacagtaaagttctcttcaagacggtgaggaaagatgcttatctgcggaatttgaagccggtggttgtgcatttgaactaccatccagataagtcggatcgcatgaaagcagtgattgaattttatgttaacgggaaacagaatgcccttgaacgcttccctgatggatcagaatgataggcaccagcttttgtagaacagaaaaatgataacctagtatctagtcgtcttgaaactgtgcgcgatt

SEQ ID NO: 30367 - DNA, 2909 bp, Zea mays
  Clone ID: UC-ZMFLB73013E07_FLI
ccttcggcccttgcttcctcttcctttcactcctccgcctgtccccttctctctctgctctgttccttgatccagattccgcagcggtgagggcacccagcccgatcgtccgtctccgtcgatccctcgaagccctaggagagacccttgtccgcgtcgaattcgatcgcgggctgatttgatcccgagaattcgcgagggggccatcggcggcggtggggaatcggatgttgtaggaaaggtcccggatttctgcgcgggcaggcgggcgggcggccatgcatctgaaactgtggaagccgctgtcccactgcgccgcgctgctcctggacaagaagaaccgtccgccgcggacgccgccggcgggagcgggcgcggggtccggcggcgggcgacggctgcaggagagcaagctgcgggaggcgctggaggaggcgtccgaggacgggtccctcgccaagtcccgcgacgtggcgctcctcgatggaggggacggcggtgcggaggaggggtccgtggggcggtcgcggtcgctggcgcggctccacgcgcagagggacttcctgcgcgcgacggcgttggccgcggagcgcgcgttccagtcgccggacgcgctccctgtgctggaggaggcgctcgccaagttcctcgtcatgtaccccaactacgcgtccgcgtcggacgtggaccgcctccgcgccgacgagtacccgcacctggacaaggtatgcctcgactactgcggctttggcctcttctcctacctccaaagctgcaaccctgcggactcgtcagcggcgttcacgctctcggagatcaccgccaacctcagcaaccatgcgctctacggcgccgccgagaagggcaccgcggagcacgacatcaagaaccgcatcatggattacctcaacatccccgagtccgagtactgtctcgtcttcacggtcagccgcggctcggccttccggctcctcgccgagtgctaccccttcggcaccaacaagcgcctgctcaccatgttcgaccacgagtcccagtccgtgaactggatgacgcaggtcgcgcgtgacaagggagccaaggcatactccgcctggttcaagtggcccacgctcaagatctgcaccacggagctccggaagctgatctccaccaagaagcggcggcgcaaggactccgccactggcctcttcgtgttccctgtgcagtcgagggtgacgggggcaaagtactcgtaccagtggatggcattggctcagcagaaccactggcatgtcctgcttgatgctggggctctggggcctaaggacatggactcgctggggctgtctctgttccggccagacttcatcataacttcatattacagggtgtttggggctgacccaacgggctttggatgcttgctgatcaagaagtcggtaatggcttgcttgcagagcccaagcggcgggacgggggcagggctagtgcggattgtgccggtcttcccacagtatctcagtgattcagttgatgggtttgatggtgtcctcgacgggctggaggatgataacatcattccaatcgaggaggggtcagcctcgaacagtcaccatgcatcccaattgcctgcattctcaggcgcatattcatcggcgcaggtgagggaggttatcgagagcgagatggaccaggacagttcagacagagatggtgccagcacaatatatgaagagagcgagagtgtttctgttggagaggtgatgaagagccccgtgttcagtgaggatgagtcatcggagaactccttctgggttgatctgggacagagcccacctggttccgaccattcagagcaatcaagcaaggggaaattgggctctccgttgccagcgtcctggttttctggcaggaagaaggcgtcgccgaaggtgccatccaaactgtcaaggagccctgttcatgacaagcatgtcttgtcatttgatgcagccgtgaggtcggtatcacaagagccagggcctgtggaagttgttccagaggaagaccattcacgtaacggcatcaagaacattcatatcagtgagattgaagaagacaacagagatggtaaagtaaacaagaggttcgtaaagttttcttgtgccaatggccctgctgaaggcagtgcaacctccgttttcgggacctgtaccgcccgcgagaacggctccacatcggagatctgctcagaaacccaagcggagaccaaggagagcgcgatcagaagggaaaacgagggcgacttccgcctgctgggaaggcgggaagcacacaacggaaggttcaacggaggaggaaggttcttcggagtagaagaaccggagcgcgtgtcgagcatggggcgcaaggtatcgttcaccatggacgacagcaggctctgccgtaactcggatgccggcgagacatctggatacgcgatggcagacgacaacgacgacgacgcgtacagcgactacgacgaggctcaggacggaaggaaagagcccgagatcgtctgcagacacctcgaccacgtgaacatgctggggctcagcaagaccacgctcaggctgcggtacctgatcaactggctggtgacgtcgctgctgcagctccggctgcccgactcaggggacggcgagggggcggcagcggcagcggcaccccccctcgtctacatatacggtccgaagatcaagtacgaccgcggggcagcggtcgcgttcaacgtgaaggactgcgggtccggaacctccctgatcaaccctgagaccgtgcagaagctggcggagaaggagggcctctccttgggcgtcgggttcctgagccacatccggctcacggacagccagaggcacggcgcggccgacgtggggctcagctcttcctcctcgccagctgcggcg

SEQ ID NO: 30368 - DNA, 933 bp, Zea mays
  Clone ID: UC-ZMFLB73013F04_FLI
gggccatcacacatgtcaggaggtggagcatgtcgtgatcccacctcatgtgccgccggaggtggagcatgaactaccagagccagagaaggctcaaagagacatatttgccttctttcgaggcaaaatggaggtgcaccccaagaatattagtggccgcttctacagcaagaaggtgaggactgagcttctacaacattatggtcgcaaccgcaagttctaccttaagagaaagcggttcgacaactaccgatcagagatggctcggtcattgttctgtctatgtccgctgggatgggcgccttggagtcctcggctcgtggagtcagtcctcctaggctgcattcctgttataattgctgataacatacgtatgccgttcccttcagtcctccagtggccggagatctcattgcaggtggctgagaaggacgtagccaaccttgaggtggtgcttgaccatgttgtggcaaccaatttgagtgtgatacagaagaatctgtgggatccagtgaagcgaaaggctctggttttcaaccgtcccatggaagtgggagatgctacatggcaagtgttgagggagcttgaggttttgctggaccagtctcaaaggaggagatacggtggatcctggagggcgtgagaaaccagaaaagatcagttttgtataatctgttgcagctgtgcagttgacattgagtctgaggcttgagcctgagatccaccggaaactcaggttattgttctcatgccagagatcccaatctcagttagtcaatgggaatatgggatgctagctcaacctttattggcttgttgcccggttagtgcctaactagagatcccgctcttgtacgtatagagaaattttatttgttctttggagaactggtgggatgagtttgattttctagccatagaaagaaatgtatt

SEQ ID NO: 30369 - DNA, 1177 bp, Zea mays
  Clone ID: UC-ZMFLB73013G04_FLI
caatcccccgcgcggcgacgctagtcgcctccgatggcagcccggcgcgggccccacgtcatcaagcttcacgatcccaacccgcccctcctcggacgggcgccgggggccgcgccggccgccgtccccgcgtcctcgcgcgatgagggcctcctcgcgcagcacctgcgcgcctccgcggcgcacccggccttcgccctcatcgaggagcgcctcgccgcccgggaccaggatatccaggagctcctcgtcgacaaccagcggttcgctgccacccacgtcgcactccagcagcagctcatagcggcgcaacacgagctccgggcggtctccgtcgccgccaccagggcgcgcgccgagcgggagggcgaggtgcgctccctggccgaccaggcggcgcatatggaggctgaggcgcgggccatcgccgctgcgcgcgcggagatcgaccaggtccacgccgacgtccaggtgctcgccgcggcgcgcaccgacctcgtcaacaggctccaggtcctacgggagaagctcgcgcacaagaaggctgaggcgagtaagaccgattccgtccgtccccagattgaaaccatgcgccgggagatccagaacggcagagctgcggttgattttgaaaagaaggcacactctgataacctcgaacaaagtaaagcaatggagaaaaatatgattgctgtggctagtgagattgagaggcttcgaggagagcttgcaaatgctgaaaaaggggccactgctgtcaacccagcagcagctgttggtaactctgggtatgctgcgccttatggcaattctgcgtcaacatatactggaatgtatggcaatcctgatgcaacgtataccgcgcaggcttatcctgacgcttatagcactaatcagggtcacatgcacaccgtcgccaatccgcattacatgagtcaacctgttccctatggacaatacgagagccagcacaccaatgttcaaagatgactggctgcaagagatagctttgactcgcctgccatctcattgtaacaggatagtcgcagaatccaccatgttacattgaaagtgctgaagtcctcatgttcatgatttttttttatttatttggctaatttgttccagaatcgatgggttgaattttggagcaaaaacctctcgcgcctctccattt

SEQ ID NO: 30370 - DNA, 1135 bp, Zea mays
  Clone ID: UC-ZMFLB73013H12_FLI
ccgacacgcacggcacgagcacgacagatcgggcgactggagtcatcgccgccgggccggtcgcggtcggatccccccgctccgcctcctctccttcgattcgttgcttcccgcttcaaatccaagccaccaccctttccttcccatggcttccgacgccccggcggagcaaccggcgacgcagcagaagcccaccagggtctcgctgtcctatgaggagatctccaagctcttctccctccccatcgctgaggcggcctccatcctcggagtctgcaccagtgtcttgaagaggatctgccgcacccacgggattgttaggtggccatatcgtaagcttgtttctgggaaagctggggatgacacaaaaggtcctgatagcgacaaagccaacgaactccttgaggtatcaaaaatcgcgaaacaaaaggctcccagtgcatcaggcccatcagtagtgtcatcaagcacttcccaaggagcggcaaagtctcaacagggcaattctaaggcaggacagttttcagtttcgccaccaacaggtaaacataacgcatcactaagtttgacccatagccaagccaaggccatcccttgctatatggatgatttcaagtacggattcccgtcatctggcttgtcttgtgaaactatgaaatggtggggcacaagcagcgacacagactatgtgcctaccaaagatggaagccatgaaccccatgaatcaacaacacatgagccatcaaagggcatgactgatgatgacgagttggactggggagcagatgaagcggaagctgaagctgatggcactgttacggcagaggcatcggcacagctgtgctcgctgagaaggaaagcagtagatgacgggcgcaaactattgaatggtcacaaccgcaggggccaagaattctctaggctgaacaaaaggcagaagacagcgctagcccaggtatttggggcttcactgccagaatgttgtattactcgtgtctagtgagtgaagaacaactgtagctgtgttttccctccttctccagaccctcatgtaatctgacccgttattagcgagaagtgtgaaatcttctcactgaattgaagaatggcaggagcttgttttgtcttccttatc

SEQ ID NO: 30371 - DNA, 1474 bp, Zea mays
  Clone ID: UC-ZMFLB73014A09_FLI
aacactttccagcatatgcatgcaagggacgaaattagttaccagttaccaacactttcagcatatgcacgcaagggacgagattgattacccattaccaaaccaacagtttccagttcagcggtaggaacaggccgtcacggcgtcatccgccaaaggacaatccatttgctcacacaggcacaaacgctgagcgcctgagcctgctctcgcggtctaggagatggcgttgatcacgaatgtctctgactatgaggagcttgcaaaacagaagctgcctaagatggtttatgacttctatgccgggggtgcagaagaccagtggacactcaaggagaataaggaggcattctccaagattctgtttcgaccacgggtgctgattgatgtgtctcatattgacatgtctacaagtatattgggttacaaaatttccatgcctattatggtggctcccactgctttgcacaaactagcccaccaagaaggagaggttgcttctgcccaggcagcagctgctgcaggaactataatgacgttgtcttcatggtcatcttgcagcattgaggaagttagctcaattgcaccaggactccgtttcttccaactttcagtattcaaggatagggatatcgtgcaacagcttgtcagaagggctgaaaatgctggctataaggcaatcgccgtcactgtcgacgctccacgccttggtcgcagggaagccgatgtcaggaacagattcaggctgcctgaaaatgtggtgttgaagtgctttgaaggactggatctcagcaagatggacaagactaagggttcaggccttgctgcttacgccactagccagattgacagctctctttcttggaaggatatcaagtggctacagacgattaccgggctgcctatcttagtgaaaggagtcataacagcagaagatgctcgaattgctatcgaatgcggtgtcgccggcattatcgtgtccaaccacgggggccgccagctagactatcttcctgcaaccatcagctgcctggaagaggttgtgagagaagcgaagggccgccgtgtgcctgtgttcctcgacggcggcatccgccgtggcactgacgtgttcaaggccttggcgctgggagcctcaggagtgtttattggaaggcccgtactgttcgccctcgccgtggacggcagggcaggggtgaggaatgcgctgcggatgctgagggatgagctcgagatcaccatggcgctgagcggctgcgcgtcgctgaaagatatcacccgcgatcgcgttatcactgagcgcgacatgatccgtcgctctcggatataggcttcgattcgtttgctgttgtgttgtgcggggctgaaagtctgttgttgccctggcatgactgtcatattcgaaactgaccggaccatcagattggttttgacttttgacctattggctaacgatgtgctaggttttctcatt

SEQ ID NO: 30372 - DNA, 911 bp, Zea mays
  Clone ID: UC-ZMFLB73014B12_FLI
gaagaatcaggggagatgcaggataaaaccaaggaaatgggcatcatagacattgacagctggattcatcaacagatcattgaaaacactggcatatgtcagtgtcacactgaaaggacgctagatgttattgaagtaaatgaatatgaaacttacaattctaatactgcttcaccagttcagaaggaatttactaatggttccaaaccctcactggatgaagatagcaacctgaacctttgtccccccacgcaaaacacagaagatagcaaggaaaccagggctgttaatcaattcacaaaaacagaattatacactcctccattaaaagaactttgcggcagtgccaaaattaaggaacataagaatgaaaagcttgggcgtcatggaagttgcagaagatcactgcaggaagagctcggcaattgcaagccagagcagccagacaaggaaccaaaagctgatccaaacatgcaacctgaaattgaattccatgacaacaaacaccatataggtaagttgacaaaattcattcaagctcttcgaacagcatggattggtgctcttcttggactaggcaccatgaaccttggattagagcaagacttcttcaagagcttaacactctgatttaactagaacttcaccatttcaaaaggatttaacgaagctgtatacagtttcagtaagagtatctacttcaggaatcaatgggcactgtatatataaggctgcaatgaaatgtaagctgccaatatgccagtggcagatgaattgctagtctgaaatggtttctttggttataaatggatagtttcaagacaagtgggaaaatgggaagaaatgtgatatatgacaaattttgaattaacattatcaatttatcataaatgataaatgattgttacagt

SEQ ID NO: 30373 - DNA, 2917 bp, Zea mays
  Clone ID: UC-ZMFLB73014D08_FLI
agcagatctacttgtagatgtggcaaggactaaagcaatgcatatcagttccttccaactggtgagactttatgtggacagcatcaccgtggtgcctgttgctcccatctgtagatgcctctccgcaacctccagatgttaatcttctttcatgattggcggacagagaacttcatggaagagaaggacatggcgcttcagctcctcatgtctcttcaagaattgcagttcgaacattatagggccctacaatccctccctcaagggttgtatcgccttccttctctctaggaaatacatatcactgggactcaaaacgtcagatcgctaccaaacaagggactccctgattcactgcgagtgttatttctatactatatacttaaagcaccagtttcaacggtctagtaaacacaatgtccttatagtttacttagtttgttctttttggttgctgattgtttggttccacattatcatattattagatttcataaaccatgatgcatatgctcatttcaaaatcaccttgtttctgtcacaatacttttttcccccacacaactatgagatgatatgctgattttcttttacaagactatgcttcatcgtaatgttgcacagcgttcaaggcaataaacgagaacaagcatgggatgtggaaaattttagaaagtaaagacaagtgaattcttgacgacgttggcttggcaccttagtttgagtacataatgaaagaacaaccttttagcaaccctggagcatctagaaaatatcaggtgaggcagtaagtggatctgaatatgtgaaaaaattggcagtcactaatggacttcttgtatatggcattgtctccctctctctgctgttttatagttcaaggcattctatttacagctattgcaactttttttgtaatttcagtcatgtaactatcgttaatcatttgaaaaccactggaagacaggagatgtagcaccacaagccattcctttgatcatttgaaaaccattgcggctctttctgattatatcaaccagttgagtggatgaaagaccaaaaaatgctttggaagaagggctcacaattgtggataataaggcatccagtattatagaggaaacaaaggaaattcaaattagacggaaacctgctagtccaagttcttatatgccaaattcatcagtagatacacatacactctacaccctaatcttctttgttatgacatttattgtttttttcatgaactacgtacatcttaattttcaattcatctagaatactgaataggtgatgattcatcaccaaattgataagtgaatattaatacatctgaaacctaaaattaaatatatattatataagttgttgttaatgttcattccatttttgaacacttgcatgaattttagttctctgtttcttttgaaaaattctgtgttgcaaaaatataaatttatatgaaaatatattatatggtgatgagaagtttgagtttagtatatggtttcatattagctatacattgttggtactatcggcttgttctctttttgtttgaaaaaaatactatcggcttgttcttaaggacacataaaggactagttcggaagcaagagaattagaggagagatggctaaaatccccttcctaattaaataggaagggaatttgagcaccctcaatcccctctaattcccttgctttcaaactagcccaaagagtgtcactgcatcctctgaattatgatatattgaacatggtgttataattgtgaaccgatgagtataacttattttctccatattctgaacaacccattacttaaacagatttgcatcctactggagacattgctggcagaggaattgagactggcataggagaactcaatatatgcttgtgaataacgcatccagtgaaagatagtagattttcatcaattcactacccaggatgttgtcgcattggatgagaatgacatggaagacggcgaactagaggaagacaacaacctcatctaagctgaaaatgtgttgcctgtggttgaagaaaatctagcagatgaacaacactgccttccctgtcctctctagacctgaatctctctgatggtttggattcgtccatgattgatcctgtacgatgaaggatcagctcgtccaacgtttttcaaggaacgaactcaatctgaggaattaccttttcattggtcacctggggtactacgaggaatgacttcacgatagacgactcggttttgcgacgcaaaccaaacgccatggttaggctcagatgttggatcagatgattcctcgtggcttcgtgacgcaaaccaaacgacatggctaggctcagatgttggatcgtatgatttctcgtggcttcgtgacgcaaaccaaacagcctgtaagtccgcacaccttatctatcatggtcattgttgagctgatcagtaattggagtcgtgtgataagcttaatggacctcctatttgtcgtgatcttcacagatcaacaagtgagcggcctttgcatgctgcatgagatcaagcaagccgccgactggcaatgctccacctgccattcagttcgttggtgaggtattaatcaccagccatgttggcacttggcggcatgcagatggagcagaacatccaggtgaagcggacagatacatgatcgatcatgagttggcgcagacacaggccagacaaccagaggctatattccaattcatacattccatgataagcaaaggaagatccaagacaacacaaatatacaaatagttagttatacaagcaaaaatcctgttgttttgtgcctcccattttctagtccagaattaatatgacaatttttcactgaaactggttggatcagagaccaggaaaaaaagggaaatgacaact

SEQ ID NO: 30374 - DNA, 817 bp, Zea mays
  Clone ID: UC-ZMFLB73014D11_FLI
gcacagcttgttgttgagaggagagaagaaagaccatcagtgatgaacgctttcgagttaatctctacgtctcagggcctcaatctcgggacgctcttcgagaagcaaacgggttctgttaagcgagaaacaaggtttgcgtcaaggcttcctgcaaatgagatactgtcgaagatcgaagcagcagcgggacccatgggcttcaacgttcagaagcgcaactataagctgaagctgcaaggggagaaccctggaaggaaaggtcagctggccattgcaacagaggttttcgaggtcacgccttccctgtacatggttgagctgcgcaagtccaacggcgacacccttgaattccacaagttctaccacaacatctcaaatggactgaaggacgtgatgtggaagccggagagcggcatcgtggaaggcgacgaggcgcggcaaaggaggtccccgtgatggggtctgcaaccaagttttagaagtagcgctgcagataactagtcatcagggagcctggcgggaactgagcctgtgactgcttcctgtttgtttggatgttttgtttttgtctaaggtgctttctgactaaagtatgctggataatgtgaatgaagaatgtgcagagttttcagcaaagtaaggttgtcggattttctttcgtttgtgcagtgttgcacgtggtggagagttgcccgttgctgacgaacttgctatcttgctagctagagcctagaggataaatatgaattcaaaatacgagtagaaatatcttaaagtctgataaattttgtagagaaaaatataaagatccaac

SEQ ID NO: 30375 - DNA, 854 bp, Zea mays
  Clone ID: UC-ZMFLB73014E10_FLI
cgcagagtgaaggatgtacagtggaaacttccttgttaaccttcttgggaagtggaaggagtctgaatactctggccattctattcctgttggtggtcttgcttactatgtaactgccccatcaaggtgaaaagctagttccttcattggggactggggaggccttctcgccatgatcatttttgttgtttttgttattcaataattaggtattcttttgactaacaatagcacattggaaaccacgcagtttggctgatgtccttgcaaatccattccatgcactgttttatgtggtcttcatgctgtcagcctgtgctctgttctcaaagacatggattgaagtttccggttcatcagcaaaggatgttgctaagcagctcaaggaacaacaaatggtgatgccaggccatcgtgagtcgaacttgcagaaggaacttaaccgatacatccccactgctgctgcatttggtggtgtatgcattggcgcattgaccgtcctggctgatttcatgggtgcgattggttcaggaactggtatattgctcgctgtgacaatcatataccaatacttcgaaacctttgagaaggaaagggcgactgagcttggtttctttggtttttgattagtagctgtggaaccttaacttggctatagctgaattttcttgtaagtccctgtagtgcttagccagttgtaacttaaagagttctgtttaggttgccttcttgcggccacaatcatgtagcagaatgtgcgtgtgtttcaggttagcgtgggggtatgtgcatctgtccaaagagagtctgcaatttggcaaccggatattttgttatcaatttcagttacttcg

SEQ ID NO: 30376 - DNA, 1000 bp, Zea mays
  Clone ID: UC-ZMFLB73014G03_FLI
gtgcacctggacatggtgactggtcaacaaatctggagaggtacacactatgccaggatgggatatttcataagcaagaccaatttgggagacttttacctacatttattcaaataattgatttggcggaagaggaagaggaagagtattggatggttgtatctgccatattcgagggaaaggaaactttcagtctaccatctgaatcgagttatgctgataaatcatcatctgaacctccaagttctactccattaagcgaccccatcaacaataaggtgcatttgctcagaaccatgcttcaatgggaggagcaagttcgtcgtggcgcatctttggcagagaaaagtctcagtgcaagcatctgcacaaaggcaatcctgcgtgaggtggccataatattctggcctaatggcaagattatgagaatgagcactggtagcacagctgctgacgctgctagaagaatgggcgtcgaagggaagctgctctgggttaatggccaactagtgctgccccaaacagagctaaaggatggggatatagttgaagtgagggtatagatgcaagtaccagattccagtacaccttcctcagggttattgatcatattggttcctcagttcttgccctatcttggcaatgcatcgaacctcaattgtacagtccatttgtcgaaatgaatcgaagaaagaaggattaggtccagtaagtgttgtgtcatacaagagttcactgtgtacataagaaactgcaagtataaaagctgtctgtccagctgtgcttctccttgcccatagttacagtggtaatgtaaatttccgtaagtaaagatgtagtaatgtttagttagtggtccacatttcagcgtgaagttatgaagtgcagtagcgctgcaagtttttttttatatatgtccaaagtagatgtctcatgctgcctaaaaaagatgtccatgtcccgtaatttggcaagccaagattttcaacgttgtttggtt

SEQ ID NO: 30377 - DNA, 786 bp, Zea mays
  Clone ID: UC-ZMFLB73015A11_FLI
ctctctggcaccagagattgttcttggtaggggtcatggatttcctgctgactggtgggcacttggagttttgatctatttcatgcttcagtcagacatgccattcgggtcctggagggagagcgagctggaacctattacaaaaattgccaaaggccaccttgttatgccagtgtctttcagtgcagaagttgttgaccttataaccaagctactcgtggtcgacgaaaacgcgcgccttggaaccagtggtgctgaagctgtgaagaaacacccctggtttgatggcactgattgggagcgaatagcatctgggacttgtgcagcacctgaagaaatcactgagcgcatcaactactgtatagaaactcttaatgaggacttatccgcatctccttccgtgccgattgaagacccagatgatctcactgctccagagtggatccaggattggtgatctcaatagttgcatgactgtccaatgatgaattgttctagttgaggaaaacgtctctagtttttcaccgagcattctcatatcaaatggaagaaggtatacataagagttgatcgaactgacaagttgtacataccaaagattattccttctgtgatcatagatcagaatttgagatgccaagcaacagagactttggtctatgtttgctgcatagttcctggtaagaaggatctggatagtttgttggtgatccatgtaattatatatccaatttgtgcactcccttgctgtttcggaaatggatactggtcgggaggaaggtcaat

SEQ ID NO: 30378 - DNA, 1246 bp, Zea mays
  Clone ID: UC-ZMFLB73015B06_FLI
cgacccgtcttcgacctcgctcccacctcgccgcccgatccgacgggctggatcgccggcgaccgaccgttgtcgatacgaagtgcagctgtaggctcttcctgccgatcccctgcgtttgcgttccataatagcacgaccagcgcatctcaccggctcaagagcatccgtggatctgaccggaggaggccgcggctgctactgctactgctctctcggcgatgtcgagggttcgggacaggacggaggacttcaaggaggccgtccgagttgccgcgctctcccatggatacacggaggcccaactggctgcgctgatgtcgtctttcatcatccggaagccgtcgcccaaatcgccgttcactaatgccgccatcaagacgcttgagagcatcagggagctcgagaggttcatagtgaagcataggagggattatgtggacctgcatcgcattaccgagcaagagagggataacattgagcatgaaattggtgtttttgtaaaagcatgcaaggaacagattgatatcctaaagaacaggatccaagaagaagagaagaatggaagtggaaagacatggcttggcactagggatgggagttcccggttggacttgatagctcatcagcatggtgtggttctaattttaagtgagcgtctccactcggtaactgctcaattcgatcgtcttcggtccatgcgttttcaagatgctattaacagagctatgccaaggaagaatcagaagagaccagaaaaaaaacctgctgaaccgtccaagtccagtcttgttctaaaatctgatgtatcaaagattgtagatcaggaagcgtccacagcacctatgagagttcaagaacaactactggatgatgaaacaaaagccctccaggtggagttgacaagtcttcttgatgctgtccaagaaacggagacaaagatgatagaaatgtcagcacttaaccatcttatgtcaacacatgttctacaacaagctcaacaaatccagtatttgtatgaccaggctgttgaagctacgaataacgtggagcgtgggaacaaggagctatcccaggcgatccagcgcaacagcagcagtagaacctttctcctcctcttcttctttgttctcactttctcggttctttttcttgactggtacaacaactgagttagcatatgaagacattgtatgctgttcatgggaaatggttaaattatgaaagctggtctgtcttgaagtcc

SEQ ID NO: 30379 - DNA, 2133 bp, Zea mays
  Clone ID: UC-ZMFLB73015C08_FLI
aactgaactgcactttgcattgggcatttggcatttttgggtttacgcatgcctccggcctacccaagctcgtcttgcagattgttactattgaaactgtacttttgaatttataagccaaacaaggagcttgctgttttgaaggacatagcattcacagtgtacaacaaggcacgacgaatcccacgggctgtctccacaagcgatatgttccagtcaccaacttatttgggtagatctcagtccacaatgatgcatgttacatctcctgctcctactctttggaaggaatgtttagttcctcgaatgtctgggccaactctctctcgagaaaccgattttgatgcatccatgaggtcggcaacatgggataactcatggcagcctgctcgttcgggaggacttctggacccaagtaagctgcctgatttatgtgctcaggatgataggaaatatgcctttgagccacttttcatactagcagaccctgggtctgccgatcttaatgctttaatggaaccatcaaaatctggagcagatgcatctggcagcagggtatatggctcaatttcaggaagtaactctgatagtggagtgagccctctactcgacgtatctgagagtgacagtgcagcaagtcttcattgctgttatggttggactgaggactggcgatggctagtgtgcatttggacagatgctagaggagaattattggacagcttaatatttccttttggtggtattagtagccgccaagacactaaagttctccaaagccttttcatccaaattctacagcaaggctgtcaaataatgtcgtcttcacctgaggctagcaatatgagaccacgagatgtcataataactcgtatcggaggtttccttgagcttgaaatccaagaatggcagaaggcaatatactcttatggtggcaatgaagtgaagaagtggcctgtgcagttacggcgatccatacctgagggtattccacctagttcaaatggtcctacgctccagcagcagcagcagcaagacatggccttaattcaagatagaaacatgccttcctcaccaaaccctctgtatagccctcatccaaaatcaagcttcatgaaaggtgcacttggacaatctggcaacaaaaaacagatccttgtggaacaaagtggaatggacacttcaaggggatcactgcacttagttcgtagcatcagtttggttgcagtttcccaagatcattcgttgcatctcacatgccaagcagatctactgagcagacctgcttcagctggcgaagggagtcaaggcagcagtggcccttggagttacctggaaggtttcactccagtgaagtccattgggtcaatgtcagcgtcacactcgtaccttctagttccttcgccaagtatgagatacctctctcctgcaacattacagctcccgacatgcctcacatcggagtcaccgccgcttgcccatctactgcacagcaaagggactgcgattcctttagcgatgggctatgtcgtctcgaaagccgtcccacctgttaggagggactctgcacaactcaccaaggatgaacagccctctgttctctcagtcagcatcatcgatcactatggaggcagcagtgggactgttcaagagaagatgagccgaggcggcggcggcggcagcaaacaggcaaggaacttgagtcaggagacaacaggtcgtgagtgtgagatggagatgcatagtgtgctggaagctgtggccgcggagcttcactctctgtcttggttgacagtaagcccggtgtacacagaaaggcgcacagcactgccctttcactgtgacatggtcctaaggatgcggcggcttctacactacgcagataagtatctatctgaacctaagggagagacaactcactaattgtcatgtacaattaatatctagctaggtaggtatgtgagggcacatttgacgagctttgtagactgattttgcaataaccctgataacttacaggtggatgctgtaacctttttctctttttttaggtctgtattgtttgtcgacacaagatttgagatatgattccgtttgttgactgtattaatcagaattacaagtacagcgttt

SEQ ID NO: 30380 - DNA, 2066 bp, Zea mays
  Clone ID: UC-ZMFLB73015C09_FLI
gttacattcgccccggttgccttgtactatccatgtacctattaatgccgggtattgcatgggatgagcttgaagaaaatctcctccagagagtaaactcattagttcaaagttctgatttggatttctggagaaaaggaaggtttttagttcgaaccaactcccagttggtatcatataaagcaggaatgacccgtttatcgaaatcgtggagaacatggaatacccctgaattgacccttgtgtcaccaattgctgttgttggtgggcagaagacctccctcattcttaaaggccgcaatctatctattcctggcacacagatccactgtacaagcatagggaagtacatatccaaagaagttctgtgctcagcatatccaggtaccatatatgatgattcaggtgttgagacatttgacttgccaggacaaccagatcttattcttgggcgctgctttgttgaggtagaaaacaggttcaggggtaacagcttccctgttattgttgctagttcaagcgtttgccaggagttgcgaaatctagaagttgagttcgaggattcgcaggttcttgatgtttcttcggatggtcagattcatgattctcggcagccaaagacatcggttcaagttctgcacttccttaatgaactcggctggctctttcagagggcttctgcctgtacatcgtccaccagatctgatgtgtctgatttggatttgattcggttttcaaccgcacggttcagataccttttactgttctgtagtgagcgcgactggtgctctcttactaaaacacttctggacattcttgccaagagaagcctggccagcgaggaactatcaaaggagactatggagatgctggctgagattcacctcctgaacagagcagtaaaaagaaagagtaggaacatggtgcacctacttgtgaagttcgttgtaatttgccccgacaattccaaggtttaccccttccttccgaacttgcctggccctggtggtttaactccgctgcatcttgctgcgtccatcgagaatgcagaggatatagttgacgccttgacagacgaccctcaacagactggtgtaacctgttggcagacagttctagacgacgacggccaatctcccgaaacatatgccaagttgaggaaccataattcctataatgagctcgtagcgcaaaagctggtggacatgaagaacaaccaggtcacagtaagggttaacggcgatgggattcgtgcggatcggttaggaaatgatgttggtgaccgcaaaagatctggggttcaggcgctgcaaataagatcctgctcccagtgtgccattctggagtctggtgtgctaatgcagcccgtgcggtcaagggggttccttgctcggccctatatccattcgatgcttgctatagcggcagtatgcgtctgcgtctgtgtattcatgcgagcgttgctgcggatcaattctggtaaatccttcaagtgggagaggctggattatggtacgatataaactgcccgcccgccggggaagacctgagcctcgtggtaattattgagttagcaagcagttggtggccttggacggtatggagattgttctatgcagggttcggtggcataaggtagtatcgtcgttggacagttccttttacctcatgtgaaatggaagtgttaacatgtgaggagccggagatgtcagatgttaaatactggtaccgaaggtggatgagcttgagcagagctggcacatctgatggagatgttttagacgtaatcacagcccggggggataagaggagtaagtaaaccttgatttccttttttttttcgctggtgcaagctcgtcgagtcttttaatttaccttgctcactattccgtatttcttttattttttgtgaattaaatacagtgctctagcatgaccgtatcttgtatctactttagatatatatatagtagtagaatggggtaaatgaaaaggaggcttgcgtatgggtctgtatcgaccattttgacttgtagctacaaagaaatgaagcggatctgaagtgt

SEQ ID NO: 30381 - DNA, 1394 bp, Zea mays
  Clone ID: UC-ZMFLB73015D07_FLI
ggaagaggattcctacttttcctaccttccattagcacatatatttgatcaagtaattgagaactactgtatttctaaaggagcctccatcggattctggcaaggggacattaggtacctgatggaggatgtgcaagtgatgaaaccgacaatattctgtggtgttcctcgtgtttatgatcgtatatatacaggtataaacatgaaaattcagtctggagggatgatagccagacacctttttcagtatgcctacaactacaaacttgccaatatgaggaaagggctgaaacagcatgaagcatcaccgtttttcgacaagatagttttcagcaaaataaaggaagggcttggagggcgtatacgtctcatgatagctggagcagcacctttgccagggcaaatcgaagaattcatgcgggtaaccacctgcagcgttgtagtacaaggatatgggctcactgagagttgtgcaggatgcttcacgtcaatcgccaacattttctcaatgattggaacagtcggccctcctgtcacaacaatagaagcacggctggagtcggtccctgaaatgggctacgacgcactgtcagacacgccccggggcgagatctgcttgaggggccacaccatgttctccgggtactacaagcgccctagcctcactgaagaagtgttctcagatggctggttccatacaggtgatatcggggagtggcaatccaatggcacgatgaagatcatcgacagaaagaagaacatcttcaagctgtcccagggggagtatgtggcagttgaggtcctggaaagagcatacctgcagtcaccccttgtggcatcggtctgggtctacgggaacagcttcgagtcgttcctcgttgccgtggctgtccctgagaggcaggctctcgaggaatgggcagcagccaacagcaaggccggcgactttgcagagctgtgcgctgatcccaaggcgaggacctacgttcgggatcagctgaaccaaactgggaagaaacttgggttgagaggcttcgagatgctgaaagcagtctacctggagccggtgcctttcagcatcgagaaggacctcgtcactccaacctttaagctcaagagaccccagctgctcaagtattacaaggatcgggtcgaccaaatgtacaaggatgccaaggaggggagagctgcgccatgagcccatgacggcattgccaatttgccacgagtggctatgatcctgagcattgtgattcctcgaaagcgtgtacatattgattatcacaatttgtaagtttaaggcatgtgtgttctatgccaaaatgtcagcagaaaatgaattggctaagaagctcgtgaatcgtgatagcttacattaataaatttattaagct

SEQ ID NO: 30382 - DNA, 1033 bp, Zea mays
  Clone ID: UC-ZMFLB73015G08_FLI
gattctgggacctcgtaggtcaaatggttgaccctttgagaccaggagacttcaaccaagcgatgatggagttaggagcaacattatgtagcaagacaaagcctggttgctctcaatgcccagtctctagccactgccaagcgcttgcgctttcccgtgaaaaatcatcggttcaagttacagacttcccacgagtggttccaaaggccaaacctcggagtgatttcgctgctgtttgtgtggttcagattgcacaaggcttggaggaagaggcggcagacccaaagggaaatgaccatctctttttgctgatcaagagaccagaagagggcctgcttgcagggctctgggagttcccactggtccttgtggaccaagggaaaaccgatttgctgaacagaaggaaagcaatggacaagtatctgtcaaagttgcttagcatcgacatggttcggaaacctgacgtgatcctccgggaggatgttggtgagcatgtccacattttctcccacattcgcctgacaatgcatgtggagctcatggttattaatctcaaagggtgctgatagcacaaagttgaaacttgtcaacgagtcctgcgtggagtccatgggattaacatcgggtattcggaaggtgtacaacatggtcagggctttcaaggagaaaagcctcgctgtatctgagataggtcatgtacccacgaggaaaaggactagacggttaaagcggtagcctaagcaattaggcagtagaggcaagaactagacggttaaagcaagtaaccgtaagcaaattagggagtagagactgctagctagtgcagtacaacatgcagcttgtgagatgttgatttctgtttcggtgcatgtatctggcgtgctgatgtccaaaactgctaattgttgcaagcttgctggaagaaagaaggctgattggtactcagggctcttgtttatcgcgcaattttcctgcatttccagacgtcaagtgatacacagcgttttagttttatgtacgctttggtttgttc

SEQ ID NO: 30383 - DNA, 2017 bp, Zea mays
  Clone ID: UC-ZMFLB73015H07_FLI
gagcaccagctagggagcagaataatgaacgtattcagagtgagcagcttcatggttctgcaagtgagcagcaaactgaatttcttcgctccaatgtcagcagtggcaaggtctcaaaatatcattttggccctatagttagtcagaagcttaaggaacattttgaaaaagatccatatccttgccgtgcaacaaaagagagtctggcacaagagctaggactgacatttaatcagatcagtaagtggttctctggcactcgtcattattcaagagatgctgttgccaagaatcagaaacgcccgggagaaaatactactgtgaataataatagcacaacctttgatgacatacaagtaatagaacccaatgttgggttgatagataaaccagctgcagatgtaaatgacatgatttctgaaaagttgatggtccaaataaatcttaacgaaggcattgaagaagatatcccaccgagccaatatgccaggtgtgaagagaaaataactatgactccagctgccatctcaagggaagctggtcttccaggatatggtcctggtcctggagaaaactttcttcaggtcagttcaaggaatactagctgtgagcagagtgtgatactggctcctaccgctatcgcaagagaagttggtccaccaggatatgcgactggagaaaaccagggcaatggggctccatggaatacaagttatgagcgaagactatttatgaatcctgtgaccagctcaagagcagtcagtcctccaggatatgggcctgaagaaagccgaggcagtggcatttcctggaatacaagcagtgaacaaatattgtttatgagtcctacaaccatctcaagagaacttggtccaccaggatatgggcctagagaagaccagtgcagtggcacttcatggaatgcaagctgcgagttgggagtatttatgagtcctgtgaccacctcaagagaagacagtccgccaggatatgggcctcgagaaaaccaggagaatgacaatatgagatgcgagttgagaatgtttacaagtcctacaaccatctccagagaagttggcccaccaggatatgagcttactggaaaaaacaagggcaacggcgcttcatgtactacgaattaccagcagggagcgtttacgagtcctgaagccttcccaagagaagcctgtcctccaggatttgtgtctggagagaaccagggtaacgacactccatggtatatgagcagcaaacagatggcgtttacgagtcctacgaccaaccctagagtaggtccgccagggtatggacaggaaaaccagggcagtcgtgtttcttggaatacgagttatgagcagggagtgtttatgagttctacaaacatctcaagagaagccggtccgccaggttatgggcctggggaaagtcagggcaatatcacttcatggatttcgacaggcgggcagagaatgtttacaggtccttcaactatcccgaacgaagtcgggcagcaaggatatggcccttcaggaatcccgggaacggatggctcaaggagtatggacttgaaagcctttccaccaggatatggacctgctggagaaaaccagggcggtggtgcttcagggagcgtcataagcccccaagctcggtctgcagagaacgtagagttttcagacgacgctagaaaaaaggctatacagcgggagctgagacggcggcagaagttcaggtgatggccgtgatgcgaatttctgatcttgctcatcgaattttgactacggattactactttttaagactacatatccagtcttgatggctgaatgagtgacgaccctagttgtcgagacgcaaaaccttttgttgtatgtgttccttttacagacttccttggcttgtcatgaatttctaatgtgaacttgtgctgtgaacttgttgcaaaacctcttgaacctgaagcattcaacatgatgtgagcttgtgcagttactcttcttctgcatgagttcatgtt

SEQ ID NO: 30384 - DNA, 1847 bp, Zea mays
  Clone ID: UC-ZMFLB73015H10_FLI
ctctgcctcatggccacgtactcctagttggatttctttactgcgtggtcacacattctattccagttttgctaggatattcaaaaggcttatacagcaatgtggaatgccagtaatctcttctcttcagagtacactagaagagtttttaatttcaaaagagagaccaaggcaatgtgtcgctgctgaagcgatggctgggatgctgcactctgatatcattgggaatctggaatgtgagaacaactggttgatggcccagttgcataagattatgttagcaccatctgtggagtcagctcctgaatgggcagcttgtattcgatatgctgttacaggaaaagaaagagctggaactcgtgctcctgttctcaggcaaaaagtattagaatgcttatgtactcctcttcctcattccatggcaactagcgtacttgcgaagagatattcttttctgtccgttgctctaatagaaatttctccacccaaaatgtccccagcagagaagcaataccatgttaaaattcttgatgaactacttgacagcatgaaccattcatctgctcaggtaagagaagcaattggtattgccatgtgtgttacaacctcaaatatgagactttctgggttatttggcactggatgttcaccgcaaggccttcatggggatgtaagcatgattgaacaaacaggaaataaatattggtctgaacgtttgacagatggagctaatgaattagccgtaagtatacaaaatagtactcaatctaagcaactagaatcaacatcagattcggctgaagatagcatggatgatagagagcaggctgatgctaaaaggatggaaacgatatttcattttatgatcgcatctttgaagtctgggcgatcttctgttctactggacactattattaggcttgtgtacccaattctctcactacaggaaacatcaaataaagatttatcattgcttgctaagtcagctttcgagttgctgaaatggaggattctacatcggccttttcttgaaactgctattacgtctattcttcctttagtcagtgatcctaactggcgtaccagatctgcactgttatcgtatctcaggacctttacctacaggcacacattcatactttctggctcagagaaatcacaaatctggcaaacaatagaaaaattacttgtggacaaccaagttgaggttagggagcatgctgctggtgttcttgcaagcttaatgaagggtatagatgaagatctatcaaaggatttccgtgaacggtcatatgcacaagcccagcatatttttgttgcacggagaagaaatttgaagttttctgttggtaccatccatggtgcagtccttgctttgacagcttcggtcctttctgttccatacgacatgcctagctggcttccttctaatgtctcgctacttgctcgcttcatccgggagcctccccctataagatcaacagtcacgaaagctgttgcagaatttaagcgcacccatgctgacacatggagcatccagaaggacgcattcactgaagacgaactggaggttctccgtgatacatcttcctcctcgtcgtacttcgcttagattaaaatttcaaaggccataggatattctctggtactggtgttgtgtatatgaatttataactgttgaagtgtcggtgtttttcataaagtatatccttgtacgtacctagttttatttcatcaacagatgccttcgtacaactgagatgaagttatgcagtctactgtataccgtctggacatagcggaagcattatggcatgtgggatccttgcgtgggctgagaaattgtt

SEQ ID NO: 30385 - DNA, 2517 bp, Zea mays
  Clone ID: UC-ZMFLB73016B02_FLI
ctcacactcacgggaaatttgcgtgacccaaaagctcctgaacatgttgttcttggttcttgcagcattctgatctcacagactgttttaagacacttgaccactgattctgtttccctctcttcctttatcatgggaattctggaaagctctcatcatgaatcgttgaagtgtcagaaagctattactgagctctttgtaacatataatatacgtttctctggaatatcaaggagcttctttaaaactcctgaaaatcaagctgacaagccaggatttctcagtctaatttctcaaattaatgctttgggctttgagactaatggactacattggaggtacaatttgatggccaacagagtattactattactaattttggcatccagaagcgaatctggcatatattcacaaatgcttgcaaaaattgctggtcatttcttaagaaatttaaagagtcaactgccccactcaagaatgcttgctatatctgctttgaacacattattgcaaggatcacctcataagacatctgcacaaaattctaagcaaccaatagatcaccctgaagattgcaatatttcatcaacagaagagattttgaatgagataatccgggaggaaggattcatgaatgagacactgaacagtttatctcatgttcatattatttccgacaatgatggttcgtcaaaagcgagttatggggcatcatcttttcaaagcggatctgacaaagcaataacttacttctattttgatttctctgcctcatggccacgtactcctagttggatttctttactgcgtggtcacacattctattccagttttgctaggatattcaaaaggcttatacagcaatgtggaatgccagtaatctcttctcttcagagtacactagaagagtttttaatttcaaaagagagaccaaggcaatgtgtcgctgctgaagcgatggctgggatgctgcactctgatatcattgggaatctggaatgtgagaacaactggttgatggcccagttgcataagattatgttagcaccatctgtggagtcagctcctgaatgggcagcttgtattcgatatgctgttacaggaaaagaaagagctggaactcgtgctcctgttctcaggcaaaaagtattagaatgcttatgtactcctcttcctcattccatggcaactagcgtacttgcgaagagatattcttttctgtccgttgctctaatagaaatttctccacccaaaatgtccccagcagagaagcaataccatgttaaaattcttgatgaactacttgacagcatgaaccattcatctgctcaggtaagagaagcaattggtattgccatgtgtgttacaacctcaaatatgagactttctgggttatttggcactggatgttcaccgcaaggccttcatggggatgtaagcatgattgaacaaacaggaaataaatattggtctgaacgtttgacagatggagctaatgaattagccgtaagtatacaaaatagtactcaatctaagcaactagaatcaacatcagattcggctgaagatagcatggatgatagagagcaggctgatgctaaaaggatggaaacgatatttcattttatgatcgcatctttgaagtctgggcgatcttctgttctactggacactattattaggcttgtgtacccaattctctcactacaggaaacatcaaataaagatttatcattgcttgctaagtcagctttcgagttgctgaaatggaggattctacatcggccttttcttgaaactgctattacgtctattcttcctttagtcagtgatcctaactggcgtaccagatctgcactgttatcgtatctcaggacctttacctacaggcacacattcatactttctggctcagagaaatcacaaatctggcaaacaatagaaaaattacttgtggacaaccaagttgaggttagggagcatgctgctggtgttcttgcaagcttaatgaagggtatagatgaagatctatcaaaggatttccgtgaacggtcatatgcacaagcccagcatatttttgttgcacggagaagaaatttgaagttttctgttggtaccatccatggtgcagtccttgctttgacagcttcggtcctttctgttccatacgacatgcctagctggcttccttctaatgtctcgctacttgctcgcttcatccgggagcctccccctataagatcaacagtcacgaaagctgttgcagaatttaagcgcacccatgctgacacatggagcatccagaaggacgcattcactgaagacgaactggaggttctccgtgatacatcttcctcctcgtcgtacttcgcttagattaaaatttcaaaggccataggatattctctggtactggtgttgtgtatatgaatttataactgttgaagtgtcggtgtttttcataaagtatatccttgtacgtacctagttttatttcatcaacagatgccttcgtac

SEQ ID NO: 30386 - DNA, 1801 bp, Zea mays
  Clone ID: UC-ZMFLB73016C05_FLI
gagaacctgaccaagcgggtgcgcgagaagatgttcgccgccgtgctccgcaacgagatcgcctggttcgacgcggacgagaacgccagcgcgcgcgtggccgccaggctagcgctggacgcccagaacgtgcgctccgccatcggggaccgcatctccgtcatcgtccagaactcggcgctgatgctggtggcctgcaccgcggggttcgtcctccagtggcgcctcgcgctcgtgctcctcgccgtgttcccgctcgtcgtgggcgccaccgtgctgcagaagatgttcatgaagggcttctcgggggacctggaggccgcgcacgccagggccacgcagatcgcgggcgaggccgtggccaacctgcgcaccgtggccgcgttcaacgcggagcgcaagatcacggggctgttcgaggccaacctgcgcggcccgctccggcgctgcttctggaaggggcagatcgccggcagcggctacggcgtggcgcagttcctgctgtacgcgtcctacgcgctggggctgtggtacgcggcgtggctggtgaagcacggcgtgtccgacttctcgcgcaccatccgcgtgttcatggtgctgatggtgtccgcgaacggcgccgccgagacgctgacgctggcgccggacttcatcaagggcgggcgcgcgatgcggtcggtgttcgagacgatcgaccgcaagacggaggtggagcccgacgacgtggacgcggcgccggtgccggagcggccgaggggcgaggtggagctgaagcacgtggacttctcgtacccgtcgcggccggacatccaggtgttccgcgacctgagcctccgtgcgcgcgccgggaagacgctggcgctggtggggccgagcgggtgcggcaagagctcggtgctggctctggtgcagcggttctacgagcccacgtccgggcgcgtgctcctggacggcaaggacgtgcgcaagtacaacctgcgggcgctgcggcgcgtggtggcggtggtaccgcaggagccgttcctgttcgcggcgagcatccacgagaacatcgcgtacgggcgcgagggcgcgacggaggcggaggtggtggaggcggcggcgcaggcgaacgcgcaccggttcatcgcggcgctgccggaggggtaccggacgcaggtgggcgagcgcggggtgcagctgtcgggggggcagcggcagcggatcgcgatcgcgcgcgcgctggtgaagcaggcggccatcgtgctgctggacgaggcgaccagcgcgctggacgccgagtcggagcggtgcgtgcaggaggcgctggagcgcgcggggtccgggcgcaccaccatcgtggtggcgcaccggctggccacggtgcgcggcgcgcacaccatcgcggtcatcgacgacggcaaggtggcggagcaggggtcgcactcgcacctgctcaagcaccatcccgacgggtgctacgcgcggatgctgcagctgcagcggctgacgggcgcggcggccgggcccgggccgtcgacctcgtgcaacggggccgcgtaggacggaatggatggatggatgggtttggttcctcgagagattgatgggtgaggaagctgaagctccggatcaaatggtggtactccatgatcgcaacaatgaggggaaaaaaagaaaggagaaaatacggtggttcatatgattgtacaatttgacgatctgtttgagtcggggttttaggatgatgtaaaccttcactcgccttttttttactcttgtttctcatccgcatcagtatcatctatctacatacagtgtc

SEQ ID NO: 30387 - DNA, 1850 bp, Zea mays
  Clone ID: UC-ZMFLB73016C08_FLI
cgcacacacacacaaccagatctcccccaaatccacccgtcggcacctccgcttcaagatgcagatctttgtgaaaaccctgactggcaagactatcaccctcgaggtggagtcgtctgacaccattgacaacgttaaggccaagatccaggacaaggagggcatccccccagaccagcagcggctcatctttgctggcaaacagcttgaggacgggcgcacgcttgctgactacaacatccagaaggagagcaccctccaccttgtgctccgtctcaggggaggcatgcagatctttgtgaaaaccctgaccggcaagactatcaccctcgaggtggagtcctctgacaccattgacaacgtcaaggccaagatccaggacaaggagggcatccctccagaccagcagcggctcatctttgctgggaagcagcttgaggacgggcgcacgcttgccgactacaacatccagaaggagagcaccctccacttggtgctgcgcctcaggggaggcatgcagatcttcgtgaagaccctgaccggcaagactatcaccctcgaggtggagtcttcagacaccatcgacaacgtcaaggccaagatccaggacaaggagggcattcccccagaccagcagcggctcatctttgctggaaagcagcttgaggacgggcgcacgcttgccgactacaacatccagaaggagagcaccctccacttggtgctgcgcctcaggggaggcatgcagatcttcgtgaagaccctgaccggcaagactatcaccctcgaggtggagtcttcagacaccatcgacaatgtcaaggccaagatccaggacaaggagggcatcccaccggaccagcagcgtttgatcttcgctggcaagcagctggaggatggccgcacccttgcggattacaacatccagaaggagagcaccctccacctggtgctccgtctcaggggtggtatgcagatctttgtgaagacactcactggcaagacaatcacccttgaggtggagtcttcggataccattgacaatgtcaaggccaagatccaggacaaggagggcatcccacccgaccagcagcgcctcatcttcgccggcaagcagctggaggatggccgcaccctggcggattacaacatccagaaggagagcactctccacctggtgctccgcctcaggggtggcatgcagatttttgtgaagacattgactggcaagaccatcaccttggaggtggagagctctgacaccattgacaatgtgaaggccaagatccaggacaaggagggcattcccccagaccagcagcgtctgatctttgcgggcaagcagctggaggatggccgcactctcgcggactacaacatccagaaggagagcacccttcaccttgttctccgcctcagaggtggtatgcagatctttgtaaagaccctgactggaaaaaccataaccctggaggttgagagctcggacaccatcgacaatgtgaaggcgaagatccaggacaaggagggcatccccccggaccagcagcgtctgatcttcgccggcaaacagctggaggatggccgcaccctagcagactacaacatccaaaaggagagcaccctccaccttgtgctccgtctccgtggtggtcagtaagtcatgggtcgtttaagctgccgatgtgcctgcgtcgtctggtgccctctctccatatggaggttgtcaaagtatctgctgttcgtgtcatgagtcgtgtcagtgttggtttaataatggaccggttgtgttgtgtgtgcgtactacccagaactatgacaaatcatgaataagtttgatgtttgaaatt

SEQ ID NO: 30388 - DNA, 1823 bp, Zea mays
  Clone ID: UC-ZMFLB73016E03_FLI
gttttgctttatcatttgggcatttgaagcaaagctctatggagaaaaggcagggaaatgttgtctttctcatttttgcaggctgacgaatttaatgcagtggcaagagttggggttgctgctgaccatcgtggaatcatctgcagtcgtcgtgtgtccacactccctaacatgttgagcctcttgctgatcagatcaggcttgagaaggaaaatttggttttaataagtgttcttgtctggttcgattaaagaaagattcagtaattgtcttttttaggaacatagattcttcatctgtgtataatgtatttttattatctagattgtgatagttatttcaaggcctggtgatcgtatagcttgaccattgattgatgattatctgttgtcttaaggattggtacactgtatgtgttctttggtgttggtggtactttgctgacttctctatttatggtatcaaatatatctattgagtgttggtacttcaggtgcactatttagactattgggatcaatgctgtcagagctcataataaattggacgatatacgagaacaaggtcaattctaaaatatatgcagtattgcaatagtggatggaaacagaacaaaatagttgttccttgcaggtattgcaatatctcaaaccagataaaagtaaatttttactcaggtattttcacctatcttattacaattcatcaaggtattttcacctagcttattacaattcatcaatcttgcttcactacccatggtaacttgattattttcatgcactaactttttgacgtcctatttcttttcttttcccctttcacctcaaaacactcattttcatctcaaagcactaattaccagatacgccaatgtcatttaaattaattttcagcagtgctattattttttctgctatttgttttggaccgattaatattttgtgtactcttcctatttattcgtgggactgtaactgcaaagcttgtaactcaagtcatatgtgtcttgtgcctgctgttgtagctatggagcagaaaattcatgtgaacccactgaagatactaagccaaacgaagtgtacacatattcagaattctagctcaagctgccctaatcaactgaggaggataaggatgccgtggattttgagagggaggagcccgccaattgccagaagtctgtgcaagctgatgcaaatgcgacagctgccccgtctaaggctgttggcttcttcgggaggacattatacaccacattaattctgcttgttgcgagccatccagatgtgtatgagccatgtgatgatttctttgcccttgttgatgcactactctcagacaaagcacaacttttgacactacaaccaaggttatgtatgtaggtagtgtcagatagtggttacgtcgtcacctctattgcaaccatgttttgtacacaatatatgttttatatatggtgcacttggttccgtctctatttcactttttctcttaccctcttcttttcatgctttttcgtcagacgatgacactatcatgcaaggcccactatcctctttgttgtcctctcatggatcctggtccagtggtggaggctgaggaatcagaaaggccctagatcatggccagtcatcgacgcaacggtggagcttatggctggaagtaatatgaagagtctatatctgacaaaaaatcatctaaaattaaatagtgagataagctttgaatagctgatgtaaaattatggagtaacattgtattagttgttgacaaaaaatgtgagaaatttaggtcaataataatatatgtattgtttgttt

SEQ ID NO: 30389 - DNA, 2381 bp, Zea mays
  Clone ID: UC-ZMFLB73016E05_FLI
ggcccaaccaacctgccccaaaacctagctagatttagaaaaacataaaacctgtccccaacccgaaccgtgagatggctgagtacggcgagcgctaccagggcaacggcgaccaggccacggccgagggtggctatgcgcagaccgagtacgccgccggcgccggtggctcgccgccctccgacagcaatccctccgtgttctccgaccacgccgacggccgctcctcccagccccagcatgagacccaatcacatgacagtggttcctccaaatctcaagaaagggaccgagaacgtgataagggcaaggacagggagcgaggcagagaccgtgtccgcgaaaaggagaggggccgagacagggacaaggatcgtgaaagaggtgacagagacagggatcgtgatcgccaccacagggatcgtcgcgagcgcagcgagataagggaacaccgtgatcgttctgatgatcgtgaccgtcgcaggagtcatgattctgagaggagaagagatcgtgacagagatggccatcgtaggcatcgctcccgttccccttctaagggtcgtgaccgtgaccgcagatctagttctcattcacgctctagatcgaagagcaagcgtgtgagtggttttgaccaagcacctacacaacaggcagttcctattgttgctgctggtgttatccctggtcagctgcctggtgtcaccgctcctattcctggggttggggtgcttccaaacttgtataatttggctgcaggacagttcaacccccatgttattcagccacaagccatgacacaacaggctacccggcatgctcggcctgtctatgtgggcggacttcctccaactgctaatgagcagaccgttgccatattcttcaatggagttatggctgctattggaggaaacacagctggtccaggtgatgctgttcccagtcaaccaccgctatggcctaggggcttcattcagcagcatcctttggattgcaacatgatgagaaacattaatttttctaatgcatcctatggtccaacaacaatgtgggctcccattcagacaggaaatataagttccgaatcaaccatgctaccagccacacaatctgcagtatattggaatcattatatgaactttgtcaggaatcctcttggttcagttcaaggaaatccttttccagattcgttttcaggtacaaatactagtacacctttgcagggttcgaatacaataccttcaatacctgtcaacttggagtccgctgctgaacatagtgttcaggacatcaatagtcctataaagacttctgcccctgttacaaaaccaaagaaaacaaaggaacaaaattatactgctgctgaagaccttctactttgcacaacctggttgcaaattagcagtgatcctattgtccacactggacaaaggaagaagggactttgggcacgaatagaaaaaaggtacaacgaacaaaggggcgagtacccttgtagaatgaatcgagcccttagcagcagatgggacaagattagagcagatgttggtaagttctcaggctgttacgcaagagtgctgcgagagaaacaaagtggtttgacagacgacgataagacttccaaggcggcaactttgtttgcacatgaggagaacaaaccatttcattttatgcattgctggcataagctgaagggggaacctaaatgggagagcatttgtcaaggacctttccgaggattacatggaaaagcaattggatcttctggtggtccttttattggtgtagaagaatcagatagtgggtctgctggtttgactggtaaacggcctctctgtcgtgattcttctaaatcagagagaaagaaggctgcgtcatcaacgacgacggaatacttaagccgtcttcaagaattaactgaaaaactaattcagcgcatcatagaaaagggtgagaagaaatataagtacaatgaacaggacatggagctagagaagaagaggttggacttggaagcaaaaaaattaagcattcgtaaaagggaattgagattaaaagaactaagtatggccgaacaacaactcgagatgctggagcgtactcgtgaagacgaggtcgatccagaagtatggagtatgatgaaggagcgcaaaaaacatttgcagcagttcatatttagtttttgctaaatttactgttgtttaacatgtcgtgcttctgtttccatatccggtttgcgaagaaatttataagtgcattgtcttatttgctttctaaaacattataaagttgttgtatgcttatgtcttgcaagacatgtcagtgttattaaagtttgtaacgttaattctgaaaggaaatgggcattaactattttctat

SEQ ID NO: 30390 - DNA, 1206 bp, Zea mays
  Clone ID: UC-ZMFLB73016E08_FLI
gtgaatctgaaactgagttgaaaagcaaaattgatggccttaaagcgaaacttcgcgctcatgaagctcaaagaaaggaggaagaaaaggtcctgtttgctattgataacctggatacttccactacactaatgcataaacccaagaactatggcaaggcaaccgacctgctgaaatctgaggaggatcggatgaagcttctgtgtgaactacagaaggcccgcgaacagcgctccatggtacataaggaaataagaagcatgaatgagtgtgattatattgatcgtgagattggagtccttgaagcagaaatagaggattcctgcatctccatactggaaactgacattgagaagtttgtccgtgacaacactttagcagagatttgggagggtagcgcaaaggatctggaggcattgctggtcgattaccaagactgtgttttccaagtcaacttgaaggaggaagagatcaaggtgtgcagtgagtccttgcagtatcaagccagggacatggataaacttcagtcgaagctgaaccaagcgatccgggagctgggtgagcttctgcaagatagaagaagcctaaccgcttgcagtctggatgaacccacgctgcccgttggtgaaaaggtggcagcagaccttgaggccgtccggattcatgtcgatgaagctaagcagcttttgattctcgacaaccaagctaattcatgaacctgcgcagctagtttcaggtcccttataaagatgcgacgagtgacaggctagtctgtcttggcttctgctgttcagatccttagtacgtagtagcaagacatcagagatgggaagctgcggaatttgcttcattagttggaagctatctgaagccgaatctgctgattcttttttccgtggatcagctaccttcttctggtggtcttgcttcgagtcaaaacaacaggtcctgcaagccactgttccggatccgatttctcctctggtgtacacttcaagatggagcggagaaactgatccgacttaggcttgaccttttgcttctgtaactctccagagactggtagcaactagcaaccagtgggtggacttgtatcacaacttaatctgagccaggtgtcttattttatttatgctataagtgcacaaatgctgcactccagtttcttgtagaaattttcgggctgatcttgaattttacctgctg

SEQ ID NO: 30391 - DNA, 1005 bp, Zea mays
  Clone ID: UC-ZMFLB73016H09_FLI
ctgttgagctgcgacgaggtagagcgtgcttaataaatttccccatcaaggaatactctgttgagatctatgaatggtctggaacaagctggaagccatatgttgctgatgatgtgcaactccagtttttcatgatgagtccttatgttctgaaaactatgtcgaatgacaacaagggtttatactcaacatccttcaaagttcctgatgtctacggagttttcaaaacataaggactcatcatgaaaactatgtcgaatgacaacaagggtttatactcaacatccttcaaagttcctgatgtctacggagttttccagttcaaagttgagtaccagaggctgggatatactggtttgtcttttacaaagcagattccagtgcgcccttacaggcataacgagtatgagaggttcataacatcagcgtacccatactacactgcctcattttcaacggtaagatctgcctccatatgctattcagtagacgtgatgaagatgttcttgcaccttttacagcttcacctccatatgagctttatcattaaattcacttgcgtagaatgtgttataggtagccttgttttccttacggcctaatttcaatatgcattgggagctttcaatccacatgtactatgtatcagcacgtcgtttcttcctcgttgcagatgtgtgctttcttcatattctcgcttgtgtacctgtaccacaaataaaggactcacgggagcgcacaagtttctggaggctgctgatgcgacctagatctgtggccaagtgttacccggtgcaattttatggaatcatatatttgtagtaggccaacttagctagaattagacgaccgtgaccgcaatcatgggaaatttactcgtgctagtaggatgttcgatctgccccacaaattttttttgttcggatccttctgatcagcacttgtgaaaacgtttacagtctgtagcattgaaaggatgacgaagcatgtagtgattttgaaact

SEQ ID NO: 30392 - DNA, 808 bp, Zea mays
  Clone ID: UC-ZMFLB73017A11_FLI
acccaaactgccatgcatgagaatagatagacagaaagaacaggaaccaaccaacacaagacacaacaagctgcagcagcggcaggcatggggcaccgcgccactgacaccgggccccaccaccattaccacccgacgcacactttatttagcccacgtcactcgcagcccgcaccggacacgtccacgcgacagtcactgctagctacgtaccgggctacgtacgagacacacacacacacagagagagacgccagtaataaccgtagcgtactgaacagcaaaatcccgtgtcatactgccatgtacgcgcgcgagcgactaccccgccacgcgcgcacgccgatcccctgggccctggccgccgccgctgcgtgcgcacggcctcactcgctggccttctcgggctcctcaggagcagcaacctcctccgcctcggcggccggctcctggggaccagcaggagcaggagcctccggctcgtccgcggcgagctcctcgggagcagcagcctctgcctcggcgaccggctcggccgcggcgggctcctcggcaccagcaggaggagcagcagcagcctcctcctcggcggctgcctcctgctcggccgcgggagtctcctcgggaccagcaggagcagcagcctcagcctcggcggccggatcggccgccgcgggctcctcggcaccagcaggagcagcggcctcgggctcggcggctgcctgctgctcggccgcgggaagctcctcgggatcagcaggagcagcagcctcagcctcggcctcggcctcggcctcggcgggggcag

SEQ ID NO: 30393 - DNA, 843 bp, Zea mays
  Clone ID: UC-ZMFLB73017B01_FLI
ctctgctcctccttttccactggtctgcgtctgcgtctgcgtctgcactacttcaacaagtccgccgggagggcggcgagcaacaacaacaacaacaacaacagccacgccggcggcggcaacaagaagggcggcgccggggagtacggcaggaagaagcacgccaagagcgagggcgcggcggcggccacggacaagcagcggttcaagacgctgccggcgtcggaggcgctgccgcggggccaggccatcggcgggtacatcttcgtctgcaacaacgacactatggacgagaacctcaggagggagctgttcgggctgccgtccaggtacagggactctgtgcgtgctatccgcccgggactgcccctcttcctctacaactactccacgcaccagctccacggcatcttcgaggccgcgagcttcggcgggaccaacatcgacccgacggcgtgggaggacaagaagtgccccggcgagtcgcgctttcctgcgcaggtgcgggtggcaacgcggaagatctacgacccgctggaggaggacgccttccgccccatcctgcaccactacgacgggcccaagttccggctcgagctctccgtcacctaggccctcgccctcctcgacatcttcgccgacaaggacgacgcctgatccccatcggatctgtcgtcgggccactcgaagctcggatgcacgaatgaatgaacaaacaataataacgaatggatgtgcatgtatatcgtcatgcgcatgtcccacgacgagacgggagtataccacggtgtagtagtattatattaatacgtaattaatatagtatgtccacctttgtttgat

SEQ ID NO: 30394 - DNA, 902 bp, Zea mays
  Clone ID: UC-ZMFLB73017B07_FLI
tggagaacgggtccgccgtggcggtgaagcggctcaaggacgtggacctcccggagccggagttccgggagcgcatcgcggccatcggcgccgtgcagcacgagctggtggtgcccctccgcgcctactacttcagcaaggacgagaagctcctcgtctacgactacatgtccatgggcagcctctccgccctgctgcacgggaaccgcgcctccggccggacgccgctggactgggagacgcggtcggcgatcgcgctggcggcggctcgcggcgtggcgcacatccactccacggggcccacggcgtcgcacggcaacatcaagtcctccaacgtccttctcaccaagaactacgaggcgcgcgtgtcggaccacggcctccccacgctcgtcggcccctccttctcgcccaccagggtgtccggctaccgcgcaccggaggtcaccgacatccgccgcgtctcgcagaaggccgacgtctacagcttcggcgtcctcctgctggagctgctcacggggaaggcgcccacgcacgccgtcgtcaacgaggaggggctcgacctgccgcgctgggtgcagtccgtcgtgcgggaggagtggaccgccgaggtgttcgaccaggagctcctcaggtaccaaaacgtcgaggaggagatggtgcagctcctccagctcgccatcgactgctccgcgcagcaccccgacaggaggcccgccatgtccgaggtggccacgcggatcgacgagatccgccgctccagcctcggcgaccggcaggtggccgacagcgccgaaggcgacgagccatctctataaccgccgtagcagtagctcctcccctgatccaccaccacacgtactgtgtcaatctcagtgaatgaaaattgcttagttctttgc

SEQ ID NO: 30395 - DNA, 1187 bp, Zea mays
  Clone ID: UC-ZMFLB73017C07_FLI
cttggccatggaaccacagccaccatttgctcaccacaacctgtcgatggattaccaaccggatccttccttatttctcttgactgtggattgttccacacaaccgtagtctcctctgatggagaggtgtggtgctggggaatggagagaggtcttggattgtgcccagatgctagcttttcgggagttgatgaaggggatgctttatatccaataagagttcagtctcctgagaccaatgggttcaagtttcttggtccagtgcagatcgcctgtggagctgcccacactgttcttgttgctggtgatgggtataggatgtgggcatggggcagaggccgcagtggtgtgcttgggagaggccagactgctgacagttacataccatgcgttgtgatgtggcctcctcttgatgagaactttcatgaggaccaaatgggaggatcaacatcaagagtgaatgatcacactagcactgagttggaacagaagctatctgctgcctcggaggagttacaattccttaggtcaaaactgacactcatggagagatatgccaatatacttcacatctcaatcttccgtaagccacttgatgaacgggcgctaccacgttcacttcaggaatcttccgtctttgatatcagaaaggaatttgagaacattttggatgcagcagatactgatgaacttaatcgtttagagatcttctaccgcagcatgctttctggcgttaaagacaagcttctgaagagaagagtacgagaaatggtccaacaatgcattatttcactcagcagggaggccaaaccctaaagataagtgaattggattattacacttgttaccggactgcaagtgggtacagtatcacctttggtctcactaaaattgcaaaaaaaaaaggtcaacccagtgtcttatctgtttcttcaaacatagtgagtagatctgtcctggcatcaagatcatcacctggccgaccattgcacgaagacagcattactcatactgacatgtaagcatatatgttgtttatgaaattctttatatgataaatgcatcctagataaattgaatcctgtgtaaaggatgtttctgtggattgtcatagacggacaagaatttatggacatatggttaaagtgttatcggaaaagccttaggcaagtagcagtttaaattat

SEQ ID NO: 30396 - DNA, 1060 bp, Zea mays
  Clone ID: UC-ZMFLB73017D04_FLI
gcaaaaaggccgcgacgagccgaccagctctactgcccccttccggccttcggcgaccgtgacgagcaacgacgaccacggcgacgatggccgcttcctccctctgccacgggcacttgctcctgtttctcctcgtgtccgtcacatcggcctgcctcggtaccgcggcagcgcatcaagccgggtctggagagggttacacgatcgccggccgcgtcaagatcgatggcatgagtgagaagggctatggtcttccagccaagacatcaaacacaaaagtgatacttaatggcggccaaagggttacatttgccaggccagacggctactttgcattccacaacgtgccagctggaactcatctgattgaggtctcctcaattggttacttcttttcccctgtccgagttgatataagtgcaaggaatcctggatatattcaagcagcattgactgaaaccagaagggttctgaatgagcttgttctggaacctctgaaagaagagcagtactatgaggttagggagccgttctccatcatgtcacttttgaagagccccatggggttaatggttggttttatggtcttaatggtctttgtgatgcccaagatgatggagaacttagatcccgaggagatgaagcaagctcaagaacaaatgaggaacaaccctgtatcattctctggcttgctcgccagagcgcagggctagagaagtagactgtagacatgaggatactgcaaaggtcaaacattctagaatgtgagtaagagcactattaaagtgcttggcacgtcactcactcggggcaatttcctggggataagaaggaaatcctttccccctgtttttaccgtattttagggctagtttgggaataccaatttcccaaaagatttatattttcccatgggaaaatgaactaatttcccttgggaaaataaaaatctcttggaaatttggggttccaaactagcccttaagttgtaatttgtctgcggtgtagaaccttctgaaacctctgagctagtgatgcgtcagattgagatattttgttc

SEQ ID NO: 30397 - DNA, 1260 bp, Zea mays
  Clone ID: UC-ZMFLB73017D10_FLI
cacggaccacggggcaccaccacaaaccagacgcgacgcacgcgcgcaaaatcatccggcggagccagggcggaggcaagccagagacgcggcacgcgacgcgtgagggcgaggagcagcggcagcgcgggcgcggcgacaccgcgaggacagagcgagacgcagcggcggaggaggggcagaggcgagcgccgcctagagtccctgctaccatggacactttcttcctgtcgcacggctcgcccacgctctccatcgacgacaacatcccggcgcggcacttcttcaagtcgtgggtgccggcgaaggtcgcgggcgaccagcccccgcgcgccatcctcgtcgtgtcgggacactgggacacggccacgccggaggtcaacgtcatccgcggcagcaacgacaccatttacgacttctatggctttcccaagcccatgtacaagctcaagtaccccgctccgggcgccccggacctggccctgcggaccaaagggctcctggagcaagccgggttcggccccgtgaaggaggaccacagccgcgggctggaccacggcgcctgggtgccgctgatgctcatgtacccggacgccgacatccccgtgtgccagctgtcggtgcagagcgaccgggacggcgcgtaccactacagcctcggcagggcgctggcgccgctgcgggaggagggcgtcctcgtcctcggctccggcagcgccacgcacaacctgcgcaagatggggccgttcgacgcgcccgtgccgcagtgggccgccgagttcgacgcctggctcaaggactcgctcctcgacggaaggtacgaggacgtgaaccggttcgaggagaaagcgccgcatgggagggtggcgcacccgtggccggaccacttctacccgctgcacgtggcgctcggcgccgccggggacggcgcaaaggcggagcagatccaccagtgctggaccaacgccacgctctcctacgcgtcctacaggttcaccaccaagagctgacgcgcccgtgcagctgtcgggtggaggaccgccacccccctcccccccggggccagctgctgaattcgtgggaagcacatccgtcgacgtgcgcgacagcattcatatacacgcaccgcatgtagaaatgtgtttttctcaataaactcccgagtgccgatcgcggtagatatgtcttgcattgttcaacgcagcagcttgtttcgagaagcattctgttgttaaatctcattccatcatcattgtcttc

SEQ ID NO: 30398 - DNA, 1038 bp, Zea mays
  Clone ID: UC-ZMFLB73017E03_FLI
caagtctcatcagtgaccctgttttctctttctggtttaaccgacatgctggtgaaggagaaggtggtgaaattgtgtttggtggaatggattctagtcactacaagggtgatcacacctatgtcccagtcactcagaagggatactggcagtttaatatgggtgatgtcctggttgatggaaagtccactgggttttgtgctggtggttgtgcagcaatagcagattctggaacttccttgcttgctggccccacagccattattactgaaatcaacgaaaagatcggtgctgctggtgtagtcagccaggagtgcaagactgttgtttctcaatacggacaacagatcctagatcttctgctagctgagacgcaaccagcgaagatctgttctcaggttggcctgtgcacttttgatggcactcacggtgttagcactggaattcgtagcgtagtggatgacaaagctgggaaatcaaatggtggtctcaagagtgatccaatgtgcaatgcctgtgagatggctgtggtatggatgcagaaccaactggcccagaacaagacacaggagctcatcctgacctacattaatcagctttgtgagcgtcttccttctcccatgggagaatcagccgtggactgtgccagtcttgggtccatgcccgacattgcgttcaccattggaggcaagaagttcaagctgaaaccggagcagtacattctgaaggtcggtgaaggacaagctgcccagtgcatcagtggattcacagctatggacatcccaccacctcgtggccccctctggatcctgggcgatgttttcatgggagtctaccacaccgtcttcgattacggcaagctgagggttggcttcgcggagtcggcctaaggaacgtatggtttggcgcctcctccagaggaggcaaaacgcatgcgccgagagaaaagcttcgcttgtttttaacttgtgtatttatgcggccggcggtgtgtgtatatatgctacatgtttagtgatgctttccgagacctgagac

SEQ ID NO: 30399 - DNA, 1210 bp, Zea mays
  Clone ID: UC-ZMFLB73017F10_FLI
ggagctctcattgccatggcaatggtaatgatccaaacgaatgaatcctttgattctcgtgttggagcatttaggcgtcagttggagaagatcattcttgacaaacatgaggacaccatgagcaagatgggtgccatactagcttctggtgtccttgatgctggtggtaggaatgttacaatcaagctcctttcaagaaacaagcatgacaaactcactgctgtgattggtcttgccgttttcagtcagttctggtactggtatcctctcttatattttatcagcctggccttctcaccaacagccttcattgggctcaactctgatttgaaagtgccaaagtttgagttcctgtcacatgctaaaccgtctctcttcgagtatcccaaaccgacaactcagcagactactacttcgacagtgaaactgccaacagccattttgtcaacttatgcgaaagcaaaatctagggcaaagaaggacgcagaaagcaaagctaaccaggagaaagcaacagaggaggcttctggttctacctcaagcaaggcggctaaagctcaagagaaggatgctgatgtcatgcaggttgataatgccactgaaaagaaagctcctgaaccagaagcaacgtatcaactcctgacgaacccagctcgggtgatccctgcacaggagaagttcatcaagtttcttgaaaacagccgatacgtccctgtgaaaccagcgccttctggattcatcctcctccgagaccttcagcccactgaggccgaggaccttgcactgaccgatgctcccacagcagttggaggaagcaccggcaacactgccacagctgcaagccaacaggggtccggatcatctgccatggccgttgacgacgagccacaaccgccgcaaccctttgagtactcctcataagcgtagatacctgggtccgtagagggttgtgttggtggtctgaacttgcgattcccctcgtcctttctataccttttgttatcttttttttttactttctgagtatgtagtgtgcggaaatttgttgttggttggaagactttttgtaggctcgagaattatacttgagtcggctctataggatcatcgttgagaatctgggtgctcttatagctaagccccaacaaccctgattttatcctagccgtgaagtcatacatagagcctgggttattcatctgggttattc

SEQ ID NO: 30400 - DNA, 949 bp, Zea mays
  Clone ID: UC-ZMFLB73017G03_FLI
accagacctcatctcactccgctaccccctcatcctgccatccaccagaagcagtgcaagcatatggcgcgccgtgccagcctgctcctcgccgcggcgctgctcgtcgccgtcgctgccgcggcggtgccgccgacgtgcgagcgcatcgagtgcccggcgtacgaggtggtggacagcgccaacgggttcgagatccggcggtacacggacgccatgtggatcaccacggcgcccatcgaggacatctccttcgtcgccgccacgcgcaccggcttcctacagctgttcgactacatccagggcaagaacgcgtacaaccagacgatcgagatgacggcgccggtgctgacgcgggtgtcgcccagcgacgggcccttctgcgcctccgccttcgccgtgagcttctacgtgccggccaagaaccaggcggacccgccgccggccgagggcctgcgcgtggaccgctgggccggggccaggtacgcggccgtgcgccgcttcgggggcttcgtggcggacgccgacgtcggggagcaggcggcgcggctcgaggccagcctccagggcacccggtgggccgccgccgtcaacgacgcgcgcagggccgacccggcctcgccctacaccgtcgcgcagtacaactcgcccttcgagttcaccggcagggtcaacgagatctggatgctcttcgacgcggacgacgacgccagtatgtgatgcgattccaagcgtgctctcggggcactgaggcgtttagggaaggacgcgcatgcacctgtgcagtgcagctgtgctaccatgaagtatttcgtgctcttgtgcgctagcttcgtttactttcgacttttcgagtaaggaataaggtgcctcttgttgcaataatgataaagctaatcctgcttgtaattacatttcgtggcatggccattccggcaacatgtccagt

SEQ ID NO: 30401 - DNA, 3107 bp, Zea mays
  Clone ID: UC-ZMFLB73017G11_FLI
cttatctgcaaaatcttgacttgtcacgcaactccatccaaggaccaattccagcatcatgggctgacctacctgtttttaatctgtctctccagggaaatcgtatatttggaaccctgccgaaggagcttggacgcatgcccaagttgaaatctatacagctagaaggcaatcagcttgcaggttctattccaccagagctgggtaacatcatcagtctgcagagatttttcatttctgcgaataacatcacaggagagttgccctcaaccttttctaggctgacaaacatgacagattttcgtgttgatggaaacagtatctcagggaaaatacctagtttcataaagaactggcagagcgtcaacagaatcgatatgcagggtaccttgatgagtgggcctattcctccagaaatttccttgttgaagaacttgacagaactgagggtgactgatttgagtggaccaagaatgaaatttcctcccttacaaaatgcactacaccttacggaagtggtcttaagaaattgctccatatatggtgaaattccttcttaccttggtcaaatgcagtacctgaaagtattggatttaagcttcaacaagttgactgataaagttccagaaaattttggagcaatgatagcactacaatatttgtacctgactgacaatatgctgactggagatttgcctgcttggatgttgaaaaacaaggcgagcaataaagtaaacatggatatatcgtataatgacttcacgggcaaccctccatctgaatgtcagcaagcaaacgtaaatatggtgtcaagcttttcatcttcaaataacaattcattgcaaccatgtttaagaaagaatcttccttgcacaaccagaccacgccattcctccttattcataaactgtggcggaaagagtgttgtggtcgatgggaatacttatgaggatgactcgtctcaaataggaacatcaatgtattctgtatctgatgataagaaatgggcatatagtagcactggtgattttgttggcaatgagaatgctgactacattgctagaaacacatcaaagctaaatctggcttacccagagctttacactgaagctcgcctctcacctctgtcactgaaatactatggcctttgcatggagaatggtgaatatacggtaaaacttcactttgcagaaattgtgttcacagaagatcgtacttattccagcaatggcaaacgtgttttcgatgtcttcatccagggggtcaaagttttggaggattttgacatcaaagatgagtctggcggtgtccatcgtgcgaccataaaattttttgcaaccaacattagcgaaaatacactagaaatccacttctactggggaggcaaaggcaccacagcgataccttaccgtggcgtgtatggtccactgatctcagccatatcagtgacaaagatgggcaggaaccaccatggactctctactggagtggcggttgccatagtaatagttgcgacatgcttggctgttatagttctaatatctttatatttcaaagtcttccgaaagaagaatataaaaggaaatggtagacagttcttttaccaaggaaggaaaactgctacttcagagcttcaaacacgggcacagtatttctttagtttgaaagagatcgaatctgcaacaaaacattttgatcctgcaaataaaataggtgagggtggctttggacctgtttacaagggcacactagcaaatggtactatagttgcagttaaaaagctatcttcaaagtcgagccaaggaaatcgcgagtttttaaatgagataggaataatatctgctctaaggcatccgaatcttgtgaggctatttggttgctgtattgatggggatcagcttcttcttatatatgaattcttggaaaataatagtcttggccgtgcgctttttggccgcacagaacatcagttaaaattggattggccaacaaggtacaatatctgccttggaactgcaaaaggcctggtctatctgcatgaagagtctgcactaaaaatcgtccacagagatattaagccatcaaatattcttcttgatggaaagatgcgacctaaaatatcagattttggcttggctaaactgaatgatgactgtggacgtgtgagcactcggatcgctggaactgttggttatatggcccctgaatatgccacaagaggttgcttaacacgtaaagcggacatctatagttatggagtggtggctcttgaggttgttagtggaatgagcaatacgaatagcatgtcaaatgaagaatatctgcatcttcttgattgggctgaaagattgaagcagcaagggaagctgctggaaatggtggaccggcgtctcggttctgactactcccaagaacaggcactgaggctgctggatgtagctctcctctgtacaagcatacaaccaacccagcggccaagaatgtcttcagtggtgaagatgctttgtggtgagatccccgtcgagattgtacctgctgacgatgatctaagtgaagatctacgactcaacatcgctcaatcccggcaatcaatagataacagccaaacaaattggtcccagtactcagtaaataacagccaaacaaattggtctgaaacgctttcaagcgatcgttcggtcttgccccacagcagcaaggacagtggctacctcccatcttcgagctccctttctgtcaagctgtgaacttcagcatcgagaatagctagccaggtgtcggcttttttttggggcccgttgctgcagttgtacataggcaaatgttgggtttcatgcttgcaatgcaagtatttgatgtctcatctcgattgtcaagtgtcattcaagaatatcgtccacgacacatggcaattgatcacagtactgtctcaacgtcagccatatttcggctagctccttagtttgttgctttggatgtagaaagttataatgacttataatttggaacagatggagatgtagtatatcattaggacagtgcacttgagaaatgtaggccagaaatattgtttcatatatgcagatcttggagacagtgcaatactt

SEQ ID NO: 30402 - DNA, 2340 bp, Zea mays
  Clone ID: UC-ZMFLB73017H01_FLI
tttctcgcttcaattgttgcaggatacaccgtgagtaggcgtgatggtgcttgataccccgttttcgtgcagcttgttgctaattcgttttagtttgagggatcaagaaccaccttgttctttctttctttcttttttggactatgatgaatcattgcaaatctcttgaatacatttttcactataaaatactgccttgcctttgagctccttggttcacgtgcaatgtttctttgccctccgattttgcaggacctcgagttattaagttgggcgaggagaggtggttcattccagcagggatccttctcgtgagcccagtcgatctgaccgtccttggtatctggggggggttgttctgtactctctctttaatttgtgagtcgtgacaggttcttgaagtgcaattgttaagagttttagttgtagaggaagagaagggtttgctaatatggcgttggcagggacctccaaagtagtgctgggatgtatcgcctttgggattttctgggtgatggccgtcttccccaccgtcccgttcatgcctgttgggcggacggctgggtccctccttggtgctatgctaatggtcctgttccgcgtcatctccccggaggacgcgtacgccgcgattgacctcccgatcatcggcctgctcttcgggacaatggtcgtcagcatcttccttgagagggctgacatgtttaagtacctcgggaacctgctctcgtggaagagcagaggcagcaaggacctgctcttccgagtctgcatcgtgtccgcgtttgccagcgcgcttttcaccaatgacacatgctgtgttgtcctcaccgagttcatcctcaaggttgctaggcaaaacaacctgccaccacagcctttccttctggcccttgccactagttcgaacatcggctctgctgccacgccgatcggcaaccctcagaaccttgtcatagctgtcgagagtgggatctcatttggccagttcttgctgggagttttcccagctatgatcgttggggttctcacaaacgctgctatcctccttttgtacttctggaaatacttgtcggtggagaaggatcaggagggtgggcagcccacaggaccagaggtggttgccgacgatgaggttacttcccatcggttcacaccggctagaatgtcacatgtttcttctctgaatccagatgacatggattgcgtaagcgaaccgatcatcaggagcaacagtgtcagtactactgggaatgagaacctgagaagcagaagcatcaattctgaggctgacattcagcttgcgatcaagtctctgcgggcatcaagcatgtcgcatgagatggtagaggtctcgacggttcctgatcggagagatgaaggtgcatcctcaaggaagttcacaaggactgctagccagcaaaggagcgtgataatagaggatttagcaccctccccagagattaatggggaaaaggagaaagaaactgaagttgcagagaagagatggaaagtacttgtgtggaagactgctgtttatcttatcactctcggtatgctcattgcacttctaatgggactgaacatgtcctggactgcaatcactgcagctcttgttcttctggcactcgattttacggacgcacaagcttgtcttgagaaggtgtcatattcactgctgatctttttctgcgggatgtttatcactgttgatggcttcaacaaaacgggcataccgaacacactatgggagttagtggaaccatattcacgaatcgatagtgcgaaaggtgttgcacttcttgccgtggtgattcttatcctttcaaacgtggcctctaatgttcctacagtcctattgctcggtacaagagtggctgcatcagcggcttcgatttctcatggttcagagaggaaagcctggctcatccttgcatgggtcagcaccgtggctgggaacctcaccctcctaggctctgcggcgaatctgattgtctgcgagcaggccaggcgggcccagttcttcggctacaacctcaccttctggagccacctccgattcggggtcccgtcgaccatcatcgtcacggcgattggtttgctcatcgtcatcagttactgaaacagctgaaggcagaagagcgtagtgtaagagaagcagaatggataaaaatccttccaataagaagtacatgtaaattaggcttgccctataactcaagtgtgtatcggtacgttatgtctccgtctgtgctcttgctcgtgagcaagcagcacatggctgaccgtgtagcttgcatttccattgcataataggcttatgaagaatgctttggtaat

SEQ ID NO: 30403 - DNA, 1962 bp, Zea mays
  Clone ID: UC-ZMFLB73017H11_FLI
gtttggcaaagcaagtggcatggccccacgtgctagggtagctgtctacaaggttctttacaggcttttcggtggttatgtggctgatgttgtggcagctattgatcaggctgttcaggatggtgttgacattctcaacctttctgttggacccaatagcccaccaacagctacaaggactacttttttgaatccttttgacgctgcacttctttctgctgtgaaagctggggtatttgttgcccaagctgcaggaaatggcggaccatttccaaaaacactggtgtctttcagcccatggataaccactgttgctgctggagttgatgaccgcagatacaagaatcatttaacactaggaaatggaaaacttatttctggacttggagtatctcctgcaacacatgggaatatgtcgtttagcctgatttctgcagctgatgctcttctgggctcatctgcaagcaagtacagtgcattagactgtcagaggccagaactattgaataagaggaaagttcagggaaaaattcttttgtgtggctattcattcaattacatttctgggacagcctcaataaagaaagtgtctcagacggccaggagtctcggcgcagctggctttgttgttgctgtggagaatagttacccaggaacaaaatttgaccctgtaccagtcagcatccctggaattctcatcacagatgtcagcaaaaccgaggatcttatagactactacaattcttccaccgtaagagattgggctggaagggctacagcctttaaagcaacagccggtattgcagatggtttggcaccaacactatacaattcagctccccaggttgcgctgttctcttctcgaggacctgatgtgaaagattttagctttcaagatgctgatgtccttaaaccagacatacttgctcctggcaatctcatatgggctgcatgggcgcctaatggaacagatgaatcaaattatgctggtgaaggatttgcaatggtttctggaactagcatggctgcgccgcatattgctggcattgcagcactgataaagcagaagaacccaaagtggagcccctcagcaataaaatctgccctgatgacaacggccaatacactggacaaagggagccatcctcttagagcgcagcagtacaccgcatcagaaatgatgacactttcacgggccacaccgttcgattgtggcagtggcgctgttaacccaaaaggcgccctcgatcctggccttgttctagacgcaagccatgaagactacatcacgtttctgtgctcgatccccgacgtcaaccagagcgaagtatcaaacatagccggctcggcttgcaactccaactccaagggacaacgccccttcgacctcaacatcccctcgatcgccgtctctcagcttcgaggcacggtggtagtgaagcggaccgtcacgagcgtgtccgacgaaaccgagacctacaccatcatgacaaggatgccgccagaggtcgccctggaggtgacgcctccggcggtgaccgtggtccccggagcatcacgagagataactgtgaccctgacggcgaggtccgtgaccggcacctacagtttcggtgagattgccatgaaaggtgaccgcggtcacctcgtcagaatcccagtcgtagctatgggattcaagtaggtagaagacgactgtgacatctcctagggagtagaggataggaagagcgagttgtgcctctgtaatctgaggtcttgagctgcagaggaacgttgtataattttttcataggttgtagagaataagagttggcacaatgctgtaagtgttatgcatgccccctccaggttgtaaaatatatttgggtgccctaaatcctctgacatggtgactagaggacctcttgtattgtagtccagccttgttctgattctctaatgcatgaaggtttgaatctc

SEQ ID NO: 30404 - DNA, 587 bp, Zea mays
  Clone ID: UC-ZMFLB73017H12_FLI
cgagggagccaccgtcaccgagcgcggttacaagaaaatccaatctctcccccacgctcgtttcgactcgcgccatggaggcgcaggcgcaggacaacagggcggaggatggggacggcgcgcggcaacacgtagccggcggcgtcgcggcgacggggatggctatgggcgcgatctccatgcacgggttcatggtcccgaagccagagccggtggagttcttcggcgggatggccgtggtgcggagcaagccgccgccgcggaaccgcgaccggcacaccaaggtggagggccgggggcggcggatccgcatgcccgcggcgtgcgcggccaggatcttccagctgacgcgggagctagggcacaagtccgacggcgagaccatccggtggctgctgcagcagtcggagcccgccatcatcgccgccaccggcaccggcacggtaccggcgatcgcgaccacggtcgacggcgtgctccgcatccccacgcagtcctcgtcgtcctccagcccctcgtccctcaccaccgtggtcgacggcgacgaggcgtccgccaagcgccgccggaagctgcagccgacgcga

SEQ ID NO: 30405 - DNA, 475 bp, Zea mays
  Clone ID: UC-ZMFLB73018A05_FLI
gttggcttggcgcaactgttagatctcgctgtgattgtgtagacatgaatgagctgttactgcaaacgagatttcagtcagatgagcttcaactgggtacagctgagagacattgatgtgttatgacctggccttctgtgcgagtcagctgcgctgtagtatctagaccaagtggaaatgctcttgtcatatcccataacagagatgcagttcaggtgctgccggacgtgaaacagtagtgtgtgtctgtgagctacaacacgcgggaaggttcgagtatgatgatccatcagccgagctaagaggaaaggggtacttaactggtttggaggacaagcgggcgacagttttggaaattctgttactcttctctaacaaactgtattcttctcccttccagtctcttcatctgttttcgttgtaattctgtatgctgttgaacttgtggagaaagaagaggaacaattttcttctg

SEQ ID NO: 30406 - DNA, 343 bp, Zea mays
  Clone ID: UC-ZMFLB73018A09_FLI
ggacaatagatgttggagatttctgggtatggatggagttcctgtgggaaaggagcagcgcgacgtatctttacctatttcttgtacatcttccctgctggcttttgtgcgtccttgtgttcctgcacccatgtcaccaatcagaatataagctgaagcaggaatagctgtttggcatccatagtcttgtctttttggatggtaaatcttgtagactagtgtagaaatttctcactttcacaaacttttggttacccataattcggaaattattcacccagttggagacgacttgtagacgatgtatcctgcctaatgtactgtctgcaacattttcgaaggc

SEQ ID NO: 30407 - DNA, 764 bp, Zea mays
  Clone ID: UC-ZMFLB73018B01_FLI
gcaaagacagaaaaccatgggcgccctgttgctcttcgccgtctgcctgctggcgccgatcgtgctggcctgcgccgtccgtggcaggaagcggcgggccgccgcgccggcgccggcgccggcgtgcggcaagaaggcgctgccgctaccgccggggtcgatggggtggccgtacgtgggcgagacgctgcagctctactcgtccaagaaccccaacgtgttcttcgcccggaagcagaaccggtacgggccgatcttcaggacccacatcctgggctgcccctgcgtgatggtgtccagccccgaggcggcgcgcttcgtgctcgtcacgcaggctcacctcttcaagcccaccttcccggcgagcaaggagcgcatgctgggcccgcaggccatcttcttccagcagggcgactaccacgcccgcctccgccgcctcgtctcccgggctttctccccccaggccatccgcgcctccgtgccggctgtcgaggccgtcgcgctgcgctcgctccgctcctgggacggccgcctcgtcaacaccttccaagagatgaagctgtacgcgctgaatgtggcattgctgtccatcttcggcgaggaggagatgcggtacatcgaggagctgaagcagtgctacctgacgctggagaaggggtacaactcgatgccggtgaacctgccgggcaccctgttccacaaggccatgaaggcccgcaagcggctgagcgccatcgtggcccacatcatcgaggcccggcgcg

SEQ ID NO: 30408 - DNA, 295 bp, Zea mays
  Clone ID: UC-ZMFLB73018C05_FLI
aatcggcgctgggttcatctacccgctcgtgggcaccatgagcacgatgcctggccttcccaccagaccctgcttctaccagatcgacgtcgacactgccaccgggaaggtcatggggctgtcatgaattgaagtccctgatggtatcattcagagaacgtaaattcggggcattcctggatcgagttaaataagagccgttcctggcatcctgcaagttcagtggcgcttcctttttttacttgattttgtaaaccggagactgtaaatgtgcttgaaccgtgcttttagaccc

SEQ ID NO: 30409 - DNA, 2115 bp, Zea mays
  Clone ID: UC-ZMFLB73018C12_FLI
ctttcttccttccgccgccgccgcgaccggctaaacccttcatttcgccgcagcgacgaccacccgccgcgggccaactatggcgcccgttgcggctcccatacgcgacctgcttacctctttcagccccggcgcggacttcctcgcgctctcttctggggacggccgcatcaaggtatgggacgccgtgcggggccggctgcagaccgagtttgctgacatccctgcagtggaggcggtcgcggtcgctgagtcgaagcgcggccacctcgccctcgattacacctgcatgaagtgggtacaactttccagtaagaagaagaggaaggctgggagctcattgattgtgcttggtacaggcagtggagatgtgcttgcacttgatgttgccgcgggacattggaagtggaaggtcagcgattgccaccctgggggtgtgacagctgtagaatactcgaaacatgggcggaatgtgtacacggcaggtgctgatggcatggtctgtaggattgatgcctctaatggggctgttgttggaaaatttaaatcttcttcaaaggcaatatctgcattagctgtgtcatcagatggaaatatgttggcaacagcagctggccagttgaggacctttgacacttccagcaacaaaaaaattaaaaaattctctggacatccagttgctgtgaggagcatggtctttagcaatgatagccaatatgttttgtcatctggagttggtgaacgctatattgccatttggaagctgggcagtggtaaaacccagagctcaaactgtattctgtcgatggagcacccagcaatgtttgtggactgtaaatgttcagacaaaggagaaatacacattctggctatttctgagattggtgtctgctatttctggtctgcaaatgttgtggatgacctgcgtaataagaagcccaccaagatcatattatctgagtcatctgtgtcaacaactcatcaagcattatcgatatttgctgcaaaacttcaaggagtggatgggcctaattctgcccatgtcctactggcttatgggtctgtagtgaaaccatcttttgataaacttttggtttgttatggtacagatattagtttgggcatttctcaagatggagttctcttgccaaatactcaaaccaccatggcaaagaaaggccaatctgtgaaaaagcatgaaactgtcattgctctagaccgagccaatgctgaagatgccatccttcctcttccaaaactccatacacaggaaaagaaaaggaaacatggtgtaacaaaacccagtggcgatgttgagcctgagattcatagtgacctcaccactacaagatctattcataaaagagttcctgtgcaaagaattgaagatgacagcacatgcatcgaggatatgatgagggagtgtggcatcattgaaactagagtagatgagagcatgaagggccatgctggtataccctttaacattttgtcttgtctctttggtgatggcagcataaaagtcgatgccaatttacccagtaagaagattcgaggtcatctaagatcattaaaacctggagatgcttgcaaacttcttgataaattagtatctgcatggaaaacgagatctggtagcacggaacttgtattgcgttggatatactgcctgttagtcattcatggccgttttatctgctccgaggaatcgattaacaacctggagaagatgtgtgcagaaagatacacagttactgaagatttgctgaagctttctgggcggcttcggttaataacagcacaggtcgacaaggctgctagtaacatgtctgagccgacatcaggggagatgcaggatgctgctttccagtctgacgaagaggaggaagatgaagatgttgatgaaacagtattcggtcaagattcagattcgtcacaaaatagcggcaccgacgacgatgcaaagtagactcactgctggtattcatcattatggtgattgtattgtttttaattaaattgccaagcttgatttttgtcaaggcgacgttggaaggttgcacagaattttgacagtgtctctggtttcattttgaaagcactcgaagttgtctc

SEQ ID NO: 30410 - DNA, 923 bp, Zea mays
  Clone ID: UC-ZMFLB73018D04_FLI
tgcctgttgtgcttcttgtgcatatacaggaggggatcgatggcgagttccaggagaagaaggctgatctccagcccaaggtcgtcgagatctacgagtctgcccctgcaccactcaaggtcctgatcaaggagaggagcaaggtgtccgggatcaagaagaactccgccgcaatcaccaagttcttcgaggagctggccaagatcgaattccctggagccaagcaagtgagcgacggcatctccaaggccggcccggccctgctgtccggccccatcttcgccacgttcgagaaggtctccacgctgctccctgtcgtcgctgccgaggagccggccaaggaggccccggccccgcccgccactgaggaggcagccacgaaggaagcgcctgttgacgagaagaaagaggaagcccccgcccccgccgccgccgtcgagaagaaggaagagacccaagaagaggagaagaaagaagacacccctgcaccgcccgccgccgagactgctcctcctgctgatgcagcagctgctacagagcagcccgctgcggaggccgcggcagaagctgaggctccacctgcacctgccgtggcggagccggccaaggccgaggaggagacacccaaggcctagctagctagggttcagcaggttcatcttcttgcgcttgctgcccctagctagctagctggtgtaccgtgctctttaatcacgtcaccatccatattgttgttgcatatatatgcacacaatgtttttgttgctccagatgttattgctgtgcaaacccgtgttagatatttatgtatgtatatgtaagcctatattattttttttgccactacgtattcatatgcagtgtgaggaggtatgtatattattgccagttttggttcaactcaatcattctttaatttggtt

SEQ ID NO: 30411 - DNA, 2728 bp, Zea mays
  Clone ID: UC-ZMFLB73018D07_FLI
gaaggagggtggagggaggagggattttgccgatcacggcctgcagtcaatttgtcagtttattgagacatccaacttgcatgagttgatcaacaagcccatccctggttccttatggaggcatcatcttccttgcgcttccaagtttctcgttttagttcgttcaagatatggctatgcctttttctggtactcgttcttcagaactgcagcccagcactttcagattcaccatatttggtcggtatggggagctatgacataacagggccagcagcagacgttaacatgatgggatatgcaaatgctgagcagattgcatcaggaattcactttaggctaaaggctcgtgcctttatcgttgctgagcctaacggcaagcgtgtcgtgtttgtaaatcttgatgcttgcatggcatcacagcttgttactataaaggtgcttgaaagacttaaagcaaggtatggagatctttataatgagaataatgtggctatcagtggaatccatacgcatgctggtcctggtggttatctgcagtatgtagtttatattgttacatcacttgggtttgttcgccaatcatttgatgtgattgtcaatggaattgagcaatgcattgttgaagctcacaacaatctccaccctgggaaaatctatgtgaacaaaggtgacctccttgatgccagtgtgaatcgcagcccaagtgcatatctaaataaccccgctgaagagagaggcaagtataagtacaatgttgataaagaaatgaccctcatcaagtttgtagatgatgagtctggtccgattgggagtttcaattggtttgcaactcatggaacatctatgagtcgtacaaattctttgataagtggtgataacaaaggagcagccgcacgtttcatggaagattgggcagaacaaaatggcattccaaaacaggcagctcatgtaaatcacgatggtttggaatcttcacacatgacctctcgacttccgagaagagtctccccaataattcctgaaccaaatgagataactgatgacttagtacaattggcgtcatcctacgaagcctcaggtggacggcgattatcaagttcaagtatcaccaagcgtatcagaagtacccaacaaaacagacctaaatttgtttctgcattctgccagtcaaattgtggtgatgttagtccaaatgtcctgggaactttctgtatagacactggccttccttgtgacttcaatcacagcacatgcaatgggaagaatgaattatgctatggacgagggccaggatatcctgatgaatttgaaagtacccatatcattggcaataggcaatttcaaaaggctgtagatctttttagttcagcttctgaagaaatacaaggcaaaattgactacaggcatacttacctagatttctcaaaacttgaagtgaatgtccgtacaagtacaggaagtcagcaagttgtgaaaacatgcccagcagccatggggtttgcctttgctgctggaaccacagatggtcctggagcttttgactttaaacaaggagatgtcaagggaaaccctttctggagattagtaagaaacttacttaagacaccagggaaggagcaagtcgaatgtcaagcaccaaaacctatcttgctagacactggtgaaatgaaggaaccatatgattgggcgcctgcaattcttccaattcagatcataagaatcggccagctggctatcttgtgtgtccctggagaattcacaacaatggctggcaggaggctacgtgatgccgtcaaagctgtacttacaagtgacaacagtggtgaatttaataacattcatgttgttcttgcggggctaacaaatacatattcgcagtatattacaacttttgaagaatatgagatccaaagatacgagggagcatcgacgttgtatggcccccacacgttgagcgcctacattcaggagttccagaaacttgctacagccatggtggcaaacaaagaggtcccgacaaattttcagcccccagacatgttggacaagcaaataggactcctcccaggcgttgtgttcgactccacacctcctggggtggagttcggagatgtcagctcagacgtccccgcaagctcaactttcaggaagggcagtgtcgtgaacgctacattctactcggcgtgcccgaggaatgaccttctcacggacggcacgttcgcgctcgttgagaagctggacggcagcaacagctgggttcctgcctacgacgacgacgactggtcactacgcttcaagtggtcgagaccgtcgaagctgagcccgagaagctttgcgacgctggaatggaccgttcctggagacgccccgtcgggcgtttataggttgaggcattttggtgcctccaaaccactgattgggtccatcaaacattttacagggacctctcgggcgttcgcagtgcgttaggttgcacaccgttgcgttgcgttcgacggcacacctgtcagagaatcgacaccgggtcatatatttactttgcatacctgccacagtatatggacatgttttccctatagtttttacatgctcctgatattaataacgctgtccatcgcccgttctgtttggtcatgacaaatacccaaatcgccatatagctacagactcgatgtgtgtgaaatttctatatattaaagcaggaaagaaatctgttctcagattc

SEQ ID NO: 30412 - DNA, 1230 bp, Zea mays
  Clone ID: UC-ZMFLB73018E05_FLI
gttgctctcctccgagaaccctcgccgccgccacccaccggagctccggtttgcagttcttcgctgaaggccatggatcacgacaggcccttacatggtgattggtgatggtggtgattgaaccttgttacttgttagcaactggcaagagtgattgcgattgaatttgccgagcacgtcggctatttcgctggaggtgatgggccaccagctacatatttcacaggatccaaactccaagcaccatgggaccacggtctgggatgcatcaatggtgtttgtcaagtttttggaaaagaatagcagaaaaggtcgcttttgtccgtccaaactaaaaggaaagagagtgattgaattgggagctggctgcggtctagctgggttcggaatggccttgttgggtggtgatgttacaacaactgaccaagccgaggtgctcccactgcttatgagaaatgttgaacggaacagatcttggatctcacaatcgaaccccgactcagatatattggcaaacacaaaaacagattccgttggctcaattacagttgcagaattggactgggggaacaaagaacatatcaaggccgttgaacctccatttgattacattgtaggaactgacgttgtttattcggagcatctgttgcaacctctaatggagacgattactgcattatctggtcctaaaacaaaaatattgctagggtacgagatccgttcgacaactgtccatgagaagatgatggaaatgtggaaaagcaatttcattgtgaaaacggtctctagatcgaagatggatgtgaaatatcagcatcctagcatacatctctacatgatggacctgaaggcaccattgatccctgaggttgaggctgccgacaatgggaactacgaggaagaggttgaggttgctgtgaatcaagaggaagacgaagatcctggagtgaagagcgaatcttgttccggctcgtcaccagaggctaagagcggcagtctggatgattgggaaatcagaaggtgtggggctatggctgcaaggcttctgaaggatgtgaaactgtaaacatgaatcctagagatcgttttccccccttgtcagagaactctagagctcctttatgttgttgtccttgatagttgttgtactgcccatggcagtctatgttattgtatcttattgcatcagtggatattgataccattccaaaagaaaaaggaagtttctct

SEQ ID NO: 30413 - DNA, 1814 bp, Zea mays
  Clone ID: UC-ZMFLB73018E08_FLI
gctcagctatctctgctgagccgattagataaatccggcggaggaagagggaagaattatcgtgcgatatttcccccctcccactccctctctctctctctcgatttgcccgagaaatttttttggttgtttcccgcatcactctccactaggccgccgtctcccccgctggtgctcgtcgcttcctgcccaattcggcgccattcgcccggcgcactccctattaattccctgcctcggtagtcactggccgattgccacgtgaaatttcctgttccgttgcctttcgggtgcgcctgaagtacccacacgctactagggttcaatcgtcgtcagcaggcttacctctcaatcactgcggggcggcggctcgagagtttgtggacagttggcgaagagatagttaggtttttttttttgtctcccgtgtccgatggaggaatcggacttgggaggtaatctgggtaagcaaacggaagaggataaggctgcgggagaatcaggggatgagggtaagatcgagaggagccaatctatcaatctgaatagagtgccagcagttgctgtagaggcgatgagcacccagggaaactgtgagacgcacggtgcagcagtgccaggaactaaggatgcaggcacaggaaaggcagggcaatccagtggcgatcgacaggaggagaagttacccaagtgtgagcaggtcgactatggaagtgaagttgaaggctgcgcagatgatgagaaccctggcaagagggctgctttagttactttggttggaaatgaatactgcggcgacgaggatgagagagttcaagtgctcaccattgtcaagaaggacgagcatgcagatgacattgtcgaccgtattaatcctggcacagttgcagggtacagtgaagtgaagggtgctgtaggtgcttctgccgccacttctgcggtgcgacctgctggctcccgatcgtcaagtttccatggtgtgactaggcatagatggagtgggaaatatgaagctcatttgtgggacagttcttgcagagtagagggacgtagaaggaaagggaaacaagtttatctaggaagttatgataccgaggaaaaagcggccagggcttatgatgttgctgctattaaatactggggcgaaaataccagactgaactttccgatttcacaatacggcaaggagttggaggacataagggatttgtctcgagaggaatgtgtgacatacttgagaaggaggagcagctgcttttcaagaggagcttctatttatagaggagtgacaagaaggcagaaagacgggagatggcaagcacgcataggactggttgctggaactagagacatttacctgggaacattcaaggaagaagctgcagaggcttatgatattgctgccattgagatacgtggcaaaaacgctgtgaccaattttgaccgaagcaactatgtcgataagggtatgccctgtatagaaggcgaaggcttgaggctgcttgcatccaagccagaagaatgacttccaagttcaatgcagtgattgtcgatcgagcagatttggccagacgtatatgcagcttagttggtacatatacagataggagaaccggttgcagtttgtcaatattcctgctttacatgacttgggattacagttaaatcgacccgctagcaaaaaaaagtgtgcaaatgttagtagatttggccagacatatatgaagattttggggttgtatcataaggcctcgtaggatagatctttctgcaaatgttagcgaagccagggtttatgttctgtttgctagatt

SEQ ID NO: 30414 - DNA, 2366 bp, Zea mays
  Clone ID: UC-ZMFLB73018F06_FLI
gctggaccctgatctgtcaaaggattatctggacctcatccagaaccggaccaaggaaaggagctataccttcgatcatgtgtacgcgcctgggtgctccaattcggacgtgtataagaatatatcctctacaattgctggtgtagtccaaggccttaacgcgacagtctttgcttatggttctactggaagtggcaaaacttacactatggttggaacccatagcgatcctggtctgatggttcttagcttccgtacaatttttgagctgataaaaaaggacgacagtaaggatacgtttgaagtttcatgttcatatctggaagtgtacaatgaggttatctatgatttgcttgagagatcctctggacacctggagcttcgagaagatcctgagcatggcataatagttgctggattgagaagcattaaggttcattccgcagataggattcttgagctgttgaacataggcaacagtaggcgcaagacagagagtacagaagcaaatgctacttcttcacggtcacatgctgtacttgagattaccgtaaagcgaaagcagaaaggccaatatggtaaccaagttcttcgtggaaagcttgccttggttgatcttgcgggcagtgagagggcctctgaaacaaacaacttcggtcaaaagcttagagatggagccaacatcaaccgatcactcctagcattagcaaactgcatcaatgccctaggcaagcaaaataagaaaggtcttgcctatgttccctatcgcaacagtaaattaactcgtattcttaaggatgggctctctggcaattctcgaaccgttatggttgctacaatatcaccagctgatgatcagtatcatcacacaacgaatacactcaagtacgcagaccgtgctaaagagataaaaacacatgtccataaaaatattggaacacttgacactcatgttgaagactatcagaggatgatcgacaatcttcaggttgaggtttctcagttgaaaaaggaattagctgagaaggagcatcagttaagtgtaaagcctactgaaaaaactgcagatagtgagctatcttggttaaatgtcttgagccaggaaactggtgagaatgttcaagaacgcataaatcttcagaaggctctgtttgaactcgaagaaaccaataagcgaaaccgcatggaactccagcatcttgatgattctattgcaaggcatcaggtgaaagaaatggactctaccattctccaagctttaacatcaaggagacaagttattcttgacaacatccgtgataatgacgaagctggttctggatatagaaaggacatcgaaatgaatgagagtcgcaggcgacaactccaggatatgattgaagaggccatcagtaacaatggcaataaaacctacctgcacattctcagccagtacagactacttggaatgactaacgctgagcttcaaattgagatggctatgcgggatcaagttatacataatcagagggaagctctaaggagcctgtggaacattctctatggaacagggctaaaccagaagcagattcttaaattggctgcaaagcaagggttaaccgtagaaggctgtcctttgcctagctcaagcccagacgttaccacgccaccttcctgtcaacctcataggtttccatcgtttatgccatttcctggtccgcagtcagagccttattctccatctgcttgctttttccaacatggtttcagcactatgtctttgctgaaaaatcagcatgagacgcccacaatatgtaggcaggagcacctcagttcttactacatgatgtctggctgctcgccttactctggtgatggaaaacagtggtcaagtggaagacctacggcattcttttctactccagaaaaacctaaggaggctcagtcccaacacaacaaggaacattctggcagccatgatttcagtctgcacagaaaggatctgtggtccacggaaaggaaatgacgggcctcgagatccttctggtacttaaaaacacctgtgatggctacaatgcggcctgtctgatgttcctaacctcggtcgctgtgtgcaccatcttctgtctaccaccgacgttcccggggttcctgagatctgaagatatggtagtggtagatttcgcgggagctgttgccttgcccacgtccattttggttgatcctgctgggcgttgcccactccgtccaccatgtacagtagatgcaagtcctctcagtttttttgggggaaggggggtggatatctgatttctggaccaagaacagtgtaaatttgccgcggttctcgccctccttcagtaaatccaccggtaaagctttcaaac

SEQ ID NO: 30415 - DNA, 1882 bp, Zea mays
  Clone ID: UC-ZMFLB73018F09_FLI
gcttcctcacatcttccttcgtcagccgcagatgcgccagcatctctcccacgggcaggaggaggaggagcgagaggcacagtgacagacagagagagagcgcgcgcggggggagcccagcacagcacctacactagctagccaccggccaccaccaccaccaccaccgaccgaatcgggtgcgcgcggcgcgctgctcgtcagctccggccggccggccgctttataaagccacccacccagccccgcccgatcgccatcgccatacccccgcctccgtccacggacacacacccgccttgccagccggcaccctcccggcctcccccacctgtgtcctccggcctcgccgccgcaaaacccgccgcgcaggccggttgctccgattgggagtgccaatcggagccaacagcgagggaagcacatgctgccgttcgtcctagagttcctcattgatgtcgcctgtgatcagtgagatcctcctctcggggtttatgatcaactccacactccggcgccgcacccacctggtccagtccttctccgtcgtcttcctctactggttctatgtcttctcatgaactactcgcccccatcatagccacgccccttctctcccactcctcctcctcctctttcccttccatctagtagcatctaccgtcctcctcttctctccgtgtcagtctctgccttcgtcgtcgccgtttcagtcgttccctaaaccttctttagcttgcatgcacttccctactgctgctagcaaagacctttattactagtgtcaattaagttacgaaagaagaagaaagaaagaaaatttcgaggccgagaaaaaagacggctttgatctctgctagtgtggtgtggtagtgtgtgcttctagtaagtaagcgagccagggatcaagaagcagagagctgctctgtctcttttgtctcttgcaagaatggcttcctccagcgggagcgggagctcgggctccctctcggcggcaacggcggccctggccgccgcggcgggcacggaggaggagctgcgcgcgctcatggagcagcgccgcgcgaagcggatgctgtccaaccgcgagtccgcgcggcggtcgcggatgcgcaagcagcgccacctcgacgagctgaccgcgcaggcggcgcacctgcgccgcgagaacgcgcacgtggccaccgcgctcggcctcaccgcgcagggcctcctcgccgtggacgccgagaacgccgtcctccgcacccagaccgccgagctcgccgcgcgcctcggctccctcaacgacatcctcgcctgcatgaacaccaacgccgtcggcgccgtcgccgtctccctcacagccgccgccgccgccgccgcttcctccgacccctgcctcgccttcgacggcgccaccgccctggacgacctcctcagatcctgccccgagaacatgttccagtaccagctctgctagctccagaccgcgcgaagtcaccatggcagcgcaaaacaccttcttttgttttgttttgtttttgtttttttttcttcttcttcttctggtgtttcaggtttagtaatctgctagtgagatggaagaactgaggtcagatcagacgtggtggtgactagccatgaaagtgaactttactgttactgtactgtgcgatcaactggtgggggtaattagctagctagctagctgctggggctatggttaatgcatgaactgctattagttaccaggtgtaagtgtaactctcgagtcctgctcttgttactgtttgtgtactgactgtgtcactccactactatgtaagaatcagagcagtaagtttactagtgtctctgctgtcaaacaaaggaagtgcaccatataatctacactttaatt

SEQ ID NO: 30416 - DNA, 849 bp, Zea mays
  Clone ID: UC-ZMFLB73018F10_FLI
gctaccgaggcgccccctgataatgccactacacaaaatcgtttgtcactaacaaataccgtatcgaatagcgagattgtggaggagtccgaacagaacacatccgtcactgtggatagtcttccaactagccaacaaccctatgtgccagttgagcaagcatggcaggtcggaaacaggccatacaccagtcctgaggtggagcgtgcgctgtgcatattagacacttctattgcacttctcagaggcgatgataaggctggaaatgtcaccacgctacaaaatctgctcagttacgatgcatctttggaagcgagtactgctgctggttccgtaacttgtcaaacaaacgttcttaacgcagacagtcttccgaatggccatcctgttgccgcagcgccacaagactccagagagaaagctagcgatagtgccgcagaggaagaagacgccggcgacgaaaactctctgaaaaatccgacagcttccactgtgacgaagagtgtgtcgatgacattgcgaagtgcaataagggtgcacggtgaagagagcctggacactgatggcttcttccatcagaacggtttcagcaacagcaaggagtcaaggcgagcgaggaagtctaagaagagatggccctgctgcttaatccctaccactatgggatgatgtgggcccatcgtaggacctcgttcgttcaagttaagttgctgattttttgagtgtactattaacaaacagtaaactacagaaatttagcgcttcgtcagttacacgatgtgggttcagacggtatgttatagcgcgtagataatgtcttggtaaatgtaaagtagaatcgttgtaaac

SEQ ID NO: 30417 - DNA, 3234 bp, Zea mays
  Clone ID: UC-ZMFLB73018F12_FLI
aatcgaagcggagaggaggagaagggtgtgctgatggcgacggcggtggcggccacggccgcggcggcgggtggcagcaatgtcgagttcatccgcgcgcgcagcgacaagcgggagtaccgccgtgtggtgctcgcaaacgcgctcgagatcctactaatcagcgaccccgacactgacaaggcggcggcgtgcatggaggtcgaggtgggctcgttcagcgacccggagggactcgagggcctcgcgcacttcctcgagcacatgctattttatgccagcgagaaatatcctggagaacacgagtatacgaaatatatcacagagcacggtggctcttacaatgcatatacaagctcagagacaacaaacttctttttcgatgtcaatgtggacaattttgaagaagccttagatagatttgctcagttcttcactaagccactgatgtcacaggatgctgttcttagagagataaaagctgttgattctgaacacaagaaaaatttgttgtccgatggctggagaatgtatcagcttcaaaagcatctggcttcaaaggatcacccttaccacaaattcagtacaggaagttgggaaacactagaaactaaaccaaaagcgaggggcgtggacatcagacttgaacttctgaagttttacaagaattattcagcaaaccttatgcaccttgttgtttatggaaaggagagcctcgattacattcagggcttggttgagcgtatgtttagtgacataaaaaacactgatcagagatgcttcaaatgtccaagtcatcctctttcagaggaacatttgcagcttcttgtcaaagcactaccaatagaagaaggggactatctaagaattatatggccaattactcctagcatccagttttacaaagaaggtccttgccattatctaagtcacctcattgggcatgaaggcgaggggtccgtcttccatattataaaggaactaggatgggccatgaacttaatggctggagagagcactgacagtaatgaatattcctttttctcagtaagcatcaggctcaccgatgctggtcatgaacacatggaggatattgttgggttgatctttaaatatcttcatctattaaaagtagacggagtccacgagtggatatttaatgagcttgaagcgataaatgaaatggagttccattatcaagacaaagttgatccaataagctatgtgatgcgtactgtctcaactatgcggttgtttccaccagaagaatggctggttggagcagcattgccatcaaagtatgcaccacaaagaataaatatgatactcgatcaactatcacctgaaagagtaagaatattctgggagtccaaaaaatttgaaggatctacgagttctgctgagccctggtataacacaccatattcagttgaaaatgtcgctcctactatgatacagcaatggattaaaaaggctcctactgagaaactccatcttccagaacctaatattttcgtaccaaaggatttatctcttaaagaagtgcatgaaaaggttacttttccaacagtgttaaggaaaagcccactttcacagttgtggtataagcctgatacactcttctccacaccaaaggttcacattatcattgatttccactgtccattatccagccactcctctgaagcagttgttgctactgagctctttgttgatttgttagtagattatttgaatgcttatgcttatgatgctcaaattgctggtttgttctattcaatatatcttacttctgctggattccaggtttctttaggtggttacaatgacaaaatgagagctctcttaaatgccatactagtgcaaattgcgagttttgaagttaagccaaacagattttctgccctaaaggaaacttctgtcaaggactaccagaatttcaatttccgacaaccttattctcaagcttcatactatgtctctctgatattggaagataaaaaatggcctgtcgctgagaaacttgaagctctttctaagcttgaatcagatttttttgcaaagtttgtaccacacctactatcgaagacatttttggaatgttatgttcaagggaacattgaaccaagtgaagcaaaatctgtcgtacaagagatcgaaaacactatatttaatgcccccaattctttgttcaaatccatgtctccatcagagtatctgactaaaagagttgtcatgcttgaaaatgagttaaaatgctactaccaaactgagggattaaaccagaagaatcagaattcatcagttatccaatatattcaggtacatcaggatgacgccattttgaatatcaaacttgagctgttctctctaatagcaagccagccagccttcaaccagctgcgaactgttgaacagcttgggtatataacaagtctttctctgagatccgactatggagtcctggcactccaggtggttatacagtccacagtaaaggatccttcgtatcttgatggtagagttgatgaattcttcaagatgtttgaaagcaaaatctatgaactctccgacaaggacttcaagagaaatgtgaaatcactaattgattctaaactggagaagtttaaaaacttatgggaggaatcagatttctactggggagagattcaggcaggaactctgaagtttgatagggtcgagtctgaggtcactatgctaagagagctcaagaaagaagaattcatagagtacttcgaccagtacataaaagtggacgcgcctcaaaggaggacactaagcgtgcaagtcttcggcggcaaccattcggcagaattcaagacggcgatcgccgaagccgatccgcccaaaatgtacagaattacagacatattcggcttcaaacgatcgaggccgctgtacagctcactcaagggaggtccgggcaggatcaccatggactgacagccatcacgcagctattccctagttttcatgtacgtacgtagtgtaacggcctgttcatacgcctgaattccatcctgaatcctgcatcagattcgattgcacgattgatgctattcttaactgatggtttgttatgttaaccaataatgcacgacagcgtgtcactttctgggcagatatagggggctgtataaataaagtcatgtatgttcgcatgtctgtatgcatttcttctgacagctatgcattatgtacagttacagttac

SEQ ID NO: 30418 - DNA, 4882 bp, Zea mays
  Clone ID: UC-ZMFLB73018G04_FLI
gcgtctcccactctccctgctcgtcacccaccactctccagtccacacgagcaaccccttccacccgcctccccccacacccaatccctaacctccctccgcctcccccgacctcgctcccgaataggatctatgatgccgtgattaagacggggacggaatccaacgcgggcaaggccgcgctcgacgcgttgggcgctgagctgactacccctctcgtcgccgacgtgctgcaccgcctccgctacgaggagaagctggcgtttcggttcttcgcctgggcgtcccaacaggacggctacaaccacgaaccgacgacttacaacgacatcatcgacattctctccggcacgcgatacaagagccgccagttcggtgtcctctgcaacgtgctcgatcacatgaagcgccatggctcgaggtcggtgccggttgaggaccttctggagatcctgcgcgcctacacggagaagcatctcacgcacatgagaaagctggccaagaagcggcgggttcggatgcgtacgccgccagagactgatgcgctcaacgttctgctggacgcgttctgcaagtgtgggatggtcaaggaagcagaggcagtgtttggtcgcgtgaagaggaagttgctgggtaatgcagagacatacagtaccctgttcttcgggtggtgccgggcgagggaccccaagaaggccatgaaggtgctcgaggaaatgattcagatgaagcacacgccagagagtttcacctacgttgcagccattatatcattttgcagcgctggattggtgtcagaggcaagggaactgtttgagttcatgaggactgaggggttgacgatatcatcgcccacagccaaaacatattcgattatgattgttgcattagcaaaggctgaccggatggaggagtgttttgaactgctttcagacatgagaagttgtggctgtatgcctgacgtgacgacttataaagatttgattgaagggatgtgcttggtgggtaaactggatgctgcttatcgtgtgttggacgagatggggagggctggatttcctcctgacattgtcacgtataattgctttcttaatgtgttttgtagtcatcgaaaggctgatgatgcacttgaactctgtgagaggatgatagaggcacactgtgagcccagtgttcatacctataatatgatgatgatgatgttcttcgagatgggagaggcacatagagcattagatatatgtcttgagatggacaaaagaagatgtcaacgtgctatcgatacctacgagataatgatctatggtctctttgattgtggagaaacagaatatgcaactgctcttctagatgaggttataaaccgtgacatgaaactttcatacaagaagtttgatgctataatgctgaggttatcagatgtagtcaaccttggcgcgatacatcggttgtcagagcatatgaggaaattttacaatgttgcgatggcgagacgatttgcaatcactcagaagaaaaagagcataggcctgagaaggaaatgagtgtcgtggctattgctgctgctgtttcttgttagttgttactgtggataatcaggagcttattcaaaggatcagaaggctgatgaagctattttggaagtgttagaccttcgatggtgtctatgttggtgatccttctaagctcagtatgaaggctgcatttggaaaggtttggtggttgaaagaagctgatggtagtattattggtggaaccatcaagacaaattcaggaaatgagcaagaatccaaaaccacccagggatgcgtaagagattgatgcattttctttttgttccactaattggctgttcccggatatatatgcaacgctcgtgtcatctgttccaatacttgaagaagcagcacgctacgagttgagatatgggcacagaaatagagctacaagaggaggtggatattttggcatattacacgttgagtggtgaactcaagtatcagtttgggtctggaaggtgaagctgatcagttgctgctggatgaggcttctcaacgacggcttctcgacaaacatcattatgcccgagtgccaggtggcagagcctgcacttaatcagaaggaggaagttatgatagaatatcgaccaccagcacctgcagttcattctaggcctgcaccccaatggatatgcccagtgtcttttatagagctcagtaaaactaccttcccttcccctctcgtctatgcatgtattcaaaacctttcttctcttcggtgaagtggaggtaggcttagctgcaaaatcctgtttcttgtcattgattcgaggattgctgctcttttattttaatgtaatccagaatggttcataatattgacagttttggttttacacatatttgtggtatttgttgctgttttattgtatttgtttgataaaaacaacgtatgctacaggttgtggaggtttctacctacaagactggtaagcatggccgcaccaaatgccacattattgtcatattatagtagttatttagagttatagtagtaactctatacaaagttagggtattatttagagtttttgatgtatgtcagtgtttggcctaaactgatacttttttggtttatttgtttgtacgacgtgttgaatgcatattgtggagctggacagtttggcctgcaaaatgtttctctgcagttttacaatatgtttagcttacatgaactgtatatggctctgtgatcatctacaatatgtacatcaaggcactctggttgcctccctgatgccatcatctacaatatgtacatcgaggggttgtataaactaccaactattatgcatattgtcgcattcgtagaatgatcagtcaaagccttgatcacatacatatgttcaacataacttatgcttcaggtctttagcatggtatggcagcatgtttgtgtatccactctgtagaaaatatcttatgcttcatgtctttagcatggtatggcaacatgtttgtgcatccactctgtagaaaaaagatgtcatatgtactgtatcgacactagaattttgtgttgttttttcatctgaaaatgtaggtggagaacaatgaactttaattgagtatgttatttctccaattatactggatgtttgggcacacccgttcatcagcattgatgttgtcgaagtgttagaggtatgctttttgtcagaattggaaggctcaagtactttactcatttttttaataaccactatgtacaaaattctttttgattgcatttgggagctgaccagacaaataattattagatgagttaacattgacgtatatgtggtagtgatatactttttatctaagcacttattgccaaagcaaatcctttaccttttgatggttatgtacttatgtagtctgtttttctatgcagtattttgtgtcattctataaaatttccctgtgcacatgttatcatttgttagcaaaagttttcttttggcttttgagacccttaaagttacatttaacacaattcattagtttttaggctatcaaggctcttggatgcttacaggcacttgtgtctcaaatcctttcaacaattggatccattttagtgaaagtgaccaaccacgtaggcgcccacaccccacgtgtgtgtacctatttgcggcgtacccggcgttgagcttgttgttacagccaaccatgcggaggccagggtccacgatcaggtggtccaatagtgtcaggttgaagtcccccaagctgatgtaagcaacttatagccttaataattcctgctttgagctgcttcgtgcaagatattgctcgcatctgtaggcttagtggtatttagtttatggaatgaaattgtccattatcatctcactctttatttttgtttggtttatggaatgaaatgagttgatcaagctggcttcgacaagtggcaacctcgtgctatacaagtaatcatgttttttgtcagtgagttcgtttcttttgtcacctacggtgcatctggctataagaagataagatttggtaaagacgtttgttctgagttatccaacctagagaccgagcataacgaccttacatatagggattgtataaagtcaagctatcaaggctagctaccatgctgcatccagtggagaactagagattaacacgtattttatggatgcatgtttacatccttaaaacattaatatataggattagaataaaactgcagagttgtttgagggatatggccatatcatacatgaactgattgtcaatcgtgcgatccgtacagaggaaaatgtaacctattttagcctttttgatttgagatggagtttttgttgttcatatatgagcaattaatatttgtgattttgaattgtttgatgagtcatactgtaccttcctataaaatgggatatttaaagttcatgtgaaagttcaatcttgttttctctaatcgtgtgacttggactgttggagaaatgttggctaatttcacttgttttcaggaaataggtggattgctctggttgttgagaagtttgttgaacccgatgtttccttggttccaacactgtcatgctccatcgattattttggagagttgatcagtgggcagaaaccgtggaagaaaagctgacatttgcactcacccgagccctatcagcagcgccggccctggcaggggtcgagcagtgccctcaaccaggcccccagattaatggagcctccctttaggtactaaataacattacgtatatacatgcatatatcatatattgtatatgtatgtctgctggctctacagaactttgaaagacgtaattataagcaaggagaattaggcgtagcccgtc

SEQ ID NO: 30419 - DNA, 1000 bp, Zea mays
  Clone ID: UC-ZMFLB73018G09_FLI
gtgtactgtccacccactccctcctcgagcacactgatgtggctatactgctggacaatgaggccatctacgacatctgccgccgatcccttgacattgagcgcccaacctacaccaacctcaacaggcttgtgtcccaggtcatctcatcccttactgcctccctgaggttcgatggtgctctgaacgtggatgttaacgagttccagaccaacctggtaccctacccgaggatccacttcatgctttcttcgtacgctccagtcatctctgctgagaaggcctaccacgagcagctctctgtggctgagatcaccaacagtgccttcgagccatcttccatgatggccaagtgcgacccacgccatggcaagtacatggcctgctgcctcatgtaccgtggtgatgtggtccccaaggatgtgaatgctgctgtggccaccatcaagaccaaacgcaccatccagttcgtggattggtgcccgactggcttcaagtgcggcatcaactaccagcctcctagcgttgtgcctggtggcgacctggccaaggtgcagcgtgccgtgtgcatgatctccaactccaccagtgttgtggaggtgttctcccgcatcgaccacaagttcgacctcatgtacgccaagcgtgccttcgtgcactggtacgtcggtgagggtatggaggaaggtgagttctctgaggcccgtgaggacctggcggcgctcgagaaggactacgaggaggtcggtgctgagttcgatgagggcgaggatggcgacgagggtgacgagtactagagaagtttgctgatgacgcagcatcaggccagtgtgctgcccttatcccgtgatctgccgagagttgctcctgctatcgtgttatgtgtgtctgttctgaagtattgtgtggtttacaacacctgatgttgtaagagttgttaattcccctgcattgctaccgggttattgagaataattatggctgtttacgttgttgcttc

SEQ ID NO: 30420 - DNA, 2591 bp, Zea mays
  Clone ID: UC-ZMFLB73019B04_FLI
gtggaggtcagcggggattgaggaggaggaggggaagaggcgaggcaggaaatcaagcgggaatccaagaaccgtaaggatgaccgtggtggagaggaggtacggtccctgtaccagccatggttccttcctcctacggctgctgctgctgccgttcttcttcttcctctgcttcatcgatgtgccgccggccggcgccgccgccaccacacagtcgcctccactagacaacacgcaaaaggctatcatgaacgatgttgcgagtctggtgaactccggatccgccaacaccaggtggaacaccgcggagtcgaatccgtgcaactgggaaggaatcacctgcacaagtaacacttcttcctcggccgtgactcggatcgccttgtcaaactatggcctcgccaactcctccatctttgctcccctctgccgtcttggcactctgcggtaccttgacctttccagaaattttttagcagatttgtccgccccgttcttcgcctcttcttcttcttcttgctccatgaaggaagggctgcagtcacttaacctgagcaccaaccggctggctagcccgctcggtgagttggccggcttcccccagctacaagttcttgacctgtccttcaattcctttgccagcagaaatctgagtgcggaattgggttatttccccaagttaaggagcttcaacactagttccaatgacttgaatggtgatgttcctaccagtatggtcggctctttggaggagctggtattgtctagtaataatttgagtggtccaattcctctgcgtttgtttgaatatgaaaatcttactctgctagatctcagccagaataatctgaccggtgctattccagataacttcacgagtctctccaagcttgagactttgctcctttctggcaacaaattgattggggaaataccatcgagtctgtctaatgtgacaacactgtctaggtttgcagctaaccagaacggtttaactggacccatccatagctggattaccaagcatatagggatgttggatttgagttacaacaagctgaatgggacaatcccctcagacttcctctcgcatcaggggttgcagagtgttgatcttaccagcaacttgcttaacggagccattcctgccaccttgtctcaaagcctctaccgcttgaggcttggtgggaaccagcttggtgagaacatcccagggtcagtttgtgataccatgggcttgacttatcttgagttggatgacaaccaattgacaggagttataccttcagagcttagcaaatgcaagaacttgacactgttgaatctggcatcaaatcgtttgcatggtttagtgcccagtattaccggtgaacttgacaaactggtagttctgaagcttcaaaataacaccctcactggacaggttccaagtacattttctgaattaaagagcctaatcacattgaatctcagtaagaattcactcagtggagcgataccaagcggaattttcgagttgccaaagctttcgaacttgtatttgcagggtaaccagtttagcggttttattccgttctccatcagttcatcaaaggatctaatcgagctcaacctgggtgataatgctctgactggtaacatcccaaccatgccaaccactgtgaccacatctcttctgaatcttagtcataaccttcttgacgggtctattccttcaaacatcaactctttaggtgaactagagattcttgatctttctcacaatgccctgtctggtgctgtgccatcttcactatggagcctgcaaagcctgacactgctggacctttcctataataatctgtctgggtctattcctagattcggtccaagtcaaactgtagatattgtcggaaatcctggtcttgtaattgtaaatggtacaggaaacaataatgacactcctactactggtaagaaaaagaggcactatttggtcgtcatcatcttcaccattgccggtactcttgttggattatgtgtgcttgctcttattattgtgatgtcattatcaaagagagtgtatcgtgttgaagatgaaggattaccagctggagaatctgtaccacaaataatcagtggtcgcctcataactatgaacagcatccacacctctgcagttgacttcgtgaaggcaatagaagcagtctccaaccatcagaacatctttttgaagaccagattctgcacctactacaaggctgtaatgcctaatggctcaacatactctgtaaaaaaacttaattctagtgacaagattttccaaattgggagccaggagaagttttctcatgaaattgaggttctagggaaactgaccaattcgaatgtcatggttccattggcctacatcttgactgcagattgtgcctacctaatctatgagcatgcatacaatggcactgtatctgatttgctacatggtggaaaatcagaagttatagactggccgtcacgatatagcgttgctttgggggtggcccaagggctgacatttcttcatgggtgcactcagccggttttgcttcttgatctgtcaacaaggaccatcc

SEQ ID NO: 30421 - DNA, 1120 bp, Zea mays
  Clone ID: UC-ZMFLB73019B08_FLI
gcggtattggaggaggaggagcaagtagagcatgaattgcctgctggggctgctccacaaccagttctcgatgtgccattggcagggaagggagagcttaaacatcatcagcccgttgaagaagctgccgaggtacacgaggatgtgcagtgcaagcaggaagctgagtgtgaggcccaaacagttgatcaacaacaagaactggttcctgaagaggagtcggtcgcaggaaaaaatgatgatgtgaatgttatccatgaatgtagcttcagtgatgaagtggttaccgaattgcctgtgggggaagtgacatcgcaagggctgccgaaggatgaccctgaggcagacatggagtttgaggagtgggaagggatcgagaggagtgaagtggagaagaggtttggtgcggctgcagcatttgctgctagtggggctggggcggctgccctgtcaaagctcgatagtgatgtgcagctgcagcttcaaggtctcctcaaggttgccattgacggtccctgttatgactcagcgcagccacttacactgagaccctcatctcgtgcaaaatggtctgcttggcagaagttagggaatatgaaccctgagattgctatggagaaatacatgaatcttttatcagaaacaattccagggtggatgatgaatgaaaccttggacacagagaacactggcagtttacctgcggagactatcttaacaacgatggcttctacaagtgatcaacggagcaatcaagggaatgaagataattctagcataggtgaaggtcatccaataacttcccctaacccagagaaaggccagagctctgatatcccaactgaatgaaggcaacactgataaaacatttcttgcatcagtggttccagcccattgctgggagcattatcgatgcgttcgtcataaaattagatttgtacagttgtggcggttgtgctgtgatgatgttggttcgtgtatgtatatgactgtatatatatgtttgtgctaatactactgctgcggcctgtatatttggccagttgacgacttgtcaccggttgtggtcagtagtaaatgatgagtggtaactgtgtttgttaccacgtagtttggaacg

SEQ ID NO: 30422 - DNA, 518 bp, Zea mays
  Clone ID: UC-ZMFLB73019C03_FLI
cgctgcaggacgacgcgctgagcacgggggagctggactacatcaacggagctgcgctggtgaggtactcgatcgcgggcaacttcctggggctgccagcgatcaccgtgcccgtcgggtatgacaggggagggctccccgtggggctccagttcatcggccgcccgtggtcggaggccacgctgctgcacctcgcctacgccatgcaggaggcgtgcgggaagaaggtgctccggaagcccaaggtgcactacgacctcctcaccaaagagtagctccagcgagcatcgatccggcagattgctctctatgaggcgcgcggttgctgattgcatgcacctctagtgtgattgattgtttgtttgattgattgagcttgtgatgagagagtgggggaagttgaatggaatgccgtcaatgtcggacaactctcaactaggagaagaaaaaaaaaacatggttgccagcaccatgcatgtgcaccaccattcgttttttaatgtcgtcctcattgaaac

SEQ ID NO: 30423 - DNA, 934 bp, Zea mays
  Clone ID: UC-ZMFLB73019C07_FLI
ccaatccgaaatctcgagctttcgcgccggcgaccacagcaaagaggaggccacagcacgacagcgccccagggttcctactctcgtcgcagcggcagcagtgaggggaagatgtcgtcggtgttcagcggcgatgagaccgcccccttcttcggcttccttggcgccgccgccgctctcgttttctcatgcatgggggcggcgtacgggacggccaagagtggcgtcggcgtggcgtccatgggtgtcatgcgcccagagctcgtcatgaagtccatcgtgcccgtggtcatggctggtgtgctcggtatctacggcctcatcatcgccgtcatcatcagcactgggatcaaccccaaggccaagccatactacctctttgacggctatgcccacctgtcgtccggccttgcctgtggtcttgctgggcttgctgcaggcatggccattggcatcgttggtgatgctggtgtcagggcgaacgctcagcagccaaagctgtttgtgggcatgatcctcatcctcatcttcgctgaagcgctcgccctatacggtctcatcgtcggcatcatcctctcatcccgcgccggccagtctcgtgcggactaggcacgttccacatgtctccgccacctggtcgtaaccgggtcgtgttttgtatcggtgatgagccgacaagctggagcacttaattttttttatgctgtctagttttttgaacttgcgttgagtcgagaaaacaaaatagaacttgggtagccgagggggtgaccttttttcccttgtgccattcttttccctgtcgtggtgggtggtgggctgtggctgatgcttctttctgcacacttttttttgcttgggctcggggcgttggtgtaatttggtgaataagcgagtgcgtccagtgcaatgggagctcaggactcttctgttc

SEQ ID NO: 30424 - DNA, 1794 bp, Zea mays
  Clone ID: UC-ZMFLB73019D05_FLI
cgacccccctccgtttgccaacgactccgggctccactgtcgctcgctctcgctcccttccctcccacgcaatggtggccgatcgcctccgcctcgcgctgctgctctccgcgtgcctctgctccgcgtgggcgcgcccacgcctcgagccgaccatccgcctgccgtccgagcgcgcggcggccgacgacgccgtcgggacccggtgggccgtgctcatcgccggctccaacggctactacaactaccgccaccaggcggacatctgccatgcataccagatcatgaagaagggcggacttaaggacgagaacatcgttgtcttcatgtacgatgacatcgcgcatagcccggaaaatccgaggcctggtgtcatcataaatcatccccagggtggcgacgtctatgctggggtgccaaaggattacactgggcgagaggtcaacgtcgacaatttcttcgctgttctgcttggcaacaaaactgctctcaggggtgggagcggcaaggttgtggacagtggccccaatgaccatatatttgttttctacagtgaccatgggggtcctggcgtccttggaatgcctacgtatccatatctctatggtgatgacctcgtagatgtcctgaagaagaagcatgctgccgggacctacaaaagcctggtcttttatcttgaagcatgcgaatctgggagcatctttgagggcctcctgccgaatgacataaatgtgtatgcgaccaccgcgtcaaatgcagaggagagtagctgggggacgtactgccctggcgagttcccgagccctccaccggagtatgacacttgcttgggagacctgtatagtgttgcttggatggaagacagtgatttccacaatctgcgaactgaatctctcaagcagcaatacaacttggtcaaggataggacagcggttcaggatacattcagctatggctcccatgtgatgcaatatggttcattggagttgaatgttaagcatctgttttcgtacattggcacaaaccctgctaacgatgacaacacgtttatagaagacaactcgttgccatcgttctcaaaggctgttaatcagcgcgacgctgaccttgtctacttctggcagaagtaccggaaattggcagacagctcacctgagaaaaatgaagctcggaaggagttgcttgaagtgatggcccacaggtctcatgttgacagcagtgttgagctcattggaagccttctctttggctctgaggacggtccaagggttctgaaagccgtccgtgcagctggtgagcctctggtcgatgattggagctgtctcaagtccacggttcgtacttttgaggcgcaatgtgggtcgttggcgcagtatgggatgaagcacatgcggtccttcgcaaacatctgcaacgctggcatccttcctgaagcagtgtcgaaggtcgctgctcaggcttgcaccagcattccttccaacccctggagttctatccacaagggttttagcgcctaagaatcataaggtgaggcgaaatatttcagccgctccaccgcaacgaactggtttacattaccagtcctcaggggggtcctagttcttgaaccataggtgaagcagacttataccactattatagctgttccaccgtcgttccagattacatagctatgcccaatttccggtgtacatatatagtcggaaagttatttggcaattgtattggtcgttgctgtatatattccctatagtttgttagcagatgtgtagtttgtaattccataaaaatgaa

SEQ ID NO: 30425 - DNA, 935 bp, Zea mays
  Clone ID: UC-ZMFLB73019E09_FLI
tctagtttgatttacaagtgatgctcgaccaatttaaacaatacttgagtcagtgaactgtaagttccaaagaaaatttcgtagattaaaggtccaacatagtgtctactgtctattttttatcagtaagcggtccaaaacctaccaggattcatgggccagtggaaggctcctacttgattagatatattataaacgaattaatgatttcagaaaataaatattagcatagaaaggttaggaacttgcatgatagttctaagtagtaatgattagcatgcctttcagagacctctcaggaaataaattgcataacggacctgtcacaactcacaataacaattgttagcaagacggcatatattttagaatcttggtatctacgatgtttcgttttctcacacctcacgaaataatgtatcttcatctaaagcttcgaactacaggaaaaggatattcttgactatgcaagacagacattagagaggaaaccatccgtactatggcttctacctccagttcttaccgccgcagcaattccaccgcagtcaagcttgttccagatatacctagctcaaatcgataagcaaattcatgaagctgctcctgcagatcgaaagtgtagttgcagaggagatgaaatagatcggcatgttaactgtgagattactgaaaggattcaatgtctatatgcattccttattcagcaactttcatataacggttccacaagattacactgaatgttagcagtgtgcactgtatgacgtttcacttttaattgagtgactggccgactatgcatggcttccttggccatattacttttcatttaacgtttgtcactggtggggggtgcgtacatctttgactttgtactcttcttatttaatgaaatgaaatggcactaactctggtgcatccttcgagaaggg

SEQ ID NO: 30426 - DNA, 1366 bp, Zea mays
  Clone ID: UC-ZMFLB73019F03_FLI
gctgaggaccctgacagcaaggttgcttgcgagacctgcaccaagaccaacatggtcatggtctttggtgagatcaccaccaaggccaatgtcgactacgagaagattgtcagggagacatgccgcaacattggtttcgtgtcgaacgatgtcgggcttgacgctgaccactgcaaggtgcttgtgaacattgagcagcagtcccctgatattgctcagggtgtgcacggccacttcaccaagcgccccgaggagattggagctggtgaccaggggcacatgtttgggtatgcgactgacgagacccctgagctgatgcccctcagccatgtccttgccaccaagcttggtgctcgtctcacggaggttcgcaagaatggaacctgcccctggctcaggcccgatgggaagacccaggtgacagtggagtaccgcaacgagggtggcgccatggttcccatccgtgtgcacacagtcctcatctctacccagcacgacgagacagtcaccaacgacgagattgctgctgacctgaaggagcacgtcatcaagccagtcatccccgagcagtacctcgacgagaagacaatcttccacctcaacccgtctggccgcttcgtcatcggcggacctcacggcgacgctggcctcactggccggaagatcatcatcgacacctacggtggctggggagcccacggcgggggcgccttctccggcaaggacccgaccaaggtggaccgcagcggggcctacgtcgcgaggcaggctgccaagagcatcgtcgccgccggcctcgcccgccgcgccattgtccaggtctcctacgccatcggcgtgcccgagcccctttcggtgttcgtggacacgtacggcaccggcgcgatccccgacaaggagatcctgaagatcgtgaaggagaacttcgacttcaggcccggcatgatcatcatcaacctcgacctcaagaaaggcggcaacgggcgctacctcaagacggcggcctacgggcactttgggagggacgaccccgacttcacctgggaggtggtgaagcccctcaaggcggagaagccgtcttctgcatgaggcgcctcctctgttttggaagaagcttttggtctggtctggtctggtctggtgtgcctgcgctctatcatgcttttttatggctcctacttgtgattcttgatctgccccttgcttatcatttgtactgtactgtcactgtcctaataagtggtacgtgtgcggggtcgtattgtgtctgcttattcacctactagaggattatttctggttttgctgcttatgtaatgcttttaaaaccatgaaagaagctacaggctcctacagctgctttgag

SEQ ID NO: 30427 - DNA, 1366 bp, Zea mays
  Clone ID: UC-ZMFLB73019F09_FLI
ctaaaactaaatttcaaacggaatccccatgacaaacgcaagaaacacgaaagcaagaaccggaaggaacagccacgccaatatacagagcgagccagcacacagtttttttttcatacggctggtctgcaattaggtgcctcgactgcttgctagccgccggattaatctttccctaccctaaggttttagtgggatatgatgaagctaaaaagtggacgacgaccgttctataaggatgttaagcttgtagactgccgttcaggctcaagtcttccacatttggctgctcaagcaaagtttgcagccatgaacatgaagactgaagatgtcaatcctcgtcgaccagttcaagtcagacgaagtagatgggctcttggtgatgtaaccgaggtgttggatcataattcgtggaggcttgggaagattacagaagtactgaagaatgactattttgtcatcaggctagtgggttgcatccaaccaagagaattccacatatcttgcttgaggattccacatgatcgcaagcagttgactgttggaggcagggaccatcaagcctatgaagaggttgatcactatgctaagaggaaagcagccaatatctgtgcttccaccggtgctagagctgtcaagagaaaactagaagcaagcaggatcccacctaatggtttagtcagaagaacaggcaaggaacagaaagtatctacacatgaatttcgccagttaaccaagaacgagttgcctccaaaggtgtctgctaggaatgccatcgacgaagatgatcattttcataggcctttaagtagcagatacaacgatctgcctgagaaacctctgcgcaccagagaagaggacgagtgctcggtggctagctgcagcgcgaattacacaagtggaacgaaaaggccttcgagcaatacggacactgcttctagtccgccaaagaagaataagaacgcaatggttaggtgcatgaagggtttgcttgatcgattagattctggcagtagcaaagacgtagatacagctacgcagattcaagaaataattgagacaaaaagaaaggagcagcaagctgcagatttcaaggagatagacctgtgtttggcactggcaaaggaatgtggggctactgaggagacagacgagttcttcgtagcttcccaactgtttgcaagctgcaaatttcaaagacatgttttcctaggactgtcttcaaatgcaggaaggatggcttggttgaagaagcactgcaagggctggactttttaaggactttagtttatgtcataggactggcttttctatttgtgtatcatgaagttaagtctatgaactgttagttatattaatatatgtg

SEQ ID NO: 30428 - DNA, 785 bp, Zea mays
  Clone ID: UC-ZMFLB73019G05_FLI
gatttatcttgggatcggctagagaagatcgagtgagaagttgcgcgtgtgaagccatcacaccaattaaagatcgagatcatccatggctagttctctacttcagcagctgctgtctctgctgctgctcctgctgccctctcctcttcgtctccgggagcatctatcaggaaaccatgctgtcagcgccaacaacttccaccccatctttctggtagctggggtgagctgcagcgacctggaggcacgcctcaccgaggagtaccggccgtcggtgccgcactgcggcgccatgaaggggaaggggtggttcggtctgtggaagaactactccgcgtccgcgcacgacatggagcgctggtgttctggggcgaagacttcgacgcggccccggaggtggcggcgtacggggacggagatggcaagatcaatttgatcagcgtcttggcgtttgagaaggagatgcgtcggcagccggagcagaagaagcagttcaaatccatcaagatcaataaggcccagcattctacgatcgtcacggatgattttgccctgcacagggtcattcaagaaattgttgaggccaataatcagaagattccatcctaaattattcatgtcatgtatgcattaccgagctgtgggggccaatagtgggttgggaagtgatggtttagacatcggtcgtggtgtggtcgcaattcaatcgattagttatttgttaacgtcaattgcttgcctcatgaacttgctgtgataaggaaagaccacaattattttccgct

SEQ ID NO: 30429 - DNA, 1276 bp, Zea mays
  Clone ID: UC-ZMFLB73019G07_FLI
aggagacacttaaacttggtctcaaacaagctaaagttgttggcttgttttctggagggcttaacgctgcatcaaccatgtctgtggttattgttgttatttatggcgccaacttaaccatcaatggttacatgacaactggctctcttacatcattcatcttatacagccttacagttggttcgtcagtatctgccttgtcaggactatacacaactgtaatgaaagcctctggtgcaagccgtagggtttttcaacttttggaccgtgtttcgtcaatgacaaactctggggacaaatgtccaataaatgaaaaggatggggaagttgagcttgatgatgtctggtttgcatatccttctcgcccatctcatatgattcttaagggaataactctgaagctagcaccaggttcaaaggttgcacttgttgggccaagtggtggtggtaaaaccacaatagcaaatttgattgagcggttttatgaccctctaaagggaaggatcttgcttaatggagtaccgttggtagaaatttcacatcaatatcttcacagcaaggtaagcattgtcagccaggagcctacgctcttcaactgcaccatcgaagagaatattgcttatggactagagggcacaacgaactttgctgacgttgagagtgcagctaaaatggcgaatgcacacaacttcatatgcggctttcccgaccaatataagactgtcgtcggcgagcgggggatcaggttatccggcgggcagaagcagaggatcgccattgcgagagctttgcttatgaacccacgagtgcttctcctggacgaagccaccagtgccctggatgctgaaagcgaatatcttgtacaggatgcaatggactccttgatgaaagggaggactgtccttgtgatagcccaccggctctcgaccgtcaagagcgccgacaccgtcgccgtcatctccgacggcctaatcgtggagagcggcacgcacgacgaactcctggaccgcgacggcatatacacggccttggtgaagaggcagctgcaggggccgaagtttgaggccaccagcagcatcagcgaggcctccgaaattgaagcggaacccagcagtaatgggcaatagcggccccgattattaggaagaccacagttgatttgaatccacacaagtgtatgtaaccctgatgttgacgtatgccactgcgaatcacgcgaaaccattggatatcacatgatgctacggttgttgtaggagtaatttcccacttggtt

SEQ ID NO: 30430 - DNA, 1144 bp, Zea mays
  Clone ID: UC-ZMFLB73019G10_FLI
ctcggttccctgcccccccacgaccacgccgccgcctcctccccacgcccgcccggcgctcccggaaccgccgcattcacatgatgtatcatgcgaagaatttttctgtgccctttgctccgcagagggcacaggataatgagcatgcaagtaatattggaggtattggtggacccaacataagcaaccctgctaatcctgtaggaagtgggaaacaacggctacggtggacatcggatcttcataatcgctttgtggatgccatcgcccagcttggtggaccagacagagctacacctaaaggggttctcactgtgatgggtgtaccagggatcacaatttatcatgtgaagagccatctgcagaagtatcgccttgcaaagtatatacccgactctcctgctgaaggttccaaggacgaaaagaaagattcgagtgattccctctcgaacacggattcggcaccaggattgcaaatcaatgaggcactaaagatgcaaatggaggttcagaagcgactacatgagcaactcgaggttcaaagacaactgcaactaagaattgaagcacaaggaagatacttgcagatgatcattgaggagcaacaaaagcttggtggatcaattaaggcttctgaggatcagaagctttctgattcacctccaagcttagatgactacccagagagcatgcaaccttctcccaagaaaccaaggatagacgcattatcaccagattcagagcgcgatacaacacaacctgaattcgaatcccatttgatcggtccgtgggatcacggcattgcattcccagtggaggagttcaaagcaggccctgctatgagcaagtcataaggcaaacttcaccttgacagaaaattttcagagttgacctctccacgagatgagcattctcatgtgaatatatattatcttaacaacagaatgtacgggtttttgaccctgcacctgatcccttcagccacgtccagttattcttatcactgtagtatccatcaacaagtcctgtaattatgaggatggtgttacagagtttctagcaagcatttccatcgagggaatggccctgagttgatccatgtagcaagaaagagaacatgcttacaagcaatatatttgctgtg

SEQ ID NO: 30431 - DNA, 705 bp, Zea mays
  Clone ID: UC-ZMFLB73019G11_FLI
caggcgcagctgcggttcctgggcgcctggctcgacgcccacatcgccgacgcgcgggcggtgctgcgcaagccgctgctggtggccgagttcggcgagtcgcgccacgacccgggctacagcggcggccaacgcgacgcggtgttcggcacggtgtacgccagggtctacgactcggcgcgcgccggaggccccgcggcgggcgcgctcttctggcagctcctggcggaggggatggactcctacggggacggctacgaggtcgtcctcccgcaggcgccgtccaccgccggagtcatcgccacgcagagccggaggctgcagggcctcgccagggcgttcgtgcgcgcgcgcaaggcccaccaggggaaggcgggcaagggcgctaagggtggcggcaactgaaagtggggtgaaacgtgtgtggcgagatcaagaagagtgtgtgtgtgtatgcgtcgatgtctcctcgagatgatttgaagattcatccgggagccaagagttacttctacatactatctagcgttgtcctccatgttttattatttagaggacttgcgtttagttcctgtgtggatcacgatagtcgagatgagcgaagttatatgcaaaagtcgtggactcgtggggggagcaactctacaatctcgagacctttgttggtttgttcgcctctgattaaagactaaagacagttattcg

SEQ ID NO: 30432 - DNA, 2149 bp, Zea mays
  Clone ID: UC-ZMFLB73019H10_FLI
tcaaaacccattgttcaagttcggagagatgttgtccagaaatacgtggaaggtctttgttgggttatgagatactactatcaaggtgtttgttcatggcagtggttttatccctatcattatgcgcctttcgcatctgatctaaaaggcttggctgaattggaaataaccttttttttgggtcaacctttcaagccatttgatcaactaatgggaaccctaccagctgcaagctccaatgcactgccaaaatactatggggatttgatgagtgatccagattcaccgttgaagtctttctacccaaaagattttgagatagacatgaatgggaaacgttttgcatggcagggtgttgcaaaattgccttttattgatgaaaggcgtctgcttgcggaaacaagaaaacttgaagatactttgacagaagaagagaaattcaggaataggactatgcttgacataatttacgttagagatactcatccattgatcactcagattatcttcctgtatcagaactattaccatctatcaagaacagacccttatgttattcccattgagcctgctgctagtggtggaatgaatggattcctatgtttatctgaaaggaactggtatagtgtcactgtcacttctccagttaaggggttcaatggcattgctcagaacagagttttgaatgctgcctatctcaatcctcagtatcacaaacacatcccagagcctccagcgggggtcatcatacctgcgaagatactgaagcctagtgatttcaaaccctttcctgtgttgtggcatcaagataatagtcgtcgacaagtaagagaaaggcctcaggtttctggagccctgtccggttctctcttaggagaagctgcacaccgactggtgaaaaactccctccagatcagatctggcaatgctgctgggttactttatatgccatacagaggtgcaccctatggccctggaaacagaccaaggcctgctgggccattggggtatgagaggggttttgtggataatccataccatgcacacatgtctagaagtgttccaaaccctcacgctcaattctttggtgattctcaagctaacagacagcccatgcggatactagaacggccagactcccgaagtcatgatgctggtatccgtgcatcaatgtctaaactgacaatccaagaagggccaaggcctcatcaaaataacaggatgcagaattccgggtactggcccaatcaaccacatcctactcactttactggacccccagcccagcggcctatgcagaacatcagttttatacctcagcgacctttccaaaccgggggatttccgcagcagagacctgtaaatggggctccaccaccattacctcccagtaactggattggtaagcaaccaagtggatgccacatgagtgtatcacctgcaaaactcgatccaaggacagctccagacagacagcccaagcaggataacccaagatctcaacaggataagaggcagcaggcgaccaaggtataccgtgtcaaaactcaagctactaatgttaatggtttgtcagagccaggtaaacaggaagaacctgaagggtaactgggttgctgcaaatccacacgccaagtttaatgtgcgtggagagaatacgctggctcttggtgatagcagcagagggtttccatgtatccctcccacaatttacctttcgatgttgaattgtttgttgtattacccggaaaggagtcggctaaattttaggtcaggggatttagacacagcttttgtttagttgataggacatggtatgggcattcactgcttgttgtaaagctgttagttggatagctgaaactgttttgtgctggctgactgctgcatattcaacatagacccgtgcggaggctggctcaactgccctgctcctgctctatctcatggaagttgggggcagatgtgcttgtggtcttcaaactgagcagtttgtgtctctgagaaaggaggaagcattccgaatttttcattgtaccgttgaaccaagttgagtctttaacactgaaaagaacatgttcctctcgagcttaacgagtgccataattaggacatggaataatatatatatttttcttttctgggatgc

SEQ ID NO: 30433 - DNA, 884 bp, Zea mays
  Clone ID: UC-ZMFLB73020A11_FLI
gccaaaacccgcatccataaacaagaaaaagaaaagaaaacccccgctgccagcgacagaagaagaaggggtcccttctccttggttgcgttgcgcctccctcctgtctgcgtgcgtgcaatcgacgcagaggcgcgggcgctcgcaccaccacgaccacgacccgatggctttcatgcgctcccgctcaaatgcatcttctggcatgggagttgctcctaacattagggagacattcgtcgagcttcaaatgaagaaggcattccgatatgttatcttcaaaatcgaagagaagcaaaagcaggtggttgtggagaagacaggggctactactgaaagctatgatgactttttggcctctctcccagagaatgactgccgatatgcgctgtatgattttgattttgttactggggagaatgtgcagaaaagcaagattttcttcattgcctggtccccatcgacatcccgcatacgtgctaagatgctgtactccacgtcgaaggaccgcatcaagtacgagcttgacgggttccactacgaaatccaggcgaccgacccatcggaggtggacatcgaggttctccgggagcgggctcactgaagctggttctccttttgaagggacctgtggagggccgtgaaccttcagccagatgcaaattcaattatcaacgatgaagctcccgccgtggtgtttgttaataagttcctgtaagcatatcatttagtcgctatgcatgacactagctgaagcgctatctaagctctattggtatgaggtttggttgccgtgttgccgagcctgtaaacgaagcaagatttgcaaacttgttatattgtggtattgatgatactggattactggctgtgggttgttcggg

SEQ ID NO: 30434 - DNA, 840 bp, Zea mays
  Clone ID: UC-ZMFLB73020B06_FLI
gagcttctgcttcgtctgctgccacctcgcgtcgggcgggcgcgagggcgacgaggcgcaccgcaacgccaacgccacggagatcctttcccggacgacattcccgcgggggcacgcgctcaacttgccgttgccgcagaacattctagaccacgaccgggtgatcctgctcggggacctcaactacaggatctccctgccggaggccaagacgaggctgctggtggagcgccaggactggaagacgctgctggagaacgaccagctgcgcgccgaggtgtgccgcggaggcgcgttccagggctggagcgaggggcccatcggcttctccccgacgtacaagtaccaccccaactccgacgcctactacggctgcgccaccgccgcccgcggccggaacaagcggcgcgcgccggcgtggtgcgaccgcgtcctgtggcgcggcgcggggctcgcgcagacccgctacgaccgctgcgagtcccggctgtcggaccaccgccccgtccgcgccgtcttcgcggtggaggtggatgcgcccggggacctcaactcgctcaggagcttcttcatgtccgagaggttcgacagggaccagatgctgctccgcaaggatgacgtcaacagcgccagattcggcgacactctttgagacacgcgtgttgagagggtgaagttgtcagtccagttctccgactgcaattgtactacgcaggcaaaagtgtgatgcagagcagagtacatatatggatgtttttcatttctgagtcagtcagtgttcatacggtcgtatctactgcaggcagctaggaaggatacagagatggggttttatttgtc

SEQ ID NO: 30435 - DNA, 699 bp, Zea mays
  Clone ID: UC-ZMFLB73020D10_FLI
gcgcaagaaacgaaagccacccgccccgcccgcctccaaccgcgcttaaatgcgcgcctttcttcttccgcgttaaaccctccggctgtctcatcgctccgcgtagtaaactcttgttacaaaaggccagctgctcgtttgctccgccgcgcgccgtcggttggctgctcgctcgctctggctgggcggcgtcggttgctcggctgagtccggccggggagcgagcaatgcacattgcgacctgcgtgtggcaagagaaggcgtcggccggcggcatggggggagctgctgctggtggaggcggctgcgccggcggagagtggggcgcggcgcgcgcgaaggtggcgtcggtgctgggcgtggccgggtgcgcgctcaactgcgcggtgagcttcgtggtgttctcggcgctggacgtgctggacgtggtgctgtgcctggtgtacaagctggtggactacgcggcggaggcggagtggaagccgcgccaccagcggcgggcgggcccaaggtggtgcggctgtcggcgtcgtccgcgaagctgcagctggaggacgtgtcggacacgctgtacgtgcggccgtcgctgctggccgacgcgacgcgggcgggcaacggcagcggcagcggcgtggcccccgcgctcaccgtgagccccgccatcgcggagctgatccgcgggaagatggaccgggcccc

SEQ ID NO: 30436 - DNA, 1098 bp, Zea mays
  Clone ID: UC-ZMFLB73020D12_FLI
catttctgcactgatattcttacagtaaataagatcaaggaacctatattgtgtaccatgtaatatcatttttaacagtttgatgaggaagtactactactattacaattgatgcttcagttctacgacttctttcaaaccaagcgtccacacatatcttgaggtatgtttctgatctgaagtacttatttacaacttctctcacttgtcatctatgtaccatgtatgtttctgaaattacatgaacagtaatgttttttttggaagacacagcatacctttaattattcagctactgtacaatgtacaaattcttaatttactgctaggcaaatcaatgctctcaaccatttcaacttctgttgccatgagatgagagaactgaaatgatagtctcattgttagtactttaactgtgctgttctatggatccttcatccttcactatctagcagtcaatatgcttcagttcaaattgtttgcattttctttcctttgttggtctgacatgtaaaactttatgctgcagcattctcactgggcttctgtccttcatgatggacgatgcactgacaactggaagcatcaagacatcagatgcagaaaagaggcgtttagcaaaagcttcccttgcctacaattgtgagagcaaaaactgtccgcacttcaggaaacttttcccagagtatgttgagaagtacaatcaacagctacaattggagaacactgctgcagagccggtgcctcaggagaatcctgcacctgctccatcccctgctgcccagcaagccccgaccgtggccaatagggcacaaccactggcggaggcgcgccgtgacaagaaccagaagaaggcggtgcccttctggatggtgctggtcatgttttcagttttcggggctgtgatggcgttgcccctaatgcaactttgacaataataaagacaataagaacgtgtgatgccagggccgtaattttgtatagttttctattggtttgtctgagtgactcagttggtcccctagactacctaccacctcggagtcgtattgatgaacctgtgatggtatatctgaagaacttttgttctcagttctc

SEQ ID NO: 30437 - DNA, 1426 bp, Zea mays
  Clone ID: UC-ZMFLB73020E07_FLI
aggaggccaagaaacccgcacccggcgaggcggaggccggcaacggcgccggcgcggaggcggcgacctgcgactactgcgggaccgcggcggcggcggtctactgccgcgccgactccgccaggctctgcctgccgtgcgaccgcctcgtgcacggcgccaacggggtctgctcccgccacgcccgcgccccgctctgcgccggctgctgcgccgccggggccgtcttccgccgcgcctcgacctccgccttcctctgctccaactgcgacttcgggaggcaccgggatggcggtgacccgccgctccacgaccgctgcgccgtgcagccctattccgggtgccctccggcgagcgacctcgccgcgctcctcgcggtgcccctcttcgacaagccggccgccgaagatggtgcctggtggaacatctgggaggagccccaggtgctgagtttggaggatctcatcgtgcccaccaccccttgccatggattcgaacccctcctaacgccgccctcgcccaagaaccggagcatctcgccggaccggaaggtgaacgaggagattcttcggcagctgggggagctcgcagagtctgatggcggtatgcaggcatcagcaggtcgtgaggaggcagagcaagctggtggagaccagttcccttcctgggcgtcaccacagtatgccactggacatggcaattttggaacagaggacaaccatgagaatggcagatggaacaacagtgaatatcatgatctaaatgatgcatgtaagctcgaggtcacatatgatcaggctccagtcaactcggctgaaccgtgcttgtcttcatttgctccactgtcggaaatctgccccagcatgagcaatggtagcagtaaggaagataaccaccaggctaatcctggcattggcatgccaatgcaaggtctacccaaaaggagtggatttgatgttgtcccatgccctgaccgtgactcggtcatttcgcgctataaagcgaagaggaagacaagaagatttgacaggcaggtccggtatgagtcgcgcaaagttcgtgctgatggcaggctcaggatcaaggggcgttttgcaaaggcaaaccagacatgaacctaaatctgcagttctgcactatcctaagcatctttcctcaagaaatatgctaagtatcttccaacacgaagaagaaaactggtcaggggcgatgataatgcaaaaatgtgccagaattttgtttgccttcagttcaatagctgataaccatagctccatatacagttgaattgaatgacgtgtgtatatattgctgtcatgtgactagtagctacattgctttgagagatcaaaacctgtatatgcacctacacatgtgattttgccatgacggacataataatagaaccactgcgtttgattgatgt

SEQ ID NO: 30438 - DNA, 347 bp, Zea mays
  Clone ID: UC-ZMFLB73020F12_FLI
gagatgcacaattacctgaccagcgtgtatgaagaaggtgacgcaaggtcagctctgattgccatggtacagtcacttcagcgtgctaaaaacggcgtggatatcgtctccggcagcaaggtatacgataatttcccttttgctcaactgtaaagtgttttgcatatgctatctgttttggttaacggagcactctgttgcagattcgaacacattttgcaagaccaaactggaggaaggtattctgtgatttggccagcgcacacaagaactctcgcataggtaagccacttgtcagtgaacatcgagtgacacgattttcagattcagtacaatcttttcggacc

SEQ ID NO: 30439 - DNA, 2450 bp, Zea mays
  Clone ID: UC-ZMFLB73020G03_FLI
ctgtgataagattaatgtgcccaataagtcagataaggagaatccgctattgaaggcaaagtgcaaatattgtaacaagctttatagttgaaggcaaagtgctattgaagaactgtcccaagtatcgaaagcatattgaagaaaagctagatcaaacactgttgaactttgctccttcaaaggcaggtgaatctggttgtggtctccctactatctcatctcctagagaatataatcatgaacaagtctaaaaattaaatgctaagatgattatagttcatgagtacccgtttagaatggttgagcacacatggtttaatattgtcatgaagtatatgaatctgttgtatgaatttattggtagaaagaccataagagctgaatgtataaaggtttatgagtctgaaaaagaatcattggctaaggcccttaaaggtgtggatttcatttccttgaccactgatttatggacatctaatcaaatgttgtcctatatgtgtttggttgcacactacattgataaagattggaaaatgcaatattgtgtgctgaatttttttgagttagaccctccaaaggacatgtgataggacaagctgcatatgttgtgttactgcatggaaaatagaagataagattatttctttcactctagataatgttgcaaacaatgacagtgctatacgtggtctgagggctagatttgcagctagaaaggggaatgctttcatttcaaaatacttccatgtctgttgttgtgcacacatcatcaatttggttgtcaatgatggagccgctgcattagcttctttgatagaaaacctaaggttaacagtcaagtaccttaagaagtctccatcttgtatgcataagtttgttgacatttgtagatctcctgcaattcaaattggagaagggatgaggcttgatgtctcaacgaggtggggttcaacatataagatgttgcgcactactatagcttacaaagaagctataaagacataggctgattcagatttgaattataagtggaaacctacattagaagaatgagatttgtttgctgcaattgagccaattctagcctctttaggaaccactacactgtcaacttcttcctaccccaccgcaaacctattctatccccataatgtggatgtcaaaattgcattgagagcagcaatggtttctactaattttaatatgaaaaaatgggtattgcgatgatggagaaattcaacaagtattgggaataaaggaacaatgttatggtgattgctactatcctagatccaaggtataagatgagatatattgagtggtgttttggtaagattttttatgtagaccaagttggatttgagatagaagaatttagagacgaattggaaaagttgtatgaagactatgagatgcaacatagagagagaaaagctgctcaaagcaagcttagtgcatcatcatcattggcaatgaatagatcttgtagtttgcctactgcatcatgtgagtttcagtcatacttatcatctactgaagtgaatccatcaaaaagtgagttgctcatctattggatgaaacaatgtgagtttggctgataaggattttgatttgctaagctggtgcaaggttaactcacatagatttccagtggtgtcgaggatggcaaagttcttaattgtgcccgctacctctgtgtcttcagagtctacttttcgcactgggggtcgaactctagatgactatcgtagctctctaagcccttctatggtagaggcattgatatgctcctctagttggattcgaagtgcacatgatgggagtcatatgtattgtagtatgatattcttctacttttttattctagtgtgttttctatttttttatcaatgtaatgctctatttattttttggagcaagatgaagaagacgatattgaaaacaatgcatttccaaaaagtttggtggagagcaactagatcttgatatcttttggacaattggatggttgatcacatagcaagtcgcatggatgatggactcatcagtcatcactcatggacatgttcacatggatgagcacacaacaagtggcatttgattctggaattttggatggtggtagttgcatgccacttgtatttgtgtaactgtgggctgtcacctgttaggttgtgcggctgtggcatggttctttacttcttttgtttatctcttcactgtttagacttgagaatttgtagttgcattcgtattgcagactttattgtcttactgttggagatggtagtgatgttactgaatactgaggtagtgtaactgttggagttggcagactttattgtcttgcacttttgctattggagttggtattgcagacttaagtgttatttcagtttgtgagtaatgtgactatgtccccttatgtttattcaagtcataaagtattc

SEQ ID NO: 30440 - DNA, 784 bp, Zea mays
  Clone ID: UC-ZMFLB73020G06_FLI
cacgacaccaaccaccaagtctgatgcgaacttcatcgaccagtatcttgatttgatggacatcacgagaggcataatctggcgcttccttggaccatggctacaccgaccacggaacaagtgcacaaaagtcatctttggtttagttggcatgcaacgctaaaagaactcgtgaaaggacccctactcctggaaaatactgtggtcgaagaggaggatctcaaaggagcccatcaccttaccgccctcgcagaagggagcgttcgcgctcaagggaacgcagaagggagcgttcgcgttcaagggatcgaagggagcggtctcgctcaagggatcgaagggagcggtctcgctcaagggaacgccgaagggagcggtctcgttcaagggaccgcagggagaggtctcgctcaagggaccgccggagggagcgctcacgctcaagggaccgcagaagggagcgctcacgctcaagggaccggaggggcagttcaccccatggcagaaggcatagagatcggtccaggtcacccaccagcaatgggaaccataaggcagactaggaagcgcttttatggacttgtcgttgattgcgtgaacaaaggaacttgtaacactacctataaactggtcagactgagacggttagcatggatttttagtagtgttgctgtattttgttgtttcatacaagtactctattctgttagctttcggatcgaaatgtcggatgatgatggttgttattgttctggaaatcgtagacatgtcctccagaatacct

SEQ ID NO: 30441 - DNA, 2176 bp, Zea mays
  Clone ID: UC-ZMFLB73020G07_FLI
ccggagacagaccaccgggccgtgcgggcgctcgcggctccgctcccagatcccgccgcgcgggcaagcttcgaggagtgaccatgcaggagcccacggagaccaggccagctggtgcggaggatctcgcgaacggcgcgcgagacggggagggacctccgccgcaggttgaggaggaggaagtggaggaggagccgccgcgatcggcgacggcaaagcaggaggaggcgacggcggcgctggggtcggaggggtcccgcccgttcactatgcgggagctcctcggcgagctcaaagaggatggcgagacggctgctggcggcagcagcgcgagatctgcgttcggcgatgggaacagggtcggatccgatgatgccgagggctcgttctacagccaagatagcacacaacagttttcatcccaccatgatgtggcgatggacttgataaatagtgtaactggagttgatgaggaagggcattctcgccaaaggattctttcttttgctgccaaaaggtatgtaaatgcaattgaaagaaatcctaatgaccctgatgcatattataattgggctctagtcctccaggagagtgcagacaatgtggatcccaattctagctcctctaaagatgcattgcttgaggaggcttgcaaaaagtatgctgaagctacccggctttgtccaactctttatgatgcatattataactgggctattgcgattgctgatcgggctaaaatgcgaggtcggacaaaagaagccgaagaactctggaaacaggcaatactgaattatgagaaggcagtccagcttaattggaatagcccacaggctctcaataactggggtcttgggctacaggagctgagtgcaattgttcctgcacgggataaacagaccatcataaaaaccgctatcagtaagttccgtgctgcaattcagctgcaatttgatttccatcgggcaatatacaaccttggaactgttttgtatggtttagctgaggataccgtgagatctgggaagccagatgtctctcctaatgagctttatagtcagtctgctatctatgttgctgctgctcatgctctaaagccaaattactcggtctatcggagtgctttgcgattagtccgctcaatggtataattaatttattctgtttctgataaactgtgttagtttattctgtttgatattattacttaatagttcatgtagctgggatatgatagctgcttttcagttcagttatccatgtgtgttgaactctatagcaacccatattcttgaggaaaataactgacaaccctcatggtattcaaactttttttctctgaacggtactgtgtgctggtctttcagcacatttttctgttctttagatgttctcttgtctaattcttgattatgacagtgttcctctgttcttattgcatcttataccatgcagttacctctgccatatctcaaagttgggtatttgacggctcctccagctaacaattccattgcaccacacaaagattgggagagatcacagttcattttgaatcatgagggactccagcaggttgatgcttctgaccagcctccatcacaatccccagggcatttggacaggggcagaaagcctgtcagaataaacattgcagatattgtttcagtgtcagcatgtgctgatttaaccttaccaagtggcgctggcctctgtatagaaactatttctggtcctacattcttggttgccgatagttgggaggctctcgaaagttggctagacgccatacgccttgtctacactatttttgcaagagggaagagcgacgtacttgccggtattattactggttaaatgtcttgctgcaaatgcaaaactgccaccgaagagccgcaaagttttggagattcagcggcagccttatcggttgaatgccctctttggtttgtgttattatttttcccgtctgtgatgtcagtcttcctagatttagccatttagggtatatcatatatattcatttgtaactactttccactgattggcgataggtccgttttccttttgtaaaagtggccgtgtgactgtattgtgcattcacagaagatgtatcggacattcttaagtttttgattttgtttctctgtaacaatgtatcaaggcacgatggtct

SEQ ID NO: 30442 - DNA, 983 bp, Zea mays
  Clone ID: UC-ZMFLB73020G08_FLI
cgcagctgcccttgcccgccatgatgcctccaccgccgctgcgccttcacctcctcttccgctccgaaaccctaatccctctactccggcaacgacccagctgcgacgcgccccattgccggaccaggaggtacatctccgttcgcgcctccgctgcacagctcgccgccgcggacgtctcgacggcgcagcagcctgcacttgaacttgggttggaggcagcggcggcgggcttcgtcaccggtaagaggaaggccaccgaggtagcccacgcgtaggttctggagaaatattgttcagaaaggggatacggtggtggatgccacatgcgggaatggcaatgacacgctcgctctgctgaagatggtggctgatgaaacaggccgtggacgtgtttatgggatggacattcaagattctgcgatagagaatacttcctcttttctgaaaatggccgtggatgatgaacatcagcggggactggtaaaactgtttcctatatgtcatagtagaatggaagagattgttcccaaagatgctcctgtcaggcttgttgctttcaacttgggctaccttccaggaggagataaaactgtaatcacagtgcctaggacaactgagttagcattgcgagctgccagcagaattctcagttctgggggactcataagtgttcttgtatacattggacatccaggtggaagggatgaactcgatgttgttgaatcattttcatcaagccttcctgtggatacctgggtgacctgcaaacttcaaatgctcaataggccagtttctccagtactcgttcttctgaacaagaaatgatgacagttccgatacacaaaaagatggggcttttgggggttgacttatgagtaatgacgcttgctgatggagctcaatacagccaactagcttcatgccatccgtgcagacttttgattggcagctgcagtgtaacttgtcataattttgatacc

SEQ ID NO: 30443 - DNA, 711 bp, Zea mays
  Clone ID: UC-ZMFLB73020H04_FLI
agcacctgatgggagaggatctggagtctttgaatccaaaagagctccaacaactagagcagcagctggagagctcactgaagcacatcagatcaagaaagagccaccttatggccgagtcaatttctgagcttcagaagaaggagaggtcactgcaggaggagaacaaggctctacagaaggaactttcagagaggcagaaggcggtcgctagccggcagcagcagcagcagcaggtgcagtgggaccagcagacacaggtccaggtccagacaagctcatcgtcttcttccttcatgatgaggcaggatcaacagggactgccacctccacaaaacatctgcttcccgccgttgagcatcggagagagaggcgaagaggtggctgcggcggcgcagcagcagctgcctcctcctccggggcaggcgcaaccacagctccgcatcgcaggtctgccgccatggatgctgagccacctcaacgcataaggagggcgagcaaatggcgtgcgaagtgattgattgctcaccgttgattgaacgatagcctaagttcatggcggcagcaaactaagctaaaactattgttatgtttgcaaggaagggtagggtaacccgctgtgtaatctttgtccagctagcatgtaccaactgagatgcatgcatgcttattattgtccaattacccgtgaatctagcggtgcttttggtg

SEQ ID NO: 30444 - DNA, 1744 bp, Zea mays
  Clone ID: UC-ZMFLB73020H07_FLI
agaagctgcatgctagcgattgcttgccctgtggtaaagagaatgtcgggacaggactacaacctaaatctgatccagaacgtgctgataataggatgagtgttgcacgtcttgggttggaccttaacacagtagatagtcctgatgtagcagagcctaaccctttcttcccttacaagaaattggggcagtcaaaagtcagcgatccatcggaatgtggcagcactactggtgctatagaagaaagcgagtcacacagaaagtggagagaaatgaagcagaatggctttctttcttcatttcatgggaatgcggtggtgcctaggccacgtggtcgaccccccaaaaggaaaagggatgatgaattcaaaaagagcagttccacacagcatgtacaggctaacaagtctgtgaaggttgctgctcctagtggtctattatctgggctaaaccctggaatcattaaccatgtgagaaatagcaagcaagtttactccataataaaggctatggtacactctgagaggcttgagaatgagaaccactctagtcaaacaggtgaaagagggagagaagttaatgagagaattcaggatcagaaatatggtggtggtttcatgaagtgccatttgttgataaatgataataatgcggtgtttcaccaaacactgcctaacacatcgcagttccttgcacaggatggtgatagtcttaaactgcaactcccatccgcagtcactatgtcttcagataggaccttcagtacgtcagctgatgatcctgcatctaatcatgattacatgactgtactgtcagtaaaagcggctagtgttgcttctcaatggttggaattactgcatcaggacataaggggacgtcttgctgctttaaagcgcagcaggaagagagtcagaaatgctcttcacacggaactgccatacctaaccgcgacagaattttcatctaatcaagagaacgaatcatccattgcaaatacttctgagattggatgtactgacaaagcggtttcagaagctcatgtggcacgatggaggtctctgtttgttcagatggacaaaacacttcaggaggaagggaaacagctggagaacaagttgaagcaagtgcaagaaatgcaattgaattgtgataaaggcctcaaacacatgacctgtgaagctcctctgctaggacctatggctgaactatggaagctgaagaacccaaatatttccgagagcgagtgggcggtgcaagccgctgccgcatcgatctactcgacctgcaacatggtcatgagaacggagaacgtgccttgcttttgataccacacttgtactttagttttttgctttgggcgtgttcggctggctacaagccgacactgttgcagctgtttggattgctgcagctgcaatccatagagagaaaaatactgtagaagccgcagccgcagccggattgcagccgcagcaagccgcagcgaacaagcttacctcaaaccaggtcttctttcttacctttaccctatgtgaatcgtgatcccttgtccattacagtagtggcgactggcgagtgatgtaacaagaacaaacttgtgatgtatgttatcccgagcctacaatttcacaggcacatgaaacagcacattctttttcatggagttgaggatattcatatcctaccgttttggttcggtgagatggtcgaaatagagattgccaccttgttaaatttttaactg

SEQ ID NO: 30445 - DNA, 1054 bp, Zea mays
  Clone ID: UC-ZMFLB73020H08_FLI
ccacactctaccttgtctcttcacgtgcacacgacgcctcccccaatggctgcggtggcggaggaggaggtgatcgtcgtcggcgcggggcagtcggggctagcggtggcggcgtgcctgtccctgcgcggcgtgcgggcgctggtcctggagcgcgacgactgcgtggggtcgctgtggcggaagcgcgcctacgaccgcctccacctccacctcaccaagaagtactgcgcgctgccgcacgcgccgcacccggccgaggcccccgcgtacctgcaccgcgacgacttcgcgcggtacctggacgggtacgccgcgcggttcgccgtccgcccgcgcctccgccgcgaggtccggtcggcgcggtacgaccccgcgagcgcgcggtgggaggtggaggccgtggacctcggcacgggccaggccgagcggtacgcggcgaggttcctggtggtcgcgtccggggagaacgccgagaagttcctgccggaggtgcctgggctggaggcgttccccggccaggtgatgcacgcagtggagtaccggtcggccgtcgtggacgtcggcacctacgccaagatcaggagcggcgagatccgggtgctccccgccgccgtcaagagcgtccgcgggaacgtcgtcgagttcggggacggcagccgccaccctttcgacgccatcgtcttcgccaccggctaccggagcactgtcaggcggtggctcaagagcgaggacgggctggtcggtgacgacgggatggcggcgcggagctacccggagcactggaagggggaccacgggctgtactgcgcggggatggtgcggaggggcatctacggcagctgcgaggacgcggagctcatcgccgccgacatcagcaagctgctgcaccccaagcaggagcagggcaacggcgtctagctgcagctagcatttcgctttgttggttgcgatggaaacaagctctattgttgttgggttggttgataataatggttgcgtgaataattaaacgtgcttaattgagatggcctggccagcctattcgttcatt

SEQ ID NO: 30446 - DNA, 1276 bp, Zea mays
  Clone ID: UC-ZMFLB73020H09_FLI
ctcggggagaatgctgacgagaaggacgctgaggagattattgacttggctagcaaagcttctattgctgatcagcagaaacaagtgcaggataatgttcattatgaacttacgcatatgtgccaagcaatggatagcattttatgtcctgatacaataaacgacccatcaaaaggaccttcagaagcacataatcattctcagcgtagtggcttaagttttgccgttggtggtgctgcatctgcaaacaagcaaagtgcaattatccctgctacacgacctttaactcgagcagaattgtcaaagaaattcagggatcattttgggtacacacttgacatcggaccatctggaattcctcataaagacgcaggtcaaggtttattcttatcaggacaagcaaatgccggtgctgtcctagccatctatcctggtgttatatattcacctgcttactatcgatatatacctggatacccaagaattgatgtttgcaacaactatctaatcacaagatatgatgggacaataattgatgcaaaaccatggtgttttggtggtgaaacaagagcattatgggatggttcagatttggtggattacaatgctatggcacctaaaggctcagagaacaactctgatcgggtgtggagaatgctaagcaagcctctagaaaaaggtgtaagggaaaattttggtgaagtgcttgaacgacgaaatccccttgcttttggtcattttgcaaatcatccacccaaaggttcaagtcctaatgtcatgatctgcccatacgattttcctttgacagagaaggacatgagagtatacatccctaacattacgtttggtggtcaagagaccattaggatgaagaggtttggctccttctatttcaagtctggaggttctgataatcaggctggtgattctctagtactgaagacgctagtgctggtgagcacaaggtccatatgtgatgaagagctctttcttaattaccgttacagtaactcaaaaagacgaccagagtggtacagccctgtcgatgaagaagaggataagaggagatggagctagtttagcacttctgtatcattctggttgtgcatttttttggctaacttttttagttctttcccccctggaaattgcaactgagcattggtaagctcctgagatcgagatgacagttttgacttaattcgtcatttggtattacatactttggtgtcccaattaccatcatgataaaagttaagctactcatgtaagttct

SEQ ID NO: 30447 - DNA, 2338 bp, Zea mays
  Clone ID: UC-ZMFLB73020H11_FLI
gagagagagttgggtgcagtgcagcagtgcagagagcagagacggagcggagcgaccgagagagagagagaggggaagtttaataatatatcccatcactcacacgccacggcatcattcgccgcctccttcctcctcccgctcgtcgccgttcctcctccgagcaccagcagcgcgccccctccgctctcccttagctcaccagccgcctcttcgtcggagcagcaacagcagctgtgcatgggagtgggagcacggctctgagaggaaaaagggaagaagaaaggtgaccaaagggaaacaaagggaaccaaaggactaggaggatgaagttcatgaagctgggctccaagcccgacgccttccagtccgacggcgccgacgtccgatatgtggtctctgaccttgcaacagatgttgtggtgcatgttggtgaagtaaaattttacttgcacaagtttcccctcctttccaagagcggcaagcttcaaagattagttctgaaggccgctgaggacgagactgatgaggttcgcatagatgaccttcctgggggagcaaaatcattcgaaatatgtgccaagttctgctatggaatggtggtcaccctcagtccacacaacgttgtagctgcaagatgtgcgtcacagtatcttgaaatgaccgaagatatggaaaaggggaacttgatatttaaaatcgaggtcttcataaattctagcatacttcgtagctggaaggactctatcattgttctccagagcacaaaggctctatcaccatggtctgaagagctgaaggttgtgggtagatgtatcgatgccatcgcttcgaagacgtctgcggatcctgccaatgtaacctggtcatacagtcatagtagcaagaaaggaggagcttgtgctgaaatagtcgagccagcaggaaagccatcaatagctccaaaagattggtgggttgaggacttgtgtgaactggatgttgacctgtacaagagagtcatggttgctatcaaatccaaggggagaatgtcacctgaactgataggagaggcacttaaagcctatgcagttagatggctgccagactcctacgatgcattagttgccgaggattacatgaggaggaatcaatgtctggttgagacaataatatggttgctgccttctgacaagagctcgggatgttcttgcagatttctcctgaaactgttgaaagtggccatactagtcggaggcggggagcacgtgaaggaagagcttatcaggaggatcagcttccagttgcacaaagctactgttaaggatctcttattacctgccacttcgcctaatgatggtacctatgatgttcggctggtgcataatcttgtccagagatttgttgcaagaacagcgctgtctcataatggcggtttcattgagaagtccgacgaaaagatgattgagctcaacttcgagcaagaatccattttgtcggtaggagagcttgttgatggctacctgtctgaagtagcttcggatcaagacctttcgttgtctatgtttgttgaactggcgactgccgtgccagaggtggctaggcctgttcatgacaacctgtactatgcagtcgatgcatatctcaaggaacacccagacataaacaagtccgagaagaagaagatttgcagtctggtggatgtcaagaagctcagcgcagatgcatccgtgcacgccacacaaaacgaccgcctgcctctccggttggtggttcaggtcctcttcttccagcagctgagggccggcccaagcaaagaactcgccctgattgacaatggagaacacgcttgcacacggcctacgcaggatcaatgtgaccgtggtgaaaggcggataccgaagcatccaaactcactgaataagcaggtgacaagcctgagcgcgagagagagccagcagcaccggatcagcgagcacaggggcggcaggaacagctttaaagaccagcttgggggcctcctgctgcagtcgcgatccaggaggatctttgacaagctgtggagcagcaaagggcagggcgagcatggcgggaaaggctcggagacgtctggtagctcgcagagcccaccgttgtcagcaaagcctgcagaagtgaagccctcccctcttccccctcttaggggcaggaggtactctgtttcttagttttttttgggggtgggggctctcctagtttagggctctgggataggttgttgtacagaaggtatcatctgctgccaatccctttttgttttgtacgcagatcaatctgctgttctatgtgatgatccatgccgtagcttttactgtagcgt

SEQ ID NO: 30448 - DNA, 1093 bp, Zea mays
  Clone ID: UC-ZMFLB73021A01_FLI
cagacatagctgctttgtttggatggaattctgatatcaagcacaaagaatgttgttggcatggtcatatccaagtaccctcagtgcattactgaagctccatgcggcagaaaattctgacatgagcagaataaattgatgtatatgtaccttttggaatggctggagttatattggctgcagcactctaatatttttatctatcattgttaccttacagcctatggaaatttatgttgatgatgaggctaaactgacccttcatggtctagttcagcactatatcaaattaagtgaggcagagaagaaccgaaagttgaacgatcttttagatgcactcgacttcaaccaagttgtgatatttgttaaaagtgttagtagagctgcagaactcaacaaattgctctgcgagtgcaatttcccctcaatctgtatacattctggaatgacacaggaagagaggttgacacggtacaagaacttcaaggaaggacacaagaggattcttgtggctactgatttggttggtaggggaatcgacattgaacgtgtcaacattgtcgtaaactatgatatgcctgattccgctgatacatacctgcatagggttggtcgggctggacgttttggtaccaagggacttgcaataacatttgtttcttcatctgattctgatgttctcaatcaagtgcaggagaggtttgaggttgacataaaggagctgcctgagcagattgacacgtcgacatacatgccatcttgatgatcgaggtgaaccagtgtttagtttgagctggaaaggagagcttgtttgaaatatacaccttagatcgctgttggacaaccttagcaccttgtttgaaagatgttccatttgtacttaaccagcagtctagtggattaagcagtaggcgtcgcaacagctgttacatgctacctaggattttatttgcaactctgtaatgttttctatgctccgactgctaattgttctgtttgagactgccctctgggtgcatgttttactagtaaattactcgcaccatgcccgagtcttcggagcatgtgtttacatatttaaaagagttgctac

SEQ ID NO: 30449 - DNA, 946 bp, Zea mays
  Clone ID: UC-ZMFLB73021A09_FLI
gggtttttgattttagccgccgccgctgctcatctcacatccctcgagaagacgcctgctcctcgccgatcgatacgatggccgtcttctccgacctccacaccgccgacggcctcaagtccctcgaggctcacctcgccggcaaaacctatgtgtctggtgactccattactaaggatgacattaaggtcttcgccgcggtgccgtcgaagcctggcgctgagtttcctaatgccgcccgctggtacgagaccgtctctgcggctgtagcctcaagattccctggtaaggctgttggtgtaaatctgcctgcgggatcagctcctgcggcagctgctcctgcggatgaggctgaggacgatgatgaccttgatctttttggtgatgaaactgaggaggacaagaaggcagctgatgagcgtgccgccgctgccaaggcctcttctaaaaagaaagaaagtggtaaatcctccgtccttatggatgtcaaaccatgggacgatgagactgatatgaagaagctggaggaggctgtccgcagtgtccagatggagggtctgacttggggagcatcaaagcttgtgcctgttggatacggcatcaagaagatgactatcatgttgacaattgtcgacgatcttgtgtccatcgacactctaattgaggaccaccttacgcaagagcccatcaatgagtacgtccagagttgcgacattgtggctttcaacaagatctagagttcagtttctgagtttgggcaacggcagcggctcagctcgtcaagtttgtgctgggatgccagtttatcccttctagtctattacagaaatgttgttcggagctgagtctattataaacatcttggtctgagtttattgttgagtggtgccagtttttttcaatatacatttatcttaaaaacagcggtactgatgtttttttgtct

SEQ ID NO: 30450 - DNA, 1808 bp, Zea mays
  Clone ID: UC-ZMFLB73021C03_FLI
ctcttgctcaatacaacctccggctccagcaagccgcagcgccaagcctagaagcggagcgcggaacacacgaggccaggaagaggaggtgctgccgtccccgcgccgccgctgtgggagtgcggggaatggggcggcacggcgtggaccagatcggcgctgtggcagcgttcgtctgggtcaccctccttcccttgctgcttgtgtgcgtcgtgtggccgggcgcccaggccggccatacaagcgagtaccggcgccaactcggctccgccatcgacatgccactcgacgccgatgtcttccgccctcccccgggctacaatgcgcccgagcaggttcacatcacacaaggcaatcatgatggcacagccatgataatctcatgggtgacaacaagtgagcctggctcgagtactgtgatctacgggacttcagaggataacctcaactatactgcaaatgggaagcatactcagtatactttctacaactacacctcaggatacattcatcattgcacaataaaaaagttggagtttgacacaaagtattactatgctgttgggattggacaaacggtgaggaagttttggtttttgacccctccaaaaagcggcccagatgttccatatacactcggtctcataggtgatcttggtcagagctttgattccaatgttacgctcacccattatgagtccaatgcaaaagcacaagcagttctttttgttggggacttgtcatatgcagataactacccatatcatgataatgtgagatgggatacttgggcaagatttgtagaaaggagcgttgcgtaccagccttggatctggactgctggaaatcatgagatagatttcgctcctgaacttggtgaaacaaagccattcaagccattcagccataggtatcccacaccctacaaggcttctggtagcacggcaccttattggtattccatcaaaagggcctctgcctacattattgtcttggcatcgtactcagcatacggaaaatacactcctcagtacaagtggcttgaagctgaatttcccaaggtcaacaggagcgaaacgccatggttggttgtcctcatgcatgctccatggtacaatagctataactatcactacatggaaggtgaaaccatgagggtgatgtatgagccatggttcgtgaagtacaaagttgacgttgtgtttgcaggacatgtccacgcctacgaacgcacacacaggatatcgaatgtcgcatacaatgttgtgaatggcctgtgcactccaatccctgatcaatcggccccagtttacatcaccatcggtgatggagggaaccaggaaggattggctaccaacatgtcgcagccgcagccgagctactcggccttcagggaggcgagcttcgggcacgccatcctggacatcaagaaccggacacacgcgtactacacgtggcaccgcaaccaggacgggagcgcggtggccgccgactccatgtggtttaccaatcggtactgggaaccgacggacgattcggccgacgatttccaatgaggacgagagctgcagctgggttggttattcgttgcggttcctcacgaccaataagcatcgccctgaatacacgaagccacccaagctccgatgcaggcctctgcacttcttaggctgagtccagggcacagcctctctctcgcccctgctgctccagtgcacaggctgtagcagactacaacttcaggctatagtcacgtcagcttttctatttcagaattaagtaatttacgcggatttatttcaacgctc

SEQ ID NO: 30451 - DNA, 1008 bp, Zea mays
  Clone ID: UC-ZMFLB73021C10_FLI
acccttctcttcggtgacaagccggtcaccgtctttggcatcaggaaccctgaggaaatcccgtggggtgaggctggcgctgagtatgtcgtggagtccaccggcgtcttcactgacaaggacaaggctgctgcacatctcaagggtggtgccaagaaggttgttatctctgccccaagcaaagacgcacccatgtttgttgttggtgtcaatgaggacaagtacacctcggatgttaacattgtttccaatgctagctgcaccacaaactgccttgctccccttgctaaggtcattcatgacaacttcggcattgttgagggtttgatgacaactgttcatgccatcactgccacccagaaaactgttgacggaccctcagccaaggactggagaggtggcagggctgccagctttaacatcattcctagcagcaccggtgctgccaaggctgttggtaaagttcttcctgatctgaatggcaagctcactggtatgtccttccgtgttcctactgtggatgtctcggttgttgacctcaccgtcagaatcgagaagggggcctcctatgaggatatcaagaaagctattaaggctgcttccgagggtccactcaagggtatcatgggttatgcggaggaggatctggtttctaccgacttccttggtgacagcaggtcgagcatcttcgacgccaaggccgggatcgctctgaacgaccacttcgtcaagctcgtctcgtggtacgacaacgagtggggctacagcaaccgcgtcgtcgacctgatccgccacatgttcaagacccagtagaggggttttttccccctgcttctcatggatggttgctgcttgtgtatgccgagaataaatgtggatggcgcgtgcctctgggtcgccaggttcatgctgagtctggacatgttttgcacttttgcttcccttcctgctaccatctgtgacagaaccgctcgctaatatgggacctgagattagctttttgctgct

SEQ ID NO: 30452 - DNA, 1005 bp, Zea mays
  Clone ID: UC-ZMFLB73021E06_FLI
tctagaagcacccctctccctctctctctcttcgccgtccgaagctccgcaccccaatctaatcgacacctcaccgagatgggccgcaagttcttcgtcggtggcaactggaaatgcaatggaaccacagatcaggtcgagaagattgtcaaaaccctgaatgaaggacaggttcccccttcagatgttgtggaggtcgttgtcagccctccttatgtcttccttcctgtggtcaagagccagctgcgccaagagttccatgttgctgctcagaactgctgggtgaagaagggaggtgctttcactggtgaagtcagtgctgagatgctcgtcaaccttggtgttccctgggtcattcttggacactctgaaaggagagctctgctgggagaatcaaatgaatttgttggagacaaggttgcgtatgccctgtctcagggactaaaggtcattgcatgtgttggtgagacccttgagcagagggaggctgggtctaccatggatgttgttgctgcacaaacaaaagcaattgctgagaagatcaaggactggagcaacgtagttgttgcctatgaaccagtttgggctattggaactggtaaagttgccaccccagctcaggctcaggaagtgcacgcctccctgagggattggctaaagaccaatgccagccctgaggttgctgaatctactaggatcatctacggaggctctgtaactgctgcgaactgcaaagagctagcagcacagcctgatgtcgatggttttcttgtcggtggagcttctttgaagcctgagttcatcgacatcatcaacgcggccaccgtgaagtccgcttaagatgctacgctgaagacgaacatactttttttttgctcaactgtgctatgtaagctagtagcttttgcgcaggagcagagactgttttgcctgcccccaacttctagcttgagcttgctaataatgtttacctctggacgtatcaataatggtgcttatgtatcc

SEQ ID NO: 30453 - DNA, 1765 bp, Zea mays
  Clone ID: UC-ZMFLB73021E12_FLI
aaaaactagtccccttgcgaaaaaattggtccgtccctgcctcagtctgcactctacgatggcggcgcctccggccacggctcccgcgaccgcccgatgtctgtccgtcgccaagtcgtgctgggctgccgagcggagctccagctcgtttgtcctctcggctcctgcgactggcctccggcaaagtgggagccgcgtcctcagcatccgtgccaaggttgccactggcctgcagagggcctgcattgcggatgatggagcggaaaggccgtggaagctcagtgatgctcgtcttgtcctggaagatggatcagtgtggacggccaagtcttttggtgcttcaggaacacaagttggtgaagttgttttcaacacatcactgacaggctatcaggagattttgaccgatccaagttatgctggtcagtttgtcctaatgaccaatcctcatattgggaacactggcgttaatcctgatgatgaagaatcaaaccaatgttttcttggtggcttaatcataagaaatctaagcatatgtacttccaactggcgatgcaaagaaacacttgagaagtatctgattaagaggaacatcatgggaatatatgatgtggatacacgtgctataacacgaagattaagagaagatggtagtcttattggtgtcttgagtactgatcagtctctgacagacaatgagttgttagaaatggcccaaaagtggaaaattgttggagttgatttgattagtggtgtcacatgtgatgctccatatgaatggtcggacaagactgattcagaatgggagtttaagagggatccgtcaagtgaaacttttcatgtggttgcctacgactttggtatcaagcataatattttgagacgattgacatcatatggatgcaaaataacagttgttccagcaaattggcctgcttcagaggtactcaatttgaagcctgatggtgttctttttagcaatggtcctggggatccagctgcagttccctatgctgtgaagacggtacaggaaataattgggaaggttcctgtttttggcatctgtatgggccaccaattgattgggcaggctcttggtgggaagacatttaaaatgaaatttggacatcatggcgggaatcaccctgtctgtgatctccgtagtggacgtgtagacataagtgcacagaaccataactacgcagttgacccagaatcactcccagaaggagcaaaagtaactcacgtcaatctcaacgataatagttgcgctggcctccagtactccaagatgaagcttatgtctctccagtaccatcccgagtcttcccctggtccgcatgactccgacacagccttcggcgagtttatagagctcatgaagagcaacagattgtaagaaaggggatcaggggagtacttgaaaaggtcaataattgtattggtgctccctcgcaccaacctcaaaagaatttgttgtatctgtagtgtttttcttttggttttgggacgttcatgtgcttgaatttttgggtccagaggacatagcataagatgctctgcgcattgtaccatgaaatggcctggttggatttcgtgaagataacatgtcatcaaactgtacggtacggtacactcactcggacagcgcctcgcgaatttcttaacggcaggtaaagtcgtcagtggatggccatgaaggccggtcagtggatgctttacttttgttgttccaggctaatcagatgtgcacgacgttgttgtc

SEQ ID NO: 30454 - DNA, 1173 bp, Zea mays
  Clone ID: UC-ZMFLB73021G01_FLI
ggtctcttgacaaggtaattatttatttttgttgttaaccggtacacaaaaacatagtcacatgcaagttaacgggtccccacggggaacggggatggggaatgcttccccgtccccatccccatttacccgtcgggggataaactttccccgtttatatccccgcgggggaagtttcttccccatccccatcccctaatggatgaattccccgcggggaatcggggatcgggtccccattgccatctctaggcctaaccagttctgattatatctagctatacaaaagtccatccaaagttcattagcctctcagcataaatcggccggatgcttcctaatcctccccccaatacatctgtcccatcacaaaccacccaatcaacgccaaaagcagaaaacacagtgccatattcctaggtttcactttagttgaccctttcagcatttgcatctcattctccatcagtttcaatgcagctatcgttttattgttttcctcaattccaaccatggctgccttcattgactttttcacgttatccagctcttccatcactaactccaggtcggacaactttttcttcatctctctgatggaattggttagagattcaacagctttgccatgatcattaagtgcgaccattaacaactcaaggcaatggtcaccactgacaaccccatccttgattaacaaaacagcatagctcgcttgccaatggaaaaaatcacattgagacccatccattttcttggctctgcaccggtagaacttcctcgatgtgctttctggttgtttggagacccgctcaatcaccaccccattgcagagcttgcaagggattagatgaagctcaacactcacagtattggagccagagagtaaggatgatgatgacgatgacgacatctcctcaaatagcctgaaggaccatagcaatgataaattaccagttaacggtgttttattagttcaaagtaaagcactgatttaacatgtacagtatgttcagataagttcagagctgatctcatgaacattgctatgactacccttagttcaaaaattctttcccaggataaagagtactttgctgaacttgcagttgacgctgtattaaggcttaagggcagcaccaacctggaagccattcaaattctgaagaaacc

SEQ ID NO: 30455 - DNA, 1145 bp, Zea mays
  Clone ID: UC-ZMFLB73021H06_FLI
cactccctgcggtgcgcccttcgctaccccatccccagtaccgccgcctctttatccacctccggcctccgccgtctctcctcccaccatcgcactccaccgccgctccgctcagcgaccaccggtgaagacgagtggaacgacgcgtgggagaccgcatggcttccaggcgactcccccgcctcctccccagcgcccgccgcgccatgggagtctcccgcctcggcttcggagtccgccatcccggtcatctccgccgaggtggatccagacactaaggccttcgtggcagacatggacgagcgctgggccgagcgccgcatcgcgtcgaggcggggccagcagcagcgcgcgtctcgcgcggcggaaggcggggaggggggcgtcgtggcgaggaagaaggcgcaagcggatgattacaggaccaggaagcagcgggtgcacgccgcgctttgggtgaaggagatcgagaagatggaggaggcgcgactcggcggtgggggaggtggcgctgacgatatcgaccggctgctcgactcgtgctcagatatctttgattctggcaacactgattttggtgattccaagatcccaaacactactgagatcaaaaccaagcctgatggttgggaaactacttcaagaggacaggatgggaacatatgggatatctcacagcgagaagatgacattctaatacaggaatttgaaaggcgaattgcttttagtaaacagcagattgctagcttcatcaaaacccacatttttagtcggaggcgtcctatcgatggatggaagtacatgattgaagaaattggccccaacgcaagaaaaggaaaggggagtgtgcaaagattaccaagtgtcagtgatcctgcaacccagccttacagggaagaaactcctgcaattgcttctagttcctccttcagaggcaatcggccatgatggtgttcgataaaccaaatcttttgctggtttcactggcatagtttatacaggcattttccccttccttttggcttcaaatgtatggtggatgactccttgcgaagaacatgacgaactttccttctgcgttgtataattttgtaatgaatgtgacgctttctgatgaaccagcaatggaagcgtttaagttttct

SEQ ID NO: 30456 - DNA, 1031 bp, Zea mays
  Clone ID: UC-ZMFLB73022A04_FLI
gccatgacgccatcctcagctctcgccctcgcgcaccacgccgcggtatccccgctcccgtcctccacgccgcggccctcccccaggtccagctctctgagcctgggcccgggctccgccgggctcgggccgcgccggctcgtcgcggcggcgcccccacgggcgttcttctcctcgtccccctaccagccgccccagccggaggggttctcgcagcaccgcgagtacggtctggtccccatggtcatcgagaccacctcccgcggggagcgcgcctacgacatcttctcgcgcctgctcaaggagcgcatcgtctgcatccacgggcccatcgccgacgacacggcctcgcttgtcgtcgcgcagctgctcttcctcgagtccgagaacccgctcaagcccgtccacctctacatcaactcccccgggggcgtcgtcaccgcggggctcgccatctacgacaccatgcagtacatccgctgccccgtcaccaccctctgcatcggccaggcggcctccatgggctcgctcctcctcgcggctggggcgccgggtgagaggcgcgcgcttcccaacgccagggtcatgatccaccagccctcgggcggcgcgcaggggcaagccaccgacatcgccatccaggccaaggagatcctcaaaatgcgcgaccgcctcaacaagatctaccagaagcacacgcgccagcccatcgataagattgagcagtgcatggagagggacctcttcatggaccctgaagaggcgcgcgactggggcctcatcgacgaggtcatcgagaatcgacctgcctcgttcatgcccgacggaatcggtggaggcctcgatgtgcccaggctcggtggcgttggcggcggacgggggagggacgtcgaggaaccttccgcggtgtgaggattggcctcaaaggtgaaatccttcctcatccggtggatgtgttgtttttttttagaggaaaaagtttgaatgtcctggcatggaattgatacaaatatagtacaacatacacaata

SEQ ID NO: 30457 - DNA, 1619 bp, Zea mays
  Clone ID: UC-ZMFLB73022B06_FLI
cagatgactaccgagacagcgatggtgaacaagaaaatgaggcacttgatcgcagcaaccggcggaggaaaagatctcagagatacacacaagactttgttgaggctgtctcagatgttgatcctaactttgacagtgacgacgatatcatgggagaggcagtgtatgatgacgaatacctgagaagtcgcaaacagaataagccatcaagtgcttctgaagaggatgaagagttccggttggaagaagatgccgaagatgatgatgaagaggaatattcattgagtaccagtgaagatctagaggagccacaacggcataaaaagctggaaactcgtggccggcgaggtacgaagctgagatcagttggtgaaatccaagcaggtcttagacgcagcaagcgttcttctcgtcctcgtattaactatcgccaatatgatttttcggactcggatacggagcctcgaaaggcaaggaaatctgacgcatcagatcctgatgctggctccgatgccgagaatgatatggagctctcgacatcgagtcaagagcaagaggaggaagaggatgatagtcatgatgaagaaaatggtaataatgcgaatgataaaatggaggaggaccacactgcagaagaaaataaaatagaaccagaggaggagaaggagcagccacagcagcagcctgtagagaagatggatgctcccagcagggaaagtaaaagtgtaggaagaacattcctagatctaaacgagcttgcacctggaggtggctttgatgatggcccaagcttgacagtgagagatgacatggacaacatctagggaataaagttttgttttgatacatttcgggtgctgttggccagttttctgacttccaggcaagggcagatccatggtcctgatggcctgtgatgaatggtgcaactatggtttggcggtgtgagcttatggttatggctgcttcactgatttgcagcagcaggacaggcgatgttccacttgaagcgactttgagcttctccggtgcttatgttatacgtggagaccatgaggaggtagttttatgtatactacatgaaggtcgcaatcgatcatagctgtattgcggccaggctgctgctgcgttgcggccggtctctaggatataaatttattgcctccatttatttagtcttaggcattgtgatgtcaatgagaacatggagggaaacctgtacaccgagtgcggtccgtcggcattcgcccgaccttttccacttgtagattgtaggttttttaaagtccgggcgggattagttctgtatctatacctgacagtctgtttttttctgtcacacctgtgtagctgacattgagcttgtccctgaatgcacaccggcaatgcctctcgttcgctctatatggagaagatgctgcatgtattcagctgatgttgtagcctatggacatgtccattactcagagtggctggcctggtgattgctaatttgatgtatggtttataaaaccaaattcctgtgtgcgtattggttagttgcaaaactttgcaaagataaataatttgggggtgttctgttccattaaacattgcaaaattatgtgaaatgtttggtg

SEQ ID NO: 30458 - DNA, 1404 bp, Zea mays
  Clone ID: UC-ZMFLB73022B07_FLI
ctacgtctccaacttcgccttcgcgcgcctgcccgtccacctcagctggcgcgccatgttcctggtcggcgccgtgccgcccgtcttcctcggcgtcgccgtcctcgccatgccggagtcgccgcgctggctcgtcatgcggggccgcatcgacgacgcgcgccgcgtgctgcagaagacctccgactcccccgccgaggccgaggagcgtctgctcgacatcaagaaggtggtcggcatccccgagggcgtgaccgacgccgacgacgtggccgccatcgtccgcgccagcagcaaggcatcgtcgtcgtcgtcgtcgtcgcgccacgacggggtgtggaaggagctgctcatcaacccttcccgccccgtgcgccgcatgctcgtggcggggctcggcctcatgttcatccagcaggccacgggcgtggactgcgtggtgatgtacagcccgcgggtgttcgagcgggcgggcatcaagtccaagaccaactcgctgggcgcgtccatggcggtgggcgcgtgcaagaccttcttcatacccatctccacgctgctcctggaccgcatcggccgccgcccgctgctgctggccagcggcggcgggatgaccatcttcctcttcacgctggccacgtccttgcacatgatggaccggcgccccgagggggaggccgcggcactgggcgcggtgagcatcgcggccatgctgtcgttcgtggcgtcgttcgcgtccggcctgggccccgtcgcctgggtctactgctccgagatctacccgctgcggctgcgcgcgcaggctgctgccatcggcacggggctcaaccggatcatgagcggcgccaccaccatgtccttcctctcgctctccaacgccatcaccatcgccggcagcttctacctctacgcgtgcatcgccgccgcaggctgggtgttcatgtacttcttcctgccggagaccatgggcaggagcctggaggacaccgtgaagctcttcggcaaggacgcggacgacgaggacgtcggcgacagccgtcgtcacgcgcccagtaagaagccctccacttccactgagcttgagctcagtgctcagcactgagtgatgtgccatgcaacacgtgtcctcccgagtgtgaccgaagcttatgtctaaagcttcgatgatacagtctactcctagtatcttgtgtgctcgaactgtggtgaatcttttgtagatcccgggcctctccttttttttctgttagatttgtagattttttttgttgatctcgtggcatagtgcgtgtgagtagcgagggattggggcacgcaacactttagtctaatttggatactctagtaatgagtgtgattggagtggattgagatgtattgagagaatatttgatctattggtgattt

SEQ ID NO: 30459 - DNA, 1612 bp, Zea mays
  Clone ID: UC-ZMFLB73022C05_FLI
gggagcaccaccggcggaggggccgctgctgctgccgcggcggcggcggtcgttgacccgggtgcacccgccgctctggtcgggccgtccctccaagtcctatcagccctgtcagatcagaacaacaaaagaattgtccttgcattgcaaagtgggttgaagtcagagatactgtgggcactgaatgcccttacagtactctcatttaaggagaaggatgacctccgacgtgatgcaacacctcttgctaaagttcctgggctcctagatgctcttcttcaagttattgatgaatggagcgatatttcaatgcctaaggaccatacgaaaccacccagactaagaactttgggtgccaacacaacactctcgggctttggccaggagaatatggaaaaagtatactctgacactgccactacctctaatgaccaatccaaggcggaagattccagtgtcacaaagaagcgcgctgcaagcttttggtttgatgaggatgggttgtttaacaacgatgatgaagggagggcggaaaggcagcagtgtgctattgcagcctccaatataatccgcaatttctcttttatgccagaaaatgagattatcatggttcaacataggcattgcttggaaactatatttcattgcttagaaaaccagaatagagaagatgatgagctcataacaaacatgctggagacccttgtcaatttagcacctgtgctggacctgaggatcttcagctcatcgaagccttcgttcattaaaatgaccgagaaaggtgcaattcatgccataatgggtatgctttcttcttccgtaaagccatggcactgtgctgctgctgaattgattggccgtctgataataaatccagacaacgagccatttcttcttcctatcattccacaaatatacaaacgactcgttgacctattgagtgtaccagcatatgatgcacaggctgctgctgttagtgcactctacaatgtagccgaagtgaatatggattgcaggctcaagcttgccagtgagcgatgggctgtcgatagactcctaaagattgtgaaaacgccgcaccctgtgcctgaggtctgcaggaagacgtcgatgatactggagagcctcgtctctgagccgcagaacaggatgcatctcctcgtacacgagaacacttttgctgagatcctgacatcagaagggaaatactcggacacatttgctcggatcgtgtatgaactgacagcaaggccaagcaacaaagtgacctcaggacacgccatctggggaaacataaactgatgcgacgcgatggcctgtaatgtgttgttgggatctagactagatgagatttatttaatgtaggtgcttcgttgatcatgtattatgttatgtaatagacgctttgctgtatcgagatgcaggcttgcagcttggcaacctggccgaatttgggcagtttctttcatgcttcttttatcagtttgttggtggaaagtagcgtgtagcagctatgtatttgttggaatcagatgcctcaggctggtttagccgcgttcataatagattattaaaaccgctgatggtttgcttcgttgaagctttacaagat

SEQ ID NO: 30460 - DNA, 3538 bp, Zea mays
  Clone ID: UC-ZMFLB73022C10_FLI
tccatatccactctccaactaaaacaaaggaatatggtgaagacttacttccttttgtgctggatgcattgagtgagatagcttttcatccaaagttttcttcatctcgtgttgagaaggagagaagagcaattctttctgagctccagatgatgaacacaatagagtatcgggttgattgccagttgttgcaacatctgcactcagaaaacaaactgagcaacagatttcctattggacttgaagagcaaatacataaatgggatcctgataagatccgcagatttcacgagcgttggtactaccctgcaaatgccactttatatctggtgggggaaattgatgatattcctagagctgtgcgggaaatagaggcggtatttgaacacactctttcagaaaatgaaggaaatcctgtaccgagcgctaatccatttggtgctatggcaagcctttttgcaccaaagctcccaggtggttttacttcaaacctaactggtgaaaaatcacctgccacagataaaataaagcctgcaaaaagggaaagacaagcagttaggccacctgtagagcataagtggtcccttcctggagttgctcaggatgccaaacccccagcaatttttcaacacgagttgattcagagtttctctatcaacatgttctgcaagatacctgttagcaaagttcagagctacaaggacctgcgcagtgtactcatgaaaaggatatttttgtctgccctacattttcgaatcaatacaagatacaagagctcaaaccctccttttacttcagttgagctggaccacagtgactctggaagggaagggtgcacggtcactactctcacagtaaccgctgaaccccaaaattggagaagtgcaatcaaagtcgctgttcatgaggtgcgaagactgaaagaatttggtgttacaatgggagaaatgacccgttacatggatgcactgataaaagatagtgagcagctggctatgatgattgacagtgttccctcagttgacaacttggacttcatcatggagagtgatgcacttggccacactgtcatggatcagttgcagggacatgaaagtttgcttgcagttgctgaaactgtcacccttgaagaggtcaacactgttggcgcggaagtattggagttcatttcagattttggaaaactcaatgctccccttcctgctgctattgtggcatgtgtcccccaaaaggtgcatgttgatggcgcaggtgaaactgaattcgagatatatccagaagaaatcactgaggctatcaaggcaggtcttgaggaacctatttaccgagagcccgagcttgaggtgccaaaggaattgattactcaatcagagctcgatgacctgaaatctcaatgcaatccttcatttgttcctttaaccaaagaggagaatgcggtgaaagtgtttgacagtgaaactggtatagcacaacgccgtctttctaatggaatttccatcaactacaagataacacaaaatgaagctagggttggtgtcatgcggctcatagtagggggagggagagcaacggaagattctgaatcaaagggatctgtcattgttggtgttcgtaccctgagtgaaggtggctgcgttggtaacttttctagggaacaggttgaacttttctgcgtcaataaccttatcaactgttcactggaatcgaatgaggaattcatatttatggaatttagatttgctttaagagacaatggcatgcgagctgctttccaacttcttcatatggtccttgagcataatgtatggctagaagatgcatttaatagagcaactcagttgtatttgtcttactatcgctctatccccaaaagtttggagcgttctacagctcataagcttatgttagccatgctaaaccatgatgaaaggttcgtagagccgtcaccacattcactgcagaagttgactcttcagtcagttaaaaatgctgtcatgaaccagtttgtgggtggcaacatggaggtcagtattgttggtgatttcactgaagaagaagtagaatcttgtgttcttgattatcttgggaccgtgagggcttcgagttctctaaacacagaggagcgtattgagaagatttccttccgaccatttccatcagatgttcatttccagcaagtatacataaaggacacagatgagagagcctgtgcgtatattgcaggccctgctcctaaccgttgggggttcactactgaaggaaatgacctatttaatgtcattcggatatctgatgctgatgcagaagtatctgaaccagtgagcttggatctaacagggaagagacacgttgatgttcgcagccacccccttttctttggcatcactttgagtctgcttgctgaaattattaattctaggctatttacaacagttcgagattccatgggattaacatatgatgtttcttttgaattaaacctttttgacaaattgggtcttggttggtatgtaatcgcggtcacttcaactcccagcaaggtccataaagctgttgatgcctgcaaaggtgttctgagaggattacatagtagtcgaattgtggaaagggagcttgaccgggcaaagaggacgctgttgatgaaacatgaggctgagacaaagacaaacgcgtactggcttggtttgctagcccatctacaatcttcatctgtaccaagaaaggatgtatcatgcatcagggaattgacgacattatatgaaagtgccacaattgaggatctgtatcttgcatatgagcatctgaaagttgatgattcttctttgtttgcttgcattggaattgctggcgctgaatctggtgaagatacaaatgatgatgagcttgatgtggatcttcatggcatggctcccatgggaggccggggtctttcaacaatgaccagaccaaccacatgatcaccattgggatggccagcccttccaaggtgacatattaaatgctgtgttactgcatcatggacaagttgtgctgaaacctactcggaattggttgtggatctttatatggattttaaccttgctcctgaagacaggagccacatggccctaggagactattctcgtttcccagcaaaacggtttaaagataattgaaacattggatctgtatctggggagactattgtttgtttcctatgagccacaaccaaaaagcttggccgttgcatttccccccgagaagaagcgttggagttaatgactcgcaaggtcgtggaaaggagataatatttttcgaggtcattatgtagcttggcatgtacaggaaagcaggctgattcttgcatacagcagttgtaactaggtcgttgagggcattgaagataggatgacagtagaatcacatataagttgctggtctgcgaattcggaaataatgatgaaggcgtaggctagtaacattttggtgttattcttttttttttttaatcaaaaaattgtagcctttgttaccggtaataaatagatccatagctttg

SEQ ID NO: 30461 - DNA, 1735 bp, Zea mays
  Clone ID: UC-ZMFLB73022D03_FLI
ggaaaaggagccgaggaagccctcccctctcgccgcagccgcaccaccagaccgacaaccggccggcttccctcgcccccggcgaggagtgaagacaagccgacaaggcaaaaccatcgcctgtacggtatccaaccgccgtcccgccgcacaaccaaggatagggcgggagagggggatctcgctttcgctccgctgccgcatgcgcaccgcccctcctcatgacaccaactagggcaccaccagcccccttctcgtcgacctccgcgcggtgactctgctgagcatcatacccttatagggcccgacccatggatgtaacttcgaccgctgccgcctccgcctcaggcgggggtaggtggtacacgggcatgtccgcggataacatcaagggcctggtgctcgcgctctcctccagcctcttcatcggcgccagcttcattatcaagaagaagggactcaagaaggccgcatcctccggcgtcagagcggatacccacgcacatgacatctctgacttatgcccaaaatcgagaaggcttatgtcatgttatatctcggacgccccacccctcctacaggattttatatcgcaatttcaggcctcatttgtactcttaccctgaggcgtctgtctatttatactagcaaactgcagtattaatgttccatgttattgttatgacaggggttggtggctattcttatttatatgagcctctttggtgggttggcatgataacaatgattgttggagaagttgcaaatttcgcagcttatgcatttgcaccggctattttggtcactcctctcggtgctcttagcattattatcagcgctgtgcttgcacatgtaatgctgcgggagaagctgcacatatttggaattcttggatgcgcgctatgtgttgtgggatccaccacaattgtccttcatgctccaccagagcgtgaaatcgagtcagtgacagaagtgtgggatctggctacggaaccagccttcatgtgttatgcagcagtggtaattgctatagctgccatacttgtttatcggtttgtcccactttatgggcagacacatgtcatggtctacataggtgtttgctctctcgttggttccatctcggtcatgagcgtgaaagctcttggtatagcattgaagctgaccttttcaggaacgaaccagcttatttacccacagacatgggcttttagtctggttgtcatctcatgtatcattacccaaatgaattacttgaacaaggcacttgacacgtttaatacagcagttgtgtcacccatttattataccatgttcacatctttaactatcttggcaagtgtcatcatgttcaaggactgggacaggcaaaatcctacgcaaattgtgactgagatgtgtggctttgttacgatcctttctggaacttttcttctacataaaacaaaggacatggctgatggtgggctttcgatgtcatcctccttccgtcttcctacatcttcttcggtgcgcttctccaaacaaacagatgaagatggtgaaggaattcctctaagatcgtccgaatcattccggtcaccacattaacgcatgtttgctaatcattaatttgcacagagttaggggtgggtattatatagataatgctatcagtgagcttgtactaagggtacgatggatggaccctcttttgctttggcagaattgtatatgtatgcccaacatcttgtgg

SEQ ID NO: 30462 - DNA, 1127 bp, Zea mays
  Clone ID: UC-ZMFLB73022D07_FLI
ggctgcaaaagtctatttatataaaaatctcctacatcacatttgcttatggtttacatgttcggtcaattgcatgaccgttcgctagaagcaagttataataaaatcagagttaaataactgcggtccctgacatgatgcatcattatcaagcaaagtaaattgataatgacaagtgcatttaccccaaaacaaaatctagcctggctctgacctgcaccactttcaatagcctgatgaaactcacttattgaagccattacatgatggcacctctgaggggaccgtgatgaaggtaaggcccaacatattctacttttggcttgtccctgaacctgatgacccctagcagtcccattgcagaatcctgaatcaatatcagactggaacatgtccacaaaaatcactgcagctccttaaagcatttctgcctctgcaggtctttgcgatgggggatcacgctcgccgagcgtagccatcaagatctcgaggcccttgtcgtagtaggcgatggacctgcaggtcttggcacctaagcatgtactgcgtatcgctgaactacacctagactgagaaagcggcgagggaccactcctcgtccctctggtgaggctcgacaagctgcagctggtggtggtcgtcaccgctgggtgcacaggcgttggtctcggcctcgccgttgacaggagactctggcggtggcacgacgtacgcaacgacacaatcgaggacagggatggaaggggagatgcacggacgatgggagcatctagacggagaaggtggctcctcggccctctggttaggctcggcaagctggaactgttggtggtcgtcgctgccggctgcataggcctcgtcctcgccgccgacatgtgtttttagcggcagcgtgatgcccgcaacagcacgctcgaggacggccatgaaaggggagatacatgggcgacaggaccatctagccggaggaggaggcgagggaccactcgtcggccctctgatggtcgtcgtcgccagttgcacaggccttggattcaggctcgccgtcagcaggcgcctctggcgacggtgtgacgcctgcagcggctcgctcgaggacgaggatggaaggggaggtaagggacggc

SEQ ID NO: 30463 - DNA, 1620 bp, Zea mays
  Clone ID: UC-ZMFLB73022E07_FLI
gtggtgctctgtccacctctctcgctctgggccgccgccgccgccctaagccacgtgctgaggctttcgttggtctcttcgccggcgacgagcacccagcagttctgtagaaatggctgatggtgaggacatccagcctcttgtctgcgacaatggcactggaatggtcaaggctggttttgctggcgatgatgcaccaagggcggttttccctagcattgttggccgtcctcgccacactggtgtcatggtagggatgggacagaaggacgcatatgttggcgatgaggcacagtccaagagaggtattcttacgctcaagtacccgattgagcacggtattgtgagcaactgggatgacatggagaaaatctggcatcatactttctacaacgagcttcgtgttgccccagaggagcaccctgtgttgctcaccgaggctcctttgaacccaaaggccaacagggagaagatgaccctaaattatgtttgagactttcaatgttcctgccatgtatgttgcaatccaagcggtgctctcactctatgctagtgggcgtactactggtattgtactcgactctggtgatggtgtgagccacactgtgcccatttacgaaggatatgcccttcctcatgccattcttcgtttggatcttgctggtcgggacctcacagactccctcatgaaaattctcactgagaggggttactccttcacaacctcagccgagcgagaaattgtaagggacatcaaggagaagctagcatatatagcccttgactatgagcaagagttggaaactgccaagaacagctcttcagttgaaaagagctatgagctacctgatggacaagtaatcaccattggtgcagagagattcaggtgccctgaggtcctcttccagccgtcgatgattggtatggaggctgctggaatccatgagacaacatacaattcaatcatgaagtgtgacgtggatatcaggaaggacctctatggtaacattgtgctcagtggtggttcgactatgttcccgggtatcgctgatcgtatgagcaaggagatcacttcccttgcaccaagcagcatgaagatcaaggtcgttgcaccgcctgagaggaagtacagtgtctggataggagggtcgatcctagcctcgctcagcactttccaacagatgtggatatcgaaggaggagtacgacgagtctggcccggcaattgttcaccggaagtgcttctagggtttcacaagttcctcgtcgttacctagtctcaaattatgtcccctccatttctcgagatatgtgtggcagatttgcatgatacgtttgtttgtttccatcggacctgaagtcttcttggggataggctcccccctttgtatgttgtggctccaatccatgtgcgagcacgctgtgtctgtcgtgacacctggttcgtgagatgggttgtcaaacttgattggtttgttgtgcgtggctggaaaagctgatagttatatatttggcttggactgtgccgcttgtatgtatctgaattctgaaagcgttgtaatctgagcatccgtgcaaagtatgaatggcccttttatatgggctggattttccggtttct

SEQ ID NO: 30464 - DNA, 1445 bp, Zea mays
  Clone ID: UC-ZMFLB73022G03_FLI
gaagcagttggttgctttagtaacctgaacaacagcaagatcgaccatgctaaacctctggttatctctcataatggtgctagcggtgactacccagactgcactgaccaagcttatgaaaaggcagttgccgatggtgcagatgtcattgactgtcctgttcaagtgaccaaagatggcatactgatatgcatgagttctgttgacctaatggatgttactactgttggaaaatcatcatttacttcgcaagtaactaccatcaacgatctgaaggctggtcctggagtcttcaccttcaaccttacttgggatgatatttctaagaacctacagcccatgatatcgaacccaatgagcacctataaactgtacagaaatcccagaaacaagaatgcaggaaatttcatgagattatcagactttttgacgtttgcaaagggaaaggatttgtcaggaatcatgataactgttgagcatgctgcattcatggcagagaagcttggatttggagtggtagacgcagtggtcaaagcacttgatgactctggttatagcaaacagactgcccagaatgttatgattcagtcaaccaacagctcggtgctaaagaagttcaagcaggaaaccaagtacagccttgtctacatgattgaagaaggtgtcagagatgccgcaccttcatcccttgcagacattaagaagtttgctaatgccgtctctgttagcaccacatctgttttaccacagacccattattatttgacaaaccagaccaataagcttgtcacgtcccttcagtctgcgggcctccaagtttacgtctatgtgctcatgaatgagtttgcatctcagccgaatgacttcttcgcagacgccacttcacagattaatgcttatgtgcaaggtgctaaggtggacgggatcatcactgatttccctgggactgctcacagatacaaattgaactcctgcacgagcatgggaaacagcgcaccactatttatgcagcctccgcaaccaggtagcctccttttaaccatggccccagatgtacagccaccagcagcggcgccaatgccgctcttgacggacgctgacgttgcagaaccagccctacctccagtcagtaacaccacaacagctgcatctccttcgcatgccgccctcagaatgcgaaccgatgtctcgatcctcatcgcattgctgatgctatgtgcttccctcctcatctgaaggtagtcctgcacaacatcatatgcggcgtggtgcattagagctgaggatttcacattgagctgctaatagcaattctttccaccatttatgtagcgattttttttcttgttctgtccggtgttttgaaggatggatggatgttcagcttgatacctcaacggtgacacttgtgtgtgctgccgctgcctctaggtatattttggtac

SEQ ID NO: 30465 - DNA, 1148 bp, Zea mays
  Clone ID: UC-ZMFLB73022G06_FLI
gcgagagaagtatggtctacacatgagccagttcacataaacccttcagacccaagcaggtaccagcagaatggcacgccagctaaagaaaggagtcaatgcactgtaatgcgaagaattcttcatgacatcctatgagataatggttttcttgaatgggctagctcaagttgtgcggtttggtgtcatggtgttgttcaaacttcgcagtggtgtgtgaaatagaagaatcccaattcccaagcatattatttgtcacgcttgtttgccggcaggtacaggggaaatacgacagcatcatcgtggaggtgaagagctactacatgtcgatgagcaggtacagggatgataaaaaaagaaaggtatatcttcacgtcgatgagcgggtacagggatgacaaaaaaagaaagggtgagattatgaaggtttatgccaatgatcaaataaaaacatgtgttgagtttccagagtgttttgtataggattgctggtcaaacatgagctgttagtgagagaagaattgtgccctcttccctctggttctccctgattctcacagatgaacaatcttctacatgcaaatttctgttatgcgcgcttgtggtcattggcaggaagactcatgtggtcggaagagggctgatgagcacgatcaccatggatgtggacaccacggcaagggtggacgagttcttggttaccacctttgtaggcccattggtggaggaagacttgacgagaggtgtgtggtgatcaccatctgaatgtgggcgtccaagcttctttgatgccgggtgtattgtcctaattgtgactatcgtcgctggtcgaacatttggctagcatcgatgatgtatactgcaatgtgaatccaataattggcttggctctccatacaaccaataactaggagatcaggtgattgctaattggacaataggggtgctcgtgttgtaatggtgtaataggttcaatgccgtcgtttttacagtcacagtagtcgtgtgttaagtgtccaaggtgatttacctctgccctgtttccggggtcttagcctgattggatagcttctggggtgcgggatgtgatggagcaaagggattaaaacatgctgatttatgttgcccaaggaattcgccagttgctt

SEQ ID NO: 30466 - DNA, 2095 bp, Zea mays
  Clone ID: UC-ZMFLB73022G09_FLI
aaattaatcgcgctccttctcccaccagctctccccctttttttcctgcccacatacaaatgcttgggcattagcgatcctcctcctcgttctccttccccttctccctcctctgggtctgggtgcgccctcccctgctccacttctccggcgctgacatgacgtccacggcgtactcgcggtcgtccaagctgccgggcggcgagcggcggctgcccccgcgcctcatgcgggggttcgcgtccaagatcgagcccaagaagctgggcgtcggcctcatcgccggctgctgcctcgcgctcctcacctacgtctccctcgccaagctcttcgcaatctactcccctgtcttcgctagctcggccaacacgtccgcgctgatgcagcagaacgcgccgccgacctcgtccaagccgtccgtgccggagacggagaccatcccgccgcaggagacgataggcggcggcggcgacagctcggatcccgtcgatctgcgtgagggcgcgacgggctccgaggagcccggcttgccggaagctgccctcacgaggaaggacatggcggcgggctccgacgagcccggcttgcccaccaggaaggacgacggcgaggatgcggcggccgagcccaccaccaagccatctgaggatggcaagggcaatggcagtggtggcgggcaaggagtaggcaagatgatttgcgacgagaacggcgtggacgaggggttcccgtacgcccggccgaccgtgtgcgagctgtccggcgacgtccgcgtgagcccgaagcagaggacggtgtacctggtgaacccgtcgggcggcggcgggttcgacgagcgcggcgagaagcgggtccggccgtacgcccgcaaggacgactttcttctccccggcgtgacggaggtgacggtgaagtcggtgccttcggccgcggtggcgcccaagtgcacgaggcagcacaccgcgccggcggtggtgttctccgtggccgggtacacggacaacttcttccacgacatggcggacgcgctgatcccgctgttcctgacgacggcgcacctggacggcgacgtgcagctgctggtgaccaactacaagccgtggtgggtgcagaagtacacgccggtgctgcggaagctgtcccggcacgacgtgatgagcttcgacgccgcggacgaggacgacgccgtgcactgcttccccgcgggcgcgttcctggggctgtaccgcgaccgggacctgatcctgtcgccgcacccgacccggaacccgcgcaacctgacgatggtggacttcgcgcggttcctgcgcggcgcgctggcgctgccgcgcgaccggcccgcggccctcggggagcagcccggggcgcggccccggatgctgatcgtctcgcgcgccggcacccggcggctgctgaacctggacgaggtggcggcggcggcggacgagctggggttcaacgtgacgtcggcggaggccggcgcggacgtgccggcgttcgcggcgcaggtgaacgcggccgacgtgctggtgggcgtgcacggcgccgggctgacgaaccaggtgttcctgccgacggaggccgtggtggtgcagatcgtgccgtggggcaagatggactggatggccaccaacttctacgcgcggccggcggcggggctggggctccgctacctggagtactacgtcggggcggaggagacgagcctcaaggacaagtacccgcgggagcacgtggtgttcagcgaccccatggcgctccacaagcaggggtggcaggcgctcgcccagaccgtcatgaagcaggacgtcaccgtcaacctcactatgttccggcccgtgctgctgcaggcgctcgacaagctgcagcagtgagggaccgtgattcctgctactgttcgtcttcctcgaattcgccattgccgaccggccatcccgagactgtggaggctagctagctgctgctgctcctgccaagtacagtactatcgctagaaaaaaagaaaaatgagagatagagagggaatgaaggaggcttcaaatttgcaatcgagttggtttgtattttttttggtttcaaccgtagcagtgcagcc

SEQ ID NO: 30467 - DNA, 1396 bp, Zea mays
  Clone ID: UC-ZMFLB73022G12_FLI
ctcgtcacatttcaacttgaaaagcaaagaaattactatgagtcacttctactagaagtcaaggaggaaactgagaaagaaatttctgctgctactgagaaagccatgagcacaaaactccaaaagttggaagtaaagtttgacaagtgtatggaagagaaaaaatttcttgatgaagtaaatggcaatcttgtcaagaatcaggagatgtggattgaaactatacgaaaagcacaagcaagggagcaagctgcgctcagattaaaagatgagaagatcgaaaaacttcaggaagagctaagaggtttgatagcccatttcgactgccaaagtgacactgcacaagcttcaaatgcgatctcgagcgatataccagggggcatgattcttccggtagcatcagaatcgtcctcgagcggcggcgttgttggtggcactggaaacggggagcaaaattgagtaaactgcgccctgtataaagcacgtttggatcttagggacctaggtatattcttgcttccaaacccccaccgttgtatgttcagttagggtaatacacacttgttagctgtcacctcactgcccctcgattctactgtcactagccgctagtagtgtggtactagggatgaaaacgatttcatttttttttggtttttcgaaattcgtttccgatttttcgaccgtatttaatggttatggtatttttcgaaaacataattggttatcggaattttatatcgaaattgaattaatgttttattgatcgttttcttcgtttatcaaatttaaatcttggaattttaaaaaaattaaataaacttggaaatttttttgtctcaagttaaattatattatatgctaaacgatatcccaataaaaattaatattaattatgaacttttttgattaagacgagattgttaaatttattgtaaaaaagtcaaatgaattataaattggaacagagagtatttgtgaactttgaatctgtgaacttgtgatctttataaatttgttatattgtgaacttatattatgaacatgtgatctttatgaacttgttatattatgaattgtaaatgtgatctttgttgtattgtgaacttttatattaagatatttttatattgatatgtttactgatcgtatattagatttcgatcgttactggtatatttttcgtatcgaactttcatttccgatattttcaaaataccgatatcgttttgtttccatgattaccatttcaatttcatttaaaaatatgaaaatggaaatggttttagtgtttactggctgttttcatcccagtgtcgctatagcgttttggataggttactgctaagatattgtatattttgtcgctattgttgctatgattgttttttcgggt

SEQ ID NO: 30468 - DNA, 1263 bp, Zea mays
  Clone ID: UC-ZMFLB73022H07_FLI
gtgccttgaaaaaaactcaaacattcggccaacgaagatcaatatacaaagtagtagcaactaacttgttggtatacttacagaaatacttggttcagatcttttttcagtagcaacaaacgaaagcactgcatctatgtcattcctcgtcagacttctgctgcttatgttgcttcatgggatcctaccggtatcaacttcgttcaattaggcgccaacaatagcgttctgcagtgagacgagccgacaagccttgctggaactgaaggccatcctaggctagctatcgagcaggttgtcctcttagaacagtagtggtagcctatgcctctggccaggtgtgacatgcagccgtaggcacgagggcacgatctcagtgcttgatctcagctctgtcggccttgcgggcaccatacccacgtccgggaccaacttgacatttctaacgagcctcaaccctgcaatgcattattgccatcggttgcatgtagttgcttccttcatccagcttcagcttcctatcctttagcaaccactctctttccatttgacatagctaactcccctaattactttcacttggattcactttgcacctcagtagcaatttcctgttgggtcaacatccacaaatctttcttatcaagatcacatagacagctccacatgcaagaagcatgtacatggcaatctcctagagcaaaatcagatcatccctttcaatacttgggtctgccttcatcataacaacaacactccagaacttcatcattgcgatcagtcaagacgacctctttgcagaaacagcagatactcggagcgccagcaatgggatgtactcaaatatcgcaagtcaaactctccagtgcctatcctctgcaagttcaacaatgacgggtcgcagcgtttgagataaaaggtcaatgccaataatctaaaagatcaaaacagaattcaccagtcatcagataattttaaagaaagaggcaatgcttgcaaggccgatgacttaaaaacaatgtattaatagctagtaaataagacttcaaatatccaaaacagaaaagaaaaggcaaataaatccagtaaaaaaacgggacctcatttgtccaacacacttacacaccaagctaaccgtaaccttcttaatagataatgagtactgatcttgcaggatggccacaatggtgaggagatcttaggggtgacggaggttgcgctcgtgctcctctggtctcaccaatcatgtcgtaaggcttggcc

SEQ ID NO: 30469 - DNA, 708 bp, Zea mays
  Clone ID: UC-ZMFLB73022H11_FLI
gttggacccaagacaatccatgttccatctggggagaagcttgcagtttttgatgctgctatgaaatacaagaatgaagggcatgacactattatcctggctggtgccgagtacgggagtggaagctctcgggattgggttgcaaagggcccaatgctgcagggagtgaaggctgtgatagcaaagagcttcgagaggattcaccgcagcaatcttgctggcatgggaatcatccctctatgctacaaagcaggggaggatgcagacaccctgggcctaaccggccatgagcgctacacggtccaccttccaaccaatgtgagtgagatcaagcctggccaagatgttaccgtgacaactgataatggaaagtcgttcacttgcacactcagattcgacactgaggtggagcttgcttactacgatcatggtggcattctaccatatgtcgctagaaagatagcggaacaatagattgtaccgtcgagatggttgcgatgcttgcggtgaatcgtaattggtgtaaacggtttgtttagtagtacaacccatttttgcggactacttataataacctctgagtatctcagagtgagctgtctgaaatttgatgaactgctacaattctggtgcgccatgaggatgggatccttttgccttctatgttaataatatgctaacttctgcaataccagatatacatttggc

SEQ ID NO: 30470 - DNA, 3222 bp, Zea mays
  Clone ID: UC-ZMFLB73023B01_FLI
aaatttgcaattcggtcactccccgcatgaaggtaggtcatcggctggacgaccaccacatgccctcgttgcttttgggtttggagggaagctcatagttatgaaagaaactacctccatgcatgcaagttttaacagtggaaatcagggtaactctagtagcacagtgtcggttcttaatctgttggaggtagtctttgataaagttgatccttcaagtgtcactaatggtagtgcacttagttatttccatgctctatgccgtcaacctgttcctggccctctggttggtggaagtgctgcatcaaaggatgtaaataagtggcttgatgaaatgattgcacggtacgagtcttcctctagtgaattccatagaggtgatactcgcaagttgcttatttcattgctgaagatactgtctcagcactatggaaaactgcgttcaccttttgcgtctgacccatcgcaagaggagacagatggtccagaaatggcagtaactaagctattttcatcgtgtaagagaagcactgttcatatgggagattatggatccctagttccctgcatgaaaagtattccttcagaaagtcagatgcaggctgttgcacaagaggtccaaagtcttctagtttctgggagaagaaaagaggcccttcactgtgcacaggcaggtcaactttggggacctgcaatcatactggcattgcagcttggtgataagttttatgtggatacagtgaagaaaatggcccacttccattttgtatctgggtcccctctgcgaacgctatgccttctcatcgctggacaacctgcagatgtttttaatgtagagaacaatgtcaacagtgactatggtgcatcccatcaacctgtggagcctggtcctaatatgttggatgattgggaggagaatttggctattattactgcaaacagaacagaaggtgacgttctagtaatcacccatcttggtgattgcctctggaaagaaaaaaatgaggttgcagctgcccattcatgctatttagttgctgaactaaacattgattcatactcggaaagtgcaaggttatgcctcattggtgcagaccatttgaagtgtcctcgaacatttgccagccctgaagccattcagaggacagaggtttatgaatatgcgaaggtgcttggtaattctcaatatatcctactatcctttcagccatataagctgatatatgcatacatgcttgtggaagtggggaaagtttctgattctttgaggtattgccaagcgtctataaaggtactgaaagcctctggtcgtgcccctgaattggaggtgtggaaacaattattttcttcgctggaggagaggatacgcactcaccagcagggtggatatggcacaaatcttgccccaggaaaaatagttgggaagatttttacctcgcttgataaatctatatcccgcatgatgggtacaccatctgcaccacttccaccgttgccacatggatcttttagtgataaagagagccactctatacctgcggcagcaaaatttgttaatagccaatcggtaatggtcatgccatcgttaataccatctgcttcaatgcagtcaatgactgagatagcagaggatagtggtggcactggcaggaaaattgcacacaacagaagtgtttctgagccggactttggtagatcatccaaacagggtgctggtggatcagatggtacacagagcagtgcatcaggatccagcagttctcgatttggttggctagtgcagaagactatgggattagtgtcaaaatcccaccgccaggcaaaattaggggatcagaacaaattttactatgatgaaaaattgaagcggtgggtggaggaaggtgctgctgttcctgccgaagagcctcctcttcctccacctccaacaaaaccatctttccagaatggtatgctagacaataagttgaatggccccatgagcgtaagccatgctcccaatggagtcacagaatggaaatcctcaaattcttcagagcaaggtctgggtatgccgccaattccacctagccaaaaccagttttctgctcgtggacggatgggtgtccggtccagatatgttgacacattcaatagatcaggtgcatctggtgcaatgccatcatataacaaaccagctgctccatctatgacaccaccagctggtgccaagttcttcatgccaactgcagcacctgttgccgcggatcagatgataccacaccaagcagcagagatacacagtgaaaccatccatcaggatgagcggtcagcctcaccgccagcagaaacatcattttcttcaaccccaccacccacgcaatttccatcaccagtgcaatcaacaatttatcggcaatctagtatggagaacatctccaccccttaccagggttccggggtatcgtcattaagcaacgacagctcattctcaaaatctcgagccgcgtcctggagtgggacatactctgagcagtttaatgcttttgcgggcactatatcgcctgacagacagacgacgcattcaccactgatgcctggcaaaccaccacacagccgttccaacagcaactcatcagggcatctcaatggattggcagaggatcttcatgaggtcgagctgtaactggcgactggtcagcatgaccgtcgcaactcgtgtcttaaaggcagcgatgacaacccctccccaagcaggtgacagaaaagaaggtgcccttaaaatgctgaccacggggatgccgcagctggaatgggcttggtgtgactttgcacgagattctggggcgcgctctaaaccaccgaggtgcgtcaggcctgtactaatagagatgcagggtttttttttgtagccatatatacatatatgttggttttgtgttttagagagaagggaaagggttgggtgggcctttgtttacaggtgggaagggaagagaagcagcatgcagatgcccttgtacagataatctgcccctacccagtttgtttaaaacgcaaacaacgccattttggttttagttccctggagaaggatagaggagaaggtgtgtgtctttgtagtgtgagaagcatggctctgtagtgttgttgttatagtgtactactactgtgctagccagccgcatacacagactgtttattctttggagacgaatcaattctttcatcttgatctagggc

SEQ ID NO: 30471 - DNA, 1039 bp, Zea mays
  Clone ID: UC-ZMFLB73023C07_FLI
ccctcctctctctcgctgtttgaggagaactacctgctcctgctccctcttccgctcctccgcgctcccgctcgccatccccaggcttcatttcggacggggatggacgactacgcccgggagatgatggagctgaagacgctcgtcacccgcaccctcgagaagaagggcgttctcgccaagattagggctgagctaagagcaagcgtgtttgaagccattgaagaggaggatcgggtgatggagaatgatgatggcggtaatcctgctttgcttggtagctgtaatgaccgggctaagcaactgcatgcttcaccttcaggtaggttactaactgcacttgtttgcgaatacttggagtgggcgcaattaagtcacacaatgaaagtttacttgccagagtgtaacctgcccaaggacttctggaagaatgaactgaaagacttctctaacaaaagtggagctgaagggagcaggagtgctgaaagtggtccactgcttttagatgttctcgaagaatttgtctcaagcaaggatgggcggcaggaggatgatgagttcagaatctgatccatcactaaatgctgaacatcggagcatgaggagggcaccatcagcatcagttgggaatctgcctcctatggggagacctatctcttcttcgcagcaggcatcagatcgcagaggggggtcttcagtttccaacacaaggaaagatgagtacaactggagatacgataccaccgatgatatatctgaagaggtgctgcgggcatcgactgccctagaaagtgttcagctagaccgcaaatctcggaatctgccgacatcttggaggcattcaggggatggcgccgagtaacaagaaggctttggagctggttgcttgacttgaccgaccctgtatcatgtaatttgtatgccactcatttgtggtgcttggattgctgctatcttagaaaaagaagtggtaaactggttatgtatggttgtcttgtaacgaacaaaacaaatcaaagagttaggtgccgtttgtttt

SEQ ID NO: 30472 - DNA, 2636 bp, Zea mays
  Clone ID: UC-ZMFLB73023C09_FLI
cgcctccattacccccgccccctgctgccacgtccaccaccacggcaccaccgccgcccccagcgcgcgcggcccaccactaacagccagcttgggtggccgctccttccctcccttgcctcaaaggacttcttcccacgcgatgttaggagcagacatgaggcggcgagagtccagcatcggagatctccgccgccatgtaggcactgcccagcaccttgcggcccgaaaaccgtcgatctaatgccctgccctccttctccgatgccttcgccctcgcctcaggcagggtccctctcccgccttgcctggctctacgtggtcggtcggttgtggcgggatgtgcagacaggacgatcgtgtccggcctcctcgagaagagctccagcaacatctagaaggtgctcttgatggaggacaagcttaggaaccttggatgcaaggtgattggaaagaaaactattgaggtggagatggacctgaccaaggccaagagcgagaggtacctatgggggaacaacactgcagctatgaactccgacaagaagcagcagtttacactgggtttggctccagtctcaaaagaaacgtctgtttcagtaagctgatggtcggtcacccaaaggacccattatctatttttattaatgttaatatattaaaaactggttagagtaaacatacatattatgctatcatgtacatatatgcctctatgagacataaatatatgtgtcatgtttcaactttcatgaatttttttcctcaacgagtaacatactagtgataataacaaaattatttaaaataataaccattatatataacttataaattatcatgatagatttggttatatattttaacttaaatatttgacatatggtataactataagttcataagtgcatatataaattctttgacatgaaaaacaagaaatattgatacatggggggcaattggtgtcgattgcagatggctacatctttctagaattcatatttctttgtagcaaatagtcattataataacaagtattaatatcctctccaggttagcaatactaaccattatagatctctgtttatttatattgtcccttcatacatattaatgtacatacacatcctttctttctcgttattccaatccctcctggacatagatacaacaaatatgatttgttccgtagaatcacaaactcttttgtacaggttgcaacttttaccagatcaggtatgatttcccacaaaaaatgaaccctgcttttttatagtccttgtcaatgcactcaacttaatagtttttcccatagcgccccttaattgggcagagaaaaagtagaatccatcactatgttttattaaacactatgtacgtatccatgtatgttgttgtgtaaacatttgcatatgtatataaccatacacacagacataatgtgttagtacacataatgcatgcacatggatcttattagttgtctcctagcctgcagcatcgcataatatgacttcaaattattttcattgcatttcaattaatagtatacttcattatcatttttccctttttcacatttttaataatctgtatattgggttgttcattttctagaaccaggctgagtattgatgttaatgttctctagacattgtcatttcagttgcttagatcagtaaaacttgataaataaatgtttgatgcaaatccaacaattagattgtttagtggtctaaatttaggagatttcatagacctacatctgtaaaggccataacttacatagaagattatctccataagatgtagcaagcactatccaaactaaacaaacctgtgcatgggtaaaacataatgctcgaatcagtggtcgaatgccttttctaaaaaatcattctttgtctgagaatggcattacttctatccaaatttactatagacttacatgtatatgtttatgtatgtattagaatttgtaggtgcctcgaagaagccaatcaaagtactaattactaaaggtcacttgcaggatagcaaactcatacagtaatactgttgtttgtcgatcttaacaaatttcattcaagaatcaggccatgatgatgttcaaaagagttgtcagcagttcatgacatctggtatttattatatcttcttttgtagagggcttgtgtgttctgcttagcagtaggtaattttgctattgaaagattaatctattactgtaagcttggttctatgtgaatggatacatataattactcaggtagcacgacaactagcaatgtatggatgaattgaaggaaataaagaaggcagacaatcttatagaaactctgcatcttgaaactaccatggtttagaaagaagctggatgcatcctttatgttggtgtcttcttatcaccaagcagtaatgtgaagcaaggtcatttgttgactaagaacggttgaacacaaattagtgaagagttcattgcactagagatggaggatggaaaggtggtagatttcaatatggctttgatactatttccccccttacaatcttgtacggaacaaacaatgtatgtggatactattgtaattcaagaatttatttctaaataataaacatatttgtttatagtt

SEQ ID NO: 30473 - DNA, 1490 bp, Zea mays
  Clone ID: UC-ZMFLB73023E02_FLI
cgaaaacatacacagctgctagctaatcctgccgtgagtgcaatgcatgcgaagatgacgaagcccgcagccatcgttgttgctgctatcgccgtcctctccgtcagcctgctggctgggtcgtcgtgccttgcccttgcgcggcccagcggcgacttctccatcgtgggctactcagaggaggacctgtcgtcgcacgagagcctggcggagctgttcgagcgctggctgtcccgccaccgcagggcgtacgccagcctggaggagaagctccggcggttccaggtgttcaaggacaacctgcaccacatcgacgagaccaaccgcaaggtgagcagctactggctgggcctcaacgagttcgccgacctcacgcacgacgagttcaaggccacctacctcggcctacggagcagtgttggcgatggtggtagtggtatcgatgacgacgacgagccggaggaggaggagggctacgagggtgtggacggggcgagcctccccaagtcggtggactggcggagcaagggcgcggtgacgggggtaaagaaccagggccagtgcggcagctgctgggccttctccacggtggccgccgtcgagggcatcaaccagatcgtcacgggcaacctcacggcgctgtcggagcaggagctcatcgactgcgacacggacggcaacaacggctgcaacggcggcctcatggactacgccttctcctacatcgcacacaacggcggcctccacacggaggaggcctacccgtacctcatggaggaaggcacctgccagcgcagcagcagcagcgagaagaagtggccgggatcgtcggaggacgccaacgacgatgccgcggtggtcaccatctccgggtacgaggacgtgccgaggaacaacgagcaggcgctgctcaaagcgctggcgcaacagcccgtcagcgtcgccatcgaggcctccggcaggaacttccagttctacagcggcggcgtcttcgatgggccctgcggcacgcagctggaccacggggtagcggccgtcggctacgggacggcggccaagggccatgactacatcatcgtcaagaactcgtgggggcccagctggggcgagaaggggtacatccgcatgaggaggggcaccggcaagcgccagggcctctgcggcatcaacaagatggcctcctacccaaccaagaactgaactcagatcatcgattcatcgtcaagcagcagctggctgattactcccactgctggcgctccacgcttcactagttcttcgtcgttctccttcacttccattgttttcaagattggacgatctttcgttgtttgaaatgaaataataatgatgatggaattagtgttccccaagttcgaacaaattaagtattgttggagttttcgttggaacaactgtagtctgtagtcagagtgagccccaaatcagggcagttgcttttgaacataacattgttaaatacttggctt

SEQ ID NO: 30474 - DNA, 1933 bp, Zea mays
  Clone ID: UC-ZMFLB73023G02_FLI
ccaccctcgcgttcgggcacccaaaaaccctagccgccgccggcgccaagcccctgcccgccgccacctccacgtccgtctccttcccggccacccaccagcccgcgtgcctgctctcctcgcccgcgcccgggtctctgcgccgccgggacgtcgccgccatggtctccgcgccgccggccgtcggcaccgccatgccgtcgctcgacttcgacacctccgtcttcaacaaggagaaggtctccctcgccggccacgacgagtacatcgtgcgcggcgggaggaacctgttcccgctgcttccggaggcgttcaagggggtcaagcagatcggagttattggatggggctcgcagggtcctgcccaagcccagaacctgagagattcactggctgaagccaagtcagatattgttgtgaagattggtctccggaaaggatccaaatcttttgaggaagcacgtgccgctggattcaccgaagagagcggaaccttgggcgatatttgggaaaccgtctccggcagcgatcttgtgttgctgctgatatcggatgctgcacaggctgacaactatgagaagatcttctctcacatgaaaccaaacagtatccttggtttatctcatggatttcttctaggacatttgcaatcactcggactcgatttcccaaagaacatcagtgtgattgctgtatgccccaagggaatgggtccatccgtccgcagactttatgttcagggcaaggaagtcaatggcgctggcatcaactctagctttgctgtgcaccaggatgttgatggaagggcaactgatgttgctttagcatggtcagttgcacttggttcccccttcacgtttgctactactttggaacaggagtacaagagtgatatctttggagagcgaggcatcttgctgggtgctgtccatggtatcgtggaggctctgtttaggaggtacacagaacaaggaatggatgaagagtcggcctacaaaaacactgtcgagggcataactgggatcatctcgaaaaccatctcaaagaaagggatgcttgaagtgtacaactctttgagcgaggaaggcaaaaaggagttcaacaaggcttatagcgcatcgttttacccatgcatggatatactctacgaatgctatgaagatgtggcctctggaagtgaaatccggagcgtggtgttggctgggcggaggttttatgagaaagagggcctcccagcttttccgatgggcaacatcgaccaaactcgcatgtggaaggttggtgaaaaggtgcgctcaacccgtccggaaggtgatcttggcccgctccatgccttcactgctggagtgtacattgccctgatgatggctcagattgagatcctgaggaagaaggggcactcctactctgagatcatcaacgagagcgtgattgagtcggtggactcgctgaacccgttcatgcacgcccgtggggtcgccttcatggtggacaactgctccacaacggctcgcctgggatccaggaagtgggcgcctcgcttcgactacatcctgacgcagcaggcctttgtggcggtggacaaggacgccccgatcaaccaggacctcatcagcaacttcttgtcggaccctgtccatggtgccattgaggtctgcgccgagctgaggcccaccgtcgacatctctgtgcctgccaacgccgactttgtgcgcccggagctccggcagtcttcctagattgaggcagtgagcggagagggagagggagagagaaagagaggatttcgtgtcccgagttagaacagagtgctgtatgttttgtgcgactgtttgtaagtcaagtctgaactgtgaacctatgtttgcttctatcagaggacccggagaaagcctgggcatctgtttccggaataaaatgggtccttcggaat

SEQ ID NO: 30475 - DNA, 2529 bp, Zea mays
  Clone ID: UC-ZMFLB73023G10_FLI
gcacaacataagttcaagcaggccaatgtggtgcaccagccagcagctcgggacactaggcaaatgactgatgtgcaggaggatctgataaatggattagcatcgaatagttcgtgtgaacggccttcaattttccagaaatcttctttacagtatgctgatgatcctgatcaacaagagacgtttcggcctcttgctggaacaagggcagcatcaccacatctcttgagtacacatgcatctgatatgaatctagatgggccattagtcaattcaaggagaaacttgtccatatcaccacctcttgatgtgttctctaggaatgtgtcccccaagagagcactagagaggctgccaccatctcattctgtattgggacctgatcccagaaaattcactgatcgaaatggcaggttaagatggggtttggatgatggtgcacaacggcctacaatcagtatgcttgatgaagagtacaggaagcaaagtgcaagggaacttattgatgcatatgggaattgtcaaggacgagatgctgatgaacgacttcctaaagtgcagcgcctggatccaaatggtatggctagcagatctagtgcacgaaattggttaacttccgaggaagaagagtattcatgggaggatatgagcccaactttgactgatcgagtcagtagcagcatgccatcttttcctcctggaaccatgagaactggatttcctggggcaaatgcagggttactggaatctgatgttgggaggcacaatttcccaagccaagctactagattatcggttgatggttcaccgtttaatcttgaagataggttttcaactgcaagtcatgttaacatgtctacaaggagatatccaagcaattttggtgttcagaatggagctcttttgaaattccagaattctgaacatgccctaaatcatgggagaattgctaccatgccagctccaccttggcaacagcctactggtctgccattgcaaatgcaagcacctcaacattcttcagcacttgatagattaccacagcccgctgacagtgaaatgccagtcaagaggttggacattcgtggcacatacaatggtttgaatgtagatagatccttggcggagaagcataggtcatcacctgctcgtgctccgacagaatggcttccccttcaccatacaccatcacaaactttaccactaattatacctgagacaaaacatgttagaagtgcatcggatagtttagaaattagttcttttgttagccaaggagctagttcatcagtatttgttccgcatcatcagtatgatgccttggaccggaaaacaggtacccgtaacttagctcaaccaccatatcagcaccaagatttgttgctaccaagccaacaaaatcaaggtacaattttgggaaaccaagttcatcctcatctgccccaacagttacatccccattcccatcctcaccatcaggagacttttagaagctttgcccctggcatgactgtatctccattccaaggacaaggaggcaatgcaaccatgacaccagtttccgttctgccaactttttctgtaccacctgctgtgccaccctatggcgtgctgtctgcacctgggtttcctatgccaccattaccgcccggaccaccacctgtcccactgcagatgggttcatcatcatcacaagttggtggccctcaaccatttgtctctggacttttgagtaaccttatgcggcatggtgtaatttcactggaaccacctagccaatcccaggattctgttggagttgacttcaatgtagacctcaaggtacggaatgagcctgtcatcaatgctttgtatcaggatctttcaaggcagtgtaaaacttgtggccttcgatttaaatgccaagaggagcatcgtgctcacatggactggcatgttacaaaaaataggaattcaaagaaccgtaagcaatcttcacgtaaatattttgtcacggtggaggaatggttaagagctgcagaaacagtaggaaacgatggagttcctgcttttgtgccctcagacccagtcccagatagaaaggaagagagagaaattgctgttcctgcggatgaggagcaaacagcctgtgcattatgtcaagagccatttgaagatttctacagtgatgagactgatgagtggatgtatagaggtgcggtctacatgaatgcaccagacggtaatattgatggtctggaaaggtcacggttgggacctattgtccatgctaaatgtcgatctgggcccagcaatacttagggtgggcatggctgggatgacttgatagcttttttttccgttgcggctgtaggcatgacctgtaaactactggagactcagaatttggtatggttagattttttcctatctatggcttcgttaacagccaatgcacagaatgttaatgtgacaatagtgcataactgtaaaatttttctgtaattcagtgattggaagttagtaatcggcacaacattcactattgtc

SEQ ID NO: 30476 - DNA, 1696 bp, Zea mays
  Clone ID: UC-ZMFLB73025C03_FLI
cagtgatgctgagactggcatgtctgaggaggacatcctcttacaagatgaaatatgtaaatctcggttaatgagtataaaacgggaggaagaacagtatatgagagagagagatcggtatgagttggaaaaggggaggcttatacgagagatgaagcgtctcagagatgaagatggctcacgctttaacaacttccaaattcttcaccatcgttatgctctcttaaatcttcttggaaagggagggtttagtgaggtttacagggcttttgatttggtggagtacaaatatgtggcatgcaagcttcatggattgaatgctcaatggagtgaggagaaaaaacagagctacatacggcatgcgattcgtgaatataacattcacaaaactttggttcatccaaacattgtcaggctatgggatatatttgagattgatcacaatacattctgcactgtcctagaatattgcagtggcaaggatcttgatgcagtccttaaagctacaccaattcttccagaaaaagaaggaaggatcataattgttcaaatatttcagggcctggtttatctaaacaagaggggccaaaagatcattcactatgatctaaagccgggcaatgttctctttgatgaggttggtgttgcaaaagttaccgactttggcctcagcaagatagtggagaatgatgttgggtctcaggggatggagctcacttctcagggagctggaacctattggtatcttcctccagaatgctttgacctgagcaaaacaccatttatttcatctaaggtggatgtttggtcagctggtgtaatgttttaccagatgctcttcggaaagcgtccttttggtcatgaccagacccaggagagaatacttcgggaagatacgattatcaatgcacggagagtggagttcccttcaaagccagctgtatcaaatgaggcaaaggatctgatacgccggtgcttgacatacaaccaatcagagagaccagatgtactaaccatagctcaagatccttatctctcatacgcaaagagatagccgctatgccggagaacactaaggcaagggtagctgatcatttatgagattatttatgtatggggatggataatcttgcgaaggagcaaagtgttccacaagctcaagaagaccacaaagggtgtaactgtatatgttgtaaattttagtctttcccatcgcagcaatgacctgaaatccagaagccatcagttcaacggacagcttctttgtagcgtagagaaagcaggcattggtttgaacggggcatgcgtaacgtgatggtttcttggctggtgggctgtgggcagtggtcctgttgatggttggtttttgtttgctcatactgtcggtaaggtctgccaaatcagaaaccaccggtgacaggcgagagctcacatgctcacctccgaaaaaatctcggccttgcactggcaggatggactggattttgcgtattgccaaaacagatttaaggtagcatgcatcaatacaggttactttggataacctatagactcaccacagccacaagcacagaagctcttcgtacaatttcagagagtaccgatgtgccagatttctgctggtgccaatttgtttgtgatcgctgtcacccttgtacaacactgggatcgctcattgagcatacacaagttatgc

SEQ ID NO: 30477 - DNA, 3359 bp, Zea mays
  Clone ID: UC-ZMFLB73025E08_FLI
ggcggcgaagggaggtgtaggtgctccggaggcggcggcgtggagtggcagtggtctccgcgcgaaccaggccgggcgcgccagctgccgcggcgcctagagcgagcgcctggacgtggtctctctcgcagtccgagttggagcttgggttttggcgcggagggacgccggggttctggttctggcaacgcggctggaggaaggggggaaacggagatggcggtcggggacgcgctgcgacggctgtgcgaggagatcgggtggtcctacgccgtcttctggaaggccatcggcgccgccgaccccgtgcatttggtgcgggaggacggttactgtggccacacttcatgccctgtcggatctgagccttctgaatctctgcctctgcccagcgacgctgggtgctctgttcctgcagctgacaccatctgctggcttgttaacaacgatatggcgtcgcaggttcatgtcgtcggacaagggatcgtgggccgtgccgcgttcagtggcaatcaccaatggatcgtccacggtactgccaatggtcacgggctctcctccgaggttgctgctgaggtgaacaatcagttcagagttggtattaagactattgcgatcattcctgtgctgccacggggtgtcctacagttaggctctactggtttggttatggaaaacacaaattttgttatgtttgcaaagaagttgtgttctcagctaaacaaccgttcaagcatggctgcatctgcttcggttaagaacacttctagtcagcatggtcagtcacgtcctgatactgcaactgtgtcaactagtacaccaccaaatgcattgctgagtgcatctttgcttaaggttgcgcaacagaatggtcaccctgttagagagcacagtgtctatgctgagcgtgatcttaggtttatacaacaagcatccatctgtgagagtcaatttggaagtaatttacagagtggtgttatgaactcatgtttgacctccccaagcttcgcatcagttaaaaagcagtcacttttgatgaacagcattgggcagttacagttcagtaataatgtgcattcatcagcagatttggcaagggagatcatattaaaatcccttgggcgccaggactcttctatctgcgaaaatacaaacatgaatatgcatcgtggaagatatgtagtatcccttgggcgccaggactcttctgtctgcgaaaatacaaacatgaatatgcatcgtggaagatatgtagtatccaatgatataaatggttctaggaattttgattttcttcctattggtgcgaaagaaagcagagccaacttatcaatccctgcgtcgagtcaaattttggaccacatgccaggaacattgcagcagaaacagtctctagtcccattcagggttacccaatcttctgaattttctaagaaagtggagaaccctgaaagtggatcatttcaaattccttcagttacaacttctgattctggtggtcaggtttctaacagtttcaacatggtccaagagaatcgattgagtatgtcaaacaatgtccgacaagtccaaaagattgacagatttagtgatccaagtgctaatgtcagcactcagagaatgaagaacagagatgaatgcgagccaggaatgcccattgagagagcctcctcgttcctagtcgaacctggtgcagataatgacttgtttgatatgtttggttctgaatttcatcagtcctcccacaacgttggtgctgatttggtcacctggagtggtacagagtctcagaactcagatagagatgtccctgaatcgtcaatatgtttcaatagttcaccacttttcagttcgctagacaacgagcttcactattcaggtatcttatcgctgactgatactgatcaactattggatgctgtcatatcaaatgtcaatccaagtggtaaacagtgtcctgataatagtgcttcttgcaagactgcactgatggatgttcctagcacatctcatctttgttcaatagatttgaagagatgtgagtctcccagcgttccttccctgctaattaagcacgaattggcacagtttgctaaacagccatgtctcgttgataaatctgaggatggttgtctttcccagaataatggaatgcacaaatctcagatacggctttggattgagagtggtcagaacatgaaatgtgagagtgcttcagcttctaatagcaaaggtcttgatgtgccaagcaaggcaaatcgcaagagatctcgaccaggagaaagccctaagccacgacctaaggaccggcagctgatacaggaccgtattaaagagcttcgtgagcttgtaccgaatggggcaaagtgtagcattgatggtttgttggagaagacagttaagcacatgcttttcttacaaagtgtgacgaaaaatgcagacaagctcaaggactctactgagtctaagatacttggtagcgaaaatggccccctttggaaagactacttcgaaggtggggctacctgggcttttgatgtcggctctcagtctatgacatgtccgatcattgtcgaggatcttgaccgacctcgtcaaatgcttgtggagatgctctgcgaggatagaggaatcttcttggagatagctgatttcatcaaaggacttggactgactatcttgaggggtgtgatggaaacacgcaaaagtaaaatctgggcacgattcactgttgaggcgaaccgggacgtaaccagaatggagatattcctatcgcttgtgcgcttattggagccaaattgtgacggcagtggagcggcggacaacactaacaacatgaacatgcatcttggtttggtgcaccaacctgtcatcccagcaacaggtctcatccaatgagattaagactaagaggaaaccctcaagcatcttccaagtgctaagagcaggaggagctcagctaactcctgccatgactagcatcaccaatacgccatgcagtgcaccacctgctttcccgagacaccttaatctgtgcaaaagtgacgtccttcttgagaccaggtcgcagaaatggaagaaggaaaacaacgcaagagtgatcatcaggcagtgttttgttcgtatgatctttagattgtttgttagttagcgctgtttggtcgtatattagtggttttttttgggtactgttatccagaatggaagttcttgggttggtttatttcacacacacaaaaagatggaatgccacctttgttataagtctcttcacattagaaccagtgagcatagctagtgaaaaattgtttgagaagactcttgagtcattgctctgatcagattatttgttattactc

SEQ ID NO: 30478 - DNA, 940 bp, Zea mays
  Clone ID: UC-ZMFLB73025G01_FLI
gcggttgggtttattgaggcgtggaggatccctggtgttgcccctttcgccctctgccttttcttctgcaagcttgtggcgtatacgttcctgtactggcttcccttctatatcagccacacagctatcggtggagaatacttgtcggactccgcagccggggtactgtcgacgctgttcgacgtgggcggcgtcgtgggcggcatcctcgccggccacatctccgaccacctggacgcccgggcgctgacggccgcgagcttcaccttctcggcgataccggcgctcttcttctaccgcgtctacgggaacgtctcgctggcctggaacatcgccctcatgttcgtcacggggatgctggtgaacggcccctacgcgctgatcacgacggccgtgtccgcggacctcggcacgcacagctcgctcaacggcaactcccgcgcgctggccaccgtcacggcgatcatcgacggcacggggtccatcggcgccgccgtcggcccgctcctcacgggctacatctccgccaggagctggagcgccgtgttcacgatgctgatggcgtccgcgctcgtcgcggggctgctgctgtccaggctcgtggcggcggaggtggtcgccaagatggagtcccggaggacgcccgcccctgctgcgagcgacctgctgcccgtgtcctcctcctccatggacgaaccgtagatcgcttctagctgcgccccggctgtggtctcctggtgacatggaatggtggcgggagagtagatcacctgtgattttaggcctggtgggactgtggcagcaggtgcgcagtgcgcttctgtcccggaactgtgggatcttgctcctgccgtgccgtgcttcaccgcttctggttcgtcatggtatatatgtatatggaatgtcttctggttgccgacgaagatgaatgcggttggct

SEQ ID NO: 30479 - DNA, 895 bp, Zea mays
  Clone ID: UC-ZMFLB73025G10_FLI
cggggcaactcggcggctgcgtctggccgccgcgctcctacacgtgcaccttctgccgccgagagttccggtccgcgcaggcgctgggcggccatatgaacgtgcaccgccgcgaccgggctcgcctccggcagtgcgccccgccggatcatgaccaggagccgatcgccgcgcctcttccagcgccggaattggcggatcaccagcagcagcttctgcaactgcatggatctcccatgaccaaggcggcagtattattctctggccgccctgctgctgcttgctgtactcatcagcaaacttattgcaataacaacagggagggggagggggaggattctcctgctcggtacatatcaacgacgacgaccatcatcaaggacagcaagagcaaggtactcatctccatacctgcagcaacgacagcaacggggagcaaaaaagccgctactactatagcaatcatcggtgaggaggaggaggaggaagaagaagaggaagagatcatggtgacggggcggaggacgaaacgaaggcggctagtccatcagccgttctacgacctgcggcggcttccgccggcatcatcatcacccaataaaggaggagttgaagatgatgatgcaaaggtacccaaattaagcagccctagtagcctcagtcatcatcttgcaggccggcaagaagaagtggatctggagctcaggcttggcactagctgctagctagtcgcgatccgccgtccggtccctaaattaagttgcgtgaatggatccatatatctctcttttcacttcaccataattaagatcgagtgtgtgcgtgcacaactgaatcatatatatcatctgctgcttgcttcattcatatatcatatatatagtatgcttctcgc

SEQ ID NO: 30480 - DNA, 1138 bp, Zea mays
  Clone ID: UC-ZMFLB73025G12_FLI
caagctgcaccgcagcaacgaacacgaaccttggcagaacgaagctgaagtagttcgctgtgaacccagtatggcaaacgcgccgaggatcctggccctcggcctgctagcgctcctgtgcgctgccgccggcccggccgccgcgcagaactgcggctgccagccaaacttctgctgcagcaagttcggctactgcggcacgaccgacgcctactgcggcgacgggtgccagtcgggcccgtgccgctcgggcggcggcggcggcggcggcggcggcggaggcggcggaggcagtggcggtgcgaacgtggctaatgtggtcaccgacgcgttcttcaacggcatcaagaaccaggccgggagcgggtgcgagggcaagaacttctacacccggagcgcgttcctgagcgccgtcaacgcgtacccgggcttcgcccatggcgggacggaggtggagggcaagcgcgagatcgccgccttcttcgcgcacgtcacgcacgagaccggacatttctgctacatcagcgagatcaacaagagcaacgcctactgcgacgcgagcaacaggcagtggccgtgcgcggcggggcagaagtactacgggcgcggcccgctgcagatctcgtggaactacaactacgggcccgccgggagggacatcggcttcaacgggctcgccgaccccaacagggtggcgcaggacgccgtgatcgcgttcaagacggcgctctggttctggatgaacaacgtgcaccgtgtgatgccgcagggcttcggcgccaccatcagggccatcaacggcgccctcgagtgcaacgggaacaaccccgcccagatgaacgcgcgcgtcggctactacaagcagtactgccagcagctccgcgtcgacccagggcccaacctcacttgctaggcgacggcgtccacgttgtacccatggctcctgctagtgctagctcgtccacaataaatgctcggcgtcgcaccctcgcgaaaagtaaaccaagagtttactgactagtacgagctagctagcatgcagtaataataatcatcgtaataataataataaaacgactgggctgagccactttgttcgacctgaatgaataatgaagcaactgtatgttccctctgt

SEQ ID NO: 30481 - DNA, 1667 bp, Zea mays
  Clone ID: UC-ZMFLB73025H09_FLI
gttgggaacaggctagaaagcagacctatttcggcatcaccatccttcagctcaagtttggtggcatataaaggatctgccaaaacatttaacctggttgagatggagagagctacactaggatttgatgagtccagaattattggtgagggtggttttgggcgtgtctatgaaggtattcttgaggatggagaacgggttgctatcaaggttttaaagcgggacgatcaacaaggtacccgggagtttttggctgaggtcgagatgcttagccgattgcatcataggaacttggttaagctgataggtatatgcacagaggggcatagccgatgtttggtttatgagcttgttccgaatggcagtgtggaatctcacttgcatggatcagataagggagctgctcagtttgattggaacgctaggctcaaaattgcacttggtgcagcacgcgcacttgcatatttgcatgaggattcaagtccacgtgtcatacaccgtgatttcaagtccagtaacatcttattggaacatgacttcaccccaaaggtgtcagactttggcttagcaaggacagctttgggtgagggaaacgagcatatttcaactcgtgtcatgggaacttttgggtatcttgctcctgaatatgcaatgactggccatcttctagtaaagagtgatgtttacagctacggtgttgttcttcttgagcttcttacagggaggaaaccggtagatatgttaagacctcctggacaggaaaacttagtggcatgggctggttctcttctgacaagcagggatggtctggaatcaatcatagatcattcacttgggcgcagcattccatttgacagcatcgcaaaagtagcagccattgcttctatgtgtgttcagcctgaggtggaccagcgcccattcatgggtgaagtagttcaagctctaaagctggtatgcaatgaaggcggcgagttcaatgagtcaacctttagccaagatttgcatatccaagatgtcgaggttatgagtagagcaagtacggatgtagacgttgacccaacgctatctgctgagctgttcacttcatcagcgcgttatgatgctatagatgcccctggttctttccgaagatactcaagttcaggtcctctaagagtagggagaactggactgaacaaagagaggggcctgtcaacaggcagctcaagtgaacacgttgggctacagaggtttaggattgatggagaatagtcagcctgcaagcagctcatgatgatgtgcgcatggaagaaatacacattggattattttcttccaagccagatttcatactcatcgtgaatagtatgtggaaaattgagaaaggcgtaaaaatcagtgtgccactgttcggtgctcccgtcgccttctttggaaagctcaaacaagacttcacacgaatttttgtacagttctagagatgatagatgcttttaggaaagaaggggtgtacacgagtttttcagctgtaattccccacgaaccgtattacgtttcgccgtagcatcagtgcaaatcaattaaagggcgtgcacgcagtcaccattttgagttcaatgaaaaaaaattcatcctgattgaccgcaacctttgtctggcccggcatagtctacaaatgcacggttcat

SEQ ID NO: 30482 - DNA, 2460 bp, Zea mays
  Clone ID: UC-ZMFLB73026A08_FLI
ctttgtctgtttcggtggaggctgtcggccccaaattatggtacagcgcatacggaggctaaccttccattggcagcgcacagatcatccggggcggacctataagatgtcaagtgtgtacgccccaacaacccacagatgcggctcgacgctctccatctgcatgtctctttaattatctctatatatatggatagacgacaaccttctatctatgaattatatgtcatgtctctttaattatctctatatcaatgtctacctatgtgatataagataccgtagcaacgcacgtgcacctaattagtgaatttggaagtgtgactttataaaaaaaatgagttatatgttcaagataatgttagtagtcatactatttaaagtccttttactttcttatttggatgagtcttttttcacatatcttccttcttaatgtaccattcatggttctattgatagctcaaggtcatgagaatgttgccgctgagtactacaaacaacaggtggagatgttagagggttttagtgagatggacgcatttacatatcgtgctttcctacctgtaatgtccaaggaagaacaggaaaaagttgtcaggagtgaatcattagccatatggctgtctaatattgcaaatatggttctctttgctgcaaaagtgtatgcttcagtaaggagtggttcacttgctattatcgcatcaactttggattctcttctagacttgttgtcatgatatatcttgtggtttactgccttttcaatgcaaacgccaaatccctatagaaacccaattggaaaagcgtatgcagccactggaatcaaggaactagctgaggtctccttccctcctaccattggcggcaggggcagcacaggatctactgcattttttacaacgcagtggcagacattggagacgggttcgtgtgggatgccgactcctagctctactgccacgccagacactcttcccatatgaactttttgtgaagctctatagcaaggttgagttgcacccttttggtcttcataaccttggtaacaggccaatttatgctgggaatgcactttgtactgtgaaatataccgacgaggatccttgcatgatgagtattagatcaacttcattttcccctactgctgatgctatgtctgaaacaaaggttgcacctatcacccagtaccttttttcaaaccttagggaaatctacatgggtgaatctgacatcccaagacacaaagcggcatgatcttgcaaatgcatgtgtagtagtcacaggaggcagaggtttaagaagtgctgaaaattttaagttgttggagcagcttgcggagaaatttggtgcagcagcgggcgcgactagggctgctgttgaagcaggttatgttccaaatgaccttcaggatcctcgccggtatatttttacaccatgcccacttttaagaaaatgaaaacacagagttgcaggagaaggctgcagcagcttgaatctcagctaatggaagcgaacagaatcaaagaggaaggcaacactggaagtatccgatggaaggagaacatattagaccaagagaatgaattacagaacataaaacaagagaacgacgacctgcagacaaaggaatcagcggcttctgagaagattaaggaactctcttcccagcttactaatgcaaaatatggcatgataaatagtaacaccaaggagataatgagaaggggggcactgaagaggacgatgaacctgttgtagtagttgccaaaatatgggagaacaacaagtttgttgactatgattcatctaaggagaaggagaatgatggtgactcacaggttgatttggaatcaaacaagggggatgcaggtcttgatagcaacgggttgcactcaactaaggagaacagtggcagggcatcaccaactaaacaacaccagcagtataagaagaagtctctgctgaagagattcggtggtctgctaaaaaagaaaagcgaaaattagcataaaactgtctgatgatattctttgttctatcatttgacatattttttgtaaaccctctcagagatgctgaaagccaacttactattgagagtactatgaaacctctcgcgcagtgtgaaataaatgacagaaatgaagtgtgtgttggtgttggtgctggtgctggagacactaacataaccggtggtattatccaattgtattggagttctattcttgaaaggtgcttggatacaaacgatcaaagcttgaaggaggcttgagtcaattgaatcatctgtaagtaatttagaagaaatattgtttttgttggtgaagcgagtttgttctttcctttgggctctatttatttatgaattgataacccaacaggattgtagtttgtagccatttagatttgaatccgagctatgactgagacgaatacaacatatgcattttgtagccc

SEQ ID NO: 30483 - DNA, 2099 bp, Zea mays
  Clone ID: UC-ZMFLB73026A09_FLI
ctccctttccactccagtccaaccaaccgtccatgggtttcttcatcccgccgcccaaggtgtacaagccggcggcagaggtcgacctcgggccggacagcgacgagcactacatcagccccaacgtgaaagcgccccgcgtggccgggttcctggtgaagatgctggcctgggtgctggagacgccggtgcttggctggatcgtgctcggcgtcctcaagagggacaacctcgtctacaagctcgtctcggacgctgagatcccggagccgccgctattcacggccacccacacatggcaagcgatccaggagcagagcgtgcgcgtgacggagtcgaggctgtcgccggcggagcgcgtgcaggaggccgtcgcctgcgtcccagctgctgcccaggcccagttggagccggcggcggggttcaggcgctggacggtgcgggacttccacagggcgtacagatcaggacaggctacccctaccatggtggcgcggcgattcctggcagccgtggaggaatgttcagggccggacctgaacatgggcttcttcatcagctgcgaccctgcggacgtgctgcggcaggccgaggactccacccgcagataccagcaaggggcgccgctgtccgccatggacggagtactggtcgccgtcaaggacgagctcgattgcctgccgtacccgaccagcggcggcacgcggtggctggggtcggcgcggcggtgcgcggcggacgcggcgtgcgtggcgcagctgcgcgcgtgcggcgccgtgatggccggcaaggccaacatgcacgagctgggcgcgggcaccagcggcatcaacccgcaccacggcgccacgcgcaacccctacaacgtgggcagggtgtcgggcggctcctcgggcgggtccgccgccgccgtctgcgccgggctctgccccgtcgccctcggcgccgacggaggcgggtccgtgcgcatgccggcggcgctctgcggcgtcgtcgggttcaagcccactgccggccgcctctccaactccgggcttcttcctctgaactggaccgtcggcatgccggggatcctagcagcgacggtcgaggacacgctgatcgcgtatgcggcgattgctgatcagtcaaaaccaagccctttgcagcagcctgaactgaacctgcccatgctgacacgcacgaggtccatgcccagcatcaggctcgccaaatacgcaaagtggttcgacgacagctcggaggacatcaggagcctctgcgggaaggcgctgcagatgctgcgcacgcactacggctgggagagcgtggacgtcaccgtccctgagatcgaagagatgcggctggcgcactacgtgaccatgggctcggagtgcactgcctccctcgccgccaagtacctggacagcatggacaggtccgaggtcgggtgggacgtgcggatcgcgctcagccctacgggtccttcagcagccgagactacctcagcgcgcagcgtctccgatgccggcagatgtacttccacgagaagatcttcgagactgccgacgccatcgtcacgccgatgacaggggtgacggcgtacgcgctgcaggacgacgcgctgagcacgggggagctggactacatcaacggagctgcgctggtgaggtactcgatcgcgggcaacttcctggggctgccagcgatcaccgtgcccgtcgggtatgacaggggagggctccccgtggggctccagttcatcggccgcccgtggtcggaggccacgctgctgcacctcgcctacgccatgcaggaggcgtgcgggaagaaggtgctccggaagcccaaggtgcactacgacctcctcaccaaagagtagctccagcgagcatcgatccggcagattgctctctatgaggcgcgcggttgctgattgcatgcacctctagtgtgattgattgtttgtttgattgattgagcttgtgatgagagagtgggggaagttgaatggaatgccgtcaatgtcggacaactctcaactaggagaagaaaaaaaaacatggttgccagcaccatgcatgtgcaccaccattcgttttttaatgtcgtcctcattg

SEQ ID NO: 30484 - DNA, 1317 bp, Zea mays
  Clone ID: UC-ZMFLB73026B04_FLI
gcacgccgaaaaaagacctctcacccgccccggccgcggtggcagaccgtgctcagcatcgccgccaagaacgcggctctcctcgccgcgctgctctatctcggggacctcgcctggcgctggtcccacccgcccccgccctcgccgccgcccgaccgcgccgcgctcgagggctacgccgcccgcgtcgacgaggtggaggcctccctcacccgcaccttccggatgatccaggtgcaactcgaggccgtagatcgcaagatcgacggcgaggtcggcgccgccaggggcgaccttctcgctctgctggaggataagcggctcgcgctcgagcgccaactcacccggcttgacgcgagggccggtgagctcggcgacgcgctggccgggctcaagcggatggagttcctccggaaggacgagtttgagaagttctgggacgaggtgaaggggagccttggctcgagttcggagagcgaggttgatctggaccaggttcgtgccttagccagggagatcgtcatgagggagattgagaaacatgccgcagatgggatcggcagggttgactacgccgttgcctcaggcgggggaagggttgtccggcattcggaggcctatgtgcctaaacgtggtttcatggtttggatgtctggagttgacgtggggcctaagccagagaagatgcttcaaccgagctttggggaacctggacagtgctttgctttgcagggtagcaatgggtttgttgaggtcaagctcaagtcagggataattcctgaggcagtaacgcttgagcatgtgtccaaggatgtggcgtatgacaggtctacagctccaaaaggctgtcgggtgtatggatggtacgaggagacgcccggtgagacccaatctggtcatgctgcaaagatggctttggcagagttcgcctacgacttggagaagaacaatgtgcagacatttgacgtgacagccccagatgtaggcgtgatcaatatggtccggctggatttcacttcgaatcacggaagctcgcagctgacgtgcatctaccgcctccgggtccatggccatgaaccggtctctccaggatcctccgcaggttctcaggcctgatgagttgtggaaagccttgtgtttctatttgatacgtgattcacacttgacacaactgtaaatgtaacgatcgtttgctggtagcctggtgtcttcctagatcctagtccagtaacatgtggtaggtggctagtgtattctatgaacacatgggatttcagcattcagcagttgtttgttgcgtaattgtttgtttgaacc

SEQ ID NO: 30485 - DNA, 1216 bp, Zea mays
  Clone ID: UC-ZMFLB73026D01_FLI
gataaccctctatttatccatgcattatgctatataatatgtcgatagttccttttaataggccatatatcttttatttatcactatttaggagtattggctgttgttgttgtgaaacttacttttctgatgtgccgatgtgcatatgtttggagcaacatgttttttagttaaaagcaaaactatactggacagtaaagccatcaatacaaagcaacaaatattacgaggggctgtcctatgctcatataattctactttttttttaaaaaaaaggaactaacactcttttcaaacgagtaaaaaataaattcaaagtatgcagttagttactctgtctcggtagcaaagtgttgaacagtcaaattcctgcttgaattgctctcttgcttggtctgaaaggcatacattttgttgatgaagatggtaacgatttttgtttggtttcagtggacgacgagtacatcatcattgggtccgccaacatcaaccagaggtccatggacggtgccagggactccgagatcgccatgggcgcgtaccagccgtaccacttggcgactaggcagcctgcccggggccagatccatggcttccggatgtctctttggtacgagcacctgggaatgctggaagacgtcttccagcggcccgagagcgtagagtgtgtgcagaaggtgaacgaggtcgccgagaagtactgggacctgtactcgagcgacgacctggagcaggacctcccgggccacctcctcagctacccgatcggtgtcactgccgacggcagcgttaccgagctgcccgggatggagaacttccccgacacccgcgcccgcgtcctcgggaacaagtcggattacctcccgcccatcctcaccacatagagtgcacactgcaggcagcgccatggctgctctcctctctggcctcaccttggtgtccctgtgtttgtgtttgggacactggaggttcagattgcagtgttgatattatatcccccctccgtccagagggattcgacgttattgagtcataataaaatgcattgtgcacggtgggagactgggaggataggaattatagttgtttattacagtacgactgcttactgcatccagattgtgttgtcccttgtctggtgtagcttctgttgcttgctgcgttgcagtgccggaagtgactccagatttcagaacttaaacatgattgcttgttc

SEQ ID NO: 30486 - DNA, 1214 bp, Zea mays
  Clone ID: UC-ZMFLB73026E01_FLI
cgcggcgacgaatgcccgatatgccgatgccgacgatgactgaccgcgccatgcgctcccgccgttgcacgcagggctgcgacgcgtcagtgctgctcaacgcgacgggcggcagcgaggcggagaaggacgcggcgcccaacctgacgctgcgcggcttcggcttcatcgaccgcatcaaggcgctgctcgagaaggagtgccccggcgtggtgtcctgcgccgacatcgtcgcgctcgccgcccgcgactccgtcggcgtcatcggcggtccgttctggagcgtgccgacggggaggcgcgacggcaccgtgtccatcaagcaggaggcgctggaccagatccccgcgcccaccatgaacttcacccaactcctccagtccttccagaacaagagcctcaacctcgccgacctcgtctggctctcaggggctcacacgatcggcatctcccaatgcaactccttcagcgagcgcctgtacaacttcacggggcgcggcgggcccgacgacgcggacccgtcgctggacccgctgtacgccgcgaagttgcggctcaagtgcaagacgctgacggacaacacgacgatcgtggagatggaccccggcagcttccgcaccttcgacctgagctactaccgcggcgtgctcaagcggcggggcctgttccagtccgacgccgcgctcatcaccgacgccgcctccaaggccgacatcctcagcgtgatcaacgcgccgcccgaggtgttcttccaggtcttcgcgggctccatggtcaagatgggcgccatcgaggtcaagaccggctccgagggcgagatcaggaagcactgcgccctcgtcaacaagcactaggcggcggaattcatgcgggagatggctccattgctcgcaaaaaatccttgtgagacacacaacatgctctgcatctgcaggcgttgtcgtcaccttggtggacgtagtacatcggtgcatggattatctgttgtttaatttgtacgttcagttcattctgtttcttgtattcttttggttcctttcctcttgtttattcatggatgatgaggtgtttctgttttattctctggttcagctgtaaccatgtaacatgtaaggtgcgcgttttgtcctcgtgatctctgcaactgtatttattttaatggatggtatacatggagatatgatcatgataataacaataaggtgattacaatc

SEQ ID NO: 30487 - DNA, 575 bp, Zea mays
  Clone ID: UC-ZMFLB73026E02_FLI
agtttgtgctatgaagcttattaactgtcctttctaccatgttggatgtgaaacagcctttccacaaggtaatcttgagaaccactgttcgaagctacttcaaacgcatatgttgtatgttctccaagcaagtacaagacaaaatgctgctgttaatgatatgaatcaacgattacaacttcttgagaaggctcagtcacttaacgaaatctctggggctttagatgttaggtcgctcactctgataataaaggagcaagaagcaaagatcaaggatcttgagagcggtatcaaagcacaagaagcaaaggtgaagaaacttgagaacgagcttaggtcgaagaatgcacgataacttcctacacaaaccagagtggcatactttaggacctgtaaataatcagtagcactgacatatatttggaaattatgtttttttgttcatataaaaagtatagagaattgcagggtttagacttcagaatatgaacttctcttgggttatcttttaagttgatgtaattgatgttttgatatttttatatgatatattgattgcttggattattatgggg

SEQ ID NO: 30488 - DNA, 1147 bp, Zea mays
  Clone ID: UC-ZMFLB73026H07_FLI
cgaccctcccccgcctctatataggccatgggtggcgcactcggtgccgggcatcagctgcgctgctcaccaggaaggccatctcatccatccttcattgtattgtagtggcatcaccaggaacagcccagccgcaagaagacagacgacagcagcgagtggggatcggaagaaagaggaagcggagacgaaggtgagagagagaggcaaaagggcagccatgacgatgaagcagtcgaggttcaagaggatctgcgtcttctgtggcagcagccaggggaagaaggcgagctaccatgacgccgccgttgagctcggcaaccagctggttgcccggagcatcgacctggtgtacggcggcggcagcatcgggctcatgggcctcgtctcccaggccgtctacggcggcggacggcacgtcatcggggtcattcccaagacgctcatgacaccagagataagcggcgagacagtcggggaggtgcgggcggtggccgacatgcaccagaggaaggcggagatggcgcggcagtccgacgcattcgtcgccctgcctggagggtatggcacgctggaggagctgctggaggtcatcacgtgggcgcagctgggcatccaccacaagccggtcgggctgctgaacgtggacggctactacaactcgctgctgaccttcatcgacaaggccgtggaggagggcttcatcaaccccagcgcccgccgcatcatcgtgctcgcgcccaccgcgcaggagctcatggacaagctcgaggagtacgagccttaccacgacagggtggcgtccacgctcaactgggagaccacgatggaccacctggcctactgacgcccacgctgccagagccgccagcaggcgactgggacgacatctctgatccatcgatgccattcaggaaacaagcttttagcttgccgtcagattggggcttttgtttcgtttttaactgcatgcagatcggttttatttggagtgccggagggagagagaaaaaaaaaacaggttgattattcggttcgcgtagcaggagtacgtagtacgtgcttgttttgtgtatatggtgccttgtgtttgcttcccaccaacggggatgattgatggcttgcagtgttgtctctgtaccagttc

SEQ ID NO: 30489 - DNA, 1125 bp, Zea mays
  Clone ID: UC-ZMFLB73026H10_FLI
ggtttaattaacttaccagcttggtccatttgttgtgctagagtgagatatttgatttttatcttttatgttacagggccgtgatggttttgttatgggggaaggggctggtgtcctcgtattggaagaacttgagcacgccaaggttttaaacatgcaatttcagttgcccctctttatagatctttcagctgcttgtgtccagttcaatggcttatgattatgtttaaacattactgcctcctgatatctgtgcaccttctccaggaaagaggtgcaacaatatatgctgaatttcttggtggaagcttcacatgtgatgcttaccacatgactgagccacatcctgaaggaagagggattactctctgcatagaaaaggcactagctgatgcaggggtagcaagggaagaaatcaactacgtgaatgcccatgcaacttctacacaagcaggtgacctgaaggagtatgaggctattgtgcgctgttttcgccagaaccctcaactgagggtgaactcgaccaaatcaatgactgggcatcttataggagcagctggtggaatagaagcagttgcttctatacaagctataagaactggttgggtccatccaaatttgaatttagaaaatcctgaggacactgtggatgtgggcatcttggtaggatcacagaaggagagatgtgaggtgaaggtggcgttatccaactcattcggcttcggtgggcacaactcatcaattctctttgccccctttaaggaactgccatcttcctcatcgtccaaatagattcatatatctggatctccacatagaagacaagtggactctgcaacttcctcggtgccatagatattacagggaggtccaaactgagcgtatctgagcgaacaaaacatcagcccccctacatgtttcatctatatcacgaagttgcagatatgtggtaactatcaaaaggatttaccgtacctgggccagtgttttcgccttcaccatacctgcccattgtcagtactatttcctagatttggagtagtcccgtagctaatcctcttccctgcggaggtgatgggattttatgttgtattgatgttgtcaacaatgtcgttcttagccatg

SEQ ID NO: 30490 - DNA, 633 bp, Zea mays
  Clone ID: UC-ZMFLB73027B02_FLI
tggtagagagcctctgacagacaaggtatcaactcttgcacacagatttccagctctgaagacattcaaaagctgtgatcttctgccatcgagctggatgtctgttgcatgattgtgaccctcctacgccagcatgccctggctttgggggaattaaccgcggcacgactgcagctgggaaactatctttgcctatctttgggctggcaccttacaaattacgtgcctccatttggacatctgacaaaactcaagaacgggacctcgtcacctctctgatgcaggaggctgacagctggctccgcagaatacaagtagaccatccggatttccggtttttcgtatcccatttcagtacaacgtggagatgacccgtggctgtaaatggttcatttagtatgaatatggcatagagacacctgagtgcccttttgtaacgggggggaatgtatgagttataagcctgcgtgcataactttttctcttgtctccagtaagctgtatcttttgtaggtttgttttgttgtggggtgaaagtaaagatggatggtggaaaaagcaaaattggaggcattgtggaactgaagtgaaatatggggaaaaaagaataaagatttccagttattagagttg

SEQ ID NO: 30491 - DNA, 1228 bp, Zea mays
  Clone ID: UC-ZMFLB73027B03_FLI
gctcgacaccaccgccgccgcctgcccggagaacggccgccccgcgcgcccgttcccgcagacgtcccgcttcccgtgccccgccggcgccgggtgcatgaaccagccgctgctgttccacaaccgcaccgcgctggacgacgccggccgccggctccgcggcggcctgttcgggacctacgacctcgacgccgccgcgggtctcggcgccggcgacgtctccttctactccgtgacgtgggagaaggatgtggcggcgagcggtcgcggcggcgggtgggcattccaccacaagctgtgcacgtccaccaagtacccgtggctgatgctgtacctacggtccgacgccaccaggggcttctccggcgggtaccactacgacaccagaggcatgaccaagacagtgccggagtctccggacttcaaggtgcggctgaccctggacgtgaagcagggcggcgggcgcaacagccagttctacctgatggacatgggcagctgctggaagaacgacgggcgcgcctgcgacggcgacacggcgacggacgtgacgcggtacagcgagatgatcatcaacccggccacgccggcgtggtgctcgccgtcgcggatcgaccagtgcccgccatggcacaccttccggaacggcagccgcgtgcaccgccgcgacggagcccgcttcccctacggcgcctaccacgtgtactgctcccccgggaacgcggcgcgcgcggagcagcccaccacctactgcgacgcctacagcaacccgcaggcgcaggagatcctgcagctgctgccgcaccccgtgtggggagagttcggctacccgacggccaggggacaggggtgggtcggcgaccccagggcgtgggacctcgacgtcggcgccatgtcccaggcgctctacttctaccaggaccccggcacgccgccggccaggaggcggtggacgtcgctcgacgtcggcacggagatatacgtcagcgacagggccgaggaggcggagtggacgctcagtggcttcgacatccttgtgccggacaagtgtatcaagtcacagcaacgggccagcaacagctgctggtagacagacactttaatgtcactgtacgttacgctgagtagcatagcaggccaaagtgttcttcgtactagaagaggtggtgtaggatgactatattactcatgttagtactaactaactataaaaaataaaatgatgatt

SEQ ID NO: 30492 - DNA, 1362 bp, Zea mays
  Clone ID: UC-ZMFLB73027D05_FLI
atcaaagtgtagattccggcacaacaatgggcgctggtataatggatgcattataggctttgaaggttcaggcgatgcaaggatctcatttctgacacctacatctgaaaatatgtcgatatgcaagttcttcctacagcagcgatgtcgatttggtagtaactgccgcatgtctcatggtattgtaatgccttctaaagccttgaagcgattcactccaactaggtgggagcagtccttggtaggctccagcatactggcaacttctgggtataactctggcctttggaggagagcagagcttgagtcatgggatgataatctgaagattggccaagttgtttttcaagatgatgggagttctgcgagtctgccaagtgattctctttctgtctcggaatacgctgacatgagtgacgaagatgaaggaagcttaagtgacgaagaatctgagttcagtgacgatgctgatcaagaggacggaagtgttcatcagggtcttggccttttagaattcacaaattttagtggcattcagacagataccatgatcttcgcaaaatgggagcaccacaccaggggtgttgcctccaaaatgatggcaaaaatgggttaccgagaggggatggggcttggtgtgtctggccaaggcatgcttgatccaattccagttaaggtactacccccaaagcaatcacttgatcatgcacttgcttcaagcgaggctgacggaggcagtgggaaaaagcgcagtaggggtgggaaaaggaagcgtgagaagaagtttgcagaacaggccagggctgctaaagctgaagaagctgagagatctgtctttaattttatcaacagccatctagtaagccaagaaggttcgaccaccaaagttagaaagggttcatcagttgagaccaatggactcgctaagaaggaagacagaagatccttggttgcatacggtgaggaagtgaaggagctgaggattcgagttgagaaactggaagagatgaagaaccgtaactgcaaagacaaggcattctttgaagcagcttcaaggaaactggaagagactcggaaggcactcgctgatgctgaagctacccacgcttcagcgacgagtgcagttactagaaaggagaaagagaagaaatggttgaaattctgatgtcaatttcatgtgtgccaacgcttctctgtctgtgttctgacaagaacgtggcatgatgtatgcaacttacaattgttccccatgtcagctcttagccttctacacttgtatgtctatcaagttttagatctgttgtagaagcagtaacactaataattattcgaaggatgtggtatttagatgagttttcggct

SEQ ID NO: 30493 - DNA, 1509 bp, Zea mays
  Clone ID: UC-ZMFLB73027F10_FLI
gcgccgagaaaggatggcgtcgtggtcgtcgccctcagccgccgccaacgccgcctcgggcgcccgattcggccccttcccgagcggagggcagcggctcgcgccgtgtccgtcgctcgtccgcggaactcccgccccgacgctcgtcctcaggccccacccggacggccgtggccatggcctcctcgcgcacaccgcctcccctccctccttgcggtgccgcgccgtcgccgccgaggtcgggggcctcaacatcgccaacgacgtcacccagctcatcggcaacacaccaatggtgtatctcaacaacgtcgtcaagggctctgtcgccaatgtcgctgctaagctcgagattatggagccctgctgtagcgtcaaggacaggatagggtacagtatgataaatgatgctgaacagaagggcttgattactcctggaaagagtgttttggtggaagcaacaagtggaaacacaggcattggtcttgctttcattgctgcttccaaaggatataagctgatactaacaatgccttcatcaatgagcatggagagaagagtcctccttagagcttttggtgccgaacttgtccttactgatgctgcaaaagggatgaaaggggccttagataaggctacagagattttaaacaagacaccaaattcttacatgcttcaacagttcgataaccctgccaaccctcaggtacattatgagactactggtccagagatctgggaggattcaaaggggaaggtggatatattcattggtggaattggaacaggggggacaatatctggtgccggccgttttctcaaggagaaaaatcctggaattaaggttattggtattgagccttctgaaagtaacatactctccggtggaaaacctggtccacataagatccagggaatcggcgcaggatttgttccaaggaacttggatagcgatattcttgatgaagtaattgagatatcaagtgatgaagctgttgagacagcaaaacagttggctgttcaggaaggattactggttggaatctcctctggagcagccgccgctgctgccataaaggttgccaaaagaccagagaatgctggaaagctgatagtggttgtgtttccgagcttcggcgagaggtacctttcatctgtcctctatcagtccataagagaagaatgtgagaacatgcaacctgagccatgagggagccgtcactttaagcgggcatagtaaatgtttctgaaataagacgcgtagccagcatcagtttgctccacttggaatcatttggccatgctcactctatcctttcgctagcctctatgaccggacctaaactggtgtgtgagaaacatccacgactgtcctcccaactgctttcctaaagccaaacgataacactctcaataattgtctatacgattgaagctgatttgattggtaattgtaaacagcttgtctttggatctttgaagtcaaacaaagtcagttggttgaatcag

SEQ ID NO: 30494 - DNA, 1454 bp, Zea mays
  Clone ID: UC-ZMFLB73028A06_FLI
gtgcttttgtatgtctgctatttgtgctgctattttttttctattatgtgcactatgtctctttgtcatatacatatacagatgtgcaaactatatttttgcagaatcgtgctaggaatccaatgtctggtggctattctcagcagggatatcgccctcctcgtcctcagtcaaactggggcccgccttctgtgccaccccagcagcctggctatggttatatgcagcctggggcttatcctggggcaccgccacagtatggtgcacctcagcaaccttatggtagctaccccccaacatctggtggttatcagactggatgggatcagtctcaaaaccagcaatctcatacaactccccctggtactgggtatgattattatagtcagcagcagcaacctcagcaacaatctgcccctgggacagctgcttctactgatgccactagctacaattatggtcagccttcgacgtatgcttcacagggatatgattctacctacactcagcagagtggtgggcagcaagcatatggacatgatggctacactggttaccagacccaagggcagcagcagggctactctcagcagactggttatgatcagcagggttatggcacatctgcttatggatcagctgcaagctcgacccaggatgggtccaactatggtggtcctggaggggccagtcaggcatctccagggcagcaaacatcaaacccagctgctggaagccaacctggctataccagccaaccgcccactagtgctgcagcaacttacccacctcaaggttcagctccatctggatatggcgctccaccatcccagtctggctatggcacccaaccaccacagcaagccggatatggtcagggcgcttatgggcagccttctccacagggccagaaacctcctgcattgtcaccttatggacaggctccgcctcctggttctgctcaggctggttacgggcagtatggttacagccaacctgcttacggtgcaccaccagcttaccctggtgcacccattgcaagccaccagggctatggccagcagcagtcttatggccagcagcagtcttatggcgatgcttatggtagtgcaagctatgggcagcctccagcctactctactgaagcaacacctcctgctgcatcccaggatcactctgctgcccctgctgcggcccttggaacaacagcttcgacagctcctgaaaacagtgggggcgcccaaacatccgctgaaacttgagcttcagcagctaattgggaacaaacattttccaagaccctgccgtgtggtttcctccgcgctgttgcttaatataattacgcatctaatttagggtctacaactacaagttatttatttttctgcctgttgtttttgacaccatgactttctgtttccttgctatattgagtagtactttgcagttatttt

SEQ ID NO: 30495 - DNA, 748 bp, Zea mays
  Clone ID: UC-ZMFLB73028B10_FLI
ggagtataaaagagagacaagattcacctcacagtgccccccgaaagagataatcacaaagatcgaagaagctgcaaagccgcttggctttgatgttcagaagaaaaaatacaagatgcggatggagaacccgaaagcaggtagaaagggcaatctgaatgttgcaactgaggttttccaaatagccccatccctgcatgtagtcgagctcaagaaggcgaagggggacactctggagttccaaaagttctacagaagcctgtcgacccagctgaaggatgttgtgtggaagtgcgacggcgaggtggacggcaacagcgcggcagcatgaaagtgccctttgaactttccactggacggcgccggttttcctttgtacatagcttctctttcggatgatcccgtgtccattgcagagtcggttttgcaagcaagttctttggtttatttgtagtaagcccggtgaaacaaccgccctggaggctgttgtggatgagcttactggcgtgtttagttcgtttcatggtcgggaggttggatggaatggaaaccacaatcaaggctgtagtagtgtgtgtagtaacgaagtagatacatgcatcagatggtgtaagggagtaccagctgttagttcatggtttcaagcttagccccccttcaatttgttcgatgatgtattacttcacaataaacattattacttagatgtatgaggtgagcacacttggtcttttgtcctctttgtgct

SEQ ID NO: 30496 - DNA, 966 bp, Zea mays
  Clone ID: UC-ZMFLB73028B12_FLI
ctggtcagtgtgcctttgctccggaatggcagagttgtaaataagaactacgaactttgtgcgtatttatggttgttgtatttatgattgttccctaaaccctaaaccaatcaatcaagcaaatagagttgtaagctatatttagctaggattttaaataagcaatcaaacaaataaggcagccgttgccactatccatttctcatctctcccagatccgatcgcggccactgccatggcagaagcagccggcggcggacccctgctccccgaggaactcgttatctgggagatcctgacgcgtctgccggcgaagcccctcctccggtgccgcgccgtctgcctctcctggcgccgccgactcacctccgacgctaagttcctcctcgcccaccaccgtcgccagccgtcgctcccgctcctcacccaaggggacaggagcaccgaggacaggaggatcgacgccctggactaccgcaccggcgagcggctccccgtcgcgcggacgacgggccggaccgccgccaacgccgacgacctgaacgtgctcgcttcctgcgacggcctcctcgtcctcatcgccaacggcggcctccacatctgcaacccggcgacccgccagcgcgcgccgctcgcccttctccacggcgcctcctgcatctccgcgctttacccttaccgcccgtccgggtcgtaccgggtggcgggtgctctgctgcttcgagagagccgaggacggccacgccgtgtaccacgtgcacaccgtcgggtcgcgcgagctcaggtgcgtcggagaacctcccgcgctgtgggcgtccggagacgtggcgatggcgatgccgatgatgttgtgctttcacccgcacgtcgtggcaggcagcaggatctactggcagccggtaaagctgcccggcggcaacgggaaggtcaacaacatgctcgcgttcgatacagtgaccgagtcct

SEQ ID NO: 30497 - DNA, 1054 bp, Zea mays
  Clone ID: UC-ZMFLB73028C01_FLI
caccacgcttacggatgtatccgtctccccctccccacctattttatggtgtgagcgtcagccgtcagcccgtcagcactcaccaagatccagcatacacttatcccatccactagctaagcgcgccatggcaaagttcgctcttggtcaccaccgcgaggcctccgacgccggctgcgtccgtgccgtcctcgccgagttcatcctcaccttcctcttcgtcttcgccggcgttggctccgccatggcaacaggtagataccgtatatagtataatatataacacatgcgccgtggcaatcatgcatgcacgcacgcagggaagctggccggcggcggcggggacacggtggtgggcctgacggcggtggcgctggcgcacacgctggtggtggccgtcatggtgtcagcggggctgcacgtctccggcggccacatcaacccggccgtgacgctgggcctcgccgccacgggccgcatcacgctgttccgctccgcgctctacgtggccgcccagctgctcggctccacgctcgcctgcctcctcctcgctttcctcgcagttgccgacagcggcgtgcccgtgcacgcgctgggcaccggcgtcggcgcgctccggggcgtgctcatggaggccgtgctcaccttctcgctgctcttcgcggtctacgccaccgtcgtcgacccgcgccgcgccgtcggcggcatgggcccgctgctggtgggcctggtcgtcggcgccaacgtgctcgccggcgggcccttctccggcgcgtccatgaaccccgcgcgctccttcggccccgcgctcgtggctggggtgtgggccgaccactgggtctactgggtcgggcctcttatcggtgggccgctcgctgggctggtctatgacggcctcttcatggcccagggcggacacgaaccgcttcccagggatgacaccgacttctaggcagtaggtgtgtgttctcctgaataatttgaattgaaaacacatgtattgaagcctctaatgtttcggtttcgattcaaatggaatggaagcagcagtatc

SEQ ID NO: 30498 - DNA, 1644 bp, Zea mays
  Clone ID: UC-ZMFLB73028C07_FLI
cgccactctcacgtctcgcccatcccgccactgctgctctccagagtccaggcgacccaggctgcgcggtcgctcggtgttgttagtcccgaccgccgccggccatggcatccaacggcatcgccccaagagatgtatgtgttgttggcgttgcacgcacccctttgggtggtttccttggtgccttgtcttccttgcccgcaacaaagcttggttctatagcaattgaagctgctctgaaaagagcaaatgtggatccggccctcgtgcaggaggtctttttcggaaacgtcttgagtgctaatttgggacaagctcctgcaaggcaagccgctctgggtgcagggataccaaacactgttgtttgcaccactgttaacaaagtctgcgcatctggcatgaaagctactatgttcgccgcacagtcaattcagctgggtatcaatgatattgttgtggcaggtggcatggaaagcatgtccaatgccccaaagtacattgctgaagctaggagagggtctcgttttggacatgacacacttgttgatgccatgcttaaggatggactttgggatgtatacaatgactgtgccatgggaatgtgtgccgaactttgtgctgacaatcatgccctcacaagagaagaccaggatgcttttgctatccaaagcaaccagcgtggaattgctgctcgtgacagtggtgcttttgcatgggagattgttccgattgaagttcctgttgggagaggaaaaccacctgtacttattgagaaagatgaaagcctggataagtttgacccagcaaaactgaagaaacttcgcccaagtttcaaggagaatggtggtaccgttacagctggaaatgcttctagtataagtgatggggcggctgcattagttttggtgagtgggcagaaggctcaagagcttggcctgcaagtccttgcaaggatcagaggatatgcagatgcggctcaagctccggaactttttacaaccaccccagcacttgcgataccaaaggctatatcaaatgctggattagagtcatcccatgttgatttttttgagattaatgaagcattttctgctgtcgcacttgcaaatcaaaagcttcttgggattccttcagaaaagattaatgtccatggaggagctgtgtctctagggcatcctcttgggtgcagcggtgctcgcattttggtcacccttcttggtgtccttagggaaaagggcggcaagatcggtgttgctggtgtctgcaacggcggaggtggagcatcagctcttgttctcgaactcgcataagaagcattggcttgaagcactggatatgtagttaattcagtcgcatgcatctatgcatgatgaagtattgaaaaaaaaagaccctacgatatccatgccgggtgccactgtctgcttaattcaacagaatatgattgtgcaatcattctgccgtgccgcttttgctgaccttaggaacacggcgtcggaggcgcaatcattctggcaattagcaccagctagctccctgaggggcgaccttgtactctctacattgatgtatgtgtagtgctggacattcttaagttaattcggcaataaagtgtgttgtgcttctgctacctgcatcttagat

SEQ ID NO: 30499 - DNA, 2169 bp, Zea mays
  Clone ID: UC-ZMFLB73028C10_FLI
gtcaaggccacgagccacgacgacgagccggccgaggagcgccacatccgcgagatcctccacctcacatccggatcccgcgcccacgtcgctgctgccgtggcaggctgctcccgcaggctctcccgcacccgcgactacgtggtcgcgctcaagtcgctcatgctcgtgcaccgcctcctggccgatggcgacccgtccttccaccgcgagctcctccacgccacacgccggggcacccgcctgctcaacctctccgattttcgggacgaggcgcactctggatcctgggatcactctgcctttgtgcgcacctacgcgctctaccttgaccagcgcctcgagttcttcctccatgagcgcaagcaggggtcaaatgctggcagcagcagcagcaccaatggtccatcaccgcgggaccgtgaccgctggggttcacctgatccctatggccgccgctctccctcctactcgtcaccccctgggtatggcggatatgatgattaccgcgagagaaatggtggaaacaatgatgacaagagaccgcccaccccagtgagagatatgaagccagagcaggtccttgctcgtatgcaccacctacagcagctgcttgacaggttccttgcttgccgtcccaccggtggggcgaagcacagcaggatggtgctggttgcgctgtatcagattgtgagggagagcttccagctctacgccgatatctgcgaggtgctggcggtgctgctggacaggttctttgacatggagtatgctgaatgcgtgaaggcttttgaggcttatgctagtgctgcaaagcagatcgatgagctctgtgcattctatgcatggtgtaaagataccggagttgcaaggtcatctgagtacccagaggtgcagcgggtcaccgataagttgctggagacgctggaagaatttatgagggaccgggcaaagaggcccaagagcccatcaccggagcctgaacctgagcctgtcaaggaagaacctgagccagatatgaacagcatcaaggcgcttccagcaccagaagattataaggagcctgaacctgagaaggtggaggaagaggtgaagccagagccacccctgcagccacagggtgacttggtggatctcagagaagatactgttagtgcagatgagcaaggtaacaggcttgctctagctctcttccaggggccaccagctgctggtggaagcaacggttcatgggaggctttcccttcaaatggtggcaacgaggtgacttcggcctggcagaaccctgcagctgaacctgggaaggctgattgggagcttgcccttgtagagacagcaagcaacttgtccaatcagaagccagcaatgtcaggtggcatggacccgctgctgctgaatggtatgtatgaccagggtgttgtgcgccagcatgtcggtgcacaggtgaccaccgggagtgccagcagtgtcgcgctgcctgctcctggacagaagactcagatgcttgctctgcccgcaccggatggttcgatgcagactgttggtggtgatcccttcgcggcgtcccttgccgtgccaccgccgtcctatgtgcagatggcagatttggagaagaagcaacagctcttgacgcaggagcaaattatgtggcagcagtaccagagagacggcatgcaagggcaatcgagcctgaacaggctcgaccgcgcccccaacccggccatgccctacgggatgcccatggcatacaacacgaaccccatgccaatggcttacaccgggaacactgggtattactaccctacttactgaggaggcctgttctttaatcatccttacagttgctgtgaatttttgttctgtgttgtgatcttccccgccctgcggttgtgtccagcatcagctgttgttcccctgtccctggatcaaaccttttggtctgatatatgtaatgtaattttctttgtttggaaccaaatgcagcatccgagggtggtggctatagttgattacataatctcatgttgatctttacactgtttttactgatcctccgcatgttatcacttctcttcacacgattttttgtcacctgcttgtagatgttcctgagagagtggtactgagtgtctctcacctatgaatacatgatctacttgctgtggttag

SEQ ID NO: 30500 - DNA, 747 bp, Zea mays
  Clone ID: UC-ZMFLB73028D05_FLI
cacacacagacaagtggtttccaaagccaagtgtgtgtactagcaaccagctagctcgggcggcagcaggcagccatcatgtcggaggagaagcaccaccacttcttcaaccaccacaagaaggacgaggagcagcccgccggcgagtacgggtactccgagaccgaggtggtcaccgccaccggcgagggcgagtacgagaggtacaagaaggaggagaaggagcacaagcacaagcagcacctcggcgaggccggcgccatcgccgccggcgccttcgcactctacgagaagcacgaggcgaagaaggaccccgagcacgcgcacaggcacaagatcacggaggaggtcgctgccgcggcggccgtcggcgccggcggctacgtattccacgagcaccacgagaagaagaaggaccacaaggacgccgaggaggccagcggcgagaagaagcaccaccacctcttcggctgaccgtagtaccggccggcgcgcgaccgagctagctagctccggcgcacacaaccacacacctgtttaattctgtactgcatgcgtgtgtaatttgatggttcacaataatgagtccctctccggaccttggtagctgcttgcttgtggtgagtgagagtgtgagactgagggagaagaggtggtgggcgtggggctacgtcgagagaggcgtgttcctgtaatcctgtactcgcttcgttttctctgcatgcgtctataattgtgttcaataat

SEQ ID NO: 30501 - DNA, 736 bp, Zea mays
  Clone ID: UC-ZMFLB73028D07_FLI
tgcggagagaccgaagaagcgggagagatggctcgtaccaagcagactgctcgcaagtccacgggagggaaggctcccaggaagcagcttgccaccaaggctgcccgtaagtctgcccccaccactggtggagtgaagaagcctcaccgctaccgccctggaactgttgccctccgtgagatccgcaagtatcagaagagcactgagctgctgatcaggaagctgcccttccagaggctcgtcagggaaattgcacaggacttcaaaactgatttgcgtttccagagccatgcggtgcttgccctccaggaggctgctgaggcataccttgttggcctgtttgaggacaccaacctgtgcgccatccatgctaagcgtgtgaccatcatgccaaaggacattcagctggcaaggaggatccgcggcgagagggcctaatcgccacctcaaacatcgtgacaaaaacatgaagtcctggggttattgttaatctggtgccattgtaaggacatatgagtagggtttgttttgtggatcgcaagtttctcttctgctactgttgctgctacctttgctggtgttattgctagggtcgaatacttaagttaactatgcgctgacagtctggactagcagtgttatgtgcgctgctggaccttgcgcgcaatgctgtggccgatttgttcgttaatgtcaagaattgtgttacagtgcgtgtatatatgtgtgtcgccgc

SEQ ID NO: 30502 - DNA, 815 bp, Zea mays
  Clone ID: UC-ZMFLB73028E01_FLI
attccactccgacattcacgtgcagctgtcgggagcaggcaatggcgccggatctaagcgaactcgccgccgccgctccagcccgtggcgcctacctcgccggcgtcggtgtcgcggtcctcctcgctgcctccttcctcccagtagccgagtcgtcctgcgtgcgagataactcattggtgagagacataagccaaatgccgcaaagcagctatgggattgaaggattgtcacatataacagttgctggtgcgctcaatcatgggatgaaggaggtggaagtgtggcttcagacaataagtccaggtcaaaggacgccaatccacaggcattcctgtgaagaagttttcactgtcctcaaagggaagggtacgctcttgatgggatcaagctcactaaagtacccagggcagccacaggaaattcctttctttcagaataccacattttcaatccctgtaaatgatccacaccaggtttggaattctgacgagcacgaagatttgcaagttcttgtgatcatatcgagaccgcctgctaagatatttttatatgatgattggagcatgcctcatacagccgcggtactgaaattccccttcgtctgggatgaggactgcttcgaagcagcaaaagacgaactctaggtcacaagtgtttcctgcaatttatctgcttcatccatgatcctgctggtgctggactactacaattctcagcactagttgtaataaagccagtgcgcttttcatgtataattctgtattgtggctcgcgaaaataaaatttggcaacggtttatgaacttatgcgct

SEQ ID NO: 30503 - DNA, 859 bp, Zea mays
  Clone ID: UC-ZMFLB73028E02_FLI
gctagcatatatagcccttgactatgagcaagagttggaaactgccaagaacagctcttcagttgaaaagagctatgagctacctgatggacaagtaatcaccattggtgcagagagattcaggtgccctgaggtcctcttccagccgtcgatgattggtatggaggctgctggaatccatgagacaacatacaattcaatcatgaagtgtgacgtggatatcaggaaggacctctatggtaacattgtgctcagtggtggttcgactatgttcccgggtatcgctgatcgtatgagcaaggagatcacttcccttgcaccaagcagcatgaagatcaaggtcgttgcaccgcctgagaggaagtacagtgtctggataggagggtcgatcctagcctcgctcagcactttccaacagatgtggatatcgaaggaggagtacgacgagtctggcccggcaattgttcaccggaagtgcttctagggtttcacaagttcctcgtcgttacctagtctcaaattatgtcccctccatttctcgagatatgtgtggcagatttgcatgatacgtttgtttgtttccatcggacctgaagtcttcttggggataggctcccccctttgtatgttgtggctccaatccatgtgcgagcacgctgtgtctgtcgtgacacctggttcgtgagatgggttgtcaaacttgattggtttgttgtgcgtggctggaagagctgatagttatatatttggcttggactgtgccgcttgtatgtatctgaattctgaaagcgttgtaatctgagcatccgtgcaaagtatgaatggcccttttatatgggctggattttccggtttctat

SEQ ID NO: 30504 - DNA, 1443 bp, Zea mays
  Clone ID: UC-ZMFLB73028E05_FLI
gtcaaagagagaaccagcacacagcagagtagcacctgatcgatcgatctcctactactagctcgttcgctttcacaaccagggagcagcaatggcatctgctgctactactctcctcaagtcgtcattcctccccaagaaggctgaatggggatccaagcaccagctggttgccgctcatcccaggccggcgaccgtcgtcgtctccatggttgcccgcgctagcgcctacgctgacgagcttgtccagaccgcgtttgcaattctcttaattatatttctgcagaaaaccatcgcgtcgccgggaaggggcatcctcgccatggacgagtcgaacgcgacctgcgggaagaggctcgactccatcggcctcgagaacaccgaggccaaccgccaggcctacaggaccctcctcgtcagcgctccaggcctgggacagtacatctctggtgccatcctcttcgaggagaccctctaccagtcgaccgtcgacggcaagaagatcgtcgacgtgcttagtgagcagggaatcgtgcctggtatcaaggtcgacaagggtcttgtgccactcgctggctccaacaacgagtcatggtgccaaggtctcgatggccttgcttcacgtgaggcagcctactaccaggccggtgcccgcttcgccaaatggcgcactgttgtcagcatccccaacggtccatctcaactagccgtgaaggaagctgcctggggcctcgcccgctacgccgccatctcacaggaaaatggtctggtgccgatcgtggagcccgagatccttctggatggcgagcacggcatcgagaggaccttcgaggtggcgcagaaggtgtgggcggagaccttcttctacatggccgagaacagcgtgatgttcgagggcatcctgctgaagcccagcatggtgacccctggtgccgagtgcgaggagaaggccaccccggagcaagtagccgagtacaccctcaggctcctgcgcacaaggatccctcccgccgtgccgggcatcatgttcctgtccggcgggcagtctgaggtggaggcgacccagaacctgaacgccatgaaccagagccccaacccgtggcacgtgtccttctcctacgccagggcgctgcagaacacctgcctcaagacgtggggcggcaggcccgagaacgtcaaggcggcgcaggacgcgctgctgctgcgcgccaaggccaactccctggcgcagctcggcaagtacaccggcgatggcgaggccgcggcggcaaaggagggcatgttcgtcaagaactacagctactaattaaagacgacggcgatacaccactcctgctgctagtacgttcctcgatcgggggcggtgccgttacaggtttcagctggaaaacatacactactgcaaattttactgctaccctgagtgaaaacatggaacgggtc

SEQ ID NO: 30505 - DNA, 1956 bp, Zea mays
  Clone ID: UC-ZMFLB73028F04_FLI
catagtttcattgctaaaatctagatcatcataccagttattctgcagtccaggtagtaccattgtatcattgcactggattaaatcgatgctattcagtcctatatccccgaaggagacgccttgaagttgatagccggacagttcatcaggtagacaagtcaaatcagtgctgcataatatacttgcctcttctgaagtaagcaaaatattttagtataagacaggataattatcgatcataaatacatatgcatgcttataatataatttcagttgatagtagcgattgtttgcaatagattttatcgaaaaacagaccattcagtagttatagattctctaatatgtcagccaaatgaactaagaattctgtccagatgaaaataaaagattaaagatgttctcaaagacaaataaaatatgttcgttgggtcattcactgaaaagttttctgctcccaaagccagctatggtgtgacaaaaaatatagcaagtaaatagactccactctgcagcgctataaaatcagaagacaagatgatacgacccaacatgtaatcttgtttgttgcaggtctttactacgactgcaactttgaagtttggtattcatataatcaataggctcaacagtatgtcccttgtaaatggtaggatcagagtgcttctgctatgtcatcttcgacacttcctggtgtttgcaacaaacaaagtgcttctatgctgtgcagttcttgtttcttacaagtggtgatggtggtagtggtctggtctctatgtgagcattggtctagagtatcgtgaagctatgcggctcttctttcatgttcaagatgaagttcatgaagcttggatcgaatctggatacctttaatgatgatggcaatgaaatcagatgatcgatcgcttcttttaatttggcttttaccttgtttctttaatgttgcctttgaatccttgtgttgttcttagaatctgactgatttttatttatttcaattataaatggtatgatctgactaagaaattcctagacgcattctccctgattgctgttactgttgatggatactagatgattatataatatgtggtaaagttttcccaataagctcagttgtgcagatcgtttgtttcttcttcttagttagagtgaaattatttactttatgaataactagatccatataggatatagtgatgttatttaggatggagggattcttatcgctctttggtgcttctccctataatcagtgctgaataactagatccatagtgctgataaatttttggtgcttctccctataatcagtaatagcatactaaaagtacctttgaactagaaaccttatgatattatttttccacaataaattcttggtgctactccctgtatatcagaggttataatcactcctgagcacaacgaagaagggatttacacgatcagattctacattcaggtatttattgtttaaaccatttgaccagtaagtttgaggctgcttctcatgaaacatttcctataagctttatgaaacatctgttgataaaactttgtttcttaacatgtccagcgaagctttctttcttaacatgttgctattgtgtccagcgaagatgcaggctatctcctgctaatgttgctgccgaagaaatgaacttcttacttttatgtagaggcaacacttactaatatgatgctcgaatttgcaatgaatgatgtgtgtgtgtgctattttcggaccactggtatttaaaactgacaaccatgaaattttggtacacatgaatcccaagcaatttgtgtaacatatggctaaacaaaacattgatgcttgatttgtgatccagctgattttgatgtcaatttattatacatgtatatatctttgcaataacttcttatgtatatggttatattgcaaatactattgtctctttactgtct

SEQ ID NO: 30506 - DNA, 2659 bp, Zea mays
  Clone ID: UC-ZMFLB73028F05_FLI
attaaatagacataatatgtaatggtctactagttatatgtccgtgcattgcttcgtttatatatatatatatagtttatctattaagagccctgggctctatataactgtagagagccccagcccacgtccgatcactttttacgcaagcgaacagatttagcgtaaacggaaacccattttagcgtaaacagagtaacaaccgcgagccctacatgtttacgttattccattcttccgtttatacataatagtgatttagcataactacttcagccgacccacgttccagaaataaaggaatgggcccactaccccacttcccacgcggtcaaacacttctataccctaacccccgcgcggtcaaccatcctggccgactcgccgcgtttcttcagcggtcgcctgggcgattcttgttcatccgccgccgccagcccgtttcgccgtcctccaccgccgcacgccctcaacattaatcgtcgccgccgttgacatcatcgtcgagccgctgccgttgtcaatcttgcgcgccccgcgtcacattggctcacgtccgcggtcgctatgtcgtccggattccaagtgtgaatcgccttcatttgtctccgcgcgaactcaaccctaatcggcgccgccgttgacagtgtcgtcgagccggccgctgctgtcaatcctccgccaccgcgtcctataggctgctgtttcaataatgcggaaggttgatcgacccccaaccaattcgaagtgtttaatcattgagtcaagtcaagaatgtttcagtgttgacattccatgctcgactgacatggcagaccctacaaatacgccttctgatggtgatcctccgcagcatagaaagacaagtgttgcagctgctgctaaaaacattgctatgcctaatgtggatgatgatgatgactttgagccacccaaaaagaagtgcaatatctcaatggatgccccaaataagacgcagctgtattatttggatcatttgcatcatgctgctgctccaaacaacaaaaatggcactccacgcataaagtattttaataagaatattataagggcgttgtcaatggccgataagcggaagcctcgccagggtggtgaaccatttggtgtttgcccttttcgtagcagcagtgagacatgttacgtctcaaaatcgccaactacttgccagattgagtttcctatgaggccagaaacttttgatgaagacccaaatcaacatgatcgacttcccaatataatcatccaactccctcttatgcaagacttgatggcaaataagattcagatgcttcctgtacatcaacgccagaagttccaagctacgttgattgattatgacttagaggttggcaaaatatttgcctctatcaagcaatgtttgaatactattggtacaaagcagtccaatctagccgctacatttggagaattgattgatgaggttcttcgggccgatgaatctgttacaccaaatactgtcagacagtggtaggtggcacagttgaaaatgattctggaccagtatttgacaagactcctattgggagtgtttctgcaccaggtctcttcttatctgaattagaatgtgctcgcgctcttcgggcatacttgtgttctaggttcattgaattggacagaaatataattgactttggtgaacatcgcgccaattgttgtgacatacaacaatcttttgctgatggcgcatgtctcgacaacgtgtttatgcaatgtgtcattgagtgtgtccgcgatgactggtctaaacatattcctccactcaatgctcaccagctcattctagatgttaatgttggggctatattgaactttgaggagcaggagcaacatagtaagtctcctcgtccatttgacccttcagttttggagagttacctattgaagacactgccttctttcaagcagctggatgactacaaatcaataatggtacccatgctacgatctggacattggacattgtatgttgttaatcttcagattggacgcatacatgtgttagattccaacccttatggaccagagatgggtgggactatctggaaaaattaccattgtatacctatggatttgggtgataggaaggtttcatgggccatgttaatgatgagtaggctcaatctagctattcaaaatgctcgaccaagatcagctctccctgcttttttgaagtaccctattgaactcatgaataactgcccaacaatgaaattggggtctaatgattgtggattctttgtcatgagatatatgcagaactacgactacatggttggagctatgaatgcagtcattgatccggataattcagaggacattcgctctcttgtactgcattacctaatattccatcgactaaatagaaacagcttcgtggtctcccatctggacagattcaagttctctcagtagtagcctagtatagtttactatcttaatattagtatgaacatcatggtctgatggcttttggtggcttcaagttatctcagttctagcttagtttagggtagtgtcactgaatggtgttcatgtacatattggtatgttggcttatgttaggattcagataatacttatgtccatatgcagctcttagcaaactcttatttatatc

SEQ ID NO: 30507 - DNA, 1455 bp, Zea mays
  Clone ID: UC-ZMFLB73028G03_FLI
cctagtataaagtgacagtagcgggggagaagggaaccgaaaccaagcaacccaatccaaaccagacaagcaaggaatcccccgatggctcatcgcgttctcctcctcctctctctcgcgtcggccgccgcggttgccgccgccgtcgacgcggaggacccgctgatccggcaggtggttcccggtggagatgacaacgatctggagctgaacgcggagtcccacttcctgagcttcgtgcagcggttcggcaagtcctacaaggacgccgacgagcacgcgtaccggctgtccgttttcaaggccaacctgcgccgcgcgcgccggcaccagctgctggacccgtcggcggagcacggcgtcactaagttctccgacctcacgccggcagagttccgccggacctacctcggcctccgcaagtcccggcgcgctctcctcagagaactcggggagtcggcgcacgaggcgcccgtgctccccaccgatggtctccccgacgatttcgactggagggaccacggcgccgtcggccccgtcaagaaccagggttcgtgcgggtcgtgctggtcgttcagcgcgtctggagcgctggagggtgcgcactacctcgcaactggcaagctggaggtgctttcggagcagcagttcgtcgactgtgaccacgagtgtgattcatcggagcctgattcatgtgattcgggttgcaatggtgggctaatgacgacggcattcagttatctccagaaggccggtggccttgagagtgagaaggattacccttacactgggagtgatggcaaatgcaagtttgacaagtccaagattgttgcttcagttcagaacttcagtgttgtgtctgtggacgaggctcaaatttctgctaacctcatcaaacatgggccattggcaatcggcatcaatgctgcctacatgcagacatacatcggaggcgtgtcatgcccatacatctgtggcaggcaccttgaccatggtgttctccttgttggatatggtgcttctggtttcgcccccattcgcctgaaggacaagccttactggatcatcaagaactcgtggggcgagaactggggggagaacggatactacaagatatgcaggggttccaacgttcgcaacaagtgcggcgtcgattccatggtctctaccgtgtccgcagtccacgcctcgaaggagtagactctggtcagcggtgataatcgtgattccatatattgtagaactataatccctgctagtaatccatttgtgctgtttatgtatcgaaggcagcaaagatgtgtgaagcggcaatgggatgcttgctgtaaggtaatatgtttggcttgctaggcatgctacacgctatttggatgtagcaacgttatcaccagctgtatacgctttttaatcgacaacatttgaataatatgtacataacattatgttgtgctc

SEQ ID NO: 30508 - DNA, 528 bp, Zea mays
  Clone ID: UC-ZMFLB73028G10_FLI
gagaaggagcacaagcacaagcagcacctcggcgaggccggcgccatcgccgccggcgccttcgcactctacgagaagcacgaggcgaagaaggaccccgagcacgcgcacaggcacaagatcacggaggaggtcgctgccgcggcggccgtcggcgccggcggctacgtattccacgagcaccacgagaagaagaaggaccacaaggacgccgaggaggccagcggcgagaagaagcaccaccacctcttcggctgaccgtagtaccggccggcgcgcgaccgagctagctagctccggcgcacacaaccacacacctgtttaattctgtactgcatgcgtgtgtaatttgatggttcacaataatgagtccctctccggaccttggtagctgcttgcttgtggtgagtgagagtgtgagactgagggagaagaggtggtgggcgtggggctacgtcgagagaggcgtgttcctgtaatcctgtactcgcttcgttttctctgcatgcgtctataattgtgttcaat

SEQ ID NO: 30509 - DNA, 686 bp, Zea mays
  Clone ID: UC-ZMFLB73028G12_FLI
cgaacggacacggttgaaaaaccattgaaaaaccccctgggaaaaagtcaaacgaaaaatggggcgaaacacgcccccgatttgtactaagatgatccttgtacatattttcctccatgtgtgaatattcccggatggctgttggagggaggggaggcagggaaaggttgatttgttgtggggtttcagatgatggcatgccagtggggaggtagaagggatggccagtaaaacacaaaaggatcaaaggagacatggtatgcgaccagaccatgcatgaggtgtctagatgtacatagcgtctgtgtagtgtacctgtgtgttgtgtgtgtgtggaggtagagcgtggagaggcgaccatgtcggcgatccaagactggaagtaaagatgactggatttttttctatggccgcactgcaccggcggcggctcccggtgacgtttccggcaagaaggcctggagcggttccagaacaacatcatcgtctcgactctcgagtacttgtcattccaccgttcattctgttatttattatctggtattactgctctgtaattttctcaatgtatttccttattgatctcgtctgctctagctaggggccgggagcatctatgtaccttgcactactatgtgctactgtttctgctgataaggaaataattaagaccggccttgttaatt

SEQ ID NO: 30510 - DNA, 1633 bp, Zea mays
  Clone ID: UC-ZMFLB73028H03_FLI
gggcatcatttagatgaagatgaacagattgcacaggctctgcaagaaaatattggtcataacctagctgaagacgaacagcttgcacgggctctgcaagaaagtatgaatgatggacctcctcgtcagcacattccagttgaagatgttaactcagaaagtactccagcaagcatcttgccctcaaatattttccgcacaagtggcttgagggtttgtgctggatgcagaagtccaattggccgcggtcggtttctcagttgtatggactctgtttggcatcccgagtgcttcaggtgttatgcttgtgatagaccaatatcagagtatgagtttgctgttcatgaaaaccatgcctaccacaggccctgctacaaggagcgtttccatcctaaatgtgatgtttgcagtagctttattcccacagataaaaatggcctcattgaataccgggcccatcctttttggatgcagaagtattgtccttcccatgaaaatgatggtacacctaggtgctgcagttgtgaacgaatggagccaaaggacagtcaatacataacattagatgatggccggagactctgcttggagtgtctgcatactgctattatggagaccaatgaatgccagccactgtacattgatattcaagaattttatgagggtatgaacatgaaagtagagcaacaagttcccttgcttttggttgagcgacaagctttaaatgaagccatggaagcagagaaatctgtgcaccaccttcctgaaacaagaggcctctgcctatctgaggagcagattgtcagaactatattgaaaggaccaattggaccaggcaacagaatcatagatatggtcacaggaccatacaaactcattagacggtgtgaagtgactgcaattcttatactgtacgggctgccaaggctgctaactggctcgattctggctcatgagatgatgcatgcttacctccgacttaaaggataccgaaccctgagtccagaggttgaagaaggcatctgtcaggttctagctcatctttggcttgagtcagaaatcacatcaggttctggtagcatgtcaaccacctcagatgcgtcatcgtcatcttcaacatcttcatcatcgaaaaagggcgcaaagacggaatttgaaaaaagactcggggagttcttcaagtaccaaattgaaacagattcttctgtcgcttatggagatgggtttcgagcaggcatgcgagccattgagcggtacggcttgagaagcacccttgatcatatcaagatgacggggtcttttccatgctgaagctggtttttttttacctcggcttggatatgggtatacatattttttttggagaacttttggttcaggttatacatacgaaaagccgaacttctgtgtcgagaagaggcataaggatttagctatactgtccattgcaggaaaaaaaactgtttcccttttcaattataaaatttcacagtgcagacatgaaggtatgtggtctttagcttggccaaccttgtggaatgctgtcacttgatgcaaaagaaatttcgaatacatatgctttgctgtgcttgaaatgcaatggttggatgctatgctcttctttattgcgttc

SEQ ID NO: 30511 - DNA, 205 bp, Zea mays
  Clone ID: UC-ZMFLB73029A08_FLI
ggcgacgagggtgacgagtactagacgctctactggcgcggcgtcgtcgggcttgtgtgccactgctatcctgtgatctgccctgagtggctcctatcgtgttatgtttctgtcggttcttatctatctgtcgttgtgtggtttacaacttacgttgtaagactttattcccccgctttgctactgggttattaagtttggcgtt

SEQ ID NO: 30512 - DNA, 1737 bp, Zea mays
  Clone ID: UC-ZMFLB73029B06_FLI
gggctcaacaaccaccaccacctgcacccccgctcgctccgggcaatggcggcggttctggcggtcctggtgtcggcggtggccgccacgtccatcacggccgcggcgctcaacacggacggtctcgcgctgctggcgctcaagttcgccgtctcagacgacccgggcggcgcgctgtccacgtggcgggacgcggacgccgacccctgcgcctggttcggcgtcacatgctccaccgccgccggccgcgtctccgccgtcgagctcgccaacgcctcgctggccgggtacctcccgtcggagctctcgctgctgtcggagctgcaggcgctgtcgctgccctacaaccggctctcggggcagatcccggcggccgtggccgcgctgcagcggctggccacgctcgacctcgcgcacaacctgctgtcgggcccggtcccgcccggggtggcgcgcctcgtctcgctgcagcgcctcgacctctcctccaaccagctcaacggcacgatccccgccgcgctggccgcgctcccgcgcctggccggcgtgctcaacctcagctacaaccacttcacgggcgccgtcccgcccgagctcggcgccatccccgtcgccgtcagcctcgacctccgcgggaacgacctggagggggagatcccgcaggtcggctcgctcgtcaaccagggccccaccgcgttcgacggcaacccgcgcctgtgcggcttcccgctcaaggtccagtgcgcgggggccgccggggcggacgacgacccgaggatcccgaactccaacggccccaccgaccctggcgctgcggcggaggtcgggaggaggggaggcccgaggcagccgcggcggcggcgctcgtcgccggcggtcccggtcctcgcggccgtcatcgtcgtcgccctcgtcgccggcgtggttctgcagtggcagtgccggcggcggtgcgccgccgcggccggggacgaggggaaggagtccggcaaggagaagggcggcggcgcggtgacgctcgccggcagcgaggaccgccgcagcggcggggaggaaggggaggtgttcgtggccgtcgacgacggcttcgggatggagctggaggagctgctccgggcctccgcctacgtcgtcggcaagagccgcggcggcatcgtgtaccgggtcgtccccggccgcggccccgccgtcgccgtccgccgcctcagcgagcccgacgacggcgacagcgatggctccggttctggctccggctggcgccgccgccgcgcgttcgaggccgaggctgccgccatcggccgcgcgcgccaccctaacgtcgcccgcctccgcgcctactactacgcccccgacgagaagctgctcatctacgactacctccccagcggctccctccactccgctctccacggtggcccgacggcgtcgccgacgccattgccgtggtccgtgcgtctgtccatcgtgcagggcgcggcgcgcgggctggcgtatctgcacgagtgcagcccgcggcggtacgtgcacggctgcatcaagtcgtccaagatcctgctggacgacgagctccgcgcgcacgtgtccgggttcgggctcgcccgcctggtcgccggcgcgcacaaggccgccggcggcgggcactccaagaagctcggcagcgcggcatgcgcgctccgaggcggtggcgcggcgtcgtacgtggccccggagctgcgcgcgcccggcggcgcccccgcc

SEQ ID NO: 30513 - DNA, 1507 bp, Zea mays
  Clone ID: UC-ZMFLB73029C09_FLI
caagagtttcttggtgatactccctgttaccaaactggagtgctccgtacaaattgcatagattgcctggatcgcacaaatgttgctcagtatgcatatggccttgctgctttggggaggcaacttcatgcaatgggactgacagatgttttaaaaatccaccctgatagcagcattgcttctgctttgatggaaatgtaccagagcatgggtgatgcacttgctcatcagtatggaggatctgcggcacataacacggttttccctgagaggcaagggaaatggaaggctactactcagtctcgggagttcctgaaatcaattaaacggtattacagtaatgcctacactgatggtgagaagcaggatgctataaatctatttctggggtattttcaaccacaagaaggaaaaccagctctttgggagctggatactgattactatcttcatgtgacgacagctggggatgatcttatgtctgatagctaccacttgagttctgcacctggaaataatgtgttcgtggggtctggagctgcattgaaccctgggaccatattgagccctgtcccagcatgcaaagaggatttctcacggaagaagcttacttcgttcgacaaacttatagaaagaacatgtagttctataaggaatgtaaggcttcattgtgacgctgatctaaagccaagtggaggtgttggaacttctggaatggcaccagatgcagctgagatacagcttaaaagccccaactggttgtttggtcaaaggaagcatacggagacaatttcaaccgcaagagttgccccggttgaaaacgtgaacgaggggaacagagacgagtcaaatgtgtctctttgtggggaactaatttggctatcctcctcagttgaatcatgcgaggaggacattttcagaaggtaccttgcattcacgacagcggatgtagagaatggctggtatggcggaacactgctatatgaccgagatgaaaacagcggggcttacaggcactattctgagctctgccagggagctgtcatggatccctttgagcatgaccctgagaaagagcggcactacgcggaggcccttagcgtggatctcggcgatgcacgggtggaggccgaaatgcaggccgcgctggatgactaccaggtcatagggtcggacctgagcatcatcccttcgtgcggagcactcgcagaggacccgagccagctgacgaggtggatcattggagatgagaggctgcttgtgggtgctgctgcgcagtagaccggtggggttctgtcttctactcttctgtggaaggttgtacagagcaacagattgccattcaccgacccagcctttgtgttttatagatacttccctgaaacaattactccatgtatttagcagcaggtgttttatagacacttccctgaaacaattactccaacacgtgcatgcaatttattgttgtgcagcaggtggtattgctgctgggattagctttggc

SEQ ID NO: 30514 - DNA, 997 bp, Zea mays
  Clone ID: UC-ZMFLB73029D07_FLI
tcggccgcggcggcggcggcgcgcggaggcctccgcggggaagctgttcgccaagaagggctcgtgggacctcaagtcgttccggatcctggcgttcgacgagcgggagatcatcgagggcgtccgcgacgagaacctggtcggcagcggcgggtctgggaacgtgtaccgcgtgaagctcggcaacggcgcggtggtggccgtgaagcacgtcacgcggggggtggcgacgagcacggcgccgtccgccgccatgctgcggccggcggcgtcggtgcggtgccgcgagttcgactcggaggtggggacgctgagcgccatccggcacgtgaacgtggtgaagctgctgtgcagcatcaccagcgcggacggcgcggcgagcctgctggtgtacgagcacctccccaacggcagcctgtacgagcggctgcacggggcggcggggcggaagctgggcgcgctcgggtgggtggagcggcacgacgtggcggtgggcgcggcgaggggcctcgagtacctccaccacggctgcgaccgccccatcctccaccgcgacgtcaagtccagcaacatcctcctggacgagtcgttcaagccccggctcgccgacttcgggctcgccaagatcctcagctcggcaggcggcggcggcggccactcgtccgccggcgtcgtggccggcacgctggggtacatggcgccggagtacgcgtacacgtgcaaggtgacggagaagagcgacgtgtacagcttcggcgtggtgctgctggagctggtgacggggcggccggcggtggtggagagccgggacctggtggactgggtgtcgcggcggctggagagccgggagaaggtgatgtccctggtggacccgggcatcgtggaagggtgggccagggaggaggcagtccgcgtgctgcgcgtcgccgtgctgtgcaccagccgcacgccgtcgatgcggccgtccatgcgctccgtcgtgcagatgctggaggac

SEQ ID NO: 30515 - DNA, 1261 bp, Zea mays
  Clone ID: UC-ZMFLB73029D11_FLI
tacaagtacgtcgaagacattgtcctcaaggtggctgctcaggtccctgacagtggcccgtgtgtcacgtacattggcaaaggtggatcgggcaactttgtcaagatggttcacaacggaatcgagtatggcgatatgcagctgatttccgaggcatacgacgttctcaagtcggtcggtaagctcaccaacagtgagctgcaccaggtgttctccgagtggaacaagggcgagctcctgagcttcttgatcgagatcacggccgacatctttggcatcaaggacgagcatggcgatggctacctggtggacaaggtccttgacaagaccgggatgaaagggacagggaagtggacggtgcagcaggccgccgagctgtcggtggccgctcctacgatcgaggcgtccttggactcgaggttcctgagcgggctgaaggacgagcgggtggaggcctccaagatcttccagggtgactactactccaccggctcgccggtggacaaggcgcagctggtggaggacgtgaggcaggccctgtacgcgtccaagatctgcagctacgcgcagggcatgaacatcatcaaggccaagagcgcggagaaaggctgggggctcaacctcggcgagctggccaggatctggaagggcgggtgcatcatccgcgccatcttcctggaccgcatcaagaaggcctacgacaggaacccgggcctcgccagcctgctcgtagaccccgagttcgcgcaggagatcatggacaggcaggcggcgtggcgcagggtggtgtgcctcgccatcaacaacggcgtcagcaccccgggaatgtccgctagcctggcctacttcgactcctaccgcagggacaggctgcctgccaacctggtgcaggcccagagggactacttcggggctcacacctacgagagggtcgacatgcctggctctttccacaccgagtggttcaagattgcgcgcaacatctccaacaactgatgagctgctcaacggatggcatgcccggtgttgactactccagtcggtaatgagatttcctgcaggaacttgtctattgatctttgtaagttaattatttatatgaataaaataagagcagacatgcttgtgtttgggcaccctctgttttctcctccctgttaatcaatgcaccatgctccaaaggtgatgtacataattcagacaagtctcgatgatgtacatgttacagaactagcgaaagagttcagcttggtcgccgcag

SEQ ID NO: 30516 - DNA, 463 bp, Zea mays
  Clone ID: UC-ZMFLB73029E05_FLI
ctctttgacaagaagccaggagagatatccgaagttggtgtagaatcagacggtggaaaggatgcaggtgatgcaagagtcaatggtggtgaggcaacgagtgctgatagaggtgtaaacacaaatgacagtccgaccagcgaatcagagtacgccttcgaggaagagaggcccgggcttcttggcagcttgtggccctctgcgaggatgatcttctcgtctcttggcatgaacaggtgcgcgatactctgaggtgtccagtgtgtactgcggagacatccaaaatcatggcagtgaagaggaactgccccgaggtttctggtatttattagagtaagtttggatgtatggaaaatgaacagtgtgcaagatgtaaatgagaaacaatatgcagggaattttaatagctatctaggattcattatcttccacggcataaaataatttcccaggtttcttctag

SEQ ID NO: 30517 - DNA, 195 bp, Zea mays
  Clone ID: UC-ZMFLB73029E08_FLI
gttgcctgctccatcagcttgctagatagctgtcgtgagccttcgatgttttaactatctgtatactcctagtcctacataagtgctagctgaacaaggaccctgaaatattcatttggtaggtggataactgatgtttcgaacacgcataaacttttttacctgttgtatgaagccatttctccgaattactat

SEQ ID NO: 30518 - DNA, 1451 bp, Zea mays
  Clone ID: UC-ZMFLB73029E12_FLI
tgagggcggcgagatgaacggcggcggggaggacgggaagcagcagccgcacctggtactggcgcacaagctgttcctcctgtcgcactccgacgtcgacgacctcgccaaggtcgacctacgcgctgacgtgttcgcggcagtcaaatccgatgacatggcagctctgtacgagtcgttggcggcggacggcgtactggagacggacgcggcgctgctggccgagatgcgcgccaggatcgacgaggagatccggaagctcgacgagaagattgctgatgcagaggagaacttgggtgagagtgaagtgcgtgaggcccatctcgccaaatccttatatttcataagggttggggagaaggagaaagcactggagcagcttaaagttactgaaggaaaaactgtagctgttgggcaaaagatggaccttgttttctacacactacaaattggattgttctatatggactttgatctcatctcgaagtccattgacaaagcgaaaaacttgtttgaggaaggtggtgattgggaaaggaagaacagattgaaagtatatgaagggttgtactgcatggcaactagaaacttcaagaaagctgctagtttattcttggattcaatttcaactttcacgacatatgagctattcacatatgatacattcatcttctacacagtcctcacgagtgttatatctctggaccgtgtatctctgaaacaaaaggttgtagatgcgcctgagatcttagccgtaattggcaaagtacctcacctctcagagtttctcaattccctctacaattgccagtacaagtcattttttattgcattctctggcttgactgaaccaatcaagttagagcgttacttgcagcctcattttcgctactacatgcgtgaagtgcgcactgttgtctactcacagtttctggaatcgtacaagagtgtgacaatggaagccatggctgctgcatttggcgtcacagtcgactttatagaccaggaactgtcacgcttcattgccgctgggaagctccactgcaagatagacaaagttgctggcgtcttggaaacgaaccgacctgatgctaggaacgccttctaccaggcaaccatcaagcaaggagacttcctgctgaaccgcatccagaagctgtcacgagttatcgacctgtaggggagagcccttcatgcaggacaggagcttgccttggttcctggagtgtacgagcggtgcttgactttcaatgggtctcagttgaagaagcttttagggatatttgtgttctgagaaattgtgttttgcactttttagcctaactacatgaagcccccaaaaaaatttcatggcgttgcttgtagacgtttcttcattgatgaattcatcccttgttttttcttgctggatattgttttgctactaagagcctagcagatggtagacaagc

SEQ ID NO: 30519 - DNA, 2582 bp, Zea mays
  Clone ID: UC-ZMFLB73029F02_FLI
tgacgcagcgccgaccgcgcacacactccccagactccgcagggacccaacgcagcggtcaaacaaaggcagcggcagccggccggcagcggcaacggcgtaactcccaagtcacctccgcctcgggctccaaaaatccccacccgacctcgagactgagcggaccgacggtgatgtcgtcgtcggtgcccccgccaccgccccagcaggagctggagtcgccctccgccggcggcgacaaggtcctggccgcagcgcagcacatcgtcaagtccctcgccacctccaagaacgccgctgacgacatgatccgcatactctccggcttcgacaaccgcctctcctccatcaccaacgaccacctcttcccctcccccgaccttaccgccgcctccgcctccgagatctccgccgccgccgcctccttcgacgccgccgaccagctcatccagctctgggacgccaccccggacgcgctcgtcttcgaggcccccgaggacgacatcgcgcagtacctcgcggccgtggacgtcgccatcgaccacctcgcgcgcggcggccccggcggcgcgcgggccggcgtcgccgtccagctcgccatggtgcgcctcgaggaggagctgcgccacctcatggtccgccacgccgtccccatcgaccccacgggcctcttcttctcgctccgccgcctctcgctcgagtccatggacgacctcgacgcctgccccgacttcgacgccgccacgccgcacagcctcgacgccacccccgccggcccggagaccgcgcgcggcgcctccctcggatctaacccctttgaggaccaggtgttcgatcccgtgcgccccgaggccgtcgaagacctgcgcgccatcgcccaccggatggcgcgcgcgggatacgcccgcgagctcgccgacgcctactgtggcatccgccgcgacctgctcgacgagtacctctccgtgcttggcgtcgagcgcctcagcatcgacgatgtgcaacgcatcgagtggaagctgctcaacgacaagatgaagaagtgggtgcacggggtcaagacggtcgtgcgcgtgctgctggctggtgagcgtcgcctctgtgaccaggtgctcgatgcgtctgatgaacttatggatgcgtgcttccttgagtccaccaaaggatgcattatgcagattcttagctttgggggtgccgtggcggtgtgcccccgctcgccagagaaggtccctcggatccttgacatgtatgaggcacttgcagaggtgatccctgaaatgaaggacttgtgcataggaagttctggggatggcgtgatcagtgacgtgcaagccattcttgataggcttggggatgccgtgaggggtaacctgtttgagtttgggaagatgttacagcaggagacctcaaggagggcgatggcagctggagagatccacccaatgacacgctatgtcatgaactatttgaggttgctggttgtttacagtgagacacttgatgcactcttggccgatgacagcagtgatcatgatactttcagaagttctgatgatcaggatcaggaacacttggagagaatgaccccttttggaaggcgtcttctgaagctgatatcttacctggaggccaatttggaggaaaaatctaagctctatgacgatgctgccctggagtgcatatttgccatgaacaatttgctctatattgttcagaaggtaaaggattcagagctggggaaggttttgggtgatcactggataaagaggcggagtggcaagattcgacagtattcaaagagctacctaagggtttcgtggacgaagcctttgtcttatttcaaggaagatggacatggcagtgggagtgggagtggcagtggcagtggcagcggcagtgggcattcaagttcgaggatgtccatcaaggaaaggttcaaaaacttcaacatggcctttgaggaaatttacaggaaccagacactctggaaagttccagatcctcagctccgggaagaactgaagatatcaatatctgaaaacgtgattccagcttatcgtgcttttctgggcagatatggcaatcaagtggacgggggaagaaatccaggaaagtatataaagtacacaccggaagatttggagagccagctatccgatttatttgagggatcaccagtgtctgccaatcactctaggagaagagcatagttcgtggttggccggatccatgttgcagccaggaccgcatgctgagtgagtccgccgctgggcggtgggctggccaggggagtctccaccgccgccaggatccgcaagcgccgcgccgcgccgtggccgccgtcggaggaggtgggcgaagcggagcgcgcgcctgatcggccggagggtcggcgtcgaatcgcgtcgccgtgatcgagcagcaggaggatgacgtgggagccgtcctggaataaccggcgccaccaccgccacgccgacttcgacgccgacgtcgacgcgcggtccgcggcgtcggccaggaatctcgccagcgccttcgaggaggacctggaggaggaaggggacgttgggtgggac

SEQ ID NO: 30520 - DNA, 2476 bp, Zea mays
  Clone ID: UC-ZMFLB73029G11_FLI
ggaaccggctctccggcgacgtccccgcctggctcggcaagctggcagcggtgcagcacgtggatttatccgacaacgcgctcaccggaggcttgccggactcgctcggcgacctcaaggcgctcaggtacctgagcctatccaggaaccagctctcgggcgccgtcccggcctccatgtccgggtgcaccaagctcgccgagctgcacctgaggggcaacaacctcagcggcagcatcccggacgctctgctcgacgtcgggctcgagacgctcgacgtgtcgtcgaacgcgctctcgggcgtcctcccctcgggctccaccaggctggccgagacgctgcagtggctcgacctctccggcaaccagctcactggcggcatccccaccgagatgtcgctcttcttcaagctccggtacctcaacctgtcccgcaacgacctccgcgcgccgctgccgccggagctcggcctgctccgcaacctgacggtgctcgacctgcgtagcactgggctgtacggcgccgtgccagccgacttctgcgagtccggtagcctcgccgtgctccagctcgacggcaactccctctccggccccatccccgacagcatcggaaactgttcttccctgtacctcctgagcttggggcacaacggcttgacggggccgatcccggcgggcatctcggagctgaagaagctggagatcctgcggctggagtacaacaagctgagcggcgagatcccgcagcagctgggcgcgctggagaacctgctggccgtgaacatctcgcacaaccggctggtggggcggctgccggcgtcgggcgtgttccagagcctggacgcgagcgcgctggagggcaacctgggcatctgcagcccgctggtgacggagccgtgcaggatgaacgtggccaagccgctggtgctggaccccaacgagtatacgcagggcggcggcggcggcgacaacaacctggagacgggcggcggcggtggtgtagaggcgccgaggaagcggcggttcctgatgagcgtgtccgccatggtggccatcttcgcggcggtcgcgatcgtgctcggcgtcatcgtgatcacgctgctcagcgtgtcggcccggcggagggtcgaggctgcgggtgttggaggccctggccacgaccggaaggaggtggacgagagcatcgtcaccaccagctcgacgacgacgaccaagtcatcgtcgtcgccgccgcccgggggcaaggtaaaggaaaagctcgccaccggcaagatggtgacgttcgggcccgggagcagcctccggtcggaggacctcgtggcgggcgccgacgcgctgctgagcaaggcaacagagatcgggcgcggcgcgttgggcacggtgtaccgcgcggccgtgggcgacgggcgggtggtggcggtgaagaagctggcggcggctcacctggtgcggtcgcgcgaggagttcgagcgggaggtgcgcgtgctgggaaaggcgcggcacccaaacctgctggcgctgaggggctactactggacgccgcagctgcagctgctgatcacggactacgcggcgcacggcagcctggaggcgcggctgcacggcggcggagaggcggcgccgatgacgtgggaggagcggttccgcgtggtgtccgggacggcccgggcgctggcgcacctgcaccaggcgttccggccggcgctggtccactacaacgtgaagccgagcaacatcttgctggcggacgcggagtgcaacccggcggtgggcgacttcgggctggcgcggctgctgcatggcagtggcagtggcaggcaggtggcgatggcgggcagccggttccggcagggcggcggcggcgggatggggtacgtggccccggagctggcgtgccagagcctgcgggcgaacgacaagtgcgacgtgtacggggtgggcgtgctgatcctggagctggtgacggggcggcgcgcggtggagtacggggacgacgacgtggtggtgctgactgaccaggtgcgcgcgctgctggagcacggcaacgcgctggagtgcgtggacccgggcatgggcggacgcgggcacgtcccggaggaggaggtggtgccggtgctgaagctgggcatggtgtgcgcgtcgcagatcccgtccaaccggccgtccatggcggaggtggtccagatcctgcaggtcatcaaggcgcccgtgggcggcggtggcagaatgcaagcctccttctgatccgggcgccgtgaccgttgggcgttggcatgcgttgcaggcagggcaacggcatctctggcctggctcggtcggcggcagcccgctgcaagtactatgtgtgcattcatgctagtatagcatggcaagcacagtagggctagggacgagggcagcttctagctccgtctctttttccatgcatgcgtgtccattcattttcagccccactgtatgtaccttgtacttgt

SEQ ID NO: 30521 - DNA, 1563 bp, Zea mays
  Clone ID: UC-ZMFLB73030B01_FLI
gaccgccgatagctacctagctcccaccccgcacccctgactccaccttctccattcttgatcccttcgccgcgcggagatccaagaacaggggcagcctgacaggggaacgggcggctatgggaggaagcagcgcgatgctcgccgtgttggcggtggtggttcttgcggcggtcggcggcgctgacgccgcggcggaatcgagtgaggcgtcggccaaggggaggtaccacgcgctcttcaatttcggggactcgctagccgacgctggcaacctcatccagaacggcaccccggacatcctggccaccgcgcgcctgccctacggccagacctacttcggcagggccaccggccgctgctccgacggacgcctcgtcatcgaccacctcgcacaagagtttggcctgccgctgctgccgccgtccaaggccacgaacgccagcttcgcgtacggcgccaatttcgccatcaccggcgccaccgcgctcgacacgccctacttcgaggccaaggggctcggtgccgtcatctggaactccggagcgctcatgacccaaatccagtggttccgtgatctcaagcctttcttctgcaacacaacgcaggcatgcaagaaattctttgccaaggcgctgtttgtggtcggtgagtttggcggcaatgactacaatgcacccctctttgcgggcatgggcatcccagaggtttacaaattcatgccggatgtcatccagggcatctctgacggtattgaggcactgattgctgagggggctgtggagatgattgtgcctggtgttatgcccactggctgcttcccagtgtacttgaacatgcttgatgagcccaaagagggatatggctcccgcagtgggtgtgtccgccggtacaacacattctcctgggtgcacaatgcacatctcaaggccatgcttaagaagctccgggctaagcatcccaatgtgaggatcatatatggcgattactacactccagttgtccagttcatgcttcagcctgagaagtttggttttgccaaacaactgcctagggcatgttgtggggctccatcgactcctgagaaagcagcttacaacttcaatgtcacggccaaatgcggtgagcctggtgcgactgcctgtgctgatccgacaacccattggagctgggatggcattcacctgacggaggctgcgtaccgccatatcgctaaaggctggttatacgggccttttgcggaccaaccaatcatccaatcctcatgatcacgccactcctgctgtagagtttcatcaaagtagcgcactggaaaaaaaatggagcgggggaaagtagttcttccatacagtttcaatgtttgcatacatgtacatctccattttgattgtattcatttaacttgggtggtacaaaggtgggatagggaggctgcacaaaggcctgatttcttgatttgtcagggggtataaatatgaaaaataacgtacatataatcatgtatattgtgtcctggaaatgtgatacagactgtctgcttgagcagcttctgattctctgatt

SEQ ID NO: 30522 - DNA, 2095 bp, Zea mays
  Clone ID: UC-ZMFLB73030B03_FLI
aatttacacttgcttggaatgtgtcaatcttaattaagctattcctggtatatgcatgacacagactgctctggttcctgtagcagattaattgacccaccgttgcacttcttattgcagaaatcactgacctttgcgcctgaagcgtctgaggatgttctgccactggatttaggggaacttcttgcttattttgtaaagcaatctgtaccactattcgaccaacttggtataaaaagagatgtatgtgacaagttggtggagtctctgtgcagcaagcgcaaggaccaccctgcatatagttttttgtcagcaactgaatcatcttcattgaaaaatgacaatgttgggaatgaactcgacctaagaatagctagcgccctacagagtacaggacaccattatgaaggtggattttggagtgatggccataagtctgacatatctggcaagagacatgttgccatagtcaccactgccagtcttccctggatgactggaacggctgtgaatcctttgtttcgagctgcatacttggctaaatcttgcaagcaagatgtaactttggtagtgccctggctttgtaagtcggatcaggaacttgtgtaccccaacagcatgacttttagttcaccagaagagcaagaaaaatatatgaggaattggctggaagaaagagttggtttcaagacagacttcaaaatatcattttatcctggaaagtttcaaaaggaaaggagaagcataattcctgctggggacacttcacagttcataccatcaaaggaagctgatattgcaatcttggaagagcccgagcacctcaactggtatcatcacgggaaacgatggacagataaattcaatcatgtgatcggtgtagtgcatacaaattatttggagtacatcaagagggagaagaatggtgctattcaggcctttttcgttaagcacattaataacctggtcgccagagcttattgccataagatcttgcggctgtcaggtgccactcaagatcttcccaagtcgacgatctgcaatgtgcacggtgtgaaccccaagtttctggaggttggagagaggatagcagcagagcgggagtctggccagcaatccttctctaaaggagcttattttctggggaagatggtgtgggccaagggttacagagagttaatagatttgttcgcgaagcacaacagtgatttggaaggcttcaagctggacatctatggaaacggtgaggattcacacgaggtgcaatcggctgccaggaagctgaatctgaacctcaactttcataagggccgggaccatgcggatgattctcttcatgggtacaaggttttcataaacccaagcatcagcgacgtcctctgcaccgcgaccgcggaggcgctagcgatgggcaagttcgtggtgtgcgccgaccacccgtccaacgacttcttccggtcgttccccaactgcctgacatacaagacctccgaggacttcgtcgccagagtgaaggaagccatggcgcgcgacccgcagcccctgaccccggagcagcggtacaacctgtcgtgggatgccgccacccagcggttcatggagcactccgagctcgacaaggtcctgaatggcgacagcaacagcgaatgcggtggctctgttggcaccgaaaccggcaagagcgcgggcacaatgatgaggagatccgcctcggcgccgaacatgtcagacgtcgtggacggcggcctggcgttcgtgcactattgcttcaccggcagtgagctcttgaggctgtccacgggtgccgtccctggaacccgggactacaacaagcaacatagcctggacctccgtctcccgccgccccaggtacagaacccggtctacggctggtaattactagatatataggtatagctctgcagtctgtagcactagctttttcatctccgcgtgtgtttgtttgccaaaggcgagccttgttcattattacctacaaacaacaactacgactgtaaggatgacaacgctgcgtcgtgattttgtaagactagtgctagatagagaggcgagcatttcttcaatcaaaaaattt

SEQ ID NO: 30523 - DNA, 1177 bp, Zea mays
  Clone ID: UC-ZMFLB73030B04_FLI
caagaactatggcaaggcaaccgacctgctgaaatctgaggaggatcggatgaagcttctgtgtgaactacagaaggcccgcgaacagcgctccatggtacataaggaaataagaagcatgaatgagtgtgattatattgatcgtgagattggagtccttgaagcagaaatagaggattcctgcatctccatactggaaactgacattgagaagtttgtccgtgacaacactttagcagagatttgggagggtagcgcaaaggatctggaggcattgctggtcgattaccaagactgtgttttccaagtcaacttgaaggaggaagagatcaaggtgtgcagtgagtccttgcagtatcaagccagggacatggataaacttcagtcgaagctgaaccaagcgatccgggagctgggtgagcttctgcaagatagaagaagcctaaccgcttgcagtctggatgaacccacgctgcccgttggtgaaaaggtggcagcagaccttgaggccgtccggattcatgtcgatgaagctaagcagcttttgattctcgacaaccaagctaattcatgaacctgcgcagctagtttcaggtcccttataaagatgcgacgagtgacaggctagtctgtcttggcttctgctgttcagatccttagtacgtagtagcaagacatcagagatgggaagctgcggaatttgcttcattagttggaagctatctgaagccgaatctgctgattcttttttccgtggatcagctaccttcttctggtggtcttgcttcgagtcaaaacaacaggtcctgcaagccactgttccggatccgatttctcctctggtgtacacttcaagatggagcggagaaactgatccgacttaggcttgaccttttgcttctgtaactctccagagactggtagcaactagcaaccagtgggtggacttgtatcacaacttaatctgagccaggtgtcttattttatttatgctataagtgcacaaatgctgcactccagtttcttgtagaaattttcgggctgatcttgaattttacctgctgaagagtttccgtgttctgctgctgtactgtaaacaggtgtgccaggtttgtagggggaccccctggattctgtggtctgttgttttttcattcgactgattttctgtttgcgc

SEQ ID NO: 30524 - DNA, 1731 bp, Zea mays
  Clone ID: UC-ZMFLB73030C03_FLI
cgaagcccttgtacccctcaccgccgccgctgctgctagggagcttccatccgcgcgcgcctacaacgagagctagcagcggtagcggccgttatcttgtcgctccggctccgttcgtgtacccaagtcccagcctagatgccgcagatggaggggtccactgatcagatcgccgccggctggttcgctaaggagccggcttccgagcggcccgtgggcttgccgaggaccggctcttccagtcgcctcaacgcgcaggcgccggagttcgtgccgcgggggccgccgccaccggcgccggcggttgtgctgccgcctccgccgcaggtgatccgcatgttcgccgcgcctcccccgccgccgcgtgggggcttcttctccgcgccgcagccccggccgttcgagtactatgcgcctatcggtgaacgcagcggatttgctgccaaggagcaacaggcgccggagctggaagcggagatgctcccgcccgccgcggtgaagacggagccggtggtggatgggctcgacgacgaggtggtgcacaagatcaccaagcaggtggaatactattttagtgacatcaaccttgctactacagaacatctgatgagattcattaccaaggattctgagggatttgtgccaatatcggtaattgctggctttaagaaagtaaaaacttctgtgcgcaataatgtgatgcttgctgcggctctccgaacctcatcaaaacttgttgtaagcgatgacggtaagagagtcaaaaggcagcagccatttacagaatctgatttgcaggagctccagtcccggattgttgtagcagaaaatcttcctggtgatccctcctaccagaatcttaagaagatattttcagctgttggaagtttgatttcaatccgaacttgctatcctcagactccaaatggcactggtcctgcaactaatagatcttccaagttagatatgctttttgctaacaagctgcatgctttcgtggagtacgaaactcctgaggatgctgcgaaggctattttggagctcaatgatgagaaaaactggagaaatgggcttagagttcggttgctgaatacttgcacggtgaagggggcaggcaaaggaaaaaacggaatgaatgaaactgatggaaatagtgaggaggatgtctccactttgaaccattctaacgagaaacagtttgaacaatcctctcaactgttagatgtactgccggaacacttgtttgatgagaatttcaacaaggaagttcccaagcgcggcaaagggcgcggtcgcggtggcagagggcatgggcgtggcaaccatcaatataacaatcaccatcacaataaccagcaccaccagaacaaccagccgcagtacaataaccatggcaacaaccaccttggtgggaaccgtggcagccttcactctgttggtactacaccgcataacctgataaccaagcttgagccgcatccgcagctgcctattggggccaacaagcttccaccaggcccccgcatgcctgatggcaccaggggtttcaccatgggcagggggaagccacaggctgtgctacctgggttgtgtgctgttggtgttgagtgaggcatgcagattgctgcttgtatgcttgtattgtatatctttgtggtgggagtatttgtgcgtcacactttgtggacacggcgagctgtcaaaaccagtatattacattcgctttgtaat

SEQ ID NO: 30525 - DNA, 1692 bp, Zea mays
  Clone ID: UC-ZMFLB73030C04_FLI
gtccttgggataattggtggaatctttggaggcctcttcaactatctgttggacaagatcctccgagtttatagtattatcaacgagagaggtgctccattcaagatccttctcactataacaatatcaataatcacatcaatgtgttcctatggtcttccttggcttgctgcatgcactccatgccctgttgatgctgtggagcagtgtcccactgttggccgctccggaaattataagaacttccaatgcccaccaggacattacaatggtcttgcatcactcttcttcaacacaaatgatgatgccatccgcaatctcttcagcaacggcacatcgactgagttccaaatgtcatctcttttcatcttcttcactgctatttactgccttggactagtgacttacggtattgctgtcccatctggtctctttatccctgttattcttgctggagccacgtatgggcgcatagtgggaactcttcttggatccatatctgatcttgatcctggcctttttgccctacttggcgcagcatcttttcttggtgggacaatgagaatgactgtgtcagtctgtgtgatccttctagagctcaccaacgatctccccatgctccctttagtcatgcttgttcttctcatatccaagaccatagcagatagctttaacaagggagtttatgatcagatagtggtgatgaaaggcttgccgtacatggaggctcatgctgaaccatacatgaggcacttggttgctggtgatgtggtgtctggcccactaatcaccttttctggggttgagaaggtggggaacattgttcatgcattaaggttaacgggccacaatggtttccctgtgcttgatgagccacccataacggaaaccccggaactggttgggcttgtgactaggtctcatttattagttttgctgaacagcaagaatttcatgaagggacgggttaaaactagtggtagcttcgttctgcgaagatttggtgcatttgactttgcgaaaccaggttcaggtaaaggtttgaaaattgaggacctggatttcactgatgaggagatggacatgtatgtggatctccacccgatcacaaatacatcaccttacacagtggttgagacgatgtcactggcaaaagcagcaatccttttccgggaacttggtttgaggcaccttttggttgtgccaaagacaccagacaggcctcccatagtcgggattctcacaaggcatgacttcatgcctgagcacattcacagtctgttcccaaacctcaatcctcacaagtaccattcagcatcaatggcaggttgacaaggagactctttctgcttctcatctatttggcattattcgggtgctggctgtatgtaaattgcaaaggtgtatgcgtatctggttttcaattggatccatctcatcttctctacatagttttgtttgtgtggattttgtagcatatgctctttttgcaataaaaaaaatgtggcagttgtttggctggtgactgcctattatgagcctgcggcaataaatgttcagcaaattgcggagtaaacattgagagctccagaacatggagagaaagtgtgtattgtatatttgcgttgttcctgtaaagcatgtttagtcaaactcgaatattgtctataacaccgagtaaatctcaggcgg

SEQ ID NO: 30526 - DNA, 2230 bp, Zea mays
  Clone ID: UC-ZMFLB73030D09_FLI
atcgtcgtcccacccagcagtgcagagactctctctctctctccccggccacctctcgctcacgagcaccccatcttcccggccagggcctgggtatgggtgctccgctcgcctcctggccatgggcaagcctcggatcatacaagtacctgctgtacgggcctctggtggcgaaggtggcgcacgcgtggagggagacggggagcctgccgctggggtcgtggtgcctccacctcctgctcctcctggcgctccgctcgctcaccttccagctctggttctcctacggcaacatgctcttcttcacccgccgccgccgcgtcgtcaaggacggcgtcgacttccgccagatcgacgccgagtgggactgggataacatggtgatcctgcaaaccctggtcgcggcggtggcgatgggcagcgcggcgttcccggccgtgtcggagctgcgggcgtgggacccgcgcgggtgggccctggccttgctcctgcacgtggccgtctcggagcccgtcttctactggacccacagggcgctgcaccggggcccgctcttcagccagtaccacgccaggcaccactcgtcccccgtcacgcagccgttcacggccgggttcggcacgccgctggaggcgctgctcctgacgctggcgatgggggccccgctggcgggagccttcctggcgggcgccgggtccgtgagcctggtctacggccacgtcctcctcttcgactgcctccggtgcatggggtacagcaacgtggaggtcatctcgcacagggccttcgccgccttcccgccgctcagatacctcgtctacaccgccacgtatttgagcctgcaccacagggagaaggactgcaacttctgcctgttcatgcctttgtacgacgccctcggagggaccctcagctccagatcgtgggggctgcagagagaggtcgaccaaggcatgaacgaccgggtgccggacttcgtgttcctggcgcacgtggtggacgtggtgtcgtcgatgcacgtgccgttcgccttccgctcctgcagctcgctgccgtgggccatgcgcccggtgctgctcccgctctggcccgtcgccttcgccttcatgctcctccagtggttcttctccaagaccttcaccgtcagcttctacttcctccgcggccggctccaccagacgtggagcgtcccgagatatggcttccagtacttcatcccgtcggcgaagaagggcatcaaccgccagatcgagctcgccatcctcagggcagacaagatgggcgtcaaggtcatcagccttgctgcgctgaacaagaacgaggctctcaacggcggcggcacacttttcgtgaacaagcacccgaacctgagggtgagggtggtgcacggcaacaccctgacggctgccgtgatcctcaacgagatccccagcagcgtgagggaggtgttcctcaccggcgccacgtccaagctcggcagggccatcgcgctgtacctctgcaggaagaggatcagggtcctgatgctgacgctttcgacggagaggtttctgaagattcagagggaggcgccgccagagttccagcagtacatcgtgcaggtcaccaagtaccaggcggcgcagggctgtaagacatggatcgtgggcaagtggctgtcgccgcgggagcagcggtgggcgccgccgggcacgcacttccaccagttcgtagtgccgcccatcatcggcttccgccgggactgcacctacggcaagctcgccgccatgaggctccccaaggacgtcgagggtctcggctcctgcgagtacacgatggagcgcggggtggtgcacgcgtgccacgccggcggcgtggtgcactgcctggaagggtgggagcaccacgaggtgggcgccctcgaggtggaccggatcgacgtcgtgtgggaggcggcgctcaagcacgggctcacgccggcgtgagcgggagggcgcccggagcgggagaccgagacggccggcgcgcgcggccccgcccggaaataacgcgtcgtctattcgttgtcgcatggctgttgcgacgggtgggtcggtgtgctaccgtgtactactactaccagctactagctaccatagtccaagactgctgcaagcgcaatgcaacaaagttgataggctggttcgcatataccaatactcttatgtacgtaccgaatactgcaatattgcacgaggcatgggcttccgtt

SEQ ID NO: 30527 - DNA, 2329 bp, Zea mays
  Clone ID: UC-ZMFLB73038G01_FLI
ggtccctatccgctgctgcgaacagcagaagctgcggcacggaggtgcgctcttcccggcggtggagttgcagctgcagggggaagaagcgagctagagctgcagggatgataagcgccaagtccaacgccgccgtgtacccgtgcccggagtatgcggaggtcgaccccaccggccggtacggacggttcagcgacgttcttggcaagggcgcgtccaagattgtgtacaaggcgttcgacgtggaaccaggtgaagctgcacgacttcctgcagagccccgaggacctggagcggctctactgcgagatccacctcctcaagacgctcaagcaccgcaacatcactgagatgttcacctccggcaccctccgccagtacaggcagaaacaccggagggtgaacatgtgggcggtgaagcactggtgccggcaaatcctcagcggcctgctgtacctccacagccacaatccgcccatcatccaccgggacctcaagtgtgacaacatcttcgtgaacggcaaccagggcgaggtcaagattggcgacctcggcctcgccgccatcctccgcaagtcccacgctgtccactgcgtgggtacaccggagttcatggcaccggaggtgtatgaagaggagtacaacgagctggtggacatctactcgtttggaatgtgcgtgctcgagatggtcacctttgagtacccgtacagcgagtgtacgcacccggtccagatctacaagaaagtgatctctctacctgtttgatttggtagggtactaagccagaagctctgtacaaggtgaaagatccaatgctgaggcgctttgtcgagaagtgcctagtatcgtcatctcagagactgtcagcaagagaactgcttgaggatcccttcctacagggcgatgacgtggctgtttctttggatggtggagattatcatgtaccgaccaagtacgtacggcagccttcatatctagggcatacctatagcaatggctccatggtgagtaatggattctcagaaagcatggatgaggacgctctgagtgaagactgcgaggatgatgacatgaaaggccaagatggcattgacctgttcaacgagaatgaggatgaacctcttggcaatgtggacataacaatcaaagggagaaagagtgaggatggaggcatattcctcagattgcggatttctgataatgatggacgggtacgcaacatctattttcctttcgacgttgaggctgataccgcactaagcgttgcaactgaaatgatagccgagctggatataactgaccatgaagttactcggattgctgacatgattgatggtgaggtcagtgcattggtaccagattggaggcctggtccgggcatagaggaagctcctgacacttcatactgccataactgtggatccaacgtctcatcgtgcggttcactttacgcctacatgtcatcaggccgtcgaggttgccaatgtgcagagctacatgggcggtttgaagagatcacgttccaagccgatggagagcagtgtgatttgcaggaatcggcaggcagctctgacgatggaggtggccaaacagagcattatgtcaaaagcaacgagtccactcatgtgaatggcctcgtacagatgggaagaagagatctttctaatcagctttgcttcagttcattccaagagcaatcatgttcatataaccgttacgagaatgacactaaccatcatgtgaatgggttcgacataaagcatgaggtaaagatcgccaagtacaaagcacggaaaatggcacagtttaagagggctatccatccatctcttgacttcgacaatgcatatggagtaaataggggtaagccttcactgaacaagctgcaatctttccatgttggaaagaaccacaatttccgtgtgccaacctgtgatcgaagcccgggtaaagtaagcacagactatcattctgacttgaacagccaagtattgcaaagtaggcaccccgatccgggagcccaaagggcccggcattgtgaggtcaatgcagctgggagcagcacggagtgtatgtttacagggaggcgctactacaccggagctcagctgccgccgaatctcccaagaacaaaatctgtacccctgaatgctgtcgacgcctgaaatgctttcttgccatgtaaatttttatagagtgtacatttgttttggttccttttgtacccattatgaaacatcgttgttgggcaggagagactggatgtggattctggctgagctgtttgtaaattttccatcttgtgaatccagagaggttaggctgt

SEQ ID NO: 30528 - DNA, 1327 bp, Zea mays
  Clone ID: UC-ZMFLB73042B10_FLI
tgccctctaataacagcagcagcagcagccgccatggaagccagcagcaagaagctccaggcgttcatcctcacgctgctgctggtgctctccaccgccgtgactcccatcctctcgctgtcagtgccagacgacgaggtagcctgcgactgcgataaacccaaggcgcccaagccgtcgcacccgcccaagaccaagccctcccacccgtcgccgtcgccgaagcccaagaatcccaagccacccaagggcagcaccgggtacccagcgccggggcaccaaccgcccaagagcccctcctaccccccggtcgtcggccctcccaagggccccgtcacgcgcccgccagtcatgcgtccgccggtcgtcggtcctcccaagggccccgtcacgcgcccgccggtcacgcgtccgccggttgtcggaccaccggtgacctacccgccgatcaccggccctccgacgacgccgcctgttgtcggaccaccggtgacctacccgccgatcaccggccctccaacaacgccgcctgttgtcggcccaccggtgacctacccaccgatcactggcccgcctgcgacgacgcccccggtcaccggtccgcccgtgacctaccctcccggcggaggcgggggaagctcgacgccgtgcccgccgccaccgagcccgacgccgacgccgtcgtcgcctacgtgcccggctgactcgctgaagctgggcgcgtgcgtggacctgctgggcgggctggtgcatatcggcctcggcgaccccgtggtgaacaagtgctgcccggtgctggaggggctggtggagctggaggcggccgtgtgcctctgcaccaccatcaagctcaggctcctcaacatcaacctctacctgccactggcgctccagctcctcctcacctgcggcaagacgccgccgccgggctacacctgcaccgtctgatctggactagctggcagcccccggctcatgcgtccatttatccgtgaacatgggttttggagtgagctagcatccagttcatcggtcgtttgaagagagatcgacatgagaggatgtcgtctgcttcgtcgttccaagctgaagaaggcacgccggaggaggaagagagtaacaacggccgggtcgatcagctaacgatggatcgatcatttttttccccatatttattgtgttgcgtctgctgtagtttctaattttctagatgtgctttcggtttggtctgtagaccctgcagcttgatttggttaagtttgatttgatgcaagggaaatgggtggcggttgattgctaataattcccgttgatatttgtcatgcgt

SEQ ID NO: 30529 - DNA, 870 bp, Zea mays
  Clone ID: UC-ZMFLB73042C11_FLI
gtaagtggacacaggccagttgaaccaatacgaacccgatcaactacatcgatgcatcaccaacccaagcatcccaatccaaacaacttgtaatttgaaactagagattgcgaactgaatttaaatcaaatacttcagtattggtctctagagaggaagctctgccaaccattactaataactgagaaggatttggcaatcgcttatctttgactcaataccttatgacctcggaaaggtttgaacccgtcagggactaaagatgccaaaggttgaagaagggtcacgagcaaagagggcatttactatcctttgcaatcttcaccgttggaaggattatgataactgcaatttcatttcttcttggatatgagctccacaagaggatgagacccctctcttcgccatatgtataggacctaccttcttgacatgacctatgcatccaaaagttctgagatgacccacttgtggtttactgccatgccatgcctcatatggagttttcccttgcacacttcttggcaatattatatatgaggaggtacctagaccatctaatcagattcgtacactaattgatgctattggctatgttattccttggctaattacacatgtgaagcaagctagaagctcatcttgtacccgcaacaagttgatacctgcagcacgtggacaaagctagatggcgtggacaaagctagatgggaagcctagtataattgcaaagtgaatcagttagattctagtagttactaaaatttttaagtgatatttgtatgatattgcccctttggctttgcttctttgtgaacacaattggcagttactgaacatgtttgctatcgagttagttagcttcttgat

SEQ ID NO: 30530 - DNA, 542 bp, Zea mays
  Clone ID: UC-ZMFLB73042E02_FLI
attcaaacagtggaacagcttctatttgcgtcgtcaactactgcagaaccaatattgacgccttggccattgatgcgggcacttgatgatatggaaaatgccaacgctcaagtcgaagtttctgtggaagaagtaaccaaggctcgcacccagaagataaagatctttgaaaatcgtgcccatgaggtggggagggagaggcaaatattcgttgatttcttctgcaaccctgaacgcctcaagaatcaagtcagagagctgacctcccgtgtgaaagctctccaggactaacctgtttctgtaggctggtctcacaggtcgtgatgctttttttttctatgtaaagtttgacttcactccagcgtcaggttggggctgctgtgcagggacggtatggaacaatatacccatcatgtagctcgggggggttcaggctgtaggtccttgtgccacccggaataggatggcattgttgtgatattatttgtagcgatatgtatgttgtaaagtatctcagaaatcacgagccctttctttcgtgt

SEQ ID NO: 30531 - DNA, 964 bp, Zea mays
  Clone ID: UC-ZMFLB73042E09_FLI
gattttcgaaccctccccacccccacacccacccgatccaaccgagtcccggcggcgatggcggcggcggcgacgaacgccgatgtggaggtggtcgacttcgacctcgatgacgacgacctcatggacgaggacgccgggccggatccagcaccgccccccgcctcccgcctccgctccaccatcgcgggcgacgacgcgccgcgtaggaccaagggccgcggcttccgcgaggaccctaactcctccgcgacccgcgactcgcgctttggcgcggggggacgcgccgacctcgactcgcttggcggccctggacccatccagtcaattgaaggatggattgtgttggtcacaggagttcacgaagaagctcaagaagatgaccttcaaaatgctttccaagaatttgggcaggtcaaaaacctgcatttgaatttggaccgccgtaccggatttgtcaaggggtacgctttgattgaatacgagaagtttgaagaagctcaggctgcaataaaagaactggatggagctgagctttataaacaaagaatgagtgttgattgggcatttagcagtggccctgctaaacgcagaaatactcggaaaaggtcaccaccaagagctcgttcaaggaccccacccaggagaaggcactgatgtttccccagcatgtcttgaactacttgctatgtgtgacagagagcaagaagtctggggattccaaatattaccttggtgtatgtggatcacctgatttcgatggtggttattaaattgcctgttgtttccttattgggattccaaatattagctttgaactctggtgtaagttgatgagacatggatgtgcacttagacgcttaccattatgtttggcatgccagttggagacgattgttggaggcgattgtatgggatcatgcttttggatttttgacgagtgatgagttgatgttggattttt

SEQ ID NO: 30532 - DNA, 872 bp, Zea mays
  Clone ID: UC-ZMFLB73042E11_FLI
ccgaagtacaccacttccgggatatggacagagtacatatgcttcccgcaggaacccaagcccatacaattctgagatgcaccaaggtattcaggctcccatgagtagcaggaacctctaccgagcacctgggtcagccgaagcctatgtggcaccttgctatgcagctggaaatctgattgggaggccacatcaggtgttatcaccatcaacttttccagcacatggtccacaaccagctgctcagtgggtgccaaatcaaggtagttcccgctcatggagttctgacagttacaggccttactatggacaatagtctcatgatgtgcaccggccgtcgaatgctgctttggcaccacatcctagctatgctatcgtcacggttctgcaccaaactacatgaatcaatggcggagaccttggtagaattagctttgatggcagcttgtttattttctatataaataaggccatgtttggtttcaattagtcttaggactaaactttagtcctaggactaaactttagtccctacttgtttggttctagggactaaatagactcaaatgctcttggaatacactcatgtgggcttttagtctcttttagcacctatgtgaaggactaaagactaaatcattttagtccatattttagtcctagtgtttggcaaaaaagggactaaatgggactaaaaactagagactaatctttagtccctctaaccaaacaccccctaaaacgagaggtgtaaataacagtgctcaggttctactcgttctagggaaccttcgtgcgtctgttacgtacaaagctacgcatttagcaacacgtttgtgaattaccttcttcaaaagttctgattttggtgg

SEQ ID NO: 30533 - DNA, 821 bp, Zea mays
  Clone ID: UC-ZMFLB73042G06_FLI
gtcgcgcgcggggccgtccgaccgggctctcctccctcgttttacccgcacccgccgcaacgccgagaagacgcgagagggagggaggaggtgagccaccggaagcggagacgtgagcagtcgaccaaccccgtcgatccggctgcggcccggcgtgctagatcgctaccgatcatggtggtggaggagatcgccgagggggtgaagaacctcaccgttaccggagacgcggcggcttcaggcggagaggggcagaggaggggcggcggcggcagcagcaaccgcatccaggtgtccaacaccaagaaacccctcttcttctacgtcaacctcgccaagaggtatatgcaacagcacgaagatgtagagctatccgctcttggaatggccatagcaacagttgtgaccgtggcagaaattctgaagaacaatggatttgctgttgaaaagaaaattaggacctctactgttgaaataaacgacgaatcaagagggcgtccattccaaaaggccaagattgagataatcttgggaaagagcgacaaatttgatgagctgatggccgctgctgcagaagagaggggcgaagtggaagatggtgaagagcaggcttgaaaacagtaccgatgacaagctgctgctgctgtgctctgttagtgttgtttaatttagtttaataccgtgtgcatgagatatggcacgcgttcttgctcaactacatcaccatggcaatgtctgcaaatccatggattgatggatggatgttggttgtttcttaacattctggacatgttgttcactttggctatgtatgttttagc

SEQ ID NO: 30534 - DNA, 635 bp, Zea mays
  Clone ID: UC-ZMFLB73043A03_FLI
gacacggagctgaacctcctcgtcgacgtgctcttcgccgccaccttctccgccgcccggatgggcgtcgggccgtacctcacctacgtcaccgtgacggccgacaaccccatcctcatcaaggcgatggcgacggggctgcagctggtgagcgcctactggttcctgcggatcctccggatggtcaggtacaagctcgccggcaagaagaagccgacgccggccaagctcgccgccgccgccgccaactgacgtaataagcgccggcgacgaccttcacgagctacgcacatttatgataccgggagttggattcgacagaggccgtgctgtacatatagtacaaatacacacacacgcccgcctctgaagcaatgcaatgcaatgcaatgcaatttctccactgccaaggatgtgtctgtcatctctcatcaaccaagtgtcggtgcgtaccaactgtacgcgcgttgctagcgcaaaaagaaaagaaaaaaaagaaagaaaaaaatcgttcaatgagtcctgttgaatgtggcggcactttaactgcaaactgctgtgagtgcgccaaaacgattgatggtgatgaatgatgatgatgatgtgcagcactgtgaccacgtcaacctttcacc

SEQ ID NO: 30535 - DNA, 1312 bp, Zea mays
  Clone ID: UC-ZMFLB73043B05_FLI
ggaaaaaacgcttcatgcatcatagaggaggcgagagcggaccatggagatggtgcatttgtcgaaacattaccaagacaaggggacgaaaagacggaacatgcaaactcaagtgtctcaggttctggagtgccagaacaggtaaaaccaaaagcaagcactgcatcaggtccatctctagatgggagcacaaaagctttgggttggcaactgctgggctcatctctagaggggagtgcaaaagcttcaggctggaaaccgccagctttatcgattgaagggattgctaatgcctcaggttcgcaagcattgtatcctacgcaagggagcacaaaatcttcaggttgtcagcgatcaagttcatccccagatgggagtagaaaagcctcaggttggcaacagtcaagtacatcaccggtggggagtggaaaagctcatggctggcaacgatcaggttcttttacccagggtggtacaaaagctgcaggctggcaaccctctggttcttctacagatcggagtgcaaaagttgatggctggcaacgaacaagttcatctccggagggaaacagaaaagcttcaggctggcattcatcaggtcgtgagagctcaaagatcacatatggtgccagtgaaaaccgtaaatcattttctagccaccaagcgacgacaccaacagggagacactctttggcaaggaggcagggaagcagcgacaagggtgctgctggttgggaagagagtctaggaaacacttgggaagcatcaaagagacaacagagaaacagcgacaagaatgcaggctgcggagaggctctcggaagcaacaggacctggcacccatcgtctggtaaccccagtcggagcagccaggggaatcaccaacatgacaggcattctcacggcagtgattcgcggcggggtagctcaaactaccctcggaggtccgaccatcgtcatgaccatggcagtggtggttcgtcaagaccctcgtcaagagggcagccccagaggggggtttgtaaatactacgagaatggccactgctggaagggctcgaaatgccagtacctgcaccgatgactgccgtgaccgtgggaaacggaacgccctcacatttttgtatagcagcatatggtctcgtcgtagtcagtaaaaggaggaactgtgtcggcgggaccactagttcgtagtagtacatatccttcagagcaggagcatgactaaagattctccgctttggtgcaggaatgcgccccttttgttcagttaaacggaggtgtgggcatttgcaaacatggattttctccat

SEQ ID NO: 30536 - DNA, 3039 bp, Zea mays
  Clone ID: UC-ZMFLB73043C08_FLI
ctaccctccctcccctgcacctcttctccctacctttcccctcccataccctttcatccaagtaccctcttagggttggtcacatctaccttcgtcgatgtccgttttagttgttattataagttgtatctagttagtgcctaaggttggtggatgcatttttctcaatggaggtcgtttctgattggttacattggtagctggcatatttgtatgattattatcaagtgctcttctctggatttagtaagggaaaagaaagagaaaaggaacataaaatgtaatgcatcaataatagtaaataaatattcttgttttcactaacgccccgtttggatcctcggaattgaattccattctaataatagtaatttaggcaaatatcaattaagctagtatagttttatgcaaaatatatttgtatactattattactttattagcaatatgtgggagatatttatgtgctgcatttttactacagaggagtgagtagaagagtgtcttataagttgcagagtagaaacatattccactgatacacaaaatcattttctatcctccacccccatgaatttgagatagtcttatatctgaactgtggaaagtggcggaatatcaaattccaagccaaatagactactctattaagtaaatttcaattccttcaaaatgaatagatccaaatggcccataaggtaaatataatgaacttgattggcacaaatttgtcatttggttgcactgatttgtgtaacggtttaataccatctttcaagcaggattttagctccttattacagatctgcaagctaccaactcgagttatttgcatctgtatgttgattaaaagaattactttacaatcttctacatgatgattagattataattcttttgcaatcttttatgtgttaattacaagaactatcttgtgtttatcctccatagtgtcatttggttgacgcacctttaatacgctgttaaggcgagcttcaaaattggaacatgtggattatcagttcataaagaaacatctgtctgaacagtttaatgagtttcactcactttccactgtgaatattgtagatttgatcactttgttactggcgcatgaatgaatgcttgttagctgtgctcgtttctgatctctttctctagacaatccttacaaagcctagaaatgcattgattgatttgattctaatactttaataacagcttgatgtcacaattttacccaggagtgatgataaattcatctgcattatctgtactagcaggttgaaaggttttgaacatgtacagttgtgtgctagtctgctagtacccttgattcattgttattggttattgccgacaaaaactttattgtagttgtaagcttttctgtatgtttgtataaatattaattttgtttggcgtagagatcagacaacctttggctgccactttcaatttaagatcatttcactttccagatatattggtgcatgcatttggttttactataatgtttcacatgtggtattaacagttgacgtatgtgtgcacaggtattttctgctttcggatttgttcataagatcgctacctttgagaaagcatctggttatcaggctttgattcagttttctgatgctgaaactgcaacatctgcaaaagctgcactggatggtagatgcattcctagctatttgctaccagaactggatgtggcctgcactttgagaataacctattcagcacacagtgttctcaacgtcaagtatcagagccacaggagtagggacttcactaatccttaccttccttttctggactctgctaaagatggctctggaccggatggaaaaaaacaggaagcagagagcaatatactgcttgcttctattgagaacatgcaatatgttgttacaatagatgtgcttcatgaggtcttttcagcttttggatttgtacagaagattgctatttttgagaagaatggctttcaagcattgatccagtatccagacattcaaactgcgtatgcagcaaaagaagcactagaagggcacagcatctatgaaggtggctactgcaaactgcacctcacattttcacgccatactgagcttaatgttaaggttaacaatgagcgaggtagagattataccaaggggaatgccactccaagcagtgatcaaccttccattcttggtcctcagccaataccaagcgttggtgctgctattccaccagcacagggtagtgttccttctgcagccaccaattcagtaatgccaccaggggatccatcagttgctctaccttctaatccttccagtgagccactcctgcaagcacctgttgtttcctctggagggcctccgcattaccctaatcaggccatcctacaaggcccacttggtgttgttgcacggttcccaggctatggtgccctgcagtttgctcagggctcagctcaagctcaaatggtgcagccttcaggccaaggaagtcaacatatgtcaggtcatgtaaattatcagctacctccaggttcagcccaattcatgcagtatctcagcaacggaagccatccacttccaaacgcacctgggccacagacaatgccttaccctgccctcagtgggcagcagctacctccgggtcttcagatgatgcaagctcaaggttttggaggcctgccgttttcacagggtcctggacaaccaatgccacagttcccaatgtatggcacccagcagtttcctccgggtatggagcccaagatgatgcgcttctctgagcagggaggccagcagtttacatttgcgccgcggggtccaaatagtcgttagcaaatttgaacttagcaacgttagatcgttgatggtgatgaatggatgtcaagccttctatgttgctgttttctaaggtgaataccgatgctgttccattactaggatctatacttggtttatctctcgtactgtggccaaaacaaatgtctaatctgaggtttcgtagccttgtatttgtatcgatttcctc

SEQ ID NO: 30537 - DNA, 2460 bp, Zea mays
  Clone ID: UC-ZMFLB73047D12_FLI
gagaagggggtgttctgaaacgagctggacacacagaggcatcggttgaccttgccatgctggctggattacctcctgttgctgtcctttgtgagattgtggatgatgcagatggttccatggctcgcctgccaaagttgcgtgtctttgctgaaagggaaaatttgaagattatatctattgctgacttgattaggtataggaggaaaagagacaggctagttgaacgtgcttctgttgcacgcttgccttcgcaatggggcaatggccatggatattgctacagatctgctattgatggcatcgagcatcttgccatggtgaaaggtgatattggtgacggccaagacattttggtgagggtgcactctgagtgcctcacaggcgacatttttagatccgcaagatgcgattgcggtgaccagcttgcaatggcaattgagatgattgagaaggccggaagaggcgtaatagtttatctccgtggacacgaaggacggggtatcggtctgggccacaagcttcgtgcttataacttgcaggatgatgggcgtgatactgtggaagctaatgaagaacttggtcttcctgtggactcacgagaatatgggattggcgcacagatactacgggacctaggagtccgttcgatgaagctgatgactaatagccctgcgaaatatagtggtctgaaaggttatggactgagcattgcgggcagggtgcccttggttacgccaattaccagcgagaaccgtaagtacctcgagaccaaaagaacaaagatggggcatgtatatggattggctaatgcgcaggttaaccagccaagtggtagccagagcacagaagagaagcattgagcccaaaaaagtgatgcattcttctttttgggagttcctgaaatcttctccctcgatatttccatatattcttttttttctatatttccatatattctttctttcacatagaaggccgttttgttcttcaactgtagctgtaggtttcaagatggttaatgagcttaataaaagcaagtttaataatataagcaactgttcttgtaatgagctttacagtctgtcttagccgatatgtataatggttagcctttacaatgaatatatggtcaactgtttttctcacaaaatttaaagtctatcttaatggccgatatgcataagagcaagttaaataatatggtcaattgttagtttatagcaagtttaataatatcaacatttagccggtgtataactagctattatactaaggcggtctccagcagttatcctatctaatcctctatcagttatcctatctaatcctctatcttatcctccatttcaaacttaactctgaaaacaatgttatctacagtataaatcaactattttacacgatctgctaggtgttaagctttgttgcttggtgtggttgttcgatagagttgtgatcggatggtgtggcttttcaatgtcgtttcctatacccgctttcatatcgagtatcgtgtatctattgctatctctaggtatgatatagcattgtagcatgtcttggcgtgtagtggtgcaaccaaagttgtgcgcagcagagtaggtttgctccattgtgcattgcttttaggttcgaatccattaaaaatgctcccttgtgcattgattttaggttcgaatccattaaaaaactgattgtgacacatcattttttatttctttttctaaaaaccatggcaaaacatttatggtcatttcaaaaataatgaaatgtgccctttctttttcttatttccacctatgtaatcctttgctaccaatcacattatcactctgaatacatataaactaccgcgactctagcacgtaataatgaaggtcctgtttgtttccttccaggattacataattcggcctatggattatataagcacctaatgatctgcttatggattatcataatctagatatctcgattatgtaatacacctaataattatttgtttgtctcttaacttatttaagccggattatacttcctctgttcgcttaacttggtcattttagcctgattgatttgtccagtgaatttgatgctcccgcagcccaaatactgtgtcccatccgtgaacatggaagagccaccgaagacggagaggaacttgtcaagcaaggatacatacccgacttgggcattttggtcttcagttgcggtcgttgcacgagctgctagaggtgtttgtcatcgttgtaacatcagcgtggtccaacatcttccgtatgttcgcaaacattcctccaagccatgaagaggtgctttgttgatcaatctagatgaggaggacgaggtcaactttgtgaaggtacaaatggagaatgtaacacccctggtgttatgtgaactaaaacattggcatgccatcatatgtactggcattatattgctcgtgttacactt

SEQ ID NO: 30538 - DNA, 3458 bp, Zea mays
  Clone ID: UC-ZMFLB73047E02_FLI
cggcgaaaccctagctccacagcgccgttgcatggagtcccagcgatacaactacggcagcggcgccggcaccggcggcaaaatccgccgctaccctccctctcgcgccgtggctgcgtcaccatatgctcgaccggccaccgccccgacccacgctcctggaaccgccacggcggcggtttcgcatgagggcgggtggctgtcccggatcatagccgccggcacctcgcgattccttccctccttgttcagcttcagcacgtctcaacctcagcaagccgcgccggccccgtcgccaacgcgcgaccagctgccagtcgtcgagccgccttcgccgcttcccccacctttagtggatgatcgtccagaatgtgaagaaaacggtggagtggctgccaataatttgtgtactgaaaatcctcaaagttgtaccaaggaagaggaagaaaacatgctaagaaattctgatgaccatggtggaacggctcttgaagaattattgaagcagagaactttcacgaggagtgagtttgaatatttggccaatttgttatggtctaaaactattggagcaaattcactgaagctagaagatggtaacgtcaggaaaatgattgtttatgacaaagaaaatgcctcggaatactccaacttacctcttaatttttccactacaacattcagcgctgatgatcaagttgccacgcctgcagaaattgcaaaagcttatatgggtttaaaatcttccaagggttcccctctacgccttagattgcacgatccctcctctatgcctatcacatctatggaagttagtatgtcacaaaaagctaagcctcccacaatcccacttgcccaaggctcaagattgcatacttccaaaacttctgattgtcttgaaagcaactacacaacaccgaatggagtaatctgcaaaatgtcatcatctccttatttcaagagtggtgtgtcttcaaaggagctatttggttctgtatcttcacattaccagacctcaaatagtgttcatacttttggcagacaggttttgaagaggaagagtactgtcagcaatgagtttgtatctgctggtccgatacgcagaattcatcaaagatacaacagaacatcaccactgttggaaacacagctgggttatcgtagataccctgtgggctatggaagcaaactcgaaggttctgagcaattggcacggactcaaaaacgccggtgtctggataaagttggtgatgccagtctcggtagcgtagaggacaaaactaatgtgaactatcctggtcaggtgccagagaagtcagctgagatggcaactaagatactgaagcagcttgacacattagtaccttcacagaaggaaaacacatcagaaacaaagcagaaacatgagagtgccatatatttcgaggaagatgtttctcgacaaaagaaagtacaagcagagagagatcttttggaaccttctccatcagaagtacctgatggtattgcatcgaacaaatcaatctcacaaattaccttgaacaaggaaaagcctccagccttttcttccagaggtaatgctcccaatctggtattatctgatgaaattggacgaagcaaaatgtccactccaggaaatggcttcaccttccctgccccgactgtcaacaatgcctactcacagggccctccaacacctacattgacatctcctatactaacagttgaaaagcagccttcagtattctgcagtgcttcagtcacttctgcacaaagtgaccctaggatttcaaaatcagttttgggaggaccagttacacagaaattagaaagcaagttaaatggagataatcaacgagtgccttccaagaattctggacaagttgcatctttcacaagtaatcctgtatttaaggttgatggccctgggcatgcgtcaaactctgttctctcagctgtacaatcttataatacatcaactggctcagtttcatttcaaagtgctggctcttctaccatctccactaacttaacttcaaacattacacagagctgttcaactggaggcagtttcactttctccaatactcgttttggtagtttatcggcaacctcaaatatgtttgcagcaaaatctttagcgttgtcttgtacagcaagccccggtgcttctttgggtttccctccagttcatactgcaagttctccagctgctcaccgcaaatctgaagcagcaaatagcagtatcagttttagttccatgcagcagtttggcattgcaggttcttccacagtgcaggacaaatccaaggcagtagacagcagtaccccttttggctttccccagaagtttgacaccgtgagttccgcttcagaggatatgtccaaggcagactctcctgagccgacatttttttctgggaatcataatgtgcaatcagaaaattgcagttccctgttcacacagagtccaggaaataatttgagttccaaatcttcagaaaatttgaactctggaagctcgcatagttttgcagattcaccagttggttcagcaacaatgtgctctagcccttcgaattcaaactctctgttttcttgggctgctggctcaggtgcaagaactgctccaccatcttcccctgctacaagctcatcttttgcttttagttccagtccagcattttcagcacaaccagtattcgccagcaaattgactacacctgcttcactttcatatggctcaccaaatactggccctgctacatcaccattcagctcaatgccaagcgctgtattttcattcacgtcagctactccttcaataccaaatccatcacccacaacaccaatatttggtgaccctactgtacagatgaatggagggaacatagttattgacaggaatgggtccccttcccctgcaacttcgccatttggcttgccaagcagctctccatcgactccaactttcagtacgcctgcaactcagtttgcttctagtacatcaggctcacctggagtttttgaaattggcaagtatagtcaagcttcttcaggtgggttctcaatgggccctagtggtggcaacgacaaatcaaacagaagaattgtcagagttaagagaaggaaatgaaataccaatatttttcaagttgctctgagcatttataagactaaggcaatcagcacgtagaactttttgtttcacatcatttgtctgcggtggcaatgagaatgagatgccattcttaaattgatgatcacaattctggcacagtagcagcaatggaactagccttttcgcgatacggtcgcccatgacattttgttgtacggtttgtcacaacaatgctataatgaaatatataggtacttctccaacttgtattaaacatgttcagcgatcaagctgccctttttttgtgcaattggatcctgaaactaaatttcatcct

SEQ ID NO: 30539 - DNA, 1848 bp, Zea mays
  Clone ID: UC-ZMFLB73049A11_FLI
ctctcagccgccaacgccatgggctccaccgccgctgcctccgtgctcccggtgtccgccggctccggcgagaacctcgtcctcatcctcgactacggctcgcagtacacgcacctcatcacccgccgcgtgcgccagctcggcgtcctctccctctgcgtgtccggcacggcgccgctcgcctccctggagggcctccgcccacgcgccgtcatcctctccggcgggccccactcagtccacgcccccggggcgcccgccttccccgagggattcctgggcttcgcggctgccgcgggcgcgcacgtgctcggcgtctgctatgggatgcagctcctcgtgcagtcccttggaggcgccgttgtgtccggggagcgccaggagtacgggaaaatggacgttgaggtgacggcggcctcctccgcgctctacgggcaggcggagaccgggaagcgccagacggtgtggatgagccatggcgacgaggtggttaggctgccggaagggttcgaggtggttgctcgcagcgtgcagggagccgtcgcggccattgagaaccgggagaatcgcttttatgggctccaataccaccccgaggttacacattcagcccaaggaatggaaacactgcgccgctttctctttgatgtttgtgggatcaaagctgattggaagatgcaagatgtgctcgatgaagaaatcaagaccatccaaagcacggttggccctgacgagcatgttatctgtgcattgtcaggtggtgttgattcaacggtcgccgccactctcgttcacaaggcgataggagataggcttcactgtgtttttgttgataatggtctattaaggtacaaggagggagagcgagtaatgacaacctttgaaagtgatttgcacctgccagtgacatgtgttgatgcctcagagcaatttctcagcaagttaaagggtgtcgaagacccagagaagaaaagaaagatcattggcagggaattcatagctgtctttgatgactttgctcacaagctggaacagaagataggaaaaaggcccgaatatttagttcaagggactttgtaccctgatgtaattgaatcatgcccacctcctgggagtggaaggacacattcccacaccatcaaaagccatcacaacgtaggtggccttccaaaagatatgaaattaaaacttattgaaccactcaagctcctattcaaggacgaggtgcggaagttggggggtattttgaatgtcccagattcatttttgaagcgacacccatttcctgggcctggtcttgcagtacgtgtcctaggtgatgttacacaaggcaatgctttggaggttcttcgtcaggtggacgagatatttgttcagtctattaaagacgcaggcctgtatgataaaatttggcaagcttttgctgtgttcttgccagtacagacagttggagttcagggtgaccagcgaacccactccaatgccgttgttttaagggcaatcaccagtgaggatggcatgactgcagattggtactattttgagcatgcattcctggtagatgtggtaaacaagatttgcaacaatgtgcgtggcatcaaccgcgtttgccaggacatcacatctaagccgcctgcaacggtggagtgggagtaggaggatgggagggaccctatggtctggtctgtctgtctgtcttgggttaaaacccgctatgtcatgtcactgctctcaacacgttgcatggatgtcacaaatagcaagcagttaagagtgaccattcgtcagtcaatacattaggtttatcatgaattgtttgttacttaatacaaggactgcattgcatgg

SEQ ID NO: 30540 - DNA, 602 bp, Zea mays
  Clone ID: UC-ZMFLB73049D01_FLI
gccggcgtcgtcgccgtcgcccgtgttcgggatggtgaacgtgatggacgacccgctgacggaagggccggagcaagggtcggcccccgtcggccgcgcccagggcctgtacatggggtccgaccaggccaagatcggcttcctgcaggccatgaacctcgtgttcaccgcgggggactacaacggcagcacgctcgcgctgctcggccgcaactgcccgctcgacgccgtccgcgagctccccgtcgtcggcggcacgggcgcgttccgcttcgcccgcggctacgcgctgctgcgcacccactggctcgacttcgccaccggcgacgccaccgtcgagtacgacgtctacgtcacggactagctaattaataacgtaccgccttgctagccctcaccctcactgatgagtgccataagcattactacaaagacaggaccacgcaacaacaatggtgccaataaaggctttgaagcatgcttcgccacagagcgcctgctttttcttttaaaaccagcattttcgtttcagcttatatatatatttatagaacgcatgatctgtatccaatacaagcttcagaacccctttatgttttcgg

SEQ ID NO: 30541 - DNA, 593 bp, Zea mays
  Clone ID: UC-ZMFLB73050B02_FLI
ggcaattggaatttctcaccgtgcctgtgacacaaccgcgatccgcgccgctacatgggcaatatgctggcgccccaatccgagcgaggttacgagtcacttgaagaccaagttggtacctgggaatctcgagtctaaggtgctcaagaagaaaccaaggctcataaatctcttattaaatccatgatgactcgattgtatgggtctaatgctagaaaaggcttcactggcttgcaaaagctagagagtctttctcaatgactccatgatttgaaccgaaccaagatgattatagcaagaagcctttccttaggtattatgttatctcgttagtctagtgttattcacttgttctcaaatgctataaatcaagaacaaggcaacacaattgttaatggttaaaggccttcgtccttcgaagcattatttcatctcggatataatgatcttcagacgaaggacatgaaggtcacaccttcatcattttatcatgtaaacatgaatataaataagaaagtaaaggaatatagaagaatactaaggagtaagggtaataattgctatatatcaataatccatttatcattatcttc

SEQ ID NO: 30542 - DNA, 1369 bp, Zea mays
  Clone ID: UC-ZMFLB73050B03_FLI
cattgactacaattacctatgctctttcacatcgttaaaataggttagcgagtgccaaagttgcattaactgcagccatgttttgttctctttacttatgttttggaaccgcgactcccaggtatgggtaatgagactttgtaaaatggcaggagtatccatatttttcacttgcccctccggaaatgctgactcacatatttattattaggatgctgatggtttgcacaaagcactggaagcatccattctaagaaatgagggttcatggtctggttcatctcattcctcagccgctgaaagaacactgcccttccaagttaaaggtggtgagtgggaaatcgacaaacgacttctgaagatgggagggatggttgcttctggttcttgtggggacttgtatcacgggacttaccttggtgaggatgtagctgttaaagttataagagctgagcatttgaataagaatgtttggaacgagtttacgcaagaagtatatatactaagagaagttcaacataaaaatgttgtgcgattcattggtgcatgcacaaaaccaccccaattttgcataattacagaatacatgtctggaggaagcctatatgactttgtgcacaagcagcataatgttctaaacctcaggactttattaaagtttgcagttgatgtatgccgagggatgtgctacttgcatgaaaggggtatcatccatagagacttgaagactgcaaaccttctaatggacaaagatcatgttgtgaaagtggctgattttggtgtagctcggttccaggatcaaggaggtgtcatgacagctgaaactggaacatacagatggatggcacctgaggttataaaccatcaaccctatgataacaaagcagatgttttcagctttgctattgtcatctgggagctgataacgtctaagatcccgtatgaaagcatgacccctctccaagcggctgtaggtgtgagacagggattgcgcccaggacttccaaagaagacgcatccaaaggtattggacttgatgcagagatgctgggaagcagacccatctgcccggcctgctttcccagacattttagccgaactggaggatcttttggcacaggttcagggaacaccgggaaagacggcccatgctccatcaaataactcgaacacgaaagattaacccccatgcacacatacctgacgtttttctgaattcagtgatctgccatgtttaggattcgagtcgctaattacgaggaatgtagcatatcgatttttttccctggatggttttgcttgtgtacatttgaacaatcttcttggggcctattttttatggtcacctcattgttcttacataggggaa

SEQ ID NO: 30543 - DNA, 933 bp, Zea mays
  Clone ID: UC-ZMFLB73071G04_FLI
ggagattcaatgttcgactatggaagatattctgtgattgcttcaactgcttgcctatggcagcacttattgatgacaaaatattatgcatgcatggtggcctctcacctgaattgactagcttggatcaaataaaagatattgagaggcctaccgaaattccagactatggtcttctgtgcgatctcctttggtctgatcccagtcatgatacagaaggttggggggagagtgatagaggtgtttcttgcacttttggcgcagataagcttgttgaatttttggagaagaatgatcttgaccttgtgtgcagagctcatcaggtggtagaagatggctacgagttctttgcagagagaagactagtgaccatcttttcagctccaaactactgtggcgaatttgataatgcaggtgctctattgagcatagatgaaagcttgatgtgttcttttcagatcttgaaaccaaatgaaacaggtgcaccacattcaaggaaacctcttccaagcaaggcaccaaaaggagagaacgtctaatttgtatccagtgacctaatcacaatcgatgtcagctcgaagggggcgatctcgttgtctcggatccaccagggcatggcattagcgttctacacttgctgaatttgtgtggactcaatcggcagcgcttacattcttctgtacagcagcagtgtttctaacttggcatatcgtccgttctgatagtgacattgccacagctgcaatattttagtcgggtggacaaggcattttgttgggtacagtagctgttgttttgttagcctttttttggtaatgtttgtttggttgattgaacgctgtgagttttgtttgccgcgtatcttcgtcaggctcgggtatttacatcctgcaactgtgtaaatgattttgtctaacgaatgtctgttgacat

SEQ ID NO: 30544 - DNA, 2050 bp, Zea mays
  Clone ID: UC-ZMFLB73076H09_FLI
tctagaccaaaccttcgacccatcacctcgagctccagccatgtcgctctcgtcggcgcgccagcgccgggccactgcagcgtcgccaccgacagatgatgggtacgccaaggacgccaaggacaggaggcggcggcccggcggagacggggacagcgaggacgagggtatcaagtggttcctcccgttcctggcgctcgggctcctccgccacatgagcgcgtcctccaacctgatccacgactgcgacgaggtcttcaactactgggagcccctccacttcctcctctaccgctccggcttccagacatgggagtacagttccgactttgctcttcggtcatatttgtaccttttctttcatgctcttgtagctgggcctgcttcattgatctttggtgagcataaggttcgtgtgttctactcagtgagaatctttcttggtctcatttcaactattaccgaaactgttctggtggttgctctttcaagaagatatgggaagcggcttgcttgttatgttcttgcaatgctatgcttatccagcggttgcttctttgctagtaccagtttcttgccaagttcattctccatgtatgcagtaacactttcgtctgcactcttccttcttgagaaatatgctggtgcagtctcagttgcagctgctggagtgatccttggttggcctttctcaattttggtcttcctccctgttaccgtttattctctaattagaggatcttttagaagggtttttctatctggatttgtgacttcactgtgctttcttgttctttcgtttgttgctgattattactgctatggtcgattgacattctcggtgttcaatcttctgaaatataacgttattggtggcggcgaaagtcacttgtatggaaccgaggggttttcattttacttcaggaatggattcaataatttcaattttgccttcatcctggctcttcttttcttgggggttgtaccatttgcaagaaagaaatatgctcctgatctcctgatagttgtctctcctgtctatatctggttggctttcatgtctttgcaggcacacaaagaagaaaggtttctctatccaatttattcattgatatgtgttgcagctgcagctgttattgacagtttacctgattttttccatgacaaatattcatctgatcagtctatttttgaaaagatagcgaagggtctgcgtcctttgatacttggttttattctgtgtgcttcccacagccgaacattttccatgttaaatggatatggtgctcccctgcagatctatcagcatctagaacatcatgatgacactggacccgggtctattctgtgtgttggaagtgagtggcatcgctatccatcatcgttcttcataccctcttatatcagtgaagtccggtggatagatgatggcttccgtgggttacttccatttcccttcaacgagacactgggtgggaccactgcagctccgtcctacttcaataacaagaacaaggcggctgaagggcaatatctgaaagacattggagcatgtaacttactggtggaacttgatctaagacggccttacccctcgcgcgggagtgacttgtcgacatgggaggcattggccgcactgccgttcctggacagagagctttcccctgcattatatcggtccttcttcataccataccgatggcaacaaaacaatgtgttcggcctgtacaagctactgaggaggttgcatcctgaccatgcgtaatcaagggaaatgtggggtttgcttcaatgagcttaatcacgtgatttcttttaacaaacagcttgcagatttttactgccatagattttctgatcccaatgtgtaatggcgtacctatttttgtcccactgatccttccatcatacaaattcatcacgagatgacgaggatgagagtgctcaactgctgatgtagggagggatgttcgaggagaatcatgttgtgaaacggctgcttcgccagttgttacctttttggattgtttgttgaatattagccaatgac

SEQ ID NO: 30545 - DNA, 1523 bp, Zea mays
  Clone ID: UC-ZMFLB73076H11_FLI
caaaagcaacaaacaactcccaaggtccaaagcccacccgtactcatccgagatccccaaccatggccgtcggcgacgtggagacggcggcgccgctgctgcccccgccggcgtctgccctggcggacgagccctccgcgggcccgcccccagacgaccggctcggcatcggctacctcatcttcttcaccctgggcgccggcttcctgctcccctggaacgcgttcatcaccgccgtcgactacttcgacttcctctacccgggggcccccgtcgaccgcgtgttctccatatcctacatggtctccgccttactgcccctgctcgtcatcgtgctcttcttccccaagtccagcgcccccatccgcatcaacacggggctcacgctcttcacgctcacgctcgtgctcgtgcccgcaatggacctcatctacgtcaaggggagggccgggctgtacggagcgttcgatgtgactgtcgccgccacggctctgtgcggggtcgccgacgcgctcgtgcagggaggcgtcatcggcttcgcgggggagctgcccgaacggtacatgcaggccgtcgtcgccggaaccgccgcctcaggagtgcttgtctcggcactgagagtcttcaccaaggcactgtacccacaggacgcgaacgggctaaggcaaagcgcgatcctctacttcgtggccggcatagtcctcatggtcatctgcatcgtgtgctacaacgtggcggacaggctcccggtcgtgatatactacaagaacatgaagaagagggcgcagaaagcggaggtcggcggcggcatgacgggccccgcgtggaggtcgacgctgtggagcatcgtcgggaccgtgaagtggtacgggatcggagtggcgctcatctacgccgtcacgctctccatcttcccagggtacatcacggaggacgtgcactccgaggcgctcggggactggtaccccatcatcctcatcaccgcctacaacgtgttcgacctcgtcggcaaggccctgcccgctgtctacctcctccagaatggcagcgccgccatcgcggggtcctttgcgaggctcctgttctacccgctcttctacggctgcctgcacgggccgagctttttccgcaccgagatccccgtcaccgtgctgacgtgcctcctggggctcactaacgggtacctgacctccgtcctcatgatcctcgcgcccaaggctgttcccatccaccactcggagactgccgggatcgtcatcgtgctgttcctcgttgttggccttgtcattggttccattgtggcttggttctgggtcatctgataccggggtacgttctctgtcacgtcgatgtatcatagcaccatgctcgtgttcttttgtgttcgatttgccacgcaatgacaacttgttagtgtatactgtaacccaggtgaaaagatttccgaaatgtgtaatttgcaactcttggaattggatttgaaggtgacctaatgtcaatgtgaagaatctcggctccttatc

SEQ ID NO: 30546 - DNA, 1526 bp, Zea mays
  Clone ID: UC-ZMFLB73091E08_FLI
gggactcgtccttcgcgcttcttcgccagctcgtccttcgcgcttcgtagccagccgtcggcgagagagggtgagaggatcctacgtgccttgtacgctcgctcgggagccggccgggatcgcgccgcgccatcgtaccccgcccggacatgtgcgtggaggggctggacgacgcagcagggaggctcggcttcggagaccaggacaccgacaggcgcgccggtgatgcgatggagagagtttgtgagaacacagtggctgttgacttcaagcagactaagctgaacaactttgtgccattcatccggtcaggggaatggtctgatattggaggtcgcgattacatggaagatgcccatgtgtgcatctctgatctggcaaagaattttggctatgactcagtcgaagatgaagtaatttctttctatggggtgtttgatggccataatggcaaagatgctgctcattatgtccgtgataacttgccacgggtcatcgtggaagacgctgattttcctcttgagcttgaaaaggtggtaaagaggtcatttgtgcaaactgatagtaagtttgcagagaaattttctcatcacaggggactttcttctggaacgacagcacttacagcaatgatttttggaaggtcccttctggttgcgaatgccggtgactgcagagcggtgctctcgcggcgtggcactgccattgagatgtccaaggaccacaggccttgctgcatgaacgaaaggaagcgcgtagagtcacttggcggctacgttgacgacggttacctgaacggtcagctggcagtgaccagagcgctcggtgattggcatctggatggcatgaaagaggtgggcgagccaggagggcccctgagcgccgaaccagagctgaagatggtcacgctgaccaaggacgacgagttcctgataatcggcagcgacggcatctgggacttcttctcgagccagaacgccgtggacttcgcgcggcggaggctccaggaccacaacgacctgaggctgtgctgcagggagatggtcgacgaggcggtgcggcggggcgccagcgacaacctgacggctgtgatggtctcgttccacccggacgcccctcccccgagccgagccaacaagaggaccggcagggtcaccaggagcatttcggctgaggggcttcacagcctcagagtgctcctggaaggccagtgacgtcgccgggcggcgcggcgccattgctgcccgttcgtccctgatgctgtgctacgttgctgatgagtgttaactgtaagtagcggtttccggtatcttggtgcttgctcttcttcttccgctgagggcgggcgactattcttgtccttcctccgacaataaaccaacgggcctgagatctcactgtgagacgctgtaaataaggaaatatggaagttggagctcgtcattaaggacgagttagggcatgtacaatgtagataccacgacacggtcctccaagtataaaacacacctaagacacagttcagt

SEQ ID NO: 30547 - DNA, 1650 bp, Zea mays
  Clone ID: UC-ZMFLB73091E12_FLI
gttcgccgaatgcctggcattttacgcgaccgcaaagaacctggtcacctacctcacggctgagcttggtgagaccaacatcgatgccgcgacgaacgtgtccacctggattggcagctgctacctcacgccgctcatcggcgccttcttggccgacacgtactggggaagatacaagacgatgatagtcttcctcttgctctacatcgttgggatgcttactctgacagcgtcggcgtggctccccttggccatggaggacgactcacctgacaacagcggacttcggcgtgccacagcgtacctggggctctacctcgtttccctaggcacaggaggcatcaagccctgcacggcggccctcggggccgaccagttcgacggcggcgacgcggcggagcgggtcaccaaggcctccttcttcaactggtactacttctgcaccaacatcggctccctgctgtcggggaccgtgctcgtctgggtgcaggaaaatattggatggggagtcgggtttacggtgcagacggtgttcatgctgttcggcctcgccgtgttcgtcgccggtcgcaaggtgtataggtacaagaagctgggcgggagccctctcacaagggtagcccaggtggttgtcgcagctgtgaggaactgccatctcgtgctgcctgatgatacgtcagccctgtaccacgataagcttctaccaactgaaccaaatttcaggattgagtctgccagacaattcagattctttgacaaggctgccataatcaccggcgagaagggtgcagcagcgccgacgagcccgtggagactgtgcacggtgtcccaggtggaggagctgaagatgctgctccggttgctgccggtctgggcatccatggtgctcttcttcgccgtcagtgcgcagacggtaaccacgttcattgagcaggctagggtgatggacaaccgcatcggcccgttcaccattcctccggcgtcgatagcgaccttcgacgtgatcagcgtcatggtctgcgtccccgtctacgacgccgtgctggtgcctctggcccggcgtgccactggcaacgaccgcggcctgtcgcagctgcaccggctctccatcgggatcgcgctgtccgtggtcgtcatggtgtacgcggcgctgctcgagggcaggcgcctggccctcgcgcgggccaacatgcccgccatgaacatcgcgtggcaggcacccatgttcgccgtgcacggcgcggcggcggtcttcgccaccgtcggcgtgctcgagttcttctacgaccagtcgccggacgggatgaagagcctcggcaacgcgctcgcgctgctctccatggcggccgggagctatttcaactcgcttgcgctcagcgctgtcgggtcgatcacggcgcgcggcggggaacgcgggtggctcccggacgacctgaacaagggtcatatggactatttcttctggatgatggccgctcttggaacgctcaacctgctgcacttcttgcactactgcaacagacgatacagaggcaacaacaacaacacttcttgacgtgtgctgtcatgctgtgtgcaccatgtttctcaaaatcatagtttgataatactatattttgtaattatcataataatactatagttttagcc

SEQ ID NO: 30548 - DNA, 1459 bp, Zea mays
  Clone ID: UC-ZMFLB73091F02_FLI
gtatatttctgcttcgatatggcctttggctattggtttgtggatactgctccacaggatgggtattgatagacaagatgtccgtattgtttgccacttcaacttgcctaagtcaatggaatccttctaccaggagtcaggtcgagctggtcgtgatcaacgaccttcaaggagtgttttgtattacggattagatgaccggaggagaatggaattcattttgagaaaccccaaaactaagaaatcacagccgtcttcctcttcaaatgagctttctgagaaggctctagctgacttcagtcagattattgactactgtgaaatttctagctgccggcggaaaaagatcattgagagctttggagagaaagtacaaccaactttatgccaacgctcatgcgatgcttgcaaacacccaaatttagtgttgtctcgtctggaggaactccgtcgtgtgcccaactgtcgctttaataagatctctccagtgtttcaaagctcagttaaagaagcacacttggacacagaattctggaatcgtgaagatgaggcgagcttatcagctgaagacatatctgattctgatgatgggaatgaggtagtgagtaatatagccatttcaaaggttccggcaaaagctggtctggatgcaaaatttaaagcactggagcgtgctgaaaatgcttattaccaaggcaaaggtcaggcgaagcagcagggtggcggccttgctgacaagaaaagcatctctgagacgctaagagatgcatgccgaaaaagattgttggatgctcttggacaagcaaagttgcgactcgggaatattccgtgcggagacgaggcttctgctacacaccttgaaacagagtgcttcaaaaaatatgtgaaggcgggcaagacgttctacaactcacagatagccgccacagttcggtggctgtcatctgcaacactcagtcagatgcgtgaccgcctcgacactcttatcgaccgaaccaaagatgatggtgcgtcaggctgccccgacattgtcccagagtcacctccagcatctcctgaaatcgtcgtcggcgcaaggtcaggagaaaccagtaacgacaaaccgcagcatatttgtgagttgaagagttcagatgagtctgcaaagggtgctgcatcatcgactgggaacatggtgctccccgccataccgacgttcagagaattcttgagccaaaaaggaagggatcgggcgaagtgctattcaaattctaatgcgacgaaccagccatctggtattcgtaggaagtttagtggtccccttgataaggaagaagccagcaagaggatgaaatcatgaatatctgtcgggcaacttgattttttttctgccttttcgttgtcactaatcaaacattgcaaatctacgttgtagtgaaacgttcctgaatcagaatctccatgatgattttcttattat

SEQ ID NO: 30549 - DNA, 3007 bp, Zea mays
  Clone ID: UC-ZMFLB73030G01_FLI
cttcatcgcagcatcggcgctccatcttctgctccctcccccacttcgtgctcgggttccatcttccgctccttcccccactcgcggtcggcacgcaggctcggccggcgtcagcggctccccatcccgccagtacaggaagagggccgccgcttggagctcgcgggaggtagcgtcgccaccgccgcatggaggtcccgaatggctgaatcctgaccgctgcctggagagtctcgcgcctaaatcacatcatattgagcttctcgcctttggatccgtcttattatttgctcacactgaagaattagtttgcactttggaggaaaatgagtggtgctccaaagaggttgctcgaggaaggtagtcactccacaccaacaaaacgccctttggatgacagcagcttgtattcgagtcctgggaaatttattcagtccggtggcagtgatttccatggttcttctgaacatgatggtagatttgcgaaatttcaacgtgtggagtctcgtgatgataagaggccatctgtacatcggatgcctgttggctccactaactttgctgttcaccccatctcgtctgacagcagattagagtcaaagcaaaataaagatgcacgggacagtaaggcagatgaccgcgaaacaaaagtcgatgccagggacgttcatagtgattcaaggattgaatttcaggctaataaaattgagagtgatgtaaaggtagacaatagagcagatgaaagtgaaataagggctgacaggaggggccatcctgattacagaactgacataaaatttggtaaggatagtcattctactgttccagcaaacataaactggaaggacaacaaggagcacaggggtaaaagacattttgaaccgcccgctgatactgtggattggcgtttgccccgtcctagtttacaaagtatcgatgaagctcccaaaggtccaatttctgtggaaggacgtaattccaaggacacaaatgaatctgctggtgattacaaagctgaaccaaaaaacgaagataggttcagagacaaggacaggaaaaagaaggacgagaagcatagggacttcggtgcaagagaaggcgatagaaatgatcgtcggaccggtgtaccacttggcagtagtggtgttgagcgaagagaaatgcaaagggaagatagggatgctgagaaatgggacagggaaagaaaagattccctgcgagacaaggaaggcaatgatagggagaaggattctgctaggaaagattcatctgtagtaattgcaaaggataaccctatactagaaaaagcttcatctgatggagctgttaagagtgctgagcatgagaatacgacaacagaatccaaggcacctaaggatgatgtatggaaagctcacgatagggatcctaaggacaagaaaagagagaaggatgtggatgcaggagactggcttgagcaacgaaacaaatataatgataaggaattagatgacaatgccattgaaggagatatggagaaagataaggatgtttttggaagtgtccaacgaaggaggatggtgcgaccaaggggaggtagtcaagtatctcagcgtgaacctcgattccggtccagaatgcgtgatggtgaagggtctcaaggtaagtctgaggtgtctgccattgtttataaagctggggagtgcatgcaggagcttctgaaatcatggaaagagtttgatgtaactcaggatgctacaattgctgaaagcctacaacatggtcctactcttgaaatccgaatacctgcagaatttgttacttccactaaccgtcaggtaaaaggtgctcagctctggggaacagatatttatacaaatgattcagatcttgtggctgtgctaatgcatactggttactgctcccctacatcctcccctccaccatccgccattcaagagcttcgtgcaactgttcgagttctaccaccacaagagagttatacttcaacactgaggaacaatgtgcgttcacgtgcttggggtgctgggattggttgtagctttcggattgaacgttgctgcattttcaagaaaggtggtggcaccattggtcttgagccacgccttagccacgtgtcagctgtggagcctactctcgccccagttgcagttgagcgtacaatgacgacaagagctgcagcttctaatgcattgcggcaacaaagatttgtccgtgaagtgactatacagtacaatctgtgcaatgagccatggttgaaatatagtataaacattgtggcagataagggattgaaaaagtctctttatacttctgctagactgaagaaaggagaagtcatatatttagaaacacacattaataggtatgagctttgcttcagtggagacaagccttgcattattggatcaagctccaatgcatctgaatcagaaacggagaaacaccagagcgggagtcaccattctcagaatggtgacagaggctgtgtggagcatgaactccgggatgtgttccggtggtcccgctgtaagaaggccatgcctgaaagtgccatgcgctccatcggtatcccactaccagcagaccagttagaggtattgcaggataacctcgaatgggaggatgtgcagtggtcacagaccggtgtgtgggtatctgggaaggagtatcccctcgcccgagtgcacttcctctcggcgaactagaagcagatgatgttggctgtgttcgtggggggaaaaaagaaggtgatgttggagcaacaaaggaattaatatttcttgtggacaagacagagtcgggaacattgcgtttgcttgtacgggtcaccatgccatgtgtacaaaagaaggatcagttggttagtgttgatatggtagccttactgtgttgacaataacactattcattaggctggcctgctgcccatgcatgtgccaaagctatatttgctggttttaggtcctgtgtcggtacgcaaataacttgcaatatgcttgcttct

SEQ ID NO: 30550 - DNA, 1650 bp, Zea mays
  Clone ID: UC-ZMFLB73030H10_FLI
atctcgcgctccggcgatcgggcgcggcgggcggagggtcgcgaagtgccctgcccacccccgatgctcttcccgaagcgcatcaactacgtggccccgatgctcgcctccgccgccatcctgctcctcctcctctcgggctacttcgagctcccctccatctccaccccggcgccgctcctcgcgggcgcagcgcgcttccccaccgcgctcgactccgtcggatcgcgcgaccgcgaccccttcacctcgctcctcgaggccttcgcgtcctgggacgccgccgtcggctgcccccgcgtccgcgccaagctcgccgccgcggggctggggctgggcccgggcctgccgctgccgagtgcgagcgccagcgccagcgctaacggcaccgcggaggaccctgcggcggcgtccgtcagcggcggcgccgcgtggcgcggagccgcgaggtgcgaggacctggcagcgcgccacgtcggggtgctcgtcaagggctggacctggatccctgacgcgctcgacggcgtctacacctgccgctgcggggttagctgcgtctggagcaagtctgccgccgccgtcgaccgtcccgacgcgctgctctttgagggcgccacgcctccgccgcagagaatgaaaggtttgcctcttcgtgtttacctggatctggaggccagtaggaagccaactggttttgaggacatttttgtcggttaccatgccagtgatgatgtgcaagtaacatatgctggaaaatcatttcacaccagccgaagttaccatatatcaactgaaaagagaaacgatgcacttatctactggtcatcttcaaggtgtcttcctcatagagataagctcgcaaaagacttcctctcgctggttcctcaccattccttcggaagatgtttgaacaatgtcggcggtcctgacatggcgctatccatgtatccagtctgctccaccaacgataacggcacgccacactggtgggatcacctacactgtgcgatgtcacattacaagttcgttcttgcaatcgagaacaccaagaccgaaagctacgtgaccgagaagctgttctacgctttggaggctgggtcggtgccgatatactttggggcgcccaatgtctgggatttcgtccctcctaattctatcatagacgcctccaaattcagttcactcagaaagctggcatcgtatgtgaagacgctggcaaatgaccccgtagcctacgctgaataccacgcgtggaggcgttgtggtgcgttgggtaacttcggcagggcacgcgagatgagccttgacacgctgccttgccgactctgcgaggtggttagcaagagaggtggtaagggtgcagatgcattgtgagatggatcggtcagtgccctgactcctggcatagaccatcaactcgtactttactgctaacactactgtctgatatagcctttttcttttcttgattctaggtgttttgtatggcttgtataccttgatccggacatgtgaaatagatgtaaatggtacgtcgaacgaagtgctcatgctattccgttcaggaaaaaagtgtctagtgtgttattcatgtcaagatcaagcacacattgtcgaaagaaatagtgcagctattcttttttttacacc

SEQ ID NO: 30551 - DNA, 686 bp, Zea mays
  Clone ID: UC-ZMFLB73031A06_FLI
ccaccgctactccgctaggttcagcagcggcaccagtcggctgagcggatctccggtgaggttgagggatcagggatggcgaacggcggcggctacgtgtgggcccttgcggcgggcttcaacgccgcgctcgccgccatctccgccaaattcatcgccactctgccgctcaaatatggcacggtgatacttttcaacgtgacaatgtgggggtgctacgtcaacagcctcaaagctttgtcgtccctccaggcaacagtcacaaacttcgccgccaacttcctctcgtctgggcttgcagggtatttcctgttcgaggagccgctgccttctaagtggtttgcaggtgccagcctcatcattcttggcgtcttcatcctcagcaagtccagcatcgaggagaaacagaacacggattaggtggaaaagttttgaccgctagtgttagctgtaacatatacgtactccgcataagctgagccatgggatgttttgtccgtccatgtagccgaatcagagcatgactgtcattcggctaatacaatgtagtgtagcaaacatgttgtgcgagttgtcacgccaggacatttgacatttcccatggtgctactggtacatcgagaatcatcgctgtaattgtatgtatgtggtgaattgatttcatttattttattatatttttattc

SEQ ID NO: 30552 - DNA, 1569 bp, Zea mays
  Clone ID: UC-ZMFLB73031C10_FLI
gcgctctggtgcactaatgagcggatagcgagagaacctctaacatagtatgcaagattttctttcctgatagaatcttccagagtacaaagctaacacaatacctttctaggataaatttgggagtatcaactctaatattttactttaccttgtctcgaggtgtgctctccactcaaaccatttcagtaatttgcattaggttttcttgagatattaataatgtgtaaaggtatagatgctaccttcagacatttattcgaataaaattttcacttaactggatagtggctctgattgtcattaagtattttgacttttggcatgatcactgcactcttcagcactgtgtccttgcttggagccatcacctctctgtctccggtttccttggcatgatgactgttggtattgctgtaatcattgtctgcttgatcacccactcctttttagctctgttcgtatcattgtctgcttgatcaccaccctttttgctactgatttctttgaagtcaaggctgtgaaagaaattgagcctgcacttaagaagcagctcatcatctccaccaccctgatgactgttggtattgctgtaatcagctggttggcccttctagctaagttcaccatcttcaactttggtactcagaaggatgtctccaactggggcttgttcttctgtgttgcaattggtccatgggctggtctgattattggttttgtcacagaatactacactagcaatgcatacaagttcaaagcctacaagtctcttatgttttttcttctcatcgtttctttgtgatggtgttttaataatcctaacatgtttattctatggtagtcctgtgcaagacgttgcagattcctgcagaactggtgctgtcactaatgtcattttgggtcttgctcttggatacaagtcggttatcatcccgattttcgctatcgctgttatcatctatgttagtttctccattgctgcaatgtacgacatcgcagttgccgctcttggtatgctgagcacaatcgcaactggtcttgctattgatgcttatgctcccatcagtgacaatgctggtggtattgctgagaactgatgctgttgatgctgctggcaacaccactgccgctattggaaagggatttgccattggttcagctgctcttgtgtctctggcgctttttggtgcctttgtcagcagagctggagtcaaggttgtcgatgtcctctcccccaaggttttcattggtttgattgttggagccatgcttccctattggttctctgccatgaccgtgaagagtgttggaagtgctgccctaaagatggtggaggaggtccgcagacagttcaacaccattcctgggttgatggagggaactgccaagcctgactatgcaacctattggaagatctccactgatgcttccatcaaggagatgattcctcctggtgctctggtcatgctcactcccctcattgttggaaccctcttcggtgttgagactctctatggtgttcttgctggtgccctggtttctggagtgcaaccgtcgttttctctt

SEQ ID NO: 30553 - DNA, 2991 bp, Zea mays
  Clone ID: UC-ZMFLB73031D10_FLI
ctgaagctgaagctactacactgaaggggctacttgaagcttcttgtcagaagaatgcttctctccaggatcaagtctgccacctagatgaggccctcaaggaatgcgtcaggcaactgcggctggcaagggaagaacaagaggacaaaatccgtgaaatagtttccaaaactctggtgccacagtctgaaaaccctgagctccaaaagcatatcggagagctaagaaagcgactggaagtgaccagattagaagcgtcatcttccatgttattacaacatgatctacaagaaaggcttcaggcaattgagagagagaacttgggccttaaggccaagggtcaggcaattgagagagagaatttagatctcaaggccaaacttcttgtgcagtccaatgatctgaagatagtaatgttggaaagagatctgagcaaccaagcagcggagacagcaagtaaacaacacttggaaggtgttaaaaagattgccagggttgaggcagaatgccgcaggctacagcatctgatgcggaaagcaacactgatcaataattctaggtcagcacaaaacagttgctgcatggaatcactgactgacagccagtccgatcatggggagcacatggtggctgttgataatgatctgcaaaattctgactcatgggcattggctttgattgctgagcttgatcagttcaagaatggcaaagatggttcaagaaatattgtgaacaatcctgttgagattgacataatggatgatttccttgagatggaaaggttagctgcattgcctgaatcagacggcacaagctctaactttgaaatggaaacagattctgacaaggccatcgcaagaagcagctccttgaaaatcaaaagtgaagaattgcaaaacaaggtcgccaatttgcaggaaaagtttgaagcaattgcaagcgagaaaagggagcttgagatggcacttatggaggttaggaatcagcttgacatttcctgcgatgcgctagtggcggcaacgaacaggctggtcgaaatgcagatgcagttggaatcagcaaatgactccaaactttccgctttggaagatgtggagcgtttggactctgagaggaaggctttggagttgcagttggagtccaaatctgtagaagttgaggagttacttatggctgtaacttcattggaggaaaacaccgagcagaaagagttggagtcacagttagaactgatgtcagcacaagctacagagcttcgcctgactgtggcatcactggaagagagagttcaggctgaaagaaatatttctatgcagcagaaagaaaatgcagaagctatgttgagtactaaagaagaactggaagcacagctgtgttcagcaaccactgaaatggggaaactgcgtgacatggtcaaagcactagagaatgaggtcaaaacggagaaggcactgcatgaagaactaacagcacatatacagataaaggttgaagcagctgttgatgcagttaaagaaccattggaagcacaactgtgttcaacaaatactgaagcagagaagctaagagatgttgtcaaagcacttgaggatcaagtagaaaaagagaaggcattgtgcgaagagcttgcagcaaaggtagagttgaaaactaaagcagcaagaactgctgaggctgttcaagaatccttggaggcacaactgtcttcagcaaatgctgaaatacagaaactggaagagatcacgaaacaactacagagtgagttagaaaaggagaagacacttcatgaggagttctcagcacagttagagatgaagattgaagcggagagagctcgttctatggagtctgctaaagaatcattagaggaacaattccagttagtgaactcagaaacagcaaaactacgtgacacggtgcatgcgcttgagcacgatgtggaaaaggagaaggtattttctgcagagctccagatgcagctagaagctctagaggctgtaaagaaggtgttggagtcagaagcggagtcagcgcatcaggatgccaaaattctcagccagaaggtggagtcattggaagcaaaactcacggagcatatgttggtaaccgacgaattcactgccaatgtagagtctttgcagtcagataggattgcaatggagcataaacttaaaacagcagatagggaactcataaaattgacaaacaaggtgagcttgctccatagggagatcgagcaggagagattgatgtcagaagagtacgaacagaaatgccaaaagctggaggatcaactgtcgagagatagccgtgacgcaaagctctggcgactcgcaaactcgaatggagatctgaaggttaagaaggagaaagagctcgctaacgcagctgggaagctcgcagagtgccagaagacaattgcttctctggagcgccaaatcaaatcactgacagacctcgacggcgtcgtgctggagcctgaaaggcttgaatccagcagggacatgccattgccactggacttcagaaacagtgatgctgaatttgctatgtttacggatgatttatacgactttgaccttccaaacgacagcaaaagcttcttctctccactcccgtcgatccagacctcgtctccgccctcggagatgtcagtattcgcaggggggctctcgactcttagcagttacaggagcaaaagagcaagtagaaggtgatgaaaaactaggctgcgcccagatgtcgtactaacaaatagttcatggatgctgccatatgtaggtaggtaggtcgatgtacattacaggaactgattgttagatttgtgtgatgaacatcccttccagcaagcgcagttttttttagcgtgcttgatgaggtcttaggtcttactgtgtcagtgacggttagtgtggtacaaaatgtgaactcggttatctgcgtgtgtttccagttacaggaaagtgcagaggaagtgcatattcaatgctc

SEQ ID NO: 30554 - DNA, 803 bp, Zea mays
  Clone ID: UC-ZMFLB73031E03_FLI
gcgtattatccaatgaagatatcaatgatctggttatcatagtatttccactccttcacatgaactcaatgctccgataaaagagagatgtccccattattttattttacaggcggatggatagttgtttcacattatttcttttgcttaataccaacgcttacttttttcacacggatctgctatgcacggatgttgtagaacagagggagcaaaaaattttttatcaagattctcatgtaatgatcttttcgtttcagttgttgggagatatgctgctggatagatcaaatgctgcagtcatgatgcgctatgttagctccaaagacaaccttatgattttgatgaatctcttaagggattcgagtaaaaatattcaaattgaagcatttcacgtgttcaagctgtttgctgcgaataaaaacaaaccgcctgaggtcgtgaacatactggtcaccaatagaagcaagctacttcggttttttgctggattcaagattgacaaagaggatgaacagtttgaagcagacaaggagcaagtcataaaagaaatatcggcactttgagtatgcttgaggttgtaattagtttttgtgatgaattttcttttgctaagaaagtgcatgtgaaataataaacttctgtgtaatattctgttggaccaagaggaacaatgttactcattgactctagtacttggatactgccagcaaatgtgataattttaatagattttgtggttatccatgcccttattttatgggcgtgttccactgatacaaaatattgaaggatttagagac

SEQ ID NO: 30555 - DNA, 1363 bp, Zea mays
  Clone ID: UC-ZMFLB73031E04_FLI
ctaatccgagagtttggttggacaagtgtttggattacttccatattttcaaggtttctgaagctatgtgggtacaagtggcgtctctgcacttggaagggattgctgctcgctggtttcacgtgcatagactgaaacagaggacggggtggaatcattttactcgggatgtgttgaacaagtttggcgcagacgagtatccaaaggcgatgaggagattgatgggtctcaggcagacggggtcactggacgagtttgtgcgggcgttcgaggaagcacggtacatggtatcgctgcataacccaaagttgggtgaggtgctctttgtcactcagtttatttggggtctggagtatgatttgcaaggggcggtgcaatctcagatgcccaccactttggatcgagcagtactaattgccaagttgcaggatgaactgaatgatcaatacaaaggaaggtcgacaaggtcagtgttccagtcgaggtcctcgtccacagcagtcaaggccaaggcgatcagtggtactactggtaaagggtgcatgaaggtgcggggtcttttgaagaacaaagttacgttgctgttgtcaattcattccgggagtcctacttgctttatcaacaagaatctggtggctcgggctcgtttgtctgctgtttcttgtcctccagccaggttcacattggcaaatggcgagtccctaacgtcggatttgttggttcctcagcttgcctggtgcgcaaatggccacacgttccacactgatatgagagtgttggatctgggaccgtatgacgccatcttgggttatgactggctgaaatcacatagccctatggaatgtgattgggcaaacaaggtcttggtctttcatgatgcaggggtggaggttactttgaaaggggatgatgataatatcaagaaggaggtgcaggaggtttcagccatttgccacaagtgttgatcagatggtccaatctatcggtggactcgtcgactcgggaagattactatatggttaagcggtatcctaatgccgctgtttcggtacaaacagtatctgaaggtctgtgtgtgtctgggtggggggcatgttcagagctgagcgctggacaagtgaagctgatgaggagtgatggcgtagtgtcatagggcgttttctattttacgttttccagttgggttggcgtctttaggcgcatactgtcccgaacaacccgtgcgtgcagcaagtcgctgatgggaggttacctcagctcatagtttatggaacagactacaacacgaagaatggaactagggtacgtactctgttgcttgtcgtgctgctctgttatcgtttaataatggttggtagtccag

SEQ ID NO: 30556 - DNA, 255 bp, Zea mays
  Clone ID: UC-ZMFLB73031F09_FLI
acactggtagtaagtactggtattggtgagatagttggtgctgagctagtgttgtgattctttttcttacttgtgcactagtgctgttttccttccgtgtaaaaaggccaatccaattgccgcttggttttagctgtagctttgggaactgtaggcttgttgtaatacagttcgttctgtcaatgttaaggacttttgcctcgagagctaggcataactcgaagctcaccaaacagcaatctacctgcaaattgc

SEQ ID NO: 30557 - DNA, 1120 bp, Zea mays
  Clone ID: UC-ZMFLB73031G04_FLI
cggtgccacgcaaactgccaactgccatcttcttccccagccgctgtgcccgtccccctgccaccaaggtccaaggtctccggagcgcgacctggctgcaacgcaggcaatggagtcgccgttccgcgcggacctgctgagggggaaggcggcgctggtcacgggcgggggctccggcatcggcttcgagatcgccgcgcagctcgcgcgccacggcgcgcacgtcgcactcatgggccgccgccgcgaggtcctcgacaaggccgtcgccgcgctccggtccgagggcctcagggctgttggttttgacggggatgtccgaaagcaagaggatgctgccagagtgatcgcagcaacggttgagcattttggcaaactggacattcttgtcaatggtgctgccggcaacttccttgcctccccggaggatttgaagcccaagggattccggactgttcttgacattgacactgtgggtacatacacaatgtgttatgaagccctcaagtatctcaaaaagggtggaccagggagaggtccttcctctggtggcctcatcattaacataagcgcaacgctgcaatacactgccgcttggtaccaaattcatgtctctgctgccaaggctggcgttgacggtatcacaagatcattggctctggaatggggaacagattacgacattagagtaaatggaattgcacctggaccaattcaagacactccaggaatgaggaaacttgcacctgaagaaatgggcaataaggggaaacgagaaacgatgccattatttaagcttggggagaaatgggacatagcaatggccgcactctatctagcttctgatgcaggaaaatatgtaaatggggctataattattgttgacggaggtctttggttgagtcgccctcgccatattcccaaggaggaagtgaaggcactctctaaagttgtcgagaagaaggttagggcatctggtgttggggtgccatccagcaaattgtgatgacatctttgactacgtagctcttcgatgtgttctgtacaacatatgtctatattgttgtcccactaatgttgtcagtttggctatgccaccagtccatgcagatgacttgtt

SEQ ID NO: 30558 - DNA, 243 bp, Zea mays
  Clone ID: UC-ZMFLB73031G06_FLI
cttgtaccttaaaacaagaggatacaagaagctggagtggttgtctaaaggcttttgaactgcttgaagcattagtgtagctttggtgattttgtgactgatcagctctggagcagctagagtgatgtagttgtgggcttttgaacaatagctggagtgatatgaaacattagtgatgtggttgtgggcttttgaactgcttcaagctggagtgatgtcgctgtgttgcttttgtgactgatc

SEQ ID NO: 30559 - DNA, 1450 bp, Zea mays
  Clone ID: UC-ZMFLB73032A02_FLI
tccatcttctatatatatacgcagttatattatatggccaattagatagagattagagagggagctgggaatgaaattttgtacagggaagagagagagagagggtagttgatgggaagggtttgatgtgactgccctttcttttcgctttgcttcctggatccaactgccgccgccgcatctgtcttcgttgattcggtgttcttcgatcggatgcctttatctgcctaggtacgtgcgccgattcttgcgtcgggggattcaattctcggatgggtggagggggattcgtcattcgtgttactgagctatgagtgggtggatgggttcgtgaggtgcttaccagatctcagcttctcgatctgtccttcgcgatttgtcgcccaattcgtttacctcctcctatttctgctcgcagatcggagcaagagcaaagcgcggggtgtaaatcctgagaggaggaagagaaggaggagaggagatcgagaccggctccccccgtcttgcttgtgcttgtcgcgtacggttcttgtaagaacccgcagctgccgcgtccggttctttcaagaacccgcggcggggatggatctgtacgacaagcgagaggacatggcgttgcaagacggggactcctgcctggcttcccgggcttcgcggggcggatgcgacgtcgatttacagtgggtggatggcctcctcgaaggcgccggacggaagcggcgtgcgccggaagacttcgaagacgaggtccagaaaatggacgaggtggatggcggtggcaagcgcagcaagccgccgtcaccgcagccacacacgccagatattcatgaagctcatgtccctggccgccgcaccaccgtggtggctggtggtggggagcacagcggtggtgggggtgacctcataggagaaatcggtcgggacctgtccatcaactgcctcctccggctgtctcggtcagagtatggctcagtggcatcgttgaatcatgatttccggtctctggtgagaggaggggggatctacaggctgcggcggcagaataacatagcggagcattgggtgtacttctcctgtaatgttttggagtgggatgcctatgacccctaccgcaagcgttggatctcggtgcccaagatgccgcctgacgagtgcttcatgtgctcggacaaggagtctttggctgtgggcaccgaactacttgtttgggatggcacatattgtcttcagatacagtatactgacaaactcttggtcacgaggtgaggtgatgaactctcctcggtgtttatttgggtcggcaagcgttggtgagaaggcatatgttgctggtggcactgattctcttggcaggatccttagctcagcagagctatacaactctgagacacatacttggacacctcttcctagcatgaataaggcacggaaaaattgctctgggttgttc

SEQ ID NO: 30560 - DNA, 2637 bp, Zea mays
  Clone ID: UC-ZMFLB73032B04_FLI
gctttgtggtgcctgatccatgtggtgttgggctaatattgttgtatcaagtttgaagaccacatgttagtgtgcaactttggttaaaggtcatatccctaaagctacttggaacttggagaaaagatggtccaaagtggagctgtcagacttgtgatttctggactttgattcagaaattgatgtccagtttcagcatttttagcaaactttagatctctgttgtgataaacttttgatgttatggcatgcactctccacagagaagtcttagagggtagtgtggtgagtaacttctattcagtttcatctccttgagcttgtttagaaaggggagaaaatgctgctccaagtcgctatgtcagacattggtgtgctgaaccaaattcagctaggctgaattgttgagttcgctggtgctgccccaactttggtgctcgataacttgaggtcagttgagcttttgatagtaaccattaaaacaaagttgaagactttgtatcagtgagcaatcttggtacaggtctgttgtaggttgatgcactggtgttggagtaaattgtgttcaaactctctctgtcaggtgcgagttcagcttttggttcagttagctgaatctgaatttcagtattttcatcccactttgaagcaccataacttttgatccatgaatctttgacctaaggctgctgcagcaaacatttaaatctatgtgttgggaacaatctttgttaactaagattggcatgtattgcttgcactagtgaggatcaaaggggtttaaagatggggggttcatttggcgccaggtgcagttttagaatctgaaacgtgattcagcttttctgaatttttagaagacgcatattcctctcagttttggacccttctaattattaattcctaaactttggtggatgatcattacaccaaatataaagagttattattggagaaccattcttattaagcattgatttcctgtcattacttagaactggaagaaaatcgtcctccaattccctctgttttgcaagttggaaactgaaacttgtgtcagttttgggggccagggttcaacatgctcgcctatgtctcagccatcctcatcccttttgttttctagagcatgtctatctccatggaatatccccaccgcctactcttcttcttatcccaagagctaccgtattctttttctctcatacggatagagatagctggaaggagaatttcctcacgtatctctccctctgttctgtgcaaccggccacgtactgaagctcttcctcacgccacctctgcatctcattcacgtcatttatttcccacgtattcagctcctggaaacttccttcacaagatgcgttgaacaccctgggaatcacccacgccacccatctcaccactgcaccactgcgcgcttcgtactgctggccgggctgctccagcaccaggaacgctcgctcctgctcgtcgacgttagattttcccagacgcgcgagctccccagcaactccaacacgttgctcgcctcgctcagtcttcaagccatcgtgtcgctggttctagccaaagtcgggcgcgttctttccttcgccaggcagcgcctccagtcgtcgtttcttttccacggctgcacgctcaccgactcaagcgcttggccatggagctcagtttcgtgtgtgcctgtgctgggtcgccgggtcacgtgctcatccgttttgatgccgtgcacgctccggcttgtggaactcgccggcgtcgtcatctactactagacctcacagtgcatcggcgctctcgatatcgtcctgagttcactccgcgtgctgcgacgtctcgctcacctcctcgccaagccgtcgtcgccctcgcggttatcgggtcgattcgatcagggtaagctgatctattattcccgctagttaaatctggtaaaactagaaaaatcatgattgttgtgtttagtgaattatagatgtctagtgctttcgtaggattgtgttgatgtcttgccgctaaatatttgattctcttttttgtatcatccggttactttatgctcatacatgtgcattgtgcatcttatgaggtacgataattaatcaagtaagacgaaggaaaagagtcaagtcgataccaagcgcgggctaatccgcaggatgatgctgatgaacgaaccggaagatggataatctgaacgagtgccaagccaatggatgctcgtcaagtggtcgcctaacaaacactaacctagtgttacccagttttgatgcggacatcaacaccaacacgagcacatctacaccagcagcaccttctccagcccaggcgccaccccttccacctcggccagtgactcgggcccgtgcaagagaattgaactacatcatgttgttaaagaacgaaggcccggaagaatagacgaccagcccaattgcggcccataatggacgacctagggttggccgcccctaggggctgcgccccctctctatttattcaggagctgcgcctcctttatttcctgagttttgttttacgttagccttagctactctcgaacacgcgcaaatctgcgctgtcttcgtgtattcagaactccaccctcgagtaatagattagattgctcgc

SEQ ID NO: 30561 - DNA, 3011 bp, Zea mays
  Clone ID: UC-ZMFLB73032D01_FLI
gccctctcctacctccacctccacgacaacaagcaaatccccatccagttccaaaccctaactcaaatgctcgctttgactgcctcagcctcatccgcttcgtcccatccttatcgccacgcctccgcgcacactcgtcgcccccgcctacgtgcggtcctcgcgatggcgggctccgacgacccccgtgcagcgcccgccagatcggtcgccgtcgtcggcgccggggtcagcgggctcgcggcggcgtacaggctcagacagagcggcgtgaacgtaacggtgttcgaagcggccgacagggcgggaggaaagatacggaccaattccgagggcgggtttgtctgggatgaaggagctaacaccatgacagaaggtgaatgggaggccagtagactgattgatgatcttggtctacaagacaaacagcacctaactcccaacacaagcgttacattgtcaaagatggagcaccagcactgattccttcggatcccatttcgctaatgaaaagcagtgttctttcgacaaaatcaaaggtatgttcagccattgagtacaaactgccgagtgccgactaacaaaatgtcataacattgctagtatcaatgcctaccatcatcaattgaagtagtttgttagttactttaaggtaactacttgataaattcttatattcctccatttatttttccttcaagctatgtgtttatgatctgcggtgattatgtcattttattctaaaaaaaactcgacctgcggagggtaagacaacccctggacattatattaagaagaccttctcaagtgggttgagaaaaccctcaaacccctgctccacccatacacagcggcaccgtagcccatgtgagaatgacagcgattggggccatgcattagacctgtgctttggcgtgggacggacgaggggatttcccccgaacccctgccgtagcccatgtgagaatgaccgcaactagggccggacattagacttgtgctttagcgtggaacagatgaggagatttccccccgaacctctgccacacccatacacaacggcactgtagcccatatgagaatgaccgcgaccagagccggacattagacatgttctttggcgtgggacagacgagtggaatttttaaccttagattgaaattcactctcacagggagttgaactcaggacatgagggtgctactcagaccacgtaaccaactcagttagaggccttcgtatgtcattatgttttaactgaattatgttttatctgtggctctttgaagattgcgttattttttgaaccatttctctacaagaaagctaacacaagaaactctggaaaagtgtctgaggagcacttgagtgagaggtgaaccttcgtattcttcgtgtcttgcattgatatgaaatttaaaattgcaatcatatatcaatatatcatactagtattattttctttaagtaagtcttgagctatgcgttatacctatcgattcctcattattttcaaattctgaaaatcaatattatggtatcccatataatatacaccattgcagtgttctcttttgagtgtagagaactagagataatagaattatcttgtttgaaaacatttgcagtgttgggagcttctgtgaacgccactttggaagagaagttgttgactattttgttgatccatttgtagctggaacaagtgcaggagatccagagtcactatctattcgtcatgcattcccagcattgtggaatttggaaagaaagtatggttcagttattgttggtgccatcttgtctaagctagcagctaaaggtgatccagtaaagacaagacatgattcatcagggaaaagaaggaatagacgagtgtcgttttcatttcatggtggaatgcagtcactaataaatgcacttcacaatgaagttggagatgataatgtgaagcttggtacagaagtgttgtcattggcatgtacatttgatggagttcctgcactaggcaggtggtcaatttctgttgattcgaaggatagcggtgacaaggaccttgctagtaaccaaacctttgatgctgttataatgacagctccattgtcaaatgtccggaggatgaagttcacaaaaggtggagctccggttgttcttgactttcttcctaagatggattatctaccactatctctcatggtgactgcttttaagaaggatgatgtcaagaaacctctggaaggatttggggtcttaataccttacaaggaacagcaaaaacatggtctgaaaacccttgggactctcttttcctcaatgatgttcccagatcgagctcctgatgaccaatatttatatacaacatttgttgggggtagccacaatagagatcttgctggagctccaacgtctattctgaaacaacttgtgacctctgaccttaaaaaactcttgggcgtagaggggcaaccaacttttgtcaagcatgtatactggggaaatgcttttcctttgtatggccatgattatagttctgtattggaagctatagaaaagatggagaaaaaccttccagggttcttctacgcaggaaataacaaggatgggcttgctgttggaagtgttatagcttcaggaagcaaggctgctgaccttgcaatctcatatcttgaatctcacaccaagcataataattcacattgaaagcgtctgacctatcctctagcagttgtcgacaaatttgtccagttcatgtacagtagaaaccgatgcgttgcagtctcagaacatcttcacttcagatattaacccttcgttgaacatccaccagaaaggtagtcacatgtgtaagtcggaaaatgaggttaaaaactattatggtggccgaaatgctcttttttgttttcctcacaagtggcctacgacacttgatgttggaaatacatttaaatttgttgaattgtttgagaacacatgcgtgacgtgtaatatttgcctattgtgattttagcagt

SEQ ID NO: 30562 - DNA, 1373 bp, Zea mays
  Clone ID: UC-ZMFLB73032F02_FLI
gaagatgctcaatgattcacatgctgcacttcagtgatatcctaaaaactgcactagtgtcatttactaatacacaagctttactgattgtaatatatggatagtttattttgattacatggtgaagtttcggtgttaatgcccttgactaggagggaacgcatgtcgatagctttgaactgactgttttcttttaacaaattgcatgctcacattccctgaatattttaaaatttacataaaattgaacaagatcagatgcgagttattccactttcgttgcagcattttttagagaaaacagcgtatccactattggaaggatcagctaggtttttgttggattggttaattgaaggacacaggggatatttggagaccaatccttctacatctccagaacattattttattgctccagatggtaaggaggcctgtgtgagctactcaacaactatggacatctcaattataagggaagttttctcagctcttatattgtctgctgacattttaggtaaatccgacactaatgtggtgcagagaataaaaaaagcactgccaaatctcccaccaatgaaagttgctagagatggcacaatcatggagtgggcacaagactttcaggatcctgagattcatcacagacatgtgtctcacttgtttggtctttatcctggacatactatgtcacttgaggaaacacctgacctctgcagagctgttgccaatagtctttataaaagaggtgacgaaggcccaggctggtctacttcatggaaaatggtcctatgggctcgccttcacaacagtgaccatgcatacaaaatgatactgcagctaatcactttggtggatccagaacatgaggtttcaagagaaggaggcctatacagcaatctgttcactgcacatccacctttccaaattgatgcaaattttgggttcccagctgcgttgtcggaaatgctggtacagagcactgggaccgacttgtaccttctccctgctctgccccgcaacaagtggcctcaaggctacgttaaaggtctgaaggcccgaggtggtgttactgtaaacatcagctggaaggaagggagcctccatgaagctctgctatggtctagcggcgggcagaataccctttcaaggctgcactacggggaccagattgccaccgtcagcctatcatcgggtcaagtttacaggttcagcatggatttgaagtgcttgaagacttggcccctgtgatagcacacatttgctgaaatgaaagatacgattgattgtgcaaaaattcatgaaaacttctggctggcaagaaaataatcgatttcatacatcaatcataacacgtatcatatttcttattt

SEQ ID NO: 30563 - DNA, 1442 bp, Zea mays
  Clone ID: UC-ZMFLB73032G06_FLI
acggcgtcctccaggagaagatcatgagagtcccgtatggagtggagaaggagttcttcagatactcgcttttccttgttttctgtaaccgcatcaccacatccatggtgtctgcaatggtgttactggcaagtaagaaatccttggaccctgtggctccgctacacaaatatggtgttgtctccatatcaaatatactgaccactacctgccagtatgaggccctcaagtatgtaagcttccctgtccaaacgcttgccaaatgcgccaagatgatacctgtcatgatctggggcacaataataatgagaaagaagtatgttgcaaaagattacttcttttctgtcgtcgtgactatgggttgcgcattgttcattctatatccggcgtcgatggatgtgagtccatttaataaaggcagagaaagcactatttggggtgtttcactcatgctcggttatcttggttttgatgggttcacaagcacgttccaagataaactcttcaaagggtatgacatggaaatacacaaccaaatattctacacaacagtctgctcttgtcttcttagtttaagcgggctgattctccagaatcatctgattccagctgtggattttatgttccgtcacccagattgcttctccgatgttgtaatcctgtccagcgttgcaacagcgagtcagttcttcatatcctacaccattcggacatttggcgctctcacatttgctaccataatgacaactagacagcttgtgagcatattgctgtcctgcatctggtttgtacatcctctcagctggatgcagtgggttggcgcggccattgtgttcgtagccctatacacaaagagcttcctgaggagtaaaccgcagaagctagcggggtcaagcccgccacgtggttccagtccgaaccctgttagcaatagttgacaattggtgacataataacataggaaacaatggacttgttgcggtgtaacgggacgaagtctccgtgtctgagatcaatggcaccatggctgcatatgcaaggcgaggtaactggacagataggttccagatgttgctgtgttactgctccctgacattttttcaaggtcatgaaggtggccattttttcaagctagtcgaccctagtgttagtttagtgtccagagacccaattttgtagcccagtgagctgtgttaccaattttgtagcctcaacaaagcatcgtgtgtgtgtgtatttgtcgagcgttggcgactgagagttgaagaagtcacagcagaccatctgcaaaaactcaccagataactagaactgcgatgcgtaacaaattgcaaaacacaggagattgtcagctaacagctgtggtccgatgtaaagatcagcagataacaactgaaggcctgtttaccatggtttttgagtataccgtagtattttatacc

SEQ ID NO: 30564 - DNA, 1215 bp, Zea mays
  Clone ID: UC-ZMFLB73033C03_FLI
ccctttgcaagtatagtctctctgctaagcgaagcgaagcttcaagctagtctcggcggctctagaagacgatgggcaaggacgacgtgatcgagagcggcgctggcggcggcgagttcgctgccaaggactacacggaccctcccccggcgccgctgatcgacgcggcggagctggggtcctggtcgctgtaccgcgccgtgatcgccgagttcatcgccacgctgctgttcctgtacatcacggtggccaccgtgatcgggtacaagcaccagacggacgcgtcggcgtcgggcgccgacgcggcgtgcggcggcgtgggcgtgctgggcatcgcctgggccttcggcggcatgatcttcgtcctcgtctactgcaccgccggcatctcggggggccacatcaaccccgccgtcaccttcggcctcttcctggcgcgcaaggtctccctggtgcgcgcgctgctctacatcgtggcgcagtgcctcggcgccatctgcggcgtcggcctcgtcaaggcgttccagagcgcctacttcgacaggtacggcggcggcgccaactcgctcgcctccggctactcccgcggcaccggcctcggcgccgagatcatcggcaccttcgtgctcgtctacaccgtcttctccgccaccgaccccaagcgcaacgcccgcgactcccacgtcccggttctggctcccctccccatcggcttcgccgtgttcatggtgcacctggccaccatccccgtcaccggcaccggcatcaacccggccaggagcctgggcgccgccgtcatctacaacaaggacaagccctgggacgaccactggatcttctgggtgggccctctcgtgggcgctgccatcgcggccttctaccaccagtacatcctccgggctggcgccatcaaggccctcggctccttcaggagcaacgcgtgatgagcggggcttggctgtggagcaatggcgggcgacctacgggcggggggccgtgagcgaggagaatgccatcattcatcgatcgacttgggtgccggtggttggttcgggtcgccttttttttgtttcagcagctgctgcgttgcgcgcgtgcgtgagatttggtttggtttcgttcccctgcaatgtaatcatgtcgtgactctcaagggattattccgctctgctcttatggtctctgttttctatttaatgattgttattaccatgt

SEQ ID NO: 30565 - DNA, 1330 bp, Zea mays
  Clone ID: UC-ZMFLB73033D04_FLI
cagctgatgcgctggtcaacaccggtctggcgaagctggtctacgagtatgtcaacatagatgattgctgggcggagtctgacagggactaccagggaagcttcgttgcaaacagacaaaccttcccctctggcatcaaggcgctcgcggactacgtgcacgccaaggggctcaagcttggcatctacagcgatgctgggacacggacgtgcagccagaaaatgccagggtcacttgaccacgaggagcaggacgtgaagacattctcgtcctggggtatcgattatctgaaatacgacaactgcaacgacgccggcaggagcgtcatggagaggtatacgaagatgagcaacgctatgaagacgtatgggaagggcatcttcttctcgctgtgcgaatgggggaggcaaaaccctgctacctgggcaggcggcatggggaacagctggagaacgaccgatgatatcgccgacaactggggcagcatgacgtctcgtgcagaccagaacgacaggtgggcttcctacgccggacctggcgggtggaacgatcctgacatgcttgaggtgggcaacggcggcatgtccgaggcggagtaccgctctcacttcagcatctgggcgctcgccaaggctccgcttctgatcgggtgcgacgtgcgggcgatgagccagcagacgatgggcatactcagcaactcggaagtcatcgccgtgaaccaagatagccaaggtgcgcagggaaagaaagtgcagtccagcaatggcttggaggtttgggctgggccgctcagcaacaacaggaaggccgtggttctctggaaccggcagggataccaggcaaccatcaccgcacagtggtcgagcatcgggctcgcttcttccactgctgtcactgctcgcgatctatgggcgcactcgtcgttctcggctcaaggccagctatcagcttcggtgccacctcacgactgcaagatgtatgtcttgacgccgaactagctcagaagacaagagcggattgttccatggcgcgtgggatgcaaccattcggtcaggattcagggaagaagagtatgcagtgcaggcaaggatttcaagagaaggaaattcgatatcatttggttatacaggatatgagtgcgaatggaggaataatttatactaatactatggaagtgtatctaaggcgccgtcaaaatgccggtgcctgtgttactggatgtttgtaacgagagttgcagcaataaaattggcttgcccaccaccctttttacgagcatgtggacggatttcagagaacaagagaatatagaaaatgtgcgttctctgtg

SEQ ID NO: 30566 - DNA, 825 bp, Zea mays
  Clone ID: UC-ZMFLB73033D10_FLI
cctacctcaagttcgcgcacttcacggccaaccaggccatcctggaggccgtccagggctgcaagcacgtgcacatcatcgacttcagcatcatgcagggcctccagtggccagcgctgatccaggccctcgcgctccgccccggcgggccgccgtcgctccgcctcacgggcattgggccgccgtccccgccagggcgcgacgacctccgcgacgtcggggtccgcctcgccgacctggcgcgctccgtgcgcgtccacttctccttccgcggcgtggccgccaaccgcctcgacgaggtgcggccctggatgctgcaggtctcgcagggcgaggccgtggccgtgaactccgtgctccagctgcaccgcctcctcgccgacgctccctcgtcgggcgacgcccgggcgcccatcgacgccgtgctggagtgcgtcgcgtccgtgcgccccagggtgttcacggtggtggagcaggaggcggaccacaacaagccggggttcctggaccggttcacggaggcgctcttctactactcggcggtgttcgactccctggacgcggcgagcggcggcgcgggcgacgcggcggcggaggcctacctggagcgcgagatctgcgacatcgtgtgcggcgagggcgcggggcgcagggagcggcacgagccgctgtggcggtggcgtgacaggctgggtcgcacggggctggccgccgtgccgctgggggccaacgcgctgcggcaggcgaggatgctggttgggctcttctccggggaaggacactgcgtggaggaggccgaggggtgcctgacactgggctggcacg

SEQ ID NO: 30567 - DNA, 705 bp, Zea mays
  Clone ID: UC-ZMFLB73033H08_FLI
aatgccaccgccaccgccgtcgccgccgtcgctgccgtccgtgtagcgtccccgcggcgatgggcaacacctgcgtcggccccagtgccgctggccgcaacggcttcctggccaacgtcaccctgtggcggccccgcggcgacgaccccgcgccagccccagccctaccgccgcccccctcccccgcctccgacaaagcgcccgatcccgtcaccatcccagaatctgagcattcctcccaccactcatcccgatccaccgacctgccaccggcccctgcctcccagccgcaggacaaccctacggcgaagaagcccgcgcccaaggtcaagcgcgtccagagcgcgggcctcctcgcggactccgtgctcaagcgcgacgttaacacggctcggctcaaggacatctacaccattggcaagaagttaggtcagggtcaattcggcacaacctacctctgcgtcgagaaggccaccggccgggagttcgcctgcaaatccattgccaaacggaagctgctcacggaggaggatgtcgaggatgtgcgccgcgagatccagatcatgcaccacctcgcgggtcatgccaacgtcgtctccatcgtcggcgcctacgaggacgccgtcgccgtgcagctcgtcatggagctctgcgctggtggggaacttttcgacaggatcatccagagggggcactattccgaga

SEQ ID NO: 30568 - DNA, 1008 bp, Zea mays
  Clone ID: UC-ZMFLB73034C03_FLI
cttcattctgaaaaacccaccagaacagaagaagggcggaaaagacaagaaggccatgaggagagctgagaaggaacggctgaaggaaggtgaggctgctgatgaggagcagaagaaactgaagaaggatgcaaagaagaagggttccaaggattccactgctaagggtttgaagaagaaggctactactgctactggctctgatgaggatcactcatcctctccaactcgcagccatgatggtgacaaagcagctgcagatgatgatgacgatgatgtccagtggcagactgacacttcaattgaggctgcgaagcagcgcatgcaagagcagctgagtgcagcaactgctgaaatggtgatgctgtcgactgaggagactgagaagaagatgaaacaggcaacccacaaagatggaagcactaatggttcagcaaaagaaatccctaatgacaagcctgccgtcactaagcctagtccctatgaagaactgattggagacatcaaggctagcctaggaagtgctccgacccctacccagctcaaggctgtgctggcctcatcaacccttcctccccaggacgtgatgaatgctctcctggaggctctctttggtggtgtgggtaagggattcaccaaagaggttgtgaagaacaagaagtaccttgcagttgctgtgccagatgagggtgcccagacccttctggttcaggccattgaggcttttggtgggaagtgcaaccctgaggcgctgaaggaggttcccgttgtcctcaaagccctctacgatggagatatcctggacgaggaaaccattgtggactggtacaatgatgctgtcgcagctgggaaggactcccaggttgtcaagaatgccaagccgttcgtcgagtggctccagagtgccgagtctgatgaagagggtgacgacgagtgaagaggccacgctgctctactgctaatggccgaacttgataatattatttcaataagtttgttttgcttgcc

SEQ ID NO: 30569 - DNA, 578 bp, Zea mays
  Clone ID: UC-ZMFLB73034F08_FLI
ctcgagacagtacttccaccaaggccttcatccaagctgacagacatggagatagatgaatgcgaggagacgactatgcatgatgtgaacaacatcgaggaagagatgcgcaggaagcaagctcacgctgcccaggaggcgtacgaggaggacgacgagatgccgggcggagcccagagagtgcagtgcgcgcaacagtaagcagactatcatcaaggcaattgggaggggtggtgcccttaaagcatgggagtgatctctggttttgctgtcgccgagctgggaaataggaagctgaatcgacctcgcaagcggggaatgtatccttttttgctgcaacataaaaaatgctacccaggcatagctgggtaccttttaacttctgtttgtgggatttgctagagtgatggtttcgatatatagggggacttgaatgtctggaatgctacggtataacgcacatttgggtgcaatgtctgttgcattgctgtctgaatgacatcgttggtacatttattttcatgtaacgcctgtagtttgctaatcaacaagcttggaatggcctgattgatgatgcc

SEQ ID NO: 30570 - DNA, 239 bp, Zea mays
  Clone ID: UC-ZMFLB73035D04_FLI
gatcgatgtttccaagctgtccacttgatggtcttggacatttttgctggatggtttgaatttgttaaaaatgtcactgtagaatatcatggtgtaactgtcggttgtactcgcgcctttcacccccctcccggtaactggttatcatgccttgtaagcactcgctgtctcttgattgttgttgcattgtcccattgaaaggacctgtgtcttgtaagagatggcaattatagccagtg

SEQ ID NO: 30571 - DNA, 1045 bp, Zea mays
  Clone ID: UC-ZMFLB73037C01_FLI
caaactttgaccttttggaccttgttaatctttacgtaactagtgttgggcctgttggccgtgccctcccccctgccatgatatccttattagggcatattatcactgtgttctatttggtttactcctctttgctgcagtatgttcaccaccttcaatggaagtactcgcttggctcattcaacctcttaggccatactgctccagcccaggcagcatcgttgttagtattgggtccttttgtggacttctggctgaccaacaaaagagtcgatgcttttaactacacatcaatagttacgttctttatcgtgttgtcgtgcataattgctgtcgggaccaacctaagccagttcatatgcatcggaagattcacggccgtctcgttccaagtcctaggtcacatgaagacggttctcgtgttgaccctggggttctttttctttgggaaagagggtctcaatttccacgtcgcccttggcatgtttctggcagtgatcggcatgatctggtatgggaatgcctcctcgaaacctggaggcaaagagcgccaggtttactccacaccgagtgagaaaactcagaagcatggggtgctgtcatcccaatccgagcttgatcagaaggtctgaaatgagcaggggcggacccacaggggggtccgggtgggccctggcacaccctaagccaggcccactggggaccccacccgccgagcgccgaagccccaaggttgtttcaacttctccaatccttcagcacgactgcggctgttcgcctgttcctagcggctggagacatggctggctggctttctggcgaaggcgaagtggcgagtgcgcgctgtgcggctgtccgccagacgccagtcgccgactcagccagacgccgccactgcggcacatggatccagatcttagcagtagtagcttccctttccgctgctgattacctgctagctccaaaagcgattttctctcaagctaaattcagtggttctatctctaccactcaaattatataatatgtcaatgttttttctctc

SEQ ID NO: 30572 - DNA, 1467 bp, Zea mays
  Clone ID: UC-ZMFLB73037C11_FLI
cttcctcaatggcttcaaccagggttacaatccgaaccccataggaggttacggcatcagggtggatggaaggtatggcttgatttcaggtgcacgaaatgggttctcttcttttggaccagggtatgggatgggcatgaatgttgaaggtgggttgggcggaacatttggtgcaagctctggtttcatcagcaactccaacgggaggcaaatgggttcgtacttcaatgcaagttcgaacagattgggtagccctattgggtaccttggccttaatgatgttccgggatcaatgttgagttccatgtctaggaatgtttggggtaatgggagtctaaactacccgagcaatcctacaaatatgagtgcttttgcttcacctaggaatgggggccaagtcagtcttcccagtgacaattggggaggtcttccttctgctcatgggatggacaacatttcaagccttgggtcagggaaccttggtcgtggaactggagataataactttggtttgccttctggtagctatggcaggaacaactcaactggtacaattggtgagcctttttctgcagcaggcaatacatatgaagtaaacaatcgagatacatatgggagcagctctatttatggtggcacagcctggaggttcgcatcatctgaggttgacatgccttcttttgttcatgatattggaaatgttgatccgactattaaatgatacatgtcagcaagtcacatgggcaactaccctgttaacaacaatcagccaagcagaggcatcagttcctagggggcggcgagtattacacttgggggtagtagaagaaagaaacacccattcagccaggcaatcccggcgcacacggctgtgaatcggtcggtgattgtcaggttaatacacaggttagtttttgtgtagctaacccagcggcgtggtttgcgaacaccgacatgctagaggtggaagctgctaggctagctagaggaaaggagcgcggatggatatacagaaacatttcgtgaaggttttgtttttgttttgttttttggtttttgcgggggtggtggtcatgttctagttttggttcgtacgcgcgtggtgaggccttttggagttttgaaatgagatgtagtagtaattgttgcggcacatattttagaagtcaagccatgttccaacagaagctggaaagagatgtccgctgtatacgggtgagcatgtataccaaccaaagggatgctgtattatacattagcctgtgtgtgtgtgtgcgtgtttttatttttgtttgatccggtttttagccatttgtctttttttttttcaatctggagattttgctgacttgctctgaattattatgcatgcagtggtgtttattttgttctcttcatgtggtgtgataatacatatgcctttttttcttcttctggtgtacataactggatccgattgtttggcat

SEQ ID NO: 30573 - DNA, 1496 bp, Zea mays
  Clone ID: UC-ZMFLB73037E10_FLI
ggtcaacaagcagaagcccatatggatgaggaagccagaagaaatcacaaaagaagaatatgctgccttctataagagcttgacaaatgactgggaggagcatctggctgtgaagcacttctctgtggagggtcaactggagttcaaggctgttctctttgttcctaagagggccccctttgatctctttgacaccaagaagaagcaaaacaacatcaagctctatgtgcgcagggtgttcatcatggacaactgcgaagagctgatccctgagtggctgagcttcgttaagggtattgttgactctgaggaccttcccctcaatatctctcgtgagactcttcagcagaacaagatcctgaaggtgatcaggaagaaccttgtgaagaagtgtgttgagctcttctttgagattgctgagaacaaggaggactacaacaagttttacgaggctttctccaagaacctcaagcttggcatccacgaggactcgcagaacaggaccaagatcgccgagcttctgagataccactccaccaagagtggtgatgagctgaccagcctcaaggactacgtgaccaggatgaaggagggacagaatgacatatactatatcactggtgagagcaagaaggcagtggagaactcccccttccttgagaagctgaagaagaggggctatgaggttctgtacatggttgatgccattgacgagtatgctgttggtcagctcaaggagtttgagggcaagaagcttgtctctgccaccaaggagggtctgaagcttgatgagactgaggacgagaagaagaggaaggaggagctgaaggagaagtttgaggggctgtgcaaggtcatcaaggaggttctgggtgacaaagttgagaaggtggtggtgtctgatcgcgttgtggactcaccgtgctgccttgtgactggcgagtatggctggaccgccaacatggagaggatcatgaaggcacaggccctgagggactcgagcatggcgggctacatgtcgagcaaaaagacaatggagatcaacccagagaaccctatcatggatgagctccgcaagcgtgccgaggctgacaagaatgacaagtcagtcaaggatctcgtgatgctgctgttcgagactgctctcctgacctccggcttcagcctggatgaccccaacaccttcggcaaccggatccaccgcatgctcaaactcggtctgagcatcgatgaggacgagcctgttgaggcagaggctgagatgcctcagcttgaggacgacgctggtgaaagcaagatggaggaggtcgactaagtgtcgcatcgcatgcttgccgtttatcttatccctagctaagctacctgtgatagcttaattttcactattgttcgaggtttttggcacgttatcggttgtcctgctggccaggctataagtctggtttatctgttatgtttaccctttttaacagtttgtcgttattattcgtaatggt

SEQ ID NO: 30574 - DNA, 680 bp, Zea mays
  Clone ID: UC-ZMFLB73038B12_FLI
gtacgtagcgataagagtggtgcacccgtagcggcacggcatggcggccacggcgtactccgtggcgctcctcggcggcgcacgcctgccggccgccttcctccctcgacgcagcagcgtgtgccaccaccagcttcgcctccaagacgcaccgaggctgatctccctgcaccgtgccagggccgcttccgaggacacgtcggcctccggcggcgacgagctcatcgaagacctcaaggcaaagtgggacgccgttgaggacaagcccaccgtcctcctgtacggcggcggcgccgtcgtcgcgctatggttgacgtccgttgtcgtcggcgccatcaacgccgtgccgctgctccccaagatcctggagctcgttggcctcggctacaccggctggttcgtctaccgctacctcctcttcaagcaaagcaggaaagagctggtcgacgacattgagaccctcaagaaaaagattgctggaacggcggaataagcgctagctctcgtggaaagctttagaaaaccaacgacgagaggggccgtttcttctttgcaaattaagatatcaaaccgaggaacgtaccaatgcagctactgtcgcccatgtcatgtgttgtgtgatgcatacccttaccttctgtatacataacgaaattaaagagaggacagcattttgcctt

SEQ ID NO: 30575 - DNA, 2189 bp, Zea mays
  Clone ID: UC-ZMFLB73038C07_FLI
gacgaccttattattgttattgtatccctgtacagctaggcagtgttgggttgtaaaatttgtatcgcgtgaatgaactcagagcatctcaatgttaaaactgtaaaaggggcagacctggtgccagaggctcccacatgagtgggttctagggaagggataatccgaagcaagcctcccccctgcaaatgcagagatgtggctttgaacccgtgacctggtgactcagtgagacacctctcaccactgcaacgggcgtgtccttcctcagcgttaaaactgagcatattaattcccctgcttaagcaatatgggagctaattgctgcgttgctgcaaaggagaggacacagccgtgcatcactcctatagaagtatcgacatacaggaatgtgaggcgctcgccatcatggaacattcgatgggacaatcgcacacatatagaagacataatggatattcctactctgttctccaaccatagtagtggaagcattcatcctgatacaaagagtggttccattgctccaactgaagggttctctaatggaaatagccttggaactagcccttccaatgtgttccatggagcaaagtggcacaaatctgataaaaaaatggaagcacgcaaggttacaaagtctgattctcgagctgatcgctccacagcaagtaactcttctcctgagacaaagctttccaggaaatcactggacatatcaagtgttgcttcagatttgaagacttcagtgtctgttccttcaacgccacccttagtatccagagcagatccgtcatcctccaaggggcattctcaacctacagattcagatttgatgaagaaagcatggcggtcaccagggtatcaattatacagacaggtttcggacagtaaaattccatctctcagatctctcaatgagataaggtctcctgaaggaaggcctccctcttccatgttatcagcctgcagcaacgacttgtcagcagcaggatcctatggtgagtcatccgatggttggtcaatgcgcacattttctgaaatggtctcaacatcccaaagagagaggtggtcacttgacagtgagctcttgggatccatttctagtaaaatgacaagatcaagtgcttcgagttctactacacgcccccctgaccaagacgtgtgcaagctgtgtttaaagctgctaaaggagagatcgacatggaacgcgcaggagctggctgttgttgctgttttgttgtgtggacatgcataccatgctgactgtctggacagcataactacagaagctgacaaatatgatcctccatgccctgtgtgcacgcacggtgagaaattttcagtgaagctatttgggaagctggaatcaaagatcaagaacaagataccaaaaaatgtgtcagttgatattaatctagatgggaatagtagtaataagcaccagaagaaaggtagaagagagcccaggttaggtacaagttcaagcatgaaggtcccatttagtcgtccatttttgaggagacatttctccattggatctcgaccacctcggtcggtctcagaaactgattccacaagaaagaagggattctgggcaagacactgggagagagtagaatagaatccaattgtcgttaggtgggttggtctcaattattatgttttggtaagttcaatttcatatagcagattactagtcctattccttttgtcatcatggaacagtttaaagcaggttactaaaattcaaactagtgtcgaatttggaatgtcatgtcatctctgaacagtttaaagccgacaatagcatgattaattgaatttgtgttctttccacaggaaggatctttaagaagaggtgaactcctcagcatgcaagctagtggaggtgaactccccagtatacaagggctgccgagcaaccaacatatttggaagtttctctcagccatcgtattctgatactggtgcagagcgcacaacaaggtttcttataccatgcgaggcagggtcgttgtaggccccgcttgcatctaagtaatagtagtatcgatctaacagaaacggtgtggccttcctggatttaaggcccaatgctgggttataagattacacaaccagcatgctagattatttactgtacccgcagtttttttaattattggctaaggtatttgttggtggtt

SEQ ID NO: 30576 - DNA, 1285 bp, Zea mays
  Clone ID: UC-ZMFLB73038D12_FLI
ctagggttttcgaggcgtcgcagataagagatccctcccgcacctccgagccgccactcccaagacacagagcgtcagagcccgatcccgatccagcgaggcggcgaccctccctcctccccttgcttcgctcgtccagccctgaccacccgcatccccgtcagtcatggcagcggcagcaggcggaggcgcggtgcgtgcgctgtcccagaaggagcaggacatacagatgatgctcgccgccgacgtccaccttggcaccaagaactgcgatttccagatggagcgctatgcctttaagcgccgcaccgacggcatctacatcatcaaccttggcaagacatgggagaaactgcagcttgcagcgagggttatcgttgccatcgagaacccgcaggacatcatcgtccagtccgcccgcccctatggccagcgtgctgtcctcaagttcgctcagtacactggcgctcatgccatcgctgggaggcacacccctggtaccttcactaaccagctccagacctccttcagcgagcctcggctgctcatccttaccgacccaaggactgaccatcagccaattaaggagtctgctctggggaacatccccaccattgccttctgtgatactgactctcccatgcggtatgtcgatatcggcatcccagcgaacaacaaggggaggaacagcattggatgcctgttctggcttttggccaggatggttctgcagatgaggggcactatcctccctgggcacaagtgggaggtcatggtggatttgttcttctacagggacccagaggaagcaaaggagcaggaggaggaagctgctgttgcccctgagtttgccgcaatcactgattaccaaggagctgatcagtggggtggtgaccagtggacctctgatgtgactgcgccgcctgttgctcctactggtgctgattggggtgctgctccagctccggttcctaccggtgatggctgggatcaagctggggcccctgcacctgtggtggacggcactgtacctcctctggttgctcctactggttgggaccaagcagccccgccaccgactgcccaaggctgggagtaggcgttgtccactctgagacctgtcttctgcggctgaagttcagtatttttctgtggtctgaatgtccaaattccggtggcatcttctatagctatgctttgctttgctttgaacacttgtgttttagggctttctagctgaacccgttgtccaatattgctgacgttgaaatttttggttaatctt

SEQ ID NO: 30577 - DNA, 687 bp, Zea mays
  Clone ID: UC-ZMFLB73038E01_FLI
gcaggactacaaatcgctggagcagtatcagcagaaaaagattccattaaaaattgattctgatgtttcagtctcaggcacgaggcacaaagtaagaatgacagtagagaacatctcaaagaagtccgtagtagacagcacacgttcagtatcagcaatggatctaggtgatgcaagtggttcccacagcactcgcaaagaaactactcggaagggaaacgggagcgacggactgtggaggaaaatacgcagtggcctcggggtcgcaagaccaagcgacaaccgaagaacactggaggtcagcgggaccgattcaggggttgccttcttcctccatttctcagtgcacacctccgaatcatccacggacggggaggaatacaatgacacaagaatcctcccggtccactactcggacaactacttttcgctgacgccgggggagaacatggccgtcgacatctcgttcgaggctccccagggatccagtcccagagttgtcctcagaggctggaaccatcatctggaccacgccgtgatgatctgagatccgtgtaataaaataagcacgtaccgaataaagtgcagacatcagatcgtgttcgtgcctgttgttggattataattaggcttgtcctaattttattttattttattaaataaatcgtacgacctaaattgaattct

SEQ ID NO: 30578 - DNA, 844 bp, Zea mays
  Clone ID: UC-ZMFLB73038F06_FLI
acgccgtgaagtcggcgctggtgcgcgccggatacgggggcgtggacatcgtggtggccgagacggggtggccgaccaggggcgacgccggggagcccggcgccacggtggagaacgccagggcctacgtgtccaacctggtggcgcacctgcggtccggcgccggcacgccgctgatgccggggaggtcggtggacacgtacctgttcgcgctgtacgacgaggacctcaagccggggccgacgtcggagcgctcgttcgggctgtaccacacggacctgaccatggcgtacgacgccgggctgacctccaactccaacgccgggggaggtacaggtactgcggcgccggcgcagcccaaggcgggcgggtggtgcgtggaactgcgacttccgggcgtccgccacgctcacctccgagaacccaagctacggcgcatgcgtgtacaccgggggaggccaataatacaccgcgtggcagcgcacgattagttttgcgtgtaccatgcatgatgccgagcgagggaagttgggcccacaggctacagcaaggaggtctggactaccatggatgccaatgcgatccacggaggcgaagcatcctcttgtttggcgcgtcctttccagatgccttgcctgccaggctgggatgtgtttgtaacttcgtgtaaaaagaactgttagatgtttgccagtgtcacgtgatctttgtgcatatagtacgcgtgtcttaatttacaagtggaatgagattgtatgtgtgattaatttttttaaataatgttttatatataaaaatgttagaatatagtataaatgaattgtctgtatcctcctattaactt

SEQ ID NO: 30579 - DNA, 1692 bp, Zea mays
  Clone ID: UC-ZMFLB73040B02_FLI
tgctccagagcctactcgcatgactggacagagtgtccgttcgtgcaccctggcgagaacgcccgccgccgggatcctcgcaagcacccatacacggcggtgccctgccccaacttccgccgccctggtggctgccccagcggtgatagctgcgagttctcccatggtgttttcgagagctggctccacccgtcgcagtaccgcacaaggctctgcaaggagggcgcagcttgtgcccgccgcatctgcttcttcgcccacgatgaagatgagctccgccatgtgcctcacaatagtggtgcaggtctgctgtctccccgtgcctcttcatccattgacatgaccgctgctgctgctgctctagggcttctacctggatctcctaccaggcactttgtgccaccacctctgtcaccatctgctgccaacaatggtggaggtgctgctgctcattggctccaaggtagcaggctgcgctcttctttcaatgcaagagatgcacaggctgatgaccttggctcgctcctggaatgggaatctcaataccttggagcgctcagcctcccacaaagcagccgatcccagccccgtctttctactggtctgactattcgtccaacagcagttgctccatcctacctcgaagagatgtatgcttcagacatggctatgtcgccaaggttcaccaatgaccaaggtcactcagtcttctcaccagcacacaaatcagctcttctaaacaagtttcatcatcaacagaagggccttttgtcgcctgtcaataccaacaggatgtactcaccaaggggccttgatccatcaattatccattctccatttggtggcatgtctcctcggtcccctcggactatggagctaacatctcccctaagtgtccgtgttggtgttggagctgctgttactccgcgtgatatgttggatcagttttcttccctgaacaagcaccaggtgccatctgtgggatcgccacggaatcttaatgcctcatggggcaacattggtaccccaaagagtaaggtcgactggggtgtggacgacgacgaactagtgcgcttgaggcaccctgtgcaacatggaaatacagaagacgaaccagatgtgtcttgggtgcagtcactggtaaaccatgctgagctgaatggcaagaggggtgaaatggcaagcatggcttctccatcgattaacaagcctgacctgagcttttagggtgactcgctagatcagtgttattgcttcttggcttgagcagcaagatgcacttggagccgaagtaactgtcaaagaggccttttgctctcaaggtggatgaaaccatatttttgccgcgttagtttccgagaagaatagttatttgtcctagtaaataataatattctttttttatttcttgaaattttttgttcgcaaagtcggagatggtgtggtcttcaggaaagcatttgctcacaaattggtagctgaaagaagctgtcgagtattggtaaacagcctcgttaccttggaggtcctaactagtattcttttgattagttcagatgaggtgaaaattcatatggtcgaccgtgagagtcgacagtaattgtgttgatctctgtaacaagagaggttatagatttttttacccccatttgtcaatgaacaatttcataaatacattgatatttccagttt

SEQ ID NO: 30580 - DNA, 2297 bp, Zea mays
  Clone ID: UC-ZMFLB73040C01_FLI
gcagaagctgtcagtgattttgcaaaatcaaaatccctttctcaacaaaggcaatatcttcccatatttaccgtccgggatgatctgctacaggttgtgcgtgaaaatcaagtggttgtggttgttggtgaaactggttctgggaagactactcaactgactcagtatctgcatgaggatggatatactaccacaggagttgttggttgtacccaaccaaggcgtgtggctgccatgagtgttgctaagcgagtcagcgaggaaatggagactgatctgggagataaagtcggatatgccatacggtttgaggatgtcactggtccaaacactataataaagtatatgacagatggagtgcttctccgtgaaaccttgaaagatgctgacctcgacaaatatcgtgttgttgtcatggatgaagcacatgaaagatcactcaacactgatgttttgtttggtatactgaagaaggttgttgcacgtagacgggattttaaactaatcgttacatctgcaaccctaaatgctgacaagttctccaagttcttcggaggtgtgcctgtattccatattccgggtcggactttcccagttaacattatgttcagcaaaacaccatgtgaggactatgtggaagctgcagtgaagcaggccatgactatccacataaccagcggccttggtgatatcctaatcttcatgactgggcaggaagaaattgaggctacctgctatgcgcttgctgaacgcatggaacagttaatatcgtcatccaccaagactatccccaagctagagattctgcccatctactcacagttgcctgctgacttgcaagccaagatttttcagaaggctgaagagggcgctcgcaagtgtattgttgctaccaatattgctgagacctcattaacagttgatggtatcttctatgtcattgataccgggtatgggaagatgaaggtgtacaacccgcggatgggtatggacgccctccaggttttcccagtcagccgggcagctgccgaccagcgtgcaggtcgggcaggaagaactggccctggcacatgctacagattgttcacagaatcagcctaccagaatgagatgctccctaaccctgtgccagagatccaaaggactaacctggggaatgtggtgcttttactgaaatccctcagagttgaaaacttgctcgactttgactttatggacccaccgccccaggagaatatcctcaactcaatgtaccaactctgggtgttaggtgcattgaacaatgttggtggccttacagaaattggctggaagatggtggagttcccgttggatccaactctggcaaaaatgcttcttatgggggagcagctagagtgccttgatgaggtgctgaccattgtatccatgctatcagtgccgtcagtcttcttccggccaaaagaccgagcagaggagagtgacgcagcaagggagaaattctttgtcccagagtctgaccacctgacactcctgaacgtgtatcttcagtggaagtcgaatcagtatcgaggcgattggtgcaacgaccacttcctccatgtcaagggtctccgcaaggctcgtgaggtgagatctcagctgctggacatactgaaaaccctgaagatccccctgacatcatgccatatggaatgggacgtggtgaggaaggctatctgctctgcgtacttccacaattccgcccggttgaagggtattggggagtacgtcaactgccggaatgggatgccgtgccacctgcaccccagcagtgcgctatatggccttggctacactcctgactatgtcgtctaccatgagcttgtcctgaccaccaaggagtacatgcagtgcgtcaccgcagttgatccacagtggctagcggagatggggcccatgttcttctctgtgaaggagacagacacctctcttcttgaccacaagaagaggcagaaggaagagaagacggcgatggaggaggagatggagaagctgaggcggcagcaagcagaggccgcgcgcatggagaaggagaaggaacgggagaagagagctaagcagcagcaacaggttgctatgcccggcctgaagaagggtgcgacttatctgaggcccaagagaatgggtctgtagataagacctgatataacttaactgtctccggtgattttgttactaggctgagggaacttgtaatgtgtagcctgctcaagcagcatgtaaaacaacacgtcaatgtgaatgtatacaacatcgacatgtgaaaaaatgaaaag

SEQ ID NO: 30581 - DNA, 1767 bp, Zea mays
  Clone ID: UC-ZMFLB73040C05_FLI
acgccgaagccagccactcaccccgtccctgtctcctgcacccgtcacctccatctccaccagaccaccagaaatccagaatcaaacaagtgaaagcgcaaacccttgctccgattcccctctcctcggcctcctcgacggaagtagcagagcaggggccgcggagcccatgtggcccggctgcggtggccggttttactgggcgccggaatcggcgccgccggggcaggccaggggcgtcgcggtcctgttcgcgtgggtgtggagcgacgagacgcagttgcggccgttcgttgagctgtactcctcgctcgggtggcgctgcctcgtctgccaccccgatctcgtcgcactatatctctctgagaaagcaatatcgctggcaactggtgttataaatgagctggttaaggaactgaaaataaaaattgtgccaattgttcttgcttccttttctggcggctcaaagggatgcatgtataaggttattcagttactagatggaatatgtgaaggagatgcaatcatgaaggactatcggttagtgaggaactgtatctgcgggcaaatttatgactctagccctgtagattttgtcagtgatgtgggcgcccagtttgtccaaaagcctgctgatggaaattcatctcagccaactatattgcattcatggatggcaaaggctctagcttctgtcatggatactctcttcccaagcaggattgaagctcagcgtgcagagtactggcacacactgtactcggcagcaggattgggcccagttcttctattttgctcagaagctgataaccttgctccatgctatattatctgtggttttgcacggcgtttgattgaactaggcacagaggttaaacttatgaaatggaacagctcccaacatgtcggtcattacaattcacatgaaactgaatacaggacagctgtagatgatatgttgaagaaggctctccttaccttctgccaccgaagccaactatatgactcaaatatggctggtgaccgggagtacaagatagcgcactcggtctgcagtctacacaatgctgcagccaattcaaacgagagtttaagaggggttcctaacagtcctagcgatcacttcttcttgccaagttcgaaggatcacgatgagtctcaggaacccgggtcccacatgtcccatccaccctgcatggagcctaaaggagtccttggccaaatcctgtttgatgtttgtgttccgagaaatgttgaaggatgggacatcaagccgacagtgtccccgaatggacggccaacatttgcttctgcccgtcaacttggtccattcaatcccatcaggtacttccgacgttcaagactatagttttctgtaggagttgagattattattttttgtatatataacggaggcaaggtgtctaatgggcactctgagcaagattttacctatgtaagctccctgtaattgtttctgttttttacttttgcgctgcttggcgagagaatgtacatatgctttgtataccatattagggcttgttcggttagctctcaatccatgtggattgagtgagattggatgagtttgaatcccaaacaagtcaaacttcttctcaattttttccaatctcatccaatccatatgtattgggaataaccgaacaagcccttagtgtgtactagaaggtggatcgtggacatagtttctaggcgggttgtaaggtgcacgctaacattgaatagccaagggaatgcattatt

SEQ ID NO: 30582 - DNA, 1702 bp, Zea mays
  Clone ID: UC-ZMFLB73040H10_FLI
gtgatttcttctagttcttctaagcgaaaaagaggtggacctggtggtttaaataaagtttgcgcaatttcacctgaacttcagaccattgttggtgagactgccatgtcaagaactcagattgtgaagcagctctgggcatatatcaggcagaacaatcttcaagatcctgatgacaaaaggaagattatttgcaatgacgaacttcgtgtggtttttgaaactgacaacaccgacatgtttaaaatgaataaattattggctaagcacataaccccacttgacccaagtacagacttctatttcttttgatcaacatatgctactttatgtttgcattactaaagttcagtcctggaatttgctcaagtgcttcctaatgacattgcagaaggtcaacttcatgaagtaaaaagaatgaaggctcccaccatgtctcctcaacctggacgttccattgatcaaccctccatagttatttctgacgcactagcaaagttcattggaacagatggaacatttcctcacgattttgccctgaaatatctgtgggattacataaaagcaaaccaacttgaggtatggttaggttaggtcctaccttttagtttgcagaataaccctgccatgtgttcttggttttgctgcaagcctgtagcgaatatcaagaattgaagtgcaaattcaccttttgttttctagaggtgcattgaatgcatgcactgcagtccattcaatttttggtaacaaattttcattaatgttcagaagtagtatgacagtaaaaaagtgaagaacaaccgggtagactcaatagtcagcaacttcgtgttaatgctacaaacttggacttatcccctttttggttaattgtttggctatacttttgtgaacctatgtcactgctgtctggccaagaggactcggttgtcaggataactaggtaggaatgttcttagtgtgaatattttattgtaggctgcaatggctgatgcagagcgttgtgggtggcattgtgtagatatttgtttattggactaggtatttgtttgttgaaacatattaattcagatatcctggaatctgattgaggttaggacactaacagttaaaaaagttctgcacatatttgcgctaacagttaaaaaaagtcattttgattatgaagtgtggattcactgtgagctgtgaaatttatggcttaatacaccacaaatattaattgctctgtttggtaatgcataggatgtcatcaacgaatcaatattatgcgattcaaaacttcaagagctctttggctgtgagagcattcctatgtcaggactatcagaaatgcttggtcaccacttcatcaagaaaacatagcaaatcctcattaactgatctaggattgcagtgtggcagataggcctaacattacaacatggtgttctttacagaatggacagcatagtttatgtatttcttcaattttgttgattatgaattgtgtccggcacatatcagattatttgcggtaagcctgtacattgttatgcgtgctggctactgctgtgttgtctggtgtaagtgtgtaaccttctctactgaattcgtagtgctaattcctaaatgtcattgctgactatgtaaagttaagctttctattcgagtgtcagattgttactcttaagtcttaaaagtcataagtttttctttgact

SEQ ID NO: 30583 - DNA, 2533 bp, Zea mays
  Clone ID: UC-ZMFLB73041E04_FLI
taattgatttaacttttcatatatatcatttttccccattttatattggtagggatttgtcttacaaccgctttactggaccaatcccattcaacattggtttcctacaagtggctacactatccttgcaagggaacaagttcactggcccaattccttcagtaattggccttatgcaggctctcgctgtcctagatctgagttacaaccaattatctggtcctataccatctatactaggcaacttgacatacactgagaagctgtacatgcaaggcaacaggttaactggatcgataccaccagagctaggaaatatgtcaacacttcattacctagaactgaatgataatcaacttactgggtcaattccaccagagcttggaaggctaacaggcttgtttgacctgaaccttgcgaataaccaccttgaaggaccaattcctgacaacctaagttcatgtgtgaatctcaatagcttcaatgcttatggcaacaagttaaatggaaccattcctcgttcgctgcggaaacttgaaagcatgacctatttaaatctttcatcaaatttcataagtggctctattcctattgagctatcaaggatcaacaatttggacacgttggacttatcctgtaacatgatgacgggtccaattccatcatccattggcaacctagagcatctattgaggcttaacttgagcaagaatgatctagttggattcatccctgcggagtttggtaatttgagaagtgtcatggagattgatttatcctataatcatcttggtggtctgattcctcaagaacttggaatgctgcaaaacctgatgttgctaaaactggaaaacaacaatataactggcgatgtctcttctctgatgaactgcttcagcctcaatatcttaaatgtgtcatacaataatttggctggtgctgtccctactgacaacaacttcacacggttttcacatgacagctttttaggtaatcctggactctgtggatattggcttggttcttcatgtcgttccactggccaccgagacaaaccgccaatctcaaaggctgccataattggtgttgctgtgggtggacttgttatcctcctgatgatcttagtagctgtatgcaggccacaccatccacctgcttttaaagatgccactgtaagcaagccagtgagcaatggtccacccaagctggtgatccttcatatgaacatggctcttcatgtctttgatgatataatgaggatgactgagaacttgagtgagaaatacatcattggatacggggcatcaagtacagtttataaatgtgttctaaagaattgcaaaccagtggcaataaaaaagctgtatgcccactaccctcagagccttaaggaatttgaaactgagctcgagactgttggtagcatcaaacaccggaatctagtcagccttcaagggtactcgttgtcacctgttgggaacctcctcttttatgattatatggagagtggcagcttatgggatgttttacatgaaggctcatccaagaagaacaaacttgactgggtgactcgcctacggatcgctcttggtgcagctcaaggcctcgcttaccttcaccatgactgcagcccacgaataattcaccgggacgtaaaatcaaagaatatactcctcgacaaagattatgaggcccatcttacagacttcggcatcgctaagagcttatgtgtctcgaagactcacacgtcaacctacgtcatgggcactattggttacattgatcccgagtacgcccgcacctcccgcctcaacgagaagtctgatgtctacagctacggcatcgttctgctggagctgctgaccggcaagaagccagtggacaacgagtgcaatctccatcacttgatcctatcgaagacggcgagcaacgaggtcatggagacggtggaccccgacgtgggagacacctgcaaggacctgggcgaggtgaagaagctgttccagctggcgctcctctgcaccaagcggcagccctcggaccggccgacgatgcacgaggtggtgcgcgtccttgactgcctggtgaacccggagccgccgccgcagccgcagcagcagcagcagaaggcgcacgcgcaccaccagctgccgccgcagccgtcgccgccggcctacgtcgacgagtacgtcagcctgcggggcaccggcgccctctcctgcgccaactcgtccagcacctcggacgccgagctgttcctcaagttcggcgaggccatctcgcagaacatggtgtaggggaagacgtagacgttcggtgaggcgccttgagtgaggccgattgcagggggagtagtttgactgacattttgtgggacgcagcgcaggagattaacatgggactcagtagctagggtgttgttagctgtaaaaaaagtcatgtgacgcaagagcagcggagcttcttcctcttctttatcccccctccccatttttctttggtggtctaacttactaggaggctgtattgatcc

SEQ ID NO: 30584 - DNA, 926 bp, Zea mays
  Clone ID: UC-ZMFLB73042B04_FLI
gtaaaattaaaataaagtggacaaggaaaggcgccttgtcaggcaaagagaagagctgaagataggattagcttctatctatattgcagagtttgctggtaccaggaaacacaaaagaaatacaatactcctatctatcacctgtctagatctccttctagaaagaaaccataggatgaatggtgggaccaccagcatagcatgagtatacaatgaaagcagatcataaccaccagcattatagctgcttttaaaaagtaagtgttactctgaaagtttctccttttcaaggtcacaaatgattggatttttttggttatataccatttgtttgcttgcattatagttgcttttttgtggtttgaatctaacaggattttcctacttttgttgtattgtttgctttttttagaaaaaaacacagtaaaaatacgggcctctagtttataaacactcggcatgtagactagcgagatagtatatagattaaacaacagttaataaatgatattaggaagaagcttgtgtagcatcggtggccctatggggcatgctatgtcaacaatgcatcagtggccttgtcagttttattttgaccccctcaaggccttgcaaccatttcccaagccacagtatccaagagatggcagtgtcactcacagaagcagctgttcttagtatgtgatttaggaattcaatgaattatatctatgtatggttacacaagtcctatgctgacaatctgtaacatgtgtatgcttgtatttgaacctgaaacctgtgtaggctggtgtgagatctgtttgtggtatttttggtaacctgaaacctattttctatgttgtgtatgttgttttttggtaacctgaaacctgttgtgtatgttgtgcgtactactttgtagaaacctgaaatctgttttgtat

SEQ ID NO: 30585 - DNA, 1541 bp, Zea mays
  Clone ID: UC-ZMFLB73042B05_FLI
gcgcgtacctgctgtcgcgggacatcctggccatgtcgttcgcgccgcgggactctcacgaggcgcaggtgcagttcgcgctggagcgaggcgtgccggccatgatcggcgtgctcgcgtccaaccgcctcacctacccggcccgcgccttcgacatggcgcactgctcccgctgcctcatcccctggcaactctacgatggactgtacctgatcgaggtcgaccgggtgctgcgtcccggagggtactggatcctgtccgggccgccgatcaactggaacaagtactggaaggggtgggagcggaccaaggaggacctcaacgccgagcagcaggccatcgaggccgtcgccaggagcctctgctggaccaaggtcaaggaggccggcgacatcgccgtctggcagaagccctacaaccacgccggctgcaaggcctccaagtcgtcccggcccttctgctcgcgcaagaaccctgacgcggcatggtacgacaagatggaggcctgcataacgccgctgccggagatctccaaggccagcgacgtcgccggcggcgcggtgaagagatggccgcagcggctcacggccgtgccgcccagggtctcccgcggcactgtcaggggcgtcacggccaggtcgttcgcgcaggacacggagctgtggcggaggagggtccggcactacaagtcggtggccagccagctcgagcagaaggggcggtaccgcaacgtgctggacatgaacgcgcgcctgggcgggttcgccgcggcgctggcgctggccggcgacccgctgtgggtcatgaacatggtcccgaccgtggcgaacgcgaccacgctcggggccatctacgagcgcggcctcatcggaagctaccaggactggtgcgagggcatgtctacctacccgaggacctacgacctcatccatgcggattcggtgttcaccctgtacaaggacaggtgtgagatggaccgcatcctcctggagatggacaggatcctgaggcccaggggcacggtgatcgtcagggaagacgtggacatgctggtgaaggtcaagagcctggcggacgggatgaggtgggagagccagatcgtcgaccacgaagacggcccgctcgtcagggagaagatcctcctggtcgtcaagacgtactggactgcccaggaccaagaccagtagcaggaccggacttgtcaagcgaagttcagcaatgttgataagcatttttcttgcttcgaattgcattggatcgccatttctagctccttgagctagtagtgttctctgtttgtttgctgttccttttggactgtacttgctcagataggaaatttgtatcctaaggccttgttcggttattcccaatcccactcaatccacatggattgagagctaaccgaacaagccctaaggtgtaacagggggaaatggaagggcttaggtaaaacccctggcccctgcaaagtttttttttgttttccttcaattgcgaaattgtggcaagtggtaaatagaaagtcactgttgcgagtc

SEQ ID NO: 30586 - DNA, 1806 bp, Zea mays
  Clone ID: UC-ZMFLB73043D01_FLI
cttcactagaatcatgcctataataaattgttctgaagccacctgctccaccctccagacgtccttttttttgtgcacatctgtctgtctacttatattgcaattgcttcaaaatacgatcaatacataggtgtgcatgcatcatcagtcactcagtcttttgtcaaaccaatcaatggacccgttgtattgtatctgtgaactatgatgacatttgtttttgggaatgaatcatgatctggttatgtttgcttgcccttgggtactatatacgtttcaaataaataagcacatgtttactcagattactgtgccatttgaatgatataatatcgtaggttgtcaaggttgcagactttggggttgcaagggttaaagaccagtcaggagttatgactgcagaaacaggaacctacagatggatggcccctgaggttgattttgccaaattgcttgttattaaacattgagaaactcttacattaaaagcagcgtatgtgaaattcgttttagtgcttaaaaatgtggtttcatatcaagcggattacatattagttgtgcagtctgcagacagaatgcccaaaatgtgagaatttattccccctagaccaccttgatagttcgcatgaagcagcaaatttgttggggttgggggcctcagtgttatacctaaaagtttacttagttcctaatgtcacttttcaaaaaaccaagattaatttttttgagcagcttgcgatgcctcggctattgcaacatgactattttttttattctgtgtgatctacatcaatgctgcttcaccaagccaacaattctagcatcgaatatgattcgtttacttggtctgcagttggtgttactgttcctgtattgagctataaagtaccgggaaaaatcatttttatctgaaagtactttggaaaaaaataatccaagaaccttttgtgggatcaaatcgctatctcagctttagagtaaattagtgagctgtcaaactgaaggtagtccagcaaatgtttatcatttatttttagtttgccttcagtaatgcataacatataatttattggtatgctgggggtcaatgagctccttagctgtgatatgaatgtgccatcttcacaatgccatcagccttgtaccacatagaagtcaaaactagcttttgtttatgcatcacctcgttctactaaaaaaactgtgcaggtcattgagcatttgccgtatgatcatagagcagatgttttcagttttgggatagttctttgggagctgctgaccggaaagcttccatatgaagacatgacacctcttcaggcagcagttgctgttgttcaaaaggatctgaggcctactattgctgttgatactcatcctatgctcgctgagctactccagagatgctggcagaaagatcctgctctaagaccaacatttgcagagattgtggatatattgaactctataaaggaggcggttcggagttctgtgcatcacaaaaggcattcatgtcgatctcactccgggagaagacgaggctgttgatgtgccagttttatgtggtgccgcacgcccttttcattttatttttgtagtcgagcgataacttcagaatacggccagaagagcttactgtgttcattccgagaggttttggtaactttattttttttaatttggacttatgcttcaaggattttcatcgttaaaaagcttagaggtgcatatccacgtttacatttggcatgtatctgtatctcgtactcgttttcttaagtttggcaggcaaccaagattttaatg

SEQ ID NO: 30587 - DNA, 872 bp, Zea mays
  Clone ID: UC-ZMFLB73043D03_FLI
gacgtagagtcgccagtcctcccacaatctccagccgccactacgcctccctctagctccagccgccactacgccggtcgcagagtcgccagctgcctagacgcccggaggcccgcgggcgctccctcctgggctgctggcctccttcacattattggagccagaggagcgggcggcggcttgcactccatcccatcgcttgggtgcgtcgccccgaatccaatcgcctggtcaagtctgttgctgccggaggtagacggacgccttatcgtgctcgtggccgcagctagcgcgccggagccacagctggagcgctcgccggcgacgagtcgccgccccgcaaggagcctacgcaggcacgcaccgccacgtctaggcgccaggcggagacgttattaccacaacattaaaggagatgccttcactccagaaagcattgcctccagaacttgctgataatgtgctcaggttatatcgtgaatgcttacggagggcgaagtatattggccatcagaaacacaatacagaacttttagtcgccatggtgagacaacaattcaagaaaaacatgcatgaaactgatccagagaagatacagaaaatgaaggacgatgctgcaaggggccttatcaatcatattctatatgagtccgagaagattacaggacgcaagttttcaggttaaaaacagaagttgaaactggacttacagtgtgtcgtgctgtatgaataatagtaaaaataatttactttcttgcctttgaatgattccggttctattgtacaaggacctgcaaatgttttttccttcggattgctgagtactcgagctattgcagcaatgattttcagtaaccaagagtttggctgtc

SEQ ID NO: 30588 - DNA, 2174 bp, Zea mays
  Clone ID: UC-ZMFLB73043D12_FLI
gcagctcaaagctctagttctagctagctagcaaagggggggaaaatggctccgcttctcgctgctgccatgaaccacgctgcagcccatcctggccttaggagccacctagtaggacccaacaatgagagtttctcacggcaccacctgccgtcttcttctccacagagcagcaagcgaaggtgtaaccttagctttactacacgatctgcaagagtaggcagccaaaatggagtccaaatgttgagcccctcggaaatcccacaaagggactggttcccctctgacttcaccttcggtgccgccacttcagcgtaccaagtataattttctagcgcgaatgttgtttattacgtctctgttagatatatacatatatgaaaagaaactactgtagttcactgttacataatggcagctgatttatatatatacctaaaccaaaaaggagttgatatatgtgtgtgtgcgcacgcgcgcgaaacgtattgtattctagctaattaattaattgtttgatacatgctaaagtgaaatgatatatcttggtagattgaaggtgcttggaatgaagatggaaagggggaaagcaactgggatcacttctgccacaatcatccggaaaggatactggacgggagcaattcagacattggagcgaattcgtaccatatgtacaaaacggacgtcagattgctcaaggaaatgggcatggacgcatataggttctctatctcttggcccagaatactgccgaagggaaccaaagaaggaggtattaacccggatggcatcaagtactacagaaacctcatcaacttgttgctggaaaacggcatagagccatatgtaacaattttccactgggatgtacctcaagcactagaagagaagtacggcggcttcctagataagagtcataagagcattgtagaagattacacctacttcgctaaggtgtgctttgataacttcggcgacaaggtgaagaattggttgacctttaatgagccccagacatttacttccttttcctacggaactggggtctttgccccagggcggtgctcacctggactagactgtgcctacccaactgggaattcactcgtcgagccttacactgctggccataacattctcctagcccacgctgaggctgttgatctttacaacaagcattacaagcgcgacgacacccgcatagggcttgcgtttgacgtaatgggtcgtgtgccatacggaacatcgtttctggataaacaggccgaagaaaggtcatgggacatcaacctaggatggttcttagagccagtggttcgtggtgactaccccttctccatgagatcattggctagggaacgactacccttcttcaaggacgagcagaaggagaagctcgccggttcctataacatgttggggttaaactactacacctcacggttctccaaaaacatcgacatctcaccaaactactcacctgtgctcaacactgacgacgcctacgccagtcaagaagttaacgggcctgacgggaagcccattggtcctcctatgggaaatccatggatctacatgtaccctgagggcttgaaggatctccttatgataatgaagaacaaatacggaaacccacctatctacatcaccgagaacggaatcggggatgttgataccaaagagacacctctacccatggaggctgccttaaatgactacaaaaggctagattacatccagcgccacatcgctactcttaaggaatcaatagacttgggatcaaatgtgcaaggctacttcgcttggtctctgctggacaactttgaatggtttgccggcttcaccgaacgttatggcattgtctacgtcgaccgcaacaataactgcacgcgctacatgaaggagtctgccaagtggttgaaagagttcaacaccgcgaaaaagcccagcaagaagattcttacgccagcttaaaaatcgggggcctcatgatgtgggtgcagcccataaaaactgtgtggtttggaaccgaagattttctctttttttctgccacgagaggttctctggaggcatactctccagcaccgtggctaataacgcgttgttccaattcagtctggacttgtcatgcatgcaataaataaagtgatgggtttccctgtttcaat

SEQ ID NO: 30589 - DNA, 1052 bp, Zea mays
  Clone ID: UC-ZMFLB73043E02_FLI
cccatcttgagtctcgccgccgcaagcttgtgtaaggtgtaaccctaaccctaaaacacttaccttcgcctccagcaccacgcttccatggaggggcgcggaggctaagtatagccaacctctacaccatatccccatggattgagcggattcccaaggcatgggtacaaaccctcacctgcaagagctggccgcttcggcggtggcggcttctgaaccaccaccgcgggcgcgcgtggtgcggatcctagtgcacgatgctgacgccaccgattcgtcctccagcgaggatgaggcaccgccacttcttcctcggcggaggtcgaggggtggtagcagcagcctgagcgtgaggcgccgtgttatggaaccggctggggcaagctcggccgttcggttccgtggcgtccgtcgtaggccgtgggggcgctgggctgcggagatccgcgacccgcacaaccgccgcagactgtggctcggcaccttcgacaccgctgaggaggctgccaacgcctacgacgctgcgaacatccgcttccgcggtgtcagcgccactaccaacttccctgcggcccgctactcgccccctccaaagccagcgaagcctatcatctcgctgactcctgaacccggaaaggtgatcaccttgccaccggtacctgtgaagccaaccttccctgttcaggtgaaggaagtgggtgggagctggggcggcctgatcaagggagctaggtcggaggtcaaggcgtttgcacccaagccagtatggaagatgatccccagggtgcaccagaagtttccgggttgtgccgatggctctggcctgcgtgccgtccatgctgcctccatctacgtggaggaggttggcggtggctgatggtccaagtatctgcaattactatcgctagaggttttattgtctatctccatggcatcattataacctggtactgtattattttggttagtgttaaactgttgatgtggaaacctatgactcttgctgtgttatgatcggtggtaatataatgtgtatatggtgacatttggtt

SEQ ID NO: 30590 - DNA, 891 bp, Zea mays
  Clone ID: UC-ZMFLB73043E05_FLI
gagcgctcggcgacggcgtctgcgtgcccggccgcccgacgccgagggtcttctgcgtcgggccactggtcaacgacggcagcagcacggcggggggcggggggaggcacgagtgcctggcgtggctggacgcgcagcctaagcggagcgtcgtgttcctctgcttcggcagcaagggctccttccccgccgcgcagttacaggagatcgcccacgggctggagagctccggccaccggttcctgtgggccgtgaggagcccgccggaagaaccggacacggacctggggaagctgcttcccgaagggttcctggacaggaacagagacagaggcatggtggtgaaggactgggtgccacaggcagaggtggtgcggcacgaggcggtccgcgcgttcgtcacgcactgcggctggaactccacgctcgaggccatcatgtctggcctgcccatgatatgctggccgctgtacgcggagcaggggctcaacaaggtgttcatggtggaggagtggaggatcggggtggagctgcgcgggtacgaaaagttcgtcaaggcggaggagctggaagcgaaggtcagactggtgatggaggctgaggaagggaggatcctccgggagaggctcgcggtggcgagggagaaggcgttgggggctactaaggaaggcgggtcttctgaagtggcattcgcggagttctttggagatttggacaagagcagctctccgtcggtaaacggagaatgcgattgaattgatcactggtgtgctggtgtggcagatggactgcgaacgtatatatactttaggattcaatatcacttagtattttgacagtacgagactaaaatattgcatctgtggtatgggaataaaattggattcaagc

SEQ ID NO: 30591 - DNA, 805 bp, Zea mays
  Clone ID: UC-ZMFLB73043F07_FLI
ggacaccatcagcgtcatcgtctgggtccccgtgtacgaccgcgccatcgtgcccctggtgcgctcctacaccgggaggccgcgcgggttcacgcagctgcagcgcatgggcatcggcctcgtcgtctccatcttctccatggtggcggcgggcgtgctggacatcgtgcggctgcgcgccatcgcgcggcacggcctgtacggcgaggacgacatcgtgcccatctccatcttctggcagataccgcagtacttcatcatcgggtgcgcggaggtgttcaccttcgtggggcagctggagttcttctacgaccaggcgcccgacgccatgaggagcatgtgctccgcgctgtcgctcaccaccgtcgcgctcggcaactacctcagcacggtcctggtgaccatcgtcacccacatcaccaccaggcacggccgcatcgggtggatcccggagaacctcaaccgcggccacctcgactacttcttctggctgctcgccgtgctcagccttctcaacttccttgcctacctcgtcatcgccagctggtacaagtacaagaagacggccgatgattaccctggcgccaaaggggagcacggtacagagcactgatgggcgagagatggcggaaattgagtgatttctatgtgtggttagctgtctgcctgtctgtcgacttgttttgccacagtttgggtgcttaaacgttaacgtacgtactagttcaatatagtgtctcgggggcgaattggttgtttacatgtcatgtgtttatatatgcgcaatgttcgatcttagtggaat

SEQ ID NO: 30592 - DNA, 2048 bp, Zea mays
  Clone ID: UC-ZMFLB73043G03_FLI
cgcgcattaaaatctgccccctcctgccactgccagcgaccaatccaatccctacctgctcgggaaccacccgtcgggctcctcccgcccccctcgccgcatctgcatgcggcggggatctccgggctcgctccgtcaccggagccccaatcaccgccacctcatccaagcccccgaatcccccgggcgcgcagcacaaccttgccgcgatcgcgcgcgggaaccgccgctgattgggtcgtgaaagctcgattttgggcgattttgattcggagaacccgccgtcattcgattttggcgcgcgttgcgagccgggatggggttgcagcagtccaaagaggaactgctgtaccagcaggtcaactacggcaacgtcgacgggattcgcacgctccgggggcaaggcgctggtctcgagtggattgacaaggaagggaagacgcccctgatgcttgcctgtatgcgcccggatctgttcgacgtggccaaggtgctgatcgagttgggagctaatgtgaatgcctacaggcctgggtcacactgtgggacagcattgcaccatgctgccaagaaaggacttcagcagactgtccatttactactctcacatggagaaaagggtcatgtgaatgttgttcgtgccatagagggacggctttgtcttttttgtggatggatgagagagaactatgctcctgcttttttggatgcaattgctccacagttcatgacaagaaaaatttgggctgttgttttaccccgtgaagtgcgaactccaaccaggcctcttaagttagagatagctatatatcctgaattacaggcttctaaaccacgttctgtacttaaactatggaaatgtcaaattgagcaaccaaagcttaatcaggctgacccttccattatcatttttgacaaaggaacaaagactagatacaagatcttaccggcctatgaaggtgacaaacagcagcttcaatggttttataatgcatgttgtggcatggcacaggttttgaacacggctccagtagcaccagcaaatctccctatgccaaatccagcaccggcaatttcatctgtggcgccttcagaacaatctgcacccagcaaggaggatgttgaattagcaatggctatcaatgcctccattcaatcagctattgcagagggagtatcagtgcccaatgttcaaccaaatgcatccacccccaacaacaatggctgggctgcccctccaagtaattctcacaacggatggggaccaccagccactcctgcaccatcaaagacgagcggtcagtcccaggtccgggtagacgccccaagcagcagcacttacaatggatgggatgtgcccggaacaagctctagtcaaagttcatcgaaaccccaccaaacccaaaccaaccctccagtcttgattccacaggaagcacttcaggctctcccaaccccaaccgcgccaccatttgctgaagaaaccttctacaacggtcctgttcactatccatccatagactctacgcctgtcgatgtaaccatgccggctaccactggaggcggtagtacaacagtcatcgcaacggcagcacctacagaacagttagaaaatgaagctgatgcaagtgacagcggcaaaactccctctggtacttgcgttatatgtctggatgcccctgtggaaggcgcctgcatcccgtgcggccacatggctggttgcatgtcctgtttgaaggatatagaatccaagaagtggggatgccctatctgccgtgccacgattaaccaggttgttcgcctctatgctgtttgaggagttgaaacggtgggttcagaaagttggcaatggattggagggttctcgcaacaaatgttgatgggaacgtctctatctcaaaattgtgcaattatgctattttgcacttcgtactgcactacaaatatgacttccgtgtaatgtatgtgggctgacgcctttatgtacataggtagtactatacaagacaattttataaaaatctgggtattgttgcaagttgcaactc

SEQ ID NO: 30593 - DNA, 1875 bp, Zea mays
  Clone ID: UC-ZMFLB73043H11_FLI
ctgaattataagggagtttacatgtaaagatagatataagtattcccatttattggagggggtcagttaggctgatctctacccttatcaagctaacgactagataaactttctataaccaatgacacctccttggactataaaagggggtagtatcgcccatcaagggcagatcatctgatcatattgcataggcaatagacaccgcaacacacaagacgcatagtattatcttacattgatagcccgaacctatctaaatcttcgagtcccttgtgcattttccttaaactcttgatctaccccataaattcactatcgaatatttctcgacaacctttagctttatatcaaattcatacgcctcttatatattttttctagcctcatgcatgcaactagcagtatactatttttcgtccacccagtgcaggtgccaattgcgctgccaaccatttttctgccagcaggtaaactcgtgggcatggcatgtcgaaaacagagctccaattctttgttgtgtgcttgtacccttgtgggcttgtggtagtcactctgctattcatcatgtcttgcgacagtgctgcatgctggtcatcactctcatgtggcatgtggcatacttctgaaacaaatcattgagatggtgtctccaaaaattaatctacgtactcgtcactgtgtgccaagcatgtcattctgaccaccgaagatctcataaagccctaatatcattagagtcaaataatgtctgatagatgagttagcatgtgaatatattgattctaacatgatcagcatgcgattgattcaatgcaagtgcaaggatcataaacattcttccactgtcccacgacttaacccattgtcgtggtggcactgaacgtggtgtccttgggtgacccacttagaaaatttagagtttagtgatgggtttgctcattttatagtgcagtgacctatttgcacatacaagagaagtctggtgacctcggatgcaatttacccgatatattattttgtttcatggtttatttataatttacttcatccagctcttagctcaagtaatctggacaagtttctcatctccattgggaagcaaccagcatatgtggacttggaggctgcaccagctgtgggtaaggataatcctcctgatctagcacatttggttccaactggtgtgccaaattcttcagaacaaccagttgagaacacggcacctactaatgttcttaaagagacagaagtgaaggctaaacccaaagttcagagcaagggtgcagaaacatcgagcaaagtagataaacctactaccgataccagtgttgacaaatttgtaaatgatgtgttcgagatcatctccccattgttcttgtctgaggcattgaagaaattggacattaagaaggaagatctttctttgatcttagaaggcctcaggggacgggcagatccagatttgaagagtatagcgatgactctgaagaatgcatcatatacctcagggtttcacgctggttacaaaaccatgcagaatcgtggtctaaacggctgacccacttaggtcccagtctctcaattgcatggtttgatacaagaaacaggaatctgattttacatatttgtatgctgttgaatgaagtcaacatattatgtttgatgctctcgttctatctatgacgtatgctctttttttgtgtatgtgtggatttgcctttttctctctctgagagatcaatgggaaattttcaccataccgtgcagtgttccatagaatatgtatttacaagattctgctactcgctctaccaacatcagagtttcagtgtatcagatacatcacatagaaatgtcttcggcgcgttccag

SEQ ID NO: 30594 - DNA, 124 bp, Zea mays
  Clone ID: UC-ZMFLB73044A04_FLI
atgccaactatatttatgtgttacttaataaatgtatggttagtctaaaacgaattagattttgggaacaagggagtatatataacagagaaaaatatcctcccctcaaaagcaccccgctgag

SEQ ID NO: 30595 - DNA, 2729 bp, Zea mays
  Clone ID: UC-ZMFLB73044A05_FLI
cccatctattgttctgcctcaaacaaatattataggtgatcatgacaagctgctggacatgccagaattagcaagggaatcctccgatgtgacagatgagatggaatcatactctttacagcttcaagaaccagatgataaatctccattggaggtaaagaaaatgagtcacaatgctctagctgcccttgtgaagtatttgcagaagaaaagaagtggcataattgagagagcgacggctgaagtaacagaggaggtggtctctggagctgttcaccacagcttaaaattatctgagccatataagtcaaagaagctgagcaagaaacgagctcagacacatacaagctctattgctagagaaatggcaactgtactggatacttgtctgcttcaagctcttattcttactgggcagtcatcaggggcaatagagttgttgaaaggactcaattattgtgacctgaagatatgcgaagagtttttgaaggaaaggagagaatatatggttttacttgaactctataaaagcaatgaaatgcaccgtgatgctctccaactactcaatcaattagttgaagaatcaaaatctgaaatggagaatacatattttaataaaaaatttaactctcaaatgatacttgaatatctcaggcccctttgtagatctgacccaatgctggttttagagtcttccttgtacgtccttgagcgcaacccatcagaaactattgagctctttttgtctgaaaatgttccagcagatttggtaaattcatatctgaagcagcatgccccaaatttgcagtcaacttacttagagctaatgctctcaatgaatgatactgggatcaaccctaatctgcaaaacgagctggtacaactgtacctttctgaagttctagactggtacaagattctgaaggaagagggaaactggacagagaagacatattccccaacacggaagaagttaatatctacgttggagagcaattcaggttacaatacagacgcacttcttaagcgccttccccaggacgctctttttgaggagcgagctatattgtatgggaaaataaatcaacacctcagagctctctctctctatgttcacaagcttcagatgccagagcgagcagttgcatattgtgaccgtgtttatgaagaaagagaacaacaaccgtccaaatcaaatatctattttaatcttctacagattcatctgaacccaagaaaagctgaaaaggaatttgagcagaaaattattccagttgcatcacaatactctggaatccaaaaggctagtgctactaagcccaaagggggtcgcgtaggtaaaaaggttgtagagattgagggggctgatgacatacgctttagccccagcggaacagatagtggccgaagtgatggtgatggagatgatgtaaatgaccgaggccctataatgttaaatgaagcactggaactgttgagccaacggtgggacaggataaatggtgctcaggctcttaggctgttaccaagagatactaaactccaggatcttgtatcatttcttgagccactattgcgtaactctagtgaacatcggcgcaattatttggttatcaaaaacttgattttgcgggcaaacttgcaggtcaaggaggatctgtataatcggtgtcaagctgttgtgaagattgatggagatagtacgtgttctctttgccataagcgtgttgcaaatagtgcttttgcaatatatccaaatggacaggctttggtgcattttgtctgctttaaagaatcacagcaaattaaggccgtcagaggagcaaactctgtgaaacgtagataatatggccgtgatccaggtcgggcgaccagctggtcattccagaggaccgaccaggcgcctaatcacgattagggcgacaattaggacgcttaatcggtcctggtcgacctctggtcgtcccctaatcgtcctatatatttctgggcatatgtatatataatatgatatatgtatatataagcaatactgcaataggcattatataagtctgaaagtatgaaattgaaactgagtaacagactgaaaggcaatatagacatatagcactatagcagaactgaaactgaaatatggaatacaaggctacaagcagtaatgcagtacctactacctagagcatatcatcatccaagcaaaaagcagcagcagcttctccaacagattcagattcatcagaatttagacaataggaaagataggaaagggggagaagggggaaccttgagatgaggagctcatctcgtcgctagtgttttggagacgccgccggtgttcttgagctgctgctggtgttctagagccgcagcctatgttctggactcggcagaggagaggaaaagtttcaaggggcggtggcgcattgcctttatactactgtagatgggccgaaaaaatagaagcccagtagcccactagaaaaccctagccgcctggacaaatcctggtcgatttaccatctagtcggacgacctgatactctagtcgagtcatccggctgatcggccactaccaggcgacctgcccgactaatcgcgattagtcggatgacttgaaaacagtgtttgtgtgcaccatatctttcatgattatcatgcactatgtaatttattttacatatgaccctgttaatatagttgtatttataacatacaaatgttgaact

SEQ ID NO: 30596 - DNA, 1225 bp, Zea mays
  Clone ID: UC-ZMFLB73044B12_FLI
gttctcctttccccaaaggccaaaaccgaccccgctccacgcctccactcccagccccagcggatcttctcgagcggcggccggcgatggcagcgagcaacatcgggatgatggacggagcctacttcgtcgggcgcaacgagatcctcgcgtggatcaacactacgctgcagctcggcctctccaaggtggaggaggcggcgtcaggcgcggttgcgtgccaactgatggacgcggcgcatcccggcgccgtgccgatgcacaaggtcaacttcgacgccaagacggagtacgacatgatccagaactacaaggtcctgcaggatgtgttcaacaagctcaagatcactaagcatatagaggtgaacaagcttatcaaaggaaggccccttgacaatctggagttcatgcagtggatgaaacgatattgtgattctgtcaatggtggcttcatgagcagctacaatgcttctgagagaagggaaagcagcaaagggggaaaggagacgaacagaagggcatcggtgccctctcacacaccggccaagtctgcatccacaggtcacaaggctcaagcatcacatggtgccaagcgggcaagcgggcagacggcgggtgcaccacagcgcagcgctaagccatcacctgcagccagctctggcggaccagcttatgacgaacaaataactgagctgaagctccttgtggatagcctggagaaggagagagatttctacttctccaagctgcgggacattgagatcttgtgccaaaaccctgaggttgagcacgtgccggtccatgctatccagaacatactctacacatcagaggaggaccctcagcagcaggctccagccctgagccccatcatggaggcgtccgaggagaggccgaagcaagaggcggcgcacaagagaaagagcatctcggacctggacgagtttggtatgtcgtccagctcaaggcagaggctctccgacatctcagacgtgcagctgtgtggatccccgctgacgagtttcagctgaaggaaccgtcatctctacaaaatgggtgtctcgtctttctgttggattggttcgtggtttcgtatttcatgtgttgtttggtggtgaactgtcgtgtgctcttagcaagttgtctgccacagaatttgtggccataaatgctacaagttcctcctgctatgttatctgccacccattccaagctgcataatcgc

SEQ ID NO: 30597 - DNA, 1376 bp, Zea mays
  Clone ID: UC-ZMFLB73044E01_FLI
agcgaaaccgaaagagaggcagagcttggcaatggagctcccgtggggaatgctgctgccgctgctgctggtcctctccgtctcgtccccgtcctcgtcgtcggctgctgccacgctcgccgtcaccgctccgcccccactgcctgttcctcctcctcgtcatgctcaagacgccgaaggcatgctcatcaacggcaacttcgagacggcgccgcggaggctgaacaagaccctcatcgtggggcgccactcgctgccggggtggacggtgcaggggcacgtggagtacgtctcgggcggtccccagcccgggggcatgttcttcgcggtgccgcacggcgtgcacgcgctgcgcctcggcagccgcgcgtcggcgtcgcagaacgtgacggtgcggccgggggcgctgtacgcgctcacgttcgcggcgacgcggacgtgcgcgcaggacgaggccctgcgcgtggcggtggcgccgtcgctctcggcgcccgccgacgtcgccgtgcgcacgctctacagcggcgcgtccgccgacacctgggcctggggcttccgcgcctcctcccccgtcgcgcaggtcacgttcgccaaccccggcgtgcaggaggaccccgcgtgcggcccgctgctggacgccgtcgccatcaaggagctgcccgcgccgtacccgaccaaagacaacctgatcaagaacgacggcttcgagatcggtccccaggtgctcaggaactcgacggtcggcgtgctgctgccccccaagcagaaggacgcgacgtcgccgctgcccggctggatcatcgagtcgctcaaggcggtgcggttcatcgacgcggctcacttctctgtccccgcggggcagtatgcggtggagctggtggccgggcgggagagcgccatcgcgcaggtcatccgcaccgttcccaaccgcgcctacaacctgtcgttcgccgtcggcgacgcccggaacggctgccacggctccatgctggtggaggcgttcgcgggcaacgtcacgcagaaggtgccgttcgattccgccgggaaaggcgggttcaagacggcggcgttcaggttcgtggccggcggcgtccgcacccgcctcaccttctacagctcctactaccacaccaaggtcaccgacggcgtctcgctctgcggccccgtgctggaccaggtcaaggttgtgcctgtcaaggcgtagtgaaatgaatcgtgagagcgccgagtgacggtctgctctgctcgtcgtctgtagctgtgctcgtcgtgatttggcgtggtgggttgtgaaagtgtggtcgaattctggacccttcggaatctgatcgtggtgtgctgtgcggtgcgatgtgctgtagcgaaatttggttgct

SEQ ID NO: 30598 - DNA, 4105 bp, Zea mays
  Clone ID: UC-ZMFLB73044E04_FLI
cttcgatcatcccgtaccgccgtcgccgccaccaccacttccttctgtcgccgccaccacccactgtctctctcccgcgccaccgttttgggcgttgcgaaatggcgctctccgccagcgatgtgcccaccatgtacaccgtcctcgtcaattcgctcagcgccgacgaggcggcgcggcgcccggcggaggcagctctcgcgcagtgcgagacccgcccgggcttctgctcctgcctcctggagatcatctcggccaggggattggcttgtcgggaggatgtccgcctgctcgccacggtgtattttaagaacagtatcaaccgctactggcggcatcgtcgcgattcgtatggaattagcaacgaggagaaggaccaccttcggaaaaatcttttgctaaacatgcgtgaggaaaatagccagattgcactgcagctagctgtattaatctccaagattgcacgattggattacccaaaagagtggccagagcttctgtctgtattggcacaacagctgcagtccgctgacgttcttgcttcacatcgcgtgtttatggtcctgtttcgaacattaaaggagctgtcaactaaacggcttgctgtggatcagaagaactatgcagagatcactggccatttgtttgagtatacctggaacctttggaagagtgatgtgcagactatattgcagaatctttctatgctctcacagcggaatgacatagattccgtttttgagcaatccaatgaccttgctttgatttgcgaccggtggttgctctgcctaatgattgtccggctactaattttttcaggttatgctagtgattcaagaactgcacaggaggtctggcaggtcagggaagtttgtccaacagttttgactgccattaaatcccttcttccatattacgacaccttcaaagacaagcatgctaaactatgtgactttgcaaaaagggcatgcactaagttgatgaaagtcctcgttactctacaaggcagacatccatattcttttgttcacgaaactgtgctttcagctacagtagacttctgtttgaatatgattacaaatcctgaacagactggcacaacttttgaggagttccttatacaaagcatggttttggttaaatcagtactggagtgcaaagaatacagaccaagtcccatgggacgtgtgatcaatgaaaatgagcctttaagtctggagcaaaggaagaaaaacttcgcagcagtggctagtgacatgctgaaggtcattttgtctggtgatcgagttgtgctgctttgcaacattttagtaaggaggtacttcattttcacagcaaaggatttggaagagtggtcagagaatcctgagtccttccaccatgagcagaatttggttcagtggaccgagaaaaaacggccatgtgctgaagccctcttcattgttatcttcgagaagtaccgagaggtgtgaacatttaagttttcattgtggctgtgagtatattcaatgctctaatgctcacatgatcacgtgtcgcttcagcttctagctccagttgttgtttctgttcttcgtgaagctatggctatttctccaccacaagaaacagaggttactgcaggaatgcttttaaaggatgcttcctatacagctgccgggcatgtttattatgaactttcgaactatctcagttttaatgaatggttccatggatctctatctattgaaatttcaaatcatcaccccaatatgcgtatcattcgtagaaaaatcgcattgctacttgggcattggatttctgagatcaagggcgacactcggaaattggtataccgcgctttggttgggttgctgcaggataatgatatagctgttaggctagcagcatgctcttctctctgttatcttttccaagaatcttgcttttctgaattagatttgtttgagtgtcttcctacatgttggacaatgagtttcaagttgatagaagatgtacaagaatttgattcaaaggtttgcatctcaaaaccgcaattcctattctccttctgtttaacctgatgcccctgtaggcattgaaacttcatattgtactattagtcaataacatgccgagtaaaagttagtcagaaagcagtgaatggttatgtttggcaggatctagttagtattgtgtgtttttttttgcgcaacaactcttgtacatctacatttttgaattttcaggtttgtcctctctcctaaaactctacctgcggggggtaagacagcctccgagcattatattaagaagaccgtcgagaaaacccccgaatccctggcccacccatacaaagcggtactgtagcccatgtgagaacactaccgcgaccggaactggaccgtagacctgtgctttgtcgttggacagacgaggggattttttaaccacagctgaaattcgctcccacggaaagtcgaacctaggacctgaggagtgctactcagaccacctaaccaactcggctttacctatttctttgtaggtgcaagtgttgaacttcatttcagttcttcttgaacatgcgggggacaaggttattccatttgcatgtcagctatcacaattttttcagatgatatggaatgaatctgcgggtgaaagcttgctacagatacaattactaacagcacttagaacttttgtttcttcgcttggattccagtcacctctttcttaccacatgcttattcctatactgcaaagtggtatcaatattgacagccctgatgctcttaatcttcttgaggacagtgttttgttgtgggaagcaaccctttcaaatgccccttccattgtacctcaacttctggatttattcccttaccttgtgggcatcatgaatagaagctttgaccatctggaggtcacaatgaaaataattgaggattacattatttttggcggttcagaatttttgaaaagccatggtgcaagcctagctaacatcattgatactattgttggaaatgtcaatgataaaggacttctcactgcacttcctattgttgatcttcttattcagatatttcctctggaagctccaccattgatatccagtgctcttcagaaacttaccttcatttcgttgagtcaagatgatggccaaaacccgtctaggacaactgtccgagcatcctctggggcgattcttgctaggcttctggtgatgaatacaaacttttcggcacaactattatcagagcctgctcttttggcaagcatccaacaagcagggatttctgtgaacaataatctgcttttttctttggttgatatgtggatcgacaaggtagatgacgcaaatgctatacagcagaaggaatacgcaatggcactttctgtaatcctgacattacaggtacctcaggtcattgacaaacttgatgacatactgagtgtctgcactactgtcattataggaagccgtgaagtaaagactgatgacgatactagcggcgatatcacaagctcttcatggataggcaacgatggttcaggttattccaacacttcaagcaaagagctgagaaagcgccaggtaaaggattcagatcctatcaaacaaacatcgctagagatggtgttaagagagaacttaaaagcatgtgctgttttccatggggatgcagcattcaacgctgccatcggcaggatccatccatcttcgtttgctcagctgcaacaggccctgaatactgcataagagtgcatagctgcttactggattgtatggagcattacgtggagcaggcattgctttgtgaggtgctgacagacagttgaatcgcggtatgacacagcagtgcagtgcagagagagcatgtcctgatcttccgaaatataattggattggattggattaccgcggtcaatgtggatggccagagtttttatagctgtccttccaacatgactgactcgatcttctcccctcccccttctcaaatcatggccaggcatccatcctagttgatttttatcccttgtttagcgaggtgacgccgagattgttgtttgagaaggaaatctggaatgcaattttgttgtacgttttatgttc

SEQ ID NO: 30599 - DNA, 1334 bp, Zea mays
  Clone ID: UC-ZMFLB73044F12_FLI
ggcaccatggacagcgtccgcaccggaccgtacggccagatcttccgccccgacaactttgtcttcggacagtctggcgcggggaacaactgggccaagggccactacacagagggcgcagagctcattgactccgtgcttgacgttgtcagaaaggaggctgagaactgcgactgcctccaaggcttccaagtctgccattcccttggaggaggcactggatctggaatgggcacgcttctcatttcaaagatcagagaggagtaccctgatcggatgatgctgacattttctgtctttccctcgcccaaggtgtcagacactgttgttgagccatacaatgcaaccctgtctgtccatcagttggttgagaacgctgatgaatgcatggttcttgacaacgaagcactttatgacatttgcttccgaactctgaagctgacgacccctagctttggagacttgaaccacttgatcagtgcaacgatgagtggtgtcacttgctgcctccgcttcccaggacagcttaactctgacctgcgcaagcttgcagtcaacctgatcccgttccctcggctccacttcttcatggttggctttgcgccactcacctcgcgtggctcgcagcagtaccgtgcgctcactgtccctgagctaacccagcagatgtgggatgccaagaacatgatgtgtgctgctgacccacgccatggtcgttatctcacagcctctgccatgttccgtggcaagatgagcactaaggaggttgatgagcaaatgattaatgtccagaacaagaactcgtcctattttgtggagtggatccccaacaacgtcaagtccagtgtttgtgatatccctccgcgtggcctctccatggcctccaccttcattggcaactccacgtccatccaggagatgttccgccgtgtgagcgagcagttcactgctatgttcaggaggaaggctttcttgcattggtacactggtgagggcatggatgagatggagttcaccgaagctgagagcaacatgaacgatctggtgtccgagtaccagcagtaccaggatgccactgctgatgaggaggcggaatacgaggacgaggaggccatccaagacgagtaagggtggtttgggccctgccacatttgtacccttgtttcctttcattccggggcttgcctatggtttgcttgttgtattcgctcaagttatgcggtatgtagtagtactttcgtgcgtagcatgctgtatgctaccacaaagactttgttcacctgcactgcttgatatgccagccatggcatatgtgacgagtatttcattatttt

SEQ ID NO: 30600 - DNA, 1408 bp, Zea mays
  Clone ID: UC-ZMFLB73044H11_FLI
cggctcctcttcctctcatccaaggcggcctcgtccggcggcgtcacctccgctcccgtcgcctccggccagactccgccctcgtacgtcgtccgcgcggggctcggcaccccggtccagcagctgctcctcgcgctcgacaccagcgccgacgccacctggtcgcactgcgcgccgtgcgacacgtgccccgccggcagccgcttcatcccggccagctcctcctcgtacgcctccctcccgtgcgcctccgactggtgcccgctcttcgagggccagccgtgcccggcgaaccaggacgcctcggcgccgctgccggcgtgcgccttctccaagccgttcgcggacacctcgttccaggcgtcgctgggcagcgacacgctgcgcctgggcaaggacgccatcgccggctacgcgttcgggtgcgtgggcgcggtggccgggccgacgaccaacctgccgaagcaggggctcctcggcctcggccggggccccatgtctctgctgtcccagaccgggagcaggtacaacggcgtcttctcctactgcctgcccagctacaggtcctactacttctccggctccctccggctgggcgccgccgggcagcccaggaacgtccggtacacgccgctgctgaccaacccgcaccgcccgtcgctctactacgtgaacgtgacggggctcagcgtggggcggacctgggtgaaggtccccgcggggtcgttcgcgttcgacccggccaccggcgccggcacggtgatcgactcgggcacggtgatcacgcggtggacagcgcccgtgtacgcggcgctgcgcgaggagttccggcggcaggtggcggcgccgagcgggtacacgtcgctgggagcgttcgacacgtgcttcaacacggacgaggtggcggcgggcggcgcgccgcccgtgacgctgcacatggacggcggcgtggacctgacgctgccgatggagaacacgctgatccacagcagcgccacgccgctggcgtgcctggccatggccgaggcgccgcagaacgtgaacgccgtcgtgaacgtggtggccaaccttcagcagcagaacgtgcgggtcgtcgtcgacgtcgccggctcgcgcgtcgggttcgcgagggagccctgcaactgagcccctgaatccgtccgtgccctatgcacgggaggaaggaggagacgcgctgcggctgccgcatcggtcggtgtgcagttagttgtcctgttagtctatgctacgttgtctgcactctgcaataacggacgtgacccggggaaaaaaactgtttcgtcacgggtagctagagaatcacgtaatggctcttgttttcgtttgtgtcctataatgtatggctattggcctgtttcgagaggttaaaatttggaggtgctgcatc

SEQ ID NO: 30601 - DNA, 1563 bp, Zea mays
  Clone ID: UC-ZMFLB73045B02_FLI
gtgcagtgcttctcgacgaggattatgatgctcggatcacggatgttgggctcacaaggttggtccggatggcgcctggcgagggtggtgataccagtcctttcctgaacggggactttggggagtttggctatgttgctccagagtatgctagcaatccagttggtacgatgaaaggcgatgcgtatgcatttggggtgatattgtttgagcttgttagcgggcaggaggctgctgctgtggttactgacgtgacgggtgaaggattcaaggggacattggtggactgggttaaccagctcaaggcttctggtcgaatcagtgatgctattgataaaccattgcgtggaaagggccatgaggcagagattcaggagttcttgaagatagcttttgcttgcacccagccccgtgtgacggagaggcattcaatgtatcgggttttccacgctctgaagagcatcggagagggctgcgatgtcacggagcagtttgatgagttcccattggcctataacaaggatgattcagacgctatttagctgatgatgctgattgccaattcgattgtggaaatgtttggtcaggcttattgatgatatatatatttagccttgctatggacagaccggaagcataaatgagtgataagagaacaatatcgaggcaccaaatctagcgccggatgccgggtggtcaattacatcgttgcatcgacaggggatgtgataaccataagtaatattgctcgaaaatgtagagctgactcttgaagcctttgactacatgcagctgccattcacgctgaaagcgcattctaacacggcatgatacaccagcaactggaatgttgtcaacatcagcggcaacgacgacaacgccacatcgagaaacaacaactgtgggccagggagcacaatcccgtggtgcggtgacttgcccacgtttgccatgctgccttgatgcatggcacatcaacaagaagagcaccagtttggaaggctaattccgaaggaattgagatgtgcagagggagatgaagaatgtggagaaagacatcagggtagctaccaagcgcaatgacatgttatctgcaaagagctgatgctgctcggagtcatctcgctgctgctcagccagacgacactcttcatatcggagatctgcgtgccgtcctcgctcttcaccagccgcttctacatctgctctgagagcgactaccaggacctgctgcgcaacacggacgccaaccagacggcgctcgacaagaacatgttcggtggccagcggctgcacgtctgtggcgaggtattgttaacccagatgtcctgctcccagcctattaaggtcaatggaactgggagtggagtagactgttcactcatcgcttgggttggaacctaatctgtcacttgtagggccatgaaccttttgtttcgtacgagggccttgagcagctgcaccggtttctcttcatccttggtatcactcatgtgttgtacaattttgtaacagtggttctgtccatgatcaaggttcgtgctcactgcctgattgcggctc

SEQ ID NO: 30602 - DNA, 1887 bp, Zea mays
  Clone ID: UC-ZMFLB73045C09_FLI
gccgcgagctccaccttcctcagctctgccccgagcgcgatgtggcgagcgacgaggcggtctccgccgttcctgcgatggctatcgtcggacgcagcctcctctaaggcgccgcggcagcgcgtagcggcgctgtgggggaacggtgactacgggcggctggggctgggctcgctggagtcgcggtggagccccacggtttgccccttcttcctcgcccgcgccgccgacccgcccgcctccctcgcctgcggcggcgcacataccctctttctcacccagaatgggcgagtgttcgctacagggctgaacgactttgggcagctggggataggaacctctgttacacatatgctggagcctgttgaaatttctggatttcacgaaagagttgtagaagtttcagctggcaaccatcattcttgtgcagtcaccgcggatggtaagctctttgtttggggcagaaactcaggtggccagcttggccttggtaaaggtaaagtagtttctaccccaacaaaggttgattgtttgactgacctcagagtaaaaacggttgctctgggatcagagcattcaattgctgttacagaggaaggtgaagtcttgagttggggagctgctggttctggtaggctcggacatggccgtcaatctagcatcctgggattttctctgacctcaacgtatgataatatatatttcataaaaatattctctaaaaaacatatgttggaacttaattgtgtatgtactctatgtcaattcattgttatctatttagaagatataagaaaattcttaaccataaaggatgaaaatttttctactgctagctggcatgcctaagtacacaagggagctatgtgcatgattttaagagggaataggccctctaaatatctcaaacagttaaagcttgtggcaaatgaactagtgtggcatatatgggtattgtttgtgctttccttaaactgaacaaggttgctcaattatgtggtattgtaatgtgagttttgggtaaaatgctgaatggcatagatatagaagttcgaaaatttgaaggcttctgcttatcttacgtgaatatactccaagattgatcaaaaactttgatggtatcaagattaaaaagatagctgcaggaatgttgcactcagcttgcattgatgaaaaagaccgaacgaagaattcagaccaaatattgttgaagagataccattttcagaagaagttgcttgtggaggttaccatacttgtgttgtaacagatagcggtgatctgtattcttggggttcaaatgaaaatggctgccttggtctgggaggtacggatatggtccgctctccggaaattttgaaaagttctctatttaaacttcctgtatctaaggtatcttgtggttggaagcacacagctgtagtttcaggtgatgacatctacacatggggttggggaggcgccaatgggacttttttcgaagagggccattcttccggtggacagctgggacatggaaacgacgtagactattttgagcctatgatggttccctttggcacgaatgcaagagccgtccatgtatcgtgtggcttcaatcatactggtgcaatttacgagtgctccgaggactttgactgacgtgccacctgcagacagcagatccgcatgtcttggagacttaggttagttatcaaattatactcgctagaagtgcatataaacagcataaataagctctgatgttggacctgcatttatgtgaagagaaatatagaacaagtgataacacccctgagagggggatgtaaattaaacagaataagggatgaactggatgcattttgtgatgcatcagagttacttgccagtgtatagcatttcttc

SEQ ID NO: 30603 - DNA, 2613 bp, Zea mays
  Clone ID: UC-ZMFLB73045E06_FLI
gacggatggcttcatccgattggtgtggtctatttgtctcccagtcccactccgtccactcgagctctccaccagctttccccttctctccggtccgggaatcggaagctcagggcagaaggtaagctaccagaccatgtcgtagcccctagttactactgcttgattattacttttcgcttttcttgggagtaaaattttatttactcgccgttttgggctgttcatgtttctgttagtgtgtttggtgccttgattttttcagataattggtgcctttcttgataagttgatatacaaccgtggatccttggacttcgatttagttagtgactccgtaggtatcagataaccaaaaaaagaggaatcacgtgaactactggttatatttcccctggatttcgacaaagctttttaggaaatttcgtactttttttcatggagaaatttcgaagacaccaatgaagttctcgcataaaataataaaaaaaccctaagcatgctcgattttcatttttttgccatgaacaactgctagtcaagcacaaaacaaggatttcctaattctccacactcgacaaccattattttcacagcttcaagaactctcaacttccccccaccccaacccaaaagaagtgaatacaaccataaccttcacagcttcaagaacttttcaacttcaaggaaatttctaaacagtaattcttttttaagctggtgaggtgtcccggccctcctgtttcctgaaaaaaaagcacgactgaactagatgttattaggtccgcacatgaattgcatacgaaatgttttcctgactggggctaaattgctagtttagccatggggcagacgcatcttttgttgctcgcttgtttctgggtcctgtcaacatgctccttgctacttgatgcttcctccgatggactgttaagaatcaacctgaacaagaagagactggacaaggaagctttgactgctgcgaaattggcgaagaaggagagcaaccttcgaaggtctgtgggtgctgaccagtatctcagtgcctcaactgatgacatagtccctttggacaactacctggacacccagtactttggacagatcagcatcggcacgccaccacagaacttcacagtgatattcgacactggaagctccaacttgtgggttccctcatccaagtgctacttttcgatagcatgctacttacaccacagatacaagtcaaccaagtcgaagacttacacaaagaatggagaatcttgtacgataacatatggttctgggcaaatcgctggcttcttcagtgaggacaatgtgttggttggcaaccttgttgtgcaaaatcagaaatttattgagacaactcgagaaaccagccctactttcatcattgggaagtttgatggaattcttggtctcggatttcctgaaatttctgtaggaggagcccctccaatttggcagagcatgaaacagcagaaactggtcgcaaaggatgtcttctctttctggcttaatcgtgaccctgatgcatcttctggaggaggcgagcttgtctttggtggtgttgacccaaaacactacaaaggggaccatacatatgttcccgttacacgcaaaggctactggcagtttgacatgggagatcttattattggtggccactcaactggtttctgtgctggtggctgtgctgctattgtggactcagggacttcattgcttgctggtccaactaccatagtggctcaagtcaatcatgcaattggggctgagggaatcatcagtacagaatgcaaagaagtggtgagcgagtatggagagatgatccttgagttgctcatatcgcagacaagcccacagaaagtgtgcactcagattggtctctgtgtatttgatggtgcccattctgtcagcaatccaattgaatctgttgttgagaaacagaagcgtggttctgatcttttctgtactgcttgtgagatggctgttgtctggatacagaatcagctccgtgaaaacaagacaaaagaactcattttgaattatgctaatcagctctgtgagcgtctccctagccccaatggcgagtcaactgttgattgccatcagatctcaaagatgccaaatctcattcaccatagcaaacaagactttcaccttaacaccagagcagtacatagtgaagctggagcaagcaggacaaactatctgcatcagtgggtttatggcatttgacgtaccgcctcctcgtggtcctctctggatacttggtgatgtttttatgggtgcctaccacactgtttttgacttcggtgagaacaggattgggtttgccaaatctgcatgaggactggagttctgcgctttagtagcatgtccagtttgttatccgggtattgtacatatatatgttgccaactggtgtaatccgcagtgtttaatagtatatattcatgcagaaatctagaagattgtggcatgatatgtgtttgcaaatggagctatgctatgtatggagctccaggacctagagttttatgtaaagggagacgatgaggattagggcttttaacctattctcatcacgttattgtcctgattact

SEQ ID NO: 30604 - DNA, 1496 bp, Zea mays
  Clone ID: UC-ZMFLB73045G02_FLI
gcttcgtctctctcgccggcgcggcaggcaactatcatcacttcattagctcatccaatctattccgatgacgaccgtgcccaagccacagcaggtggcgcactcacgggcacggctcgcaccccgcgcgatcggcgccttgctggagtttgccccagcctcctcctccctccgcttcgccgtgcaccgctgccgcactgctcgcctagaggtgaaggcatctggaaacacgtttggaaactactttcaggttgcaacctattgtgaatctcatgggggtggtgttggttgtgttatcagtggttgtccacctagaattccactcactgaggcagacctacaagttgaactcgatcgaagacggcccggacagagcagaataacctccacaaggaaggagactgatacatgcaaaattctgtcagggacacatgaaggggtgactactggaacgccaattcttgttattgtcccaaacacagatcaaataggcagtgatcaccgtgaaatagccaatgtgtaccgaccttctcatgcagacgcaacttatgacttcaagtacggtgttagagctgtacagggaggtgggaggtcgtcgggcagagaaaccgttggaagggtggctgcaggggccctcgccaagaaaattcttaagctcaaatgtggattagagatagagagcaacatcgttagatgtcctgatccagagtacgcagagaagatgatagacgcaatcgacagagtacgagttcgaggggattcggtcggtggagtgatcacatgcgtcgctagaaacgttcctcgcgggctcggttctcctgtgttcgacaagctcgaatccgaactggcaaaagctatgctttctattcctgcgagcaacgggttcgagattggcagcggattcgccgggaccgacttgacaggaagtgagcataatgatgagttttatatggataaggctggaagtgtcaggacacggactaatcgctcgggtggtgtgcagggagggatatcgaatggtgagattgtgcacttcaaagttgcttttaagccgacaccatctatcggggtgaaacagaacaccgtgtcaagggagcgtcagaacgttgagcttctagcaagagggcgccatgacccatgcgtcgcccctcgagctgttcctgtggtggaatccatggccgcgttggtcctcatggaccagctgatggcgcacgtggctcagtgcgagatgttcgcgctcaatactgcacttcaagaaccagttggctctttctagcagaggcagagcacacctgatgagctcgcgccaaattttatcatttatcatagtaataagtagctcaagcgtggcttggtttgcttgtctcttgcaccgtagttttgtttttttttttcccgcaagtgtgatgcgatgaagtgaataaggcacttggtttcctgtgcatttgtacacgtttcatataatgtaatctacttcgaagatgatgcatttttat

SEQ ID NO: 30605 - DNA, 1428 bp, Zea mays
  Clone ID: UC-ZMFLB73045G04_FLI
taacattactataaagctgggttacgctaatgcaaaaatctacaaatgtgaggatgacagatgtccgcgaccaatgtgctacaaggcctatggaagcggaaaagaagatagccctctatgtgatgtgcctggatttgaaaacactagaatgaaactcctgagacatgtttcttttgttgattgcccgggacacgacattctcatggctacaatgcttaatggagctgctatcatggatggagctcttcttttgatcgcagcaaatgaaagttgtccacagccccagacatcagagcatcttgctgctgttgaaatcatgcgtcttcaacatatcatcattctgcagaacaagatcgatcttatccaggaaagcgcagcgatgaatcagcatgaagcaatccaaaaattcatccagggaacaatagctgaaggtgcacctgtggtgcctatatccgcccagctgaaatacaacattgatgttatctgtgaataccttgtgaagaaaatccccatccctgaaaggaactttacctcacctcccaacatgattgttattcgctcctttgatgttaacaagcctggttcagaggtcgatgaaatcaggggtggtgtagctggtggtagtattctcaggggagtcctgagggtgaaccagaagattgaagttcgccctggcattgtcatgaaagatgagactggaaacatcaagtgcaccccaatctactcaaggattgtctcactgtacgctgagcagaatgaactccaatttgctgtcccaggagggcttattggtgtgggaacaaccatggacccaactctaacacgtgctgacagactggttggccaggttcttggtgaagtaggttcactacctgatgtttacgtagagcttgagatcaatttcttcctactccggaggctgttgggtgtgaggacgaaaggtacagagaaggcagggaaggtgtcgaagctcaccaagggtgagatcctcatgcttaacatagggtccatgtccacaggcgcccgtgtgctcgctgttaagaacgatcttgccaagctacagctcaccgcgcctgtctgcacgagccgaggagagaaggttgctctgagccgtcgcgttgagaagcattggcgcctcatcggatggggccagatccaggcaggtacaacacttgaagtaccagcgtgcccggtgtaaagcgtcatactcagacgtgagctgaagttgtgtgcaaaagagaaaaaaaaatgagtttgttgttagtcctgtccctgcgttactgcagatccaaagtcctgggtcactctaattttattttgtttcgttcaattttggaggccgtttgcattatgattcctgtgaacattaccaggtcggaaaccagtattgtgaacattatgagtacggcatatggatcagcatttgcc

SEQ ID NO: 30606 - DNA, 939 bp, Zea mays
  Clone ID: UC-ZMFLB73045G10_FLI
tacaaaggcccaaccctgcttgaggctcttgaccagatcaccgagcccaagaggccttcagacaagcccctgcgtctgcccctccaggatgtgtacaagattggtggtattggaactgtaccggttggtcgtgtggagactggtgtcatcaagcctggtatggtagtcacctttggtccaactggcctgactaccgaggtgaagtctgttgagatgcaccacgaggcacttcaggaggctcttccgggtgacaatgttggcttcaacgtgaagaatgttgctgtcaaggacctcaagcgtgggtttgtggcctccaactccaaggatgaccctgccaaggaggctgccagcttcacctcccaggtcatcatcatgaaccaccctgggcagattggcaacggctatgcccctgtgctggactgccacacctcccacatcgctgtcaagtttgctgagctcattaccaagatcgacaggcgctctggcaaggagcttgagaaggagccaaagttcctgaagaacggtgatgctggtatggtgaagatgatacccaccaagcccatggtggtggagacattctcagcgtatcctccccttggtaggtttgctgtccgtgacatgaggcagacggttgctgttggagttatcaagagtgtggagaagaaggacccaaccggcgccaaggtgaccaaggctgctgccaagaagaaatgatgcgatcctgcgcctgctttagcaatacctagttttcatcattacaagttttgtttgtggtcgttgctgttattgtgtgaactgttgagctctgttagcctgtgcacttttatctatttatttggtaccttgttgctatttcaccttctgcaatacaagaatgctgtaagagctatatgttaaccttttggcattgttaatttgattttaggaagtcgtatagtt

SEQ ID NO: 30607 - DNA, 755 bp, Zea mays
  Clone ID: UC-ZMFLB73045H01_FLI
ggacaatcataggcaataaaaattattacgacatcaggaaaccatgcatcggaagcctatgctatgatttctctaatttggagaaatttctcaacctcaaatctgtcagagagagcctaggggttggagatatagagtttgtttcatgcagcccaactgtctatgaggccatgctattagattggatgaggaaccttgaagttggaatccctgaactccttgagagcgacatcaaagtgttgatttatgctggagagtatgacctcatatgtaactggcttgggaactcaaggtgggtaaactctatggaatggtctggaaaggaagcttttgtgtcctcatccgagaagcccttcacagtcgacgggaaagaagctggcgttctaaagagccacggtcctttgagtttcttgaaggttcacgatgctggtcacatggtacctatggatcaaccgaaggctgctctggagatgctgaagaggtggacttctggaaacctttcggagccatcttcaagctcccagaggcttgattttacaatgtaacaaaacacacatgctgctcatgacatttcgagcatgtacctctggatgtttgtaggctcagaaaaggtcctggtcttaggctctgaaaacctcatctggcgaccatacgttatttaccttgtatgggcgctccgcttgctggtgagacacggtgttacgagttacgactcgatgaacatgtaataaagcttttcagagaattgctaggcc

SEQ ID NO: 30608 - DNA, 632 bp, Zea mays
  Clone ID: UC-ZMFLB73045H11_FLI
gggagacaagctccggaagctatgccaatccaatggtgttcatctttctgcattctcgcctttaggctcacctggatctccttggatcaatgggccaagtgtcctcaagaaccccattgtggtctctgttgcagacaagttgcagaaaacgcctgcccaggtcgctctacgctggggaatccaaatgggccatagtgtactcccgaaaagcgccaatgagtccaggattaaggagaacattgacatatttggctggtctattcctgaagatttgatggccaagttctctgaaatcaaacaggtcaggctgctgacagctgagtttgtagttcaccctcaggccggctacaatacattggaggacttttgggatggtgaaatataaaagcatacaaatttgttcagaataaaagagccaggcgaggaaacaaccacaaaaaaggggagatcgaatgcataggccccaatacgatgaatttgggggtttacgtgattgctgaacacaagtattgtgtgactaatctgtgttttgatgtggtaaatgtaattgggttagtcacaataagagataagtgtctttgccacaagacttttggttcattggttgaagcatgatgtaaaccgtaaaggat

SEQ ID NO: 30609 - DNA, 602 bp, Zea mays
  Clone ID: UC-ZMFLB73046A04_FLI
cttgcaaagaaggcaaatgagggggcgctctcgattgatgacatggcaggaggaacattcactatctccaatggtggtgtctatggaagcctcctcagcacacctatcatcaaccccccacagtcgtcaattctggggatgcattccattgtgcaacgccctgtggttgtgaatggtgacattctcgcaaggccaatgatgttccttgcgctgacatatgaccacaggctgatcgatggcagagaggctgtattcttcctccgtcgcatcaaggatgtcgttgaggaccccaggaggttgctgcttgacatataaagttacttaccagtgctttcccgccgactgttttgtgctttctggaaataataccatgcaaatttttgactgatgaaaaagaattgcttcctcggaaagacgaattctgagctgaggatacagtgaggtttttctctataatcgtagaagagagcagcaaactcaactcaatgtgaggtcatgtttcattttcgggtataagatgctccatttcgggatgcagttcccagtaattttatttgccatgcaagagcaatagaagctgctgcatttttgtttgttggttc

SEQ ID NO: 30610 - DNA, 1997 bp, Zea mays
  Clone ID: UC-ZMFLB73046B01_FLI
caaccgtccacggtccgccctcctccttcgttcacgtcttcctcctcgcgttcctctcgtcagtacggcgacgccgcaaggctcgcaccgctgacagtcccccttcccggatcgagcctctcttttcccagatcggattctaatttggctatcgccgccgccctacgccaggtgccgagtccttagctgatcttcgccggcgaggagcgcccaccaggagttacagattgaatgacaagaatgttctctatatcatcctcagtatgtgtgaagaaatagtctgtaactacacatacctttcattgcaattaccaagaactggaaatggacgatgataatgggcttgagcttagtttgggcctatctttgggcgggtcatcagggaaggccaaggctagagatgcacctctagaaccaaaagcagaaccccaagtggaagaaagcagtagcaaaggtggtttacaaactcctgatgctccttctgggaaattttatcaaaagagcgctgataaccatgaacaaaatagtaaacagaggcacagccctgttgcaccacaatttgggaacttctggggacaaccagggaattcctccggtccagtggtagatggttctgttgaaccggtgagtcatcagcctcagctttccagttatcaagatggaaggatgccaattaacagtggaaataattctgaggagcagaagccagtttctggtaaccacaagttgccttctgaagagatgaactttcagaagaaacatcagacagctagtgaccagcctgatgcattcagtaagagctctgacggaggtgcaaagaatgcacctatctcgattagtacggatgatggttcaactggtgaaaatgaggatgttgcagagtcagaagcagaaggctcaaattcttggttggttgcacagcgtgaagacagtgctaagggctctgttgttaacaaaggaactgataggaaaaggtccgccgatgctgctgcagatggttttaaaggaaagagacaaccaagtttctcaggaagcgagtccagctctggaaagttgacacctggaaatcttatatcgatgcaggcatcaaatgtagtggctttgccatatcaagtcccaggtcaagtttctggacctcctgtcttaactaatgcaccaaattttcacccggtatgtactgtgcagttgaggccgcccacaaatggtggactagctgtccagacaatgggtagtgcctctcaagttgctttggttacccagcagtccagctaccaacacttgaaacgggctcttcatgggcatttggtgctccacctcaggctctgtcttcttttactgcaaaagacaaagctgatcaaacaggaaccaagcaagttgacgatggcaagaagccccaggaggcaggtgcttcctcgtctgctcatgctgaagatgagaaaaaggctgatagaggactctctcttatgggttctgccataaggccaggcatcgcaccaaatgtcaaatttggagggtctggatcatatccggatcttccctgggtttctaccatcggcgccggaccaaatggcagaaccatatcaggtgtgacatacaagtttggtagaaatgaggtaaagatagtatgtgcttgccatggcactcacatgtctccggaggagttcatgcggcatgcaagtgcagatgctccggcccaagataatagtgcaaccctgccagcattccctgctggtaaccaagccacgtctgcagaaaattaggttagcggttcagagaatgcttgactaataatccttgcccctcttgtgtctatatcagccattcactgtaatactcagtgttcatctcgtgttaactttttatcatgcaagtttagattcttgtattttgagctttgtttgaggataaaatctgtgtatttttagcgctatgtaacacatggactgccaattgctgtggttggattttgatctatagacgatgtgttcattgctatt

SEQ ID NO: 30611 - DNA, 879 bp, Zea mays
  Clone ID: UC-ZMFLB73046B06_FLI
gtggagcaggtgcggcaacggaggaaggccgagaaatccctgctcagcttgcagcgaaggctggctatggcaggcgcggatgggtttcatccagcggttgcattggcggaggatagcgcagagaaggggaaggagatacaggcagctgggacaaagagaaacccgtttcttgagccagcattgccgcctggggagaaggatgtatctgaggttggtatgcctccggaaaagaagaaactatctgtcctcgaggcatttgcgccagctatgcaatctagaaccatcgtcagggatgttgatgctggggcaggattggatgaaaaccaaaggagcattgttcccaaagagagggctccggtgcaccttaagattggatttggaaagaagccgttggcagcagctctgaattcaagaaccctggacctgagagaagatccatccttcttgaaagaggaagcaaaggatgacaagaagcggagagcaggcatgatattaagggcatcaatggagaacccacaagagcttcctcagctctaaagttgtttgcggaggaagtgccgtacccagagtggagttgcatcatggtgtaattgtggaacttcagtttccagaatcttgaggccatgttccctgatacaaccttctcaggatcaccatgccctgatacaacctgcaccggactctcctgcctccacctaccgttttcctaaaacaccatgcgctgatagattctgcagcactgtaactgaagttggaagttccaccatctcactgcgttgaagttggtggttgtgctggtatttcacctttaactgtaaggactaatttgggaacccaatttttccactggattttcattttcctaaggaaaattagttc

SEQ ID NO: 30612 - DNA, 1311 bp, Zea mays
  Clone ID: UC-ZMFLB73046B08_FLI
actggaagtgcaaccccctgttttactgcaagtgcaagtgcaaaggcttcatggcgagactcactctccccagtccccaaagcccagaaccccagagccgcacgcgcgagcgcgaacaccatgctgccggcgctcattgccctgctgctgtccctgctccccgcggtcgccgacgcagcgtcaatggatccaacagagagggagacgctgttccgcgtcatggaggccgtgtcctccgaccgggactggcgcgtcgagagccccgacccctgcggcgggccgtggccggggctggagtgcaagccggccgccgacgcgggcgcggcgcgcatgcacgtcacgcggctggacttcggcgtggagcccaacccgacgtgcaaggactcggcgtccttccctcccgaggtcttcaccctgccgcacgtccagtccctcttcttcgtcgactgcttcaccaacccggccgccaccacggcgctcgccctgccgccgcccgccaacctctcggccaccggcctgcagcagctcagcatccgggccaacccggcgctgtccggcgtgatgccgccggcgctggccagcctccggtcgctccaggtgctcaccatctcccagaacggcctggtccgcggcgagatcccgccgggcatcggggacctcacgtcgctgctgcgcctcgacctcagctacaactcgctctcggggccggtgccaagccagatcggccagctcaagagccttgtcggcctggacctcagctacaactcgctctccggcgccatcccgagccgcctcggcgagctgcgccagctgcagaagctggacctcagctccaacaacctcaccgccggcatcccggacgccgtcgccaacctcacgtcgctcaccttcctggcgctcagcaacaacggcctcaccggccgttttcctccgggcatctccgggctgcggagcctccagtacctcatcatggacagcaaccccatgggcgtcccgctgccttctgagctcggcagcctcgcccgcctgcaggagctccgcctggccggctccggctactcgggcccgataccggacgcgttcggccagctggcgagcctgacgacgctctcgctgcaggacaacaacctgacgggacccatccccgcggcgctcagccggctgggcaggatgtaccacctgaacctcagcaacaacgcgctcggcggggccgtgccgttcgaccgcgcgttcctgcgccggctcggcgggaacctcgacctgagcggcaactccgggctgtgcctggacgaccggagcgccctgcggggc

SEQ ID NO: 30613 - DNA, 810 bp, Zea mays
  Clone ID: UC-ZMFLB73046B09_FLI
gtggaagagctattgaaggagtatgataatgtctgtactcttagggtcaggatgcctatatcatcagatctaagcaacccccgtaatttcatcacaaagatagctcgttacgacaaggtggtgaacattcccaacagcatgacaatcttggatgagcttctgcctatctccattgagatggcgaaacgggactgcaggggcatatggaacttcaccaaccctggcgctgtaagccacaacgagattctagagatgtacaagaaatacatcaatcctgatttcaagtggaccaacttcacactcgaagagcaggccaaggtgatagtcgcgcctagaagcaacaacgagatggacacgtcgaaactgaaggctgagttccctcagcttctgtccatcaaggattctttgatcaagtacgtctttgagcccaacaggaaggttcctgttaattgaggatttacgttgcgtggatgcagaggttatttgtgttggttattggactctaaattagctaatgttgcaccgtggtgcgtactagttgtgttcgattcttttgggacaatagcaagcatacctctttctggtcgtctattatacacgcaatctacaaacaggtagatatttagatgttcttttagtggctgatacgaaggcttggcctggtgaagtggtgagagctttcttgctgagccactaggtcatgctttcgaagcagtctctccgtgtttatggtatagtggctgatatgctgagacacggttatcgatgaacactacgaattgtcttaatatattatatatattaactacc

SEQ ID NO: 30614 - DNA, 2457 bp, Zea mays
  Clone ID: UC-ZMFLB73046D03_FLI
tctccaaaaaaacagcccacagttgaagcgaaaacacgaaagctcagtgatatttctctccaggtctgcacactcgtctcctatcgagactgtcggcggccatcgtcgcccacgctgtgctcatgctaagtgtcgaggctcacacgtactactactacccgaccgcgaggccgagacggaagctatgcgcctgcagaaacgtcttgcaagaaaccgccccgcgtgacgcggaggcagatccctgccgccacggcgagaggaagagcaggagaaggggcgacggtgcttattacatcgacaaggacggcggcggcgtagccaggaccttcgaccggaagaaaatatccagaaagaggggtacggtaaatgattatgacagtgtgccagtgtgccacaccactccttaattttagttcccacacaatgctgcagatcaatgccagttcttagatcttcttctttttttttaaaaaaaagcaagaacacaaaggttgttccttttccggattcactcactgttccatgcattggaagttcaaggacaacatggcgtaggtaggttctagctctgaatggcatggcatggcttgggcttgggcgtgcagggggtgctatcaaagggcgtggatggaagtacggctccgggttcgtcgacggagtgttcccagtgctgagtccgatggcgcaggatgtgctagaactcgtgcagacgagggggaccgacgccgccagcgtctgggagtcactggacaagatccctcaagcacacgatctttgggacgacatcgtcaacgtcgccgtccagctccgcctgaaccggcaatgggagccgatcatcacagtctgcgagtgggtcctgcgccggagctcgttccgccccgacatcatctgctacaacctgctcatcgacgcgtacggccagaagcgtcagctgagcgaggcggaggcggcctacatggcgcttctggaggctcgctgcgtgcctacggaggacacctacgctctgctgctgcgcgcgtactgcggctccgggcagctgcaccgagccgagggcgtgatttcggagatgcagaggaacgggatccctcccactgcgactgtgtacaacgcgtacctggacggtctgctgaaagcgaggtgttcggagaaggcggttgaagtgtaccagaggatgaagaaggagcgctgcagaactaacaccgagacctacaccctgatgatcaacgtgtatgggaaagcaaatcagccgatgtcgtcgttgagagtgttcagggagatgaaatcggtcgggtgcaagcccaacatctgcacctacacggcgctggtgaacgcgttcgcgcgggaaggcctgtgcgagaaggcagaggaggtgttcgaggagatgcagcaggctgggcacgaacctgacgtgtacgcctacaatgctctgatggaagcttacagccgcgcagggctgccgcaaggggcgtcggagatcttctctttgatggaacacatggggtgcgagcctgatagagcctcttacaacatactggtggatgctttcggacgagctggtcttcaccaagaggcggaagcagcgttccaagagctgaagcagcagggcatgcggccgacgatgaagtcgcacatgctgctcctgtcggcgcacgccaggtccggcaacgtggcgaggtgcgaggaggtgatggcgcagctgcacaagtccgggctgcgcccggacaccttcgcgctcaacgccatgctcaacgcgtacggccgggccgggcggctggacgacatggagcggctcttcgcggccatggagcgcggcgacggcgcgatcgccggcgccccggacaccagcacgtacaacgtgatggtgaacgcgtacgggcgcgcggggtacctggaccggatggaggcggcgttccgctccctggcggcgcggggcctcgccgccgacgtggtgacgtggacgtcccgcatcggcgcgtacgccaggaagaaggagtacgggcagtgcctgcgggtcttcgaggagatggtggacgccgggtgctacccggacgccggcaccgccaaggtgctgctcgccgcgtgctccgacgagcgccaggtggagcaggtcaaggccattgtcaggtccatgcacaaggacgccaagacgctcttcgcattgtgaaatccgcgcaggctaaattccgatcctgctgcgtgatcacatacgaaccttgacgagagtcacctagcttgcatactggttaacaagtcacaaggccccgtttggttacatatagaataatctactttttagtcccgtttagtacttaattgtatttagtctctagcccttcactgtaagggcctcacatcacatgggtgctaaaggggacgaaaggacatcatttactctaattaccattgcatagagaatatgcaccgtatacatgcaataaaaagagaggcatttcagtc

SEQ ID NO: 30615 - DNA, 1701 bp, Zea mays
  Clone ID: UC-ZMFLB73046D09_FLI
ctcccccctccctgcctccttccccggcgccccgctcttcctccttccgctccggcgatgggcactggccgccgcggcggcggcggcggcggcgtgttccaccgcctcctcgccctctcgtcgctgctgctcctcgcttccggcgaggtcgtcttcgaggagcgcttcgaagatggttgggagactcggtgggtggaatccgactggaaaaggagtgaagggaaagcaggaaggttcaagcacacagcggggagatactctgcagatcctgatgacaaaggaatacaaacaacaatagatgccagacattttgctatctcagccaagttcccggaattcagtaacaagaaccggacgcttgtggtccagtactccattaagtttgagcaggatattgaatgtggcggtggctatattaagcttatgtccggttatgtcaaccagaaaaaatttagtggggacactccgtacagcttgatgtttggaccagatatatgtggtactcaaacaaagaagctccatcttatactctcttaccaggggcagaactatcccatcaaaaaagatctagaatgtgagacggacaagttaacacacgtgtatactttcattcttaggcctgatgcatcttatagcctgcttgttgataaccgtgaaagagaatctgggagcatgtacactgattgggatattctccctcctcgtaaaattaaggatgttcacgccaaaaggcctaaggattgggatgacagagaatatattgaagatcctgatgaagttaagccagagggctatgattctatcccaaaacagattcctgatccgaaggacaaaaagcctgacacatgggatgaagatgaggatggaatatggaagcccagaatggtatcaaatccagcatacaagggaccttggaaacgcaagagaattaaaaatcctaactacaagggtaaatggaagaccccatggatcgataatccagagtttgaggatgatccagatctttatgtgctgaagcctttgaagtatattggaattgaagtttggcaggtaaaagctggttcagttttcgacaacattctgatttgtgatgaccctgagtatgcaagaaaggttgttgaggaaacttggggtgcaaatagggaggctgaaaaggaagcttttgaagaagctgaaaaggagaggaaagctagggaggatagggaaggtcaaaaggcaaaggacgatggtggccggcatcgaatacacaggcgtcataaaaaacactacagagatcactgggacgactaccatgatgagctataaaagtccccaaatattgcattcctcaaaagcataagctggaagttgcttcggacattgtgggtgcttttcaataataataattgattcgcctggtcagaacaacctgaagtgtttcttgctatgcgccaacaaattattgaactacaggatttgatatgtaatggacaaccgaagatctgcagggcattccagcgaaaacttggctctggtactgaaatagaggggacgagagactgtagtttgtgtctgtacaacggtgccggccatgtgctagctttgtaatctcaaaacattgtctttgcatgaataatgtaagttacccaaaaattactgcataccaagttacaaagtgttgtagctgacatatgaggaacactttaattttaatcttcatat

SEQ ID NO: 30616 - DNA, 2992 bp, Zea mays
  Clone ID: UC-ZMFLB73046D10_FLI
ttgcagtataatgacagcagtgtctctacaaaggagctcacaaaatcgtttgggtgggatatgcatgattcatttatgcaacatgatgtacaagaattgaacagagttctttccgagaagttggaagataagatgaaggtttgacatctggaactgttgtggagggaacgatacaacaattgtttgaagggcaccacatgaactacattgagtgtatcaatgtggatttcaaatcaacaagaaaggaatccttctatgatctccagcttgatgtcaaaggttgtcaggatgtctatgcttcatttgataagtacgtagaagtggagcgtctggaaggtgacaacaagtatcatgccgacaaacatggcctgcaggatgcaaaaaaaggagttctttttatcgacttccctcctgttttgcaacttcagctaaaacgttttgagtatgatttcatgcgtgacacgatggtgaagataaacgatcgttatgaatttccactccaattggatcttgatagagataatggaaaatatttatctcctgatgctgacaggaatgtgcgtaatctttatacccttcacagtgttcttgtccatagtggtggtgttcatggtggacattactatgctttcatacgacctacactttctgatcaatggttcaagtttgatgatgagcgtgtgacaaaagaagatgcaaagagggcactagaagagcaatatggtggtgaggaggagctacctcagacaaatcctggcttaaacaacaccccattcaagtttactaaatattcaaatgcatacatgcttgtgtacattcgtgaaagtgacaaggacaaaattatatgtaatgtggatgagaaagatatagcggagcatcttcggattagattagaaaatgaccgtgaagagaaggaacgtcggaagaaggaaaaagcggaggcacacctctatactataatcaaggttgcaagggatgatgacttaaaagctcagatagggaaagacatatattttgatcttgttgatcatgataaagtcccaagcttccgtatccagaaacagatgacctttgctcaattcaaggaggaggtagcaaaagagtttggtattcctacacagtttcaacgattttggctgtgggccaagcgacaaaaccatacctaccgacctaacaggccattgtgtcctcaagacgaagcacatactgttgggcagctaaaggaactggtgaacaaggcccacaacgcagaactgaaactgttcttggaagttgaacttggactggaccttaaacctcttcctcttcccgacaagactagagaagatatatttcttttcttcaaactctatgaacctgaaaaggaacagctgcggtatgttggtaggctttttgtaaaggcttcaggaagaccacaggacattctgctgaagttaaggatgttggcaggtttttcacaggatgatgatattgaactttatgaggaaattaagttcgagcccaatgtgatgtgtgaatacattgacaacaggcttctgtttcgatcttgccagcttgaagacggggatataatttgttttcaaaagccttcaaaaccagatagtgcagaccgatatcgatttcctgacgtcccatcctttttgacgtatatacgtaaccggcaggtggtgcacttccgttcattggagaagcccaaggacgacgaattttgccttgagatgtcaaagattttcacatatgatcaagtcgtggaaaaagtagctgaaaaacttggcgtggatgacccatcgaaaattcgtcttacatcacataattgttattcgcaacagcctaagcctcaaccaataaagtacagaggcgttgaacgtctactggatatgctgattcattataaccagacttctgatattctgtactatgaagtattggacataccacttccagaattacaagcgctgaagacattaaaagttacctaccatcatgccacaaaagatgaggtgtcagttcacagtataagattaccaaaaaacagcactgttggcgatgtgctgaatgatatcaaaacgaaggttgagttgtctcataccaatgctgagctaagattacttgaggtcttttatcacaagatatacaaggtatttgcaccaaatgaaaagattgaaaacatcaatgatcagtactggacactgcgtgcagaggaggttccagaggaggagaaaaatcttggccccttcgatcgtttgattcatgtatatcattttacaaaagacactcaaaaccaaacgcaagttcagaactttggagaacctttttttatggttattcgtgaggatgagaccctatcttctatcaaagaacgtatacagaaaaagcttaaggttccagatgaggatttctcaaagtggaagtttgcatacatttcactcggtcgtcctgactattttgaagattcagatactgtagccctaaaattccagagaaacatgtatggagcttgggagcagtatcttggactggaacatccggacacggctcctaggaaggcacacacggctaatcagaaccggcattcattcgagagacctgtaaaaatttataactaggcatgttagaaattgagcgatgagctgccgctcaataccaagccaggctgaagttgctggcttgaaatagagagcatgttgctcaggtttttcgatggagctgtggaactagttcagaggagactgatcgggcgacttgtcatctttcctgtttgttttgctgccccggatatataaagttgtacagagatgaccccaccagacaattgtctttagtagataagataactttttacagtcgagtggccgatgttttagtcgatcactctgttctgcagttggtggtggtgctaggtggccttgagctgttgagggtacttgtctttcgactctttctgtatattattgacgcggcggatgtttgtaattccaatgatacatttctt

SEQ ID NO: 30617 - DNA, 660 bp, Zea mays
  Clone ID: UC-ZMFLB73046F07_FLI
aacaaattgcccccttgggctatgatagaagaggtgaacctgagcgagctctggaagtattccctcgtaccagttcgtatgggtatagttccatgcaggtcacggatgatggctatggaggacttccatcctatgcatcaaaggcatatgaagaacatgtaccacgtttggaaatgactgtacctgctagtggcatctcaaaagtaatgggaaaacatggcacaaacttggacaacattagaaagatttctggagctcacattgaaattattgaaccaaaatcctctcgtcatgagcatattgcttacatatctggaacctctgaacagaggcattcggctgagaatttgatcaaagctttcataatgtctacctaagattccttctgtggtctgagaacaccatttcatcaatttgatctcttttgacttctgctatccatagtttccctgggtttgtgaacatcaaacgtagtgttttctcccacctgtccgagttcccaatgaatactgggcatatctgagcaaggtgtactccagtggtagacaaggcactctatgttccttagatcttcaactgttacctatttatgttggcatacttatcataattcgcgtgtcttactctaaattatctcaatgactggaccagttgctgctt

SEQ ID NO: 30618 - DNA, 3682 bp, Zea mays
  Clone ID: UC-ZMFLB73046G04_FLI
acgtacgcgtgggcgtacgcgtgggtttttatcgaaactagttctgacggacggtgattagtccgaactccggaaaaattttcagggaaatagaaagaaggattttggaccagtttcatttttttgaactaaagctcaacgtccaagactttaaagagaagtaatgatcttgttcaaaaatgaacagagaatgtattgccctttttttgggggagttagatgcatgagctgatcttctgggtccaggtgggctaaattctccctttcttcttcctgcattcctcaaaggcgacgtgaagttgtgagatctgggtctccttatgaattgagctggctaaccgtactttaccatttggttaagtccatcattgccaggtgagctgagctacgtactgccggcatgcacgcagccattgtgcaccgaccagtaacagtaaccatatgggctatggcatgcagcacacattcacccctctagctagcattaacatgggggacagaagcacagacgaactttagcccagagttggttggttgccactccgcttcaggggaaaaaaaaaattaagagtcagttgagacagataatcgcttctggcaaaagtactggcggcacaaacagtactgtacatggattagctgctaatcatgcagattcaggcacaggcatcgaggcagggaggcccccacctgccggcaaatctacatgggggtccgtgtgggaacgtgacgtaaaccgtcaaagggaaaaaggtgcggggaatcgagtaccaaccttgggcccctcaccctttccaacgggggagctgactaggcattgctctggtggcccacaaagcagccaatggccttccgatcctacagtcctgctgcggctacaccagctcgctttggctgccaaagacaagaagagaagattgggatatttctattctattcaccgatataaagctactgacgcaggacacagcaaaagcaaaagccaaagtttgagagagagagagagaggggtaatatagcttcatgtgaaagatgacaagaatcccagcataaaataatctcccaaactttgctataaagccacaacccctccccctcctcctttccctccctctctctccttcctcatgcgcgcgcctgccattagcccaggtctccttctccctcttgcctgtctactgcacctcctctttgttacattacatacgacgatctcggttaaatttctgcagcttacgtctctcttctatattttttttgtgtttcaggctgtgtacattatttgtagctgaccattcattcatatagagctagttgagcaggcctggttggctgtccataatttttgcttcggatagcattgctgccaggcgactgcaaagctccaagcagacttttgctgtgaggatttttttgcgaggaagggcagagggagcaatggcgccagtcagtttgcctcctggtttcaggttccaccccactgacgaggaactcatcatctgctaccttaagaggaagatcaacgggagacagatagagctcgaaatcattccagaggttgatctttacaagtgtgagccctgggatctgccagaaaaatcatttcttccgagcaaagaccttgaatggtacttcttcagccctcgggaccgcaagtacccaaatggatcgaggacaaaccgcgcaacaaaatctgggtactggaaggcaactgggaaggacagaaaagtgaactcgcataggcgtgcagttggtatgaagaagaccctggtgtactatcggggccgagctccacatggttctcgcactgattgggtcatgcatgagtaccgcctcgacgagagggaatgcgagactgacactggcttacaggacgcatatgctttgtgccgagtgtttaagaagacagcgcctgggccaaaaatcatagagcattatggcgcagtgcaccaccccatcgagcaaactcagtggatgggaagcagcgttgagcgctccccaacgctggacttgtccagtgatgttagaggtgatgacttcgacagcagcagtttctcgttcccgacagaggcgccaatggactcctccatgcatggtgggttgttcgggatgcagatgagtgcacctcacgaggatgccaaatggatgcagtttctgagcgaagacgcctttaacgcaaccaatcctttcttcacgaatccagcttcttccagcttctcatgcctcccatccaaggtggatgttgcactggaatgtgcaaggcttcagcacaggctctcattacctcccctggaagtggaagacttcccacacgacgtcagcctcgacacaaaggcgagcgtgctccgcagcagcaaccccaacaacgaggttgacatccttcaagagttcctctccgtggcgtcggcctcccaggagctaatcaacggaaccagcagcagctacgctgcagaaatgtgggcaggcgctggcacgagcagcaccagcgacacccactacgtcaacgaactatcttccctctttgagtttggggtgaaggctaaagaggaggccgacaatttctaccacatggactgcattggcacatcttcaggcttctcaccgaagccggtccgtgtcgatgaaccggttaggttggttgagatcgctgacatggaggagttcaaggaagagaagaggcgagtagagaaccttagaggagtgaggctgcacaacaatgacgacctaggagagattccaacagactgctgcatcacacaataccccatatcggacactgctgacatttcaggagaagccggtcacctgaccaatcccactagcgccggcggcctagacactgcacccatcttctcgcaatctcaacctgacgacttcgctattgggttcagtgacgacgccgaccccaatgcatctttcgacctatgcgagagggttgacgtcaagcatgggctcttcgtctcaacggtgggtgcgcccaagacgttcttccaccacgttgagccatcgaagaaggtcagcttccacctgaataataatcccgtagcaagcgacgacgacgtcagcaaggcgacgaccgggaagtcccgttcacccattattagtgtgatgacaaccaaagatagtggcagcagcttttctgtttttagcaagttgaaggcgctcatcagggacaaattcctggtgaagaagctgccttcatcgtgccagaggtccttgttaggcagcaaagaaacagcggcagtgagcgagctgctgcagatggtggtgtcgtcgctcctcttaacaccaacggaggtgacaggccccactaccgagcaagaaaagttggccaggaaggcgatgaagccgggaccccgtcgttgtgatggaagccatgcgtggcttcttccactccccaaaaggagcaaaggcatttccagcatgttttttagtgggaaatgggcatttctgacatccgcattggccatccgcgctccaggtccagggtgcaatcactgaaagaaaggtcttccttctggtcatagctcgtgtaaaaattaaagtacggctctttataatgctactgcttaggaaactcgtatcgggtgccagtgcacgggacgcatagtctttcgtgcatcagacagttaacagcgggtgtataacgggagaaatgtcataattcgtatttatttttttt

SEQ ID NO: 30619 - DNA, 1044 bp, Zea mays
  Clone ID: UC-ZMFLB73046G08_FLI
gcaagtatagagcagcagagggctgatgcagatgttctgaagctattggctgaccaggagagggaaaaggaagatgtacttgctagaatgcttcaactagaaaaagagctgcatgagaagcagcagcttgagctcgaagtagaacggttgaatggtacactccaagtgatgaaacatttagagggagatgatgacgggggagatatccatgagaagatggagaagctgagcgaaagatttgagcgtgaaaagaagcgtctggaggaattgagtggggatctcgtgaggaaggagcgtgaaagtaatgatgagctacaagaagcccgaaaagaactgataaagggtttggaggaagagctaaatggacggacagctatcggggtcaaaagaatgggggaactcgatgaaaagcctttccaaaatgcatgtaaaacaaaatacggaaaggatgagtacgagatcaaagcagcagagctagtcacaagttggcaggatgaactaaagaagccatcctggcatccttttaagatggttgaggttaacggagaaaataaggaaattctggatgacgatgacacaaaactgaagttcctgtggatcgagtacggcgatgatgtgtgcaatgcggtgaagaccgcactgatggagattaacgagtataaccctagcgggaggtatgttgtgccggagctctggaactttaggaaaggccggaaggcgacggtgaaggaggtgctcaagtacctgttcagtcagatggacacgacgacgaagcgcaggaggggctgaggaggtgcctgatgccgagtagtgccttctatgttgttgcatcagtcgtgtgctgctcgatccccaagtggcagtctggcataggagatgcccctcttgtgtagtgaaatctggcacgataaagtgcccgcgatccaggcttgggtatgccttatgcatcatgttcatatgcttgtgcatgtggtgctgttgccgcaggcgccctagcctaacctgtatgattgttgagatgagtagtctttcttgctgctgttt

SEQ ID NO: 30620 - DNA, 2130 bp, Zea mays
  Clone ID: UC-ZMFLB73046H12_FLI
tcgaacacctcccccgatcgcgcgactccggccatggcggaacactccgacgcggctgcggccgtaactgcgcggctactggagctcgcggccgacaacgactccacggcgctcggggacctcctcgcggtacacccgtcgcttgccgacgagcccgcgccgtggtactccccggcgcgcggcgcggagcctatgaccccgctcatggtcgcggcggcgtacgggtccgtggcctgcatcgatgtcctactgtcgccgctccacctggccgatcccaaccgcgcctcaccgtcgtccctctccaccgcgctccacctcgcagccgccggcggcgcctccgctgcgccggctgcggtatcccgtctcctagctgctggcgccgaccccacgctgctcgaccatctccatcgccggccgtccgacctcgtcgccctcccacccaactcgctcccgctcaagaaccacctcctctccctcctcggagggcgcaaggagtggccgccggatccctccctccccgacatcaagaacggtgcctacgcctccgacgacttccgtatgtactccttcaaggtgcgcgcgtgctcgcgcgcctactcccacgactggacggagtgccccttcgtccaccccggcgagaacgcgcggcggcgggacccgcgcaagtaccactacagctgcgtgccctgcccggagttcaagaagggggctggatgccggaggggtgacatgtgcgagtacgcgcacggcgtgttcgagagctggctccacccggcgcagtacaggacgcggctgtgcaaggacggcctcgcctgcgcgcggcgcgtctgcttcttcgcgcacacgcctgaggagctccgtccactgtacgtgtcgtctgcggggtcgcgcagcgcgatgggaatggggctgccgtcgccgggtgcgtcgttcacgccgccgctctcgccttctggcgggggaagcggtgtggccggcgcgtggccgcagcccaacgtgcccgcgctgtgcctccccgggagcgcggggaaccttcagctgagccggctgcgcactttgatgagcgcgcgcagcatggcagtggacgagctgctcgcctcggcggattacgacgggctcgtcgggtcgccagcctctctgcggtcggcgaggggaaagacgctcgtgccgtccaatcttgacgatctgttctcggcggagatggcgggcgccgcggcatctcactcgcctcggtacgcagaccagggcggctctgctttctcgccgacgcgtaaggccgccatgctgaaccagttccagcagcagcagagcttgctgtctcctcgggccacggttgtccctgagccggtgtctccgatgagctccaggttgctctcggcccttgcgcaacgggagaagatgcagcagcaaacgctgagaagtatgagctctcgtgacctgggctccggcgcctccgtcctggttggctcaccggttacctctagctggtccaaatggggaatccccccgagcacaccagattggggtgctgacgccgaggagcttggccgcctcaagcgatcctcgtcctttgagctccggagtggtgccaacggtgatgagccggacctctcatgggtcaatacccttgtgaaggagccaacgccggagaagccatccatcaacgggacagccgcaaaggagtctattgcttctttgagccaggctgtaagtcatgaggatatcggcggtgaggacgacactgccggggtcatcggtggctggcttgaacagctccagctcgatgagatggtagtctagaacaaacacaaacataaatcaaacaagaaaggtgccattttttcccctgtgatccaccatttgcttcaacaacttgctacatctaccaaccttcataccttgctggtaattactggtggatacattcttttggagttggttagtgtaggtgttgagatttctatcaccatttagggtccaccacaagtgagaaattaaggaatggaaacctagccaattttatggaatttccacatcccatgcttcatgtaaaggagtagtagggtgacttgtcgttgcttcaaacgcttctaaggcctgcaatggtattgtactacgcaggattgtgtc

SEQ ID NO: 30621 - DNA, 1186 bp, Zea mays
  Clone ID: UC-ZMFLB73047B08_FLI
gaaattttccgaattcacatcactcaatcaagaccagatatttatggacctgcatttgtggaagttgaaaacatgtttgggttatcaaattttgttcctatcctttttggaagcaaacagttgtgttctgaactagagaggatacatgatgctctttgtggttcttacagtgaaaataatgtacttggtgagttactcagtgcttcttctgatcctcatgagcaccggaaactttgtagttctgtgatgtctggattcctgatcgacattggatggcttatcagaaagcctactcctgacgaatttaaaagtgtgctgagttcaacaaatatacagagatggatatgcatgttgaagtttttgatacagaatgatttcatcaatgttctggagataatcgtgaagtcaatggacagcatcatgggttcagaggttctttcaaacttggaaagggggaggttggaagatcatgtaacagcatttcttggatatgtaagccatgctcggaatattgctgatcgtagagctaaccatgacgagaaaacacagattgaaacaagaggcattattgttacttctccaaatcagccaaacttaggcgcctcagtgccatttgctagtgaaaacactgactttggaggggataacaaattgaactcaactgatgaggaagaaattatgccacttgtgactagagatgtctcacaccggcactgctgccagcctgatacgactgttaggtggcttaagccctcactgattgttacttatcctggtggtgccacgagaatgcgacttgttacgactgtggcggttgcggctgttttgtgtttcacagcttgtcttgttcttttccatccgcatggggtaggggtgcttgcagctccagtgaagaggtacttgtcgagtgactccgcatcgtagttgatgttatagatcagatattctattttgccgtgccgctctgctctgtctgtatcatttgcgctttgttaaggcatagcttgtgtatctgatttttttgtaagggaaccaacacgcaggtgcttttcatctgtgcaaaactggcatcttttgtttttttcagactgtaagtataggcgccggaagctctgacctgctaatgtttgggcatgtaaacttctaatgtagtgcatcagttaatggaaaatagctgcattgctgc

SEQ ID NO: 30622 - DNA, 990 bp, Zea mays
  Clone ID: UC-ZMFLB73047B12_FLI
ggccggagatcctgaagccggacatgatcgcgccgggggtgaacatcctggcgtcgtggacgggcaaggccgggccgacgggcctcgccgccgacacccgccgcgtgggcttcaacatcatctccggcacgtccatgtcgtgcccgcacgtgagcgggctggcggcgctgctccggagcgcgcacccggagtggagccccgccgccgtgcgctcggcgctcatgaccacggcctacgccagctactccggcgggtcgtcgctgctggacgcggcgacgggcgggatggccacgccgttcgactacggcgcggggcacgtggaccccgcgcgggcgctggacccggggctcgtctacgatctgggcacccgcgactacgtggacttcctgtgcgcgctcaagtacagctccaccatgatcgccgccgtggcgcggagccgggagtacgcgtgcgccgagaacaagacctactccgtgggcgccctcaactacccgtccttctcggtggcctactcgacggccaacggcgacggcggcggggactcggccaccgtgacacacacgcggacgctgaccaacgtgggcggggcgggcacgtacaaggcgtccacgtcgctcgccgctgccaagggcgtggccgtggacgtggagccggcggagctggagttcacgtcggtgggggagaagaagagctacacggtgaggttcacgtccaagtcgcagccgtcgggcaccgccggtttcgggcggctcgtgtggtcggacgggaagcacagcgtggccagcccgatagcgttcacgtggacctgaacctgatggacggatggattataccatacgacagtggtttttggcgcctcagcctcaaagaaaggcccataatccatcatccatgtgacggcctcgttccctacactacgcagtcaaaaggaccgaagtgtagggtgggaaggtttggagggggtacggtgcaaattggaggtttcttctg

SEQ ID NO: 30623 - DNA, 1217 bp, Zea mays
  Clone ID: UC-ZMFLB73047C08_FLI
acaaaaaccccaatgcgagcgcccctggcttgtcggcgtcgcctccttcagccaaaaccctagcttgcatacgcgcccgaacaaagcttcgtctgcgaggggcgtcctcctgccgccagaagctttcaggagcatcagcgatggtgtggttccaatgcgaggactgtggcgagaacctcaagaagcccaaacttgccggccacttccgctcctgctccgcgtacaagctgtcatgcatcgattgcggcgagttattcagccacgacaccgtgcaggggcacacccagtgcatctccgaggccgagaagtacggtcctaagggacagaccaaaccatccaatggtgcacagggtaaggcagataagccaaagccaaatgcagatgtcgatatcaatgttgggctgtcgacacggcctccttggttctgtagcctatgcaagaccactaccacaagtaagcaaactctcttactacatgctgatgggaagaagcatagggcaaaggcgaaagccttccatgtgtctcagaaacaaaaagatggtgcagaacaaactccagatgtgaaggaagctggagttgtacccacaaaagaatctgctcaagtaaatggtggcgtgagtggtgatcatgaaagaaatgaagataaagatgctgggaaaaggaaacgaatggatgacatgaccatagagccaggtaacacaaaaagacagttgacacagtctggagatgagaagtcagaaaacaaagcgaagagtaaggccgatgaactagcaagtggtaccgactgcaaaagtgttcaaaagcaaaagatcaaatggaagaagattattactaaaacattgaaggcgaacgcagatggagttatgaagctaaagaagctacaaaagctagtctccaaggagcttcaggaatgtggtgtctccaaagacaaggaggagctccgtgctaccttgatggataaaatagcttcaagttccagattttatgttgatggcaagaatgttagactggtggccaagaatgaagaagaatcttagaaagaggttgtcagtcatttttttggcattgttgctggtttcattctttggtgtcaactttcagatggcttatagccaagtgttggttaaattgagtccatgaaccatcaattatatccatgacgtgtagacggtatgggaatttagcatctgaattttctcgacaaccgttcaaaagtg

SEQ ID NO: 30624 - DNA, 1543 bp, Zea mays
  Clone ID: UC-ZMFLB73047C10_FLI
aaagctgctgcggaaccggtgggagatgtagctgcgctatcgtcaaggctggctaggaggctactacatggatcatggtgccctcctcggtgccaggggatatgcttggatcagagtagggaacattcatgctatggacacaaactcaggtggacgtggtgttcgacaattcaaaacatacctattacatatattggaaaaggaaaccccaggcgtttcaaagttagagtttcacagcttgcagcgaatttgggttctttttaatttgttgctttagtattgaattaacgtatgatcattgtggtttatggttcgcattggaatttatgtgttgttcgtgcttgatgaattttctccaaaagaacaagggagacaataagaggcgatgttgaagctgccgatcccgggaataaagctgctgcggaaccggtgggagatgtagctgctgcggaacacgaaagttttaatcaaggaaatggtccaagggtgcatcactggaataagctcgagaccacaagtgtcatatctcctctaatctttactctctcaggttccagttgaatatgttcattgctacaatgaagccgttttgttgtttgctgtccgccgccgtattcggggtcttcgcctgcctctatgggctcagggcggacaggggcctacaagatctcctcgggccaaggaatcgttcccctccggcgacctccctcctccctttcgtctcaggccttccactgtatctccatcaaagcgaaggatcagaggctactccgttaggaggagaggaaaggaattgtgagccttgtgttggagaagtcgaagactgagagtatatggtggctccattggtgtccatgttaatggctggcgtgttctagagcaactcggggttgtcgtagagcttagggagacttgccaaccttagggagacttgccaaccttgtcatcgcgtaccatgccaacagaatgcttagcttttacgcaccagcgcgtgacgccatgtgggagcaaagttgggaaaatggatattggcggtggtcgagaggtcactcttattggaagtctagaaatgccaaaggatgacatatggcttgtcacagctatcctatctggtctgattgaataatgtgcgaagatataagtcattggctatcaatttttgtgaatcagatatttcttggcctcctatcttcgcctcaggcagctgggagtggttttatactcgctgatgacatcaagtcttaggtgcttccattgatcaataactcagggaaatatggagggatcatgatgtggttcaagtactatgatgatcaagatggctacaattcttgagtgaagagtgatgtttagtttgttgcctgtggtgtgtcacaatatctgtgtgttacttgtgtgtatgtgagaaattatgtgactctggagtctggatagtgcaataagtattactcaagtatatgattgaatcttctgtcatactattcaaattatgtcatattgtatcttttaaggtatgtaaacatccacttttagcgatgctaac

SEQ ID NO: 30625 - DNA, 537 bp, Zea mays
  Clone ID: UC-ZMFLB73047D03_FLI
gcgcgaggccagggagtgcatctacgtcgagcccgaggaccgcaagggcgtcttctggtacaacaagaagttctagccgccgccgctcgcagagctgagaggacgctaccataggaatgggagcaggaaccaggaggaggagacggtactcgccccaaagtctccgtcaacctatctaatcgttagtcgtcagtcttttagacgggaagagagatcatttgggcacagagacgaaggcttactgcagtgccatcgctagagctgccatcaagtacaagtaggcaaattcgtcaacttagtgtgtcccatgttgtttttcttagtcgtccgctgctgtaggctttccggcggcggtcgtttgtgtggttggcatccgtggccatgcctgtgcgtgcgtggccgcgcttgtcgtgtgcgtctgtcgtcgcgttggcgtcgtctcttcgtgctccccgtgtgttgttgtaaaacaagaagatgttttctggtgtctttggcggaataacagatcgtccgaacgacaacctttttttgggt

SEQ ID NO: 30626 - DNA, 2460 bp, Zea mays; identical to SEQ ID NO: 30537
  Clone ID: UC-ZMFLB73047D11_FLI

SEQ ID NO: 30627 - DNA, 2568 bp, Zea mays
  Clone ID: UC-ZMFLB73047F11_FLI
gacttcccacatcccctgcggccccgccccccgactcttctcgtcgcggcgcgcccaatcggctcggtggcaggctagtgcaccggctcggctcgggtccggttctaccgccaacgcgggccgcggcgctcccggatctcggtctagtcagagagttagcagacaaagatggcgacttatgagcccaagaacattctcataactggtgctgctggtttcattgcatcgcatgtcgccaaccgtctggtcaggaactatccccaatacaagatcgttgtccttgacaagattgactactgctccaacctaaagaacctcaatccttcacggtcttcaccaaatttcaaatttgtcaagggtgatattgcaagtgctgacctggtgaattaccttctgatcaccgagtcaattgacaccatcatgcactttgctgctcagacgcatgttgataattcttttggcaattcatttgagttcacaaaaaacaatatatatggcacccatgttcttcttgaggcttgcaaggttactggtcagatcaggaggtttattcatgtcagtaccgacgaggtatatggtgaaactgatgaagatgctgtggttggtaaccatgaggcctcacagctgcttccaacaaatccatattcagctacaaaggctggggctgaaatgcttgtgatggcatacggaaggtcttatggtcttcctgtgattaccactcgtggcaacaatgtgtatgggccaaatcaatttcctgagaaactcattcccaaattcattcttttggccatgcaaggtctgcctcttccaattcatggagatggctccaacgtcaggagctacctgtactgtgaggatgtggccgaagcttttgaggtggtccttcacaaaggagaagttggacatgtgtataatattggtactgtgaaggagaggagggtgattgatgtggccaaggacatatgcaagctctttggcttggatactgagaaagtcatcaggtttgttgaaaacaggccattcaatgaccagaggtacttcttagatgatcagaagctaaagagattgggatgggcagagcgcacaccatgggaagagggtttgaagaagacgatggagtggtacaccaccaatcctgattactggggagatgtcactggtgcgctgcttcctcatccaaggatgttgatgactcctggagttgaaaggcataactgggctgaagaaatcaagtctctggcttcttcgccagctgaagctagtacaatagctccagcaaccagtaccaaaagcatctctgatgcccctcagaagccttcctacaggtttttaatctatggtaggactggatggattggtggcctccttggaaagatttgtgaaaagcaagggataccatatgagtatgggaaaggacgcttggaggagcgctctcagctgttggaggacattagaaatgtgaagccaactcatgttttcaatgctgccggagtcactgggagaccaaatgttgactggtgcgagacccataaacaggacactatccgcaccaatgttgtaggcactttgaatctagctgatgtctgtcgcaagcagggtctgctcatgattaattatgctacaggctgtatatttgagtatgatgctaagcaccctgaagggtctggtattggctttaaagaggaagacacgcccaactttattggttccttttattccaaaacaaaagcaatggtggaagagctattgaaggagtatgataatgtctgtactcttagggtcaggatgcctatatcatcagatctaagcaacccccgtaatttcatcacaaagatagctcgttacgacaaggtggtgaacattcccaacagcatgacaatcttggatgagcttctgcctatctccattgagatggcgaaacgggactgcaggggcatatggaacttcaccaaccctggcgctgtaagccacaacgagattctagagatgtacaagaaatacatcaatcctgatttcaagtggaccaacttcacactcgaagagcaggccaaggtgatagtcgcgcctagaagcaacaacgagatggacacgtcgaaactgaaggctgagttccctcagcttctgtccatcaaggattctttgatcaagtacgtctttgagcccaacaggaaggttcctgttaattgaggatttacgttgcgtggatgcagaggttatttgtgttggttattggactctaaattagctaatgttgcaccgtggtgcgtactagttgtgttcgattcttttgggacaatagcaagcatacctctttctggtcgtctattatacacgcaatctacaaacaggtagatatttagatgttcttttagtggctgatacgaaggcttggcctggtgaagtggtgagagctttcttgctgagccactaggtcatgctttcgaagcagtctctccgtgtttatggtatagtggctgatatgctgagacacggttatcgatgaacactacgaattgtcttaatatattatatatattaactaccaagagcagttgtacatggtcttgt

SEQ ID NO: 30628 - DNA, 1219 bp, Zea mays
  Clone ID: UC-ZMFLB73048B05_FLI
cacgaaaagagaggagccgggaagcaaagcgccgacgactacgccgcaagtcccaacccaacccaccctatccagaatccagggactggactgggaacgcaaggttctgggaaggcgtatgtaggcgttgccgtcttggtgcctcatcccggagctgctacttctcccctggtcgttggtcgattggagccggtagcgcgggggggatatgcacgggaatttcgggccccaggagcagattctgtggccggcgtcggttctcgccggcatcgtcatgtgcggcgccgtatatcagatgactcgacatgtcagttctcgatgtttcaaatgctacagtatgttaaataacaggcaaaaggttgagtggaacaataggggtttctctacactccatgcattggtagctgctgccgtttctttctacctggtcatgatctctgacctcttcaatgaagatgcgcacaatagcataataattgacagaaaatcatggctatccgattgcatgtttggggtctcgatcggttactttttgacagacttgacgatgatcatgctgtattttccttctttaggtggaaatgagagctagttttcctaatattgatgtttcagctcttgcatcacggactttctatgtatgcaattggtcttgctttattgagtggcaaagcacacatgtacatcctcatggtcctcttcaccgaaatcacgactccctttgtgaacctcagatggtatttggacgttgctggtcagaagacttgcaatctttacttatacaatggtgtggctctatttgttggatggctgattgctcggataatcttattcatatatatgttcacccatatgtattttcatcttgatcaggcgagatccatcttcagcttagggttctacagcttggtggcagtgccgtcggtggttgcggtgatgaacgtattttggttctggaagatactcaaggggatggtgaaaaccctttctaggaggaagcacagcgaaaatgggagaacagattagaaggaatgaaggaaggatgctactgaactgtacacatgttcatctcaacgcacttacggcactcgcattcatttctcacacagatgtaattatcttgtcttgccgtcaaagattcaaagtcggaatcccgcaactcttaaattgttgcaacagtgccacatgcaccgttactgaatatatattggccactgtc

SEQ ID NO: 30629 - DNA, 1917 bp, Zea mays
  Clone ID: UC-ZMFLB73048E04_FLI
cgtgctcgtgctcccccgagcagactagaccagcgcgctagcgccagcaaggccaaggcgagggaggggcgatgctcgcccgatctgctacagccgccgccgccgccgggatctggctgtgattaaggatgtcggcgtcgcggagcgggaggatcaggcgggccgggagcgtggcgctcggggactttctgcggcgggaggcgtcggcggagcgggccgcgttgggaggcggcgagcggccctcggtcgcggcggggcaggcctgccgggcgaagaagggcgaggacttcgcgctgctcaagcccgcctgcgagcgacgccccggcgcgccgtccacctccttctccgccttcgccctgttcgacgggcataacgggagcgccgcagcggtgtacgccgaggagcacctcctcgccaacgtgctcggctgcgtcccggccgatctgagcagggacgactggctcgccgcgctcccaagggcgctcgtcgccgggttcgtcaagaccgacaaggattttcaaactaaagctcattcctcggggacaaccgtgacacttgccataattgatggctccgttgtaactgttgcgtccgttggtgactcacgttgtgtccttgatgctgcgggatccatctactatttgtcggctgaccaccgctttgacgctaatgaagaggaggttggacgtgtaaccgaatgcggaggtgaagttggaaggctaaatgttgtcggtggtgctgagattggtccccttagatgttggccaggtggtctatgcctctcaagatcgattggtgatcaggacgtaggtgaatttatcattccggttccttatgtgaagcaaattaagctgtctaacgctggaggtcgtcttattatttcaagtgacggtgtttgggatgctttgactgcggaaatggcttttagatgtgcacgggggcttcctcctgaggctgcagccgagcaaattgttaaagaagcagttgaatcaaaaggattgagagatgatacaacttgcattgtcattgacataataccaccagagaaacaaaaatgcactatagaatctccaaaaacgccaggaaaaggccttgtccttctaaaaaatttcttcttaaggaaaacggcatctggttcattgtctctcgctgacaaggataattatcccgagccagatttcgtggaggaggtctttgaggatggatgcccatccctttcgaggaggcttaattctgaatatcctgtccgagatatgttcaagctttttgcatgtgcaatttgtcaaattgacttggagtctggccaaggcatatccatacacgagggttcgtcaaagacagggaagctgcgtccctgggatggccctttcctttgtcacagttgccaggaaaagaaagaggcgatggaggggaagcgtcactcgcgagactcctcgtcaagaaatagcgggtcaagtgaatagtgactaaagccaggagtcatcttgaggcgaccacctagcggtgtgacgagctaactcttgttgcagttgtcattgtagcagcacttcctctatacatggattaccattggacatagacagatgttggaacttggatggtgccatgcgtacatatgttggacctaatgcggtaatggaccgtcggccaaattcaatcgcctctaggtaccacaccggcgacggcgtcttcggcaaggcttgtagcagtagctcatgcaggtagtgatgacaagggactgttagcgaagaatgtcgacagcggccaatggtcatgtaaattgttcatcgtatagaggtgcaagtgacaattagccacggttttgtaattctgagctaggattagctattgggaccctgtaattcgtctgggcagacctcaaactagaggtcaacaacgtagcctggcctattgtag

SEQ ID NO: 30630 - DNA, 1185 bp, Zea mays
  Clone ID: UC-ZMFLB73048H11_FLI
caccatgcgcttaatccagaccccttcagaggtgcttttggttctgacggggagaaatacgccagagatgttcaggaaatcatcgaatttggaactacagggagagttggtgggttcatttcggaagccatacagggggttggtggaatagtggaactggcaccaggatacttgcccgtggcatacagtatggtaaggaaagccggtgggctctgcatcgctgacgaagttcaggcaggagtcgcgcgaactgggagccacttctggggattcgaagggcatggtgtcatcccggacatagtcaccatggccaagggtatcgggaatggcatacccataggagctgtcgtaacgacgccagagatcgctcaggtgttgacccgcaaaagctacttcaataggagtacctttgatggtaaccctgtcagcactgcaggcgggcatgcggtgctcaaagtgctggagaaggagaagctccaggagaatgcgtttgttgtgggctcctatctaaaggaacagcttaacaatctgaaagacaagcatgagatcatcggtgacgttaggggcaaaggcttccttcttggagttgagctggtgacagaccgtgagaagaaaaccccagccaaagctgagatctcacgtgtcatgaaccatatgaaagatatgggagtgttggttggtaagggtggtttctacgggaacgtttttaggataacaccgccgttgtgcttcaccaaagaggattccgacttcttcattgaggtgatggacattgcgctctcgaagctgtgaggcaggcagggcgaagatgatgtgcaaaccctggtccgtggccatgggttttttgcccatgaataatattaagattagtgagacagcacctcgttgtctcttaatctaagacgatgccatgtcatccggtggcatggtattcctgcttgcccataaataagggacgagttgtgagacagcacctcgttgtctcgtgatcagacccatggtccatggagcaatacgattcttgtaaactctagcttcatccaatctgttcctcctgatctaactagtctgaatagcaactgttcgtttgttaccaatatcaacttcttttcagatgctccatatattcctgctctctgtaaacaaacaattatcactgttcaatagatgcggagatgtggatat

SEQ ID NO: 30631 - DNA, 1150 bp, Zea mays
  Clone ID: UC-ZMFLB73050G09_FLI
cccaacactcccagacccatttccctttccttcccctccggctccgcctcctcgaccactccgacaacccccagcgcctcctctccggcgagctccacctctccaccggcggcggcgagaagcgggggggctaactaagtctgtaggctgcggcggaggtgatcccggagccggagccgagtctagggcgatggggcagcagtcgctgatctacgcgttcgtggcgcgtggcaccgtggtgctggccgagtacaccgagttcaccggcaacttcaccaccatcgccgcccagtgcctgcagaagctccccgccagcaacaacaagttcacctacaactgcgacggccacaccttcaactacctcgtcgaggacggattcacgtattgtgtagttgctgttgaatcagttgggcgacaaatccccatagctttcctggacagagttaaggaagacttcaccaaaaagtatggaggcgggaaagcagctactgctgcagcgaacagcttgaacagggagtttggatcaaagcttaaagagcacatgcagtactgtgtggaccaccctgaggaggttagcaagcttgccaaggtgaaggcccaagtctccgaagtcaaaggagttatgatggaaaacattgagaaggttcttgaccgtggcgagaagattgaactgcttgtcgacaaaactgaaaatctgcgttctcaggcacaagatttcaggcagcagggcaccaaggtgcggcggaagatgtggctccaaaacatgaagatcaagctgatcgtgctgggcatcatcatcgcgctcatcctcatcatcatcctgtcggtgtgccatggcttcaagtgcggcagcaagtgaggagggggacttacggatggccgtgccctgccctgccctgccctggcacctgcgagaaggaggagactacatgtggagttttttttttgcttctttagtcgtcgtgttaagtcgtcctgcgccgataattcttggtggtcaccagataaagagtcattcctggtgtcggtgttgattgctgttggttggtcgggaaatgactgggtgaaccgaggggcgaagtgggaggggggttgtgtcgtgtaattttggatgccactattgtgcatgtatagccccgtgtgctgtgct

SEQ ID NO: 30632 - DNA, 1105 bp, Zea mays
  Clone ID: UC-ZMFLB73051A02_FLI
ctctgccctcagaaccctcgccgccgcccgtcggagctccggtgtgtcagttcgccgtcgaaggatatggactatgacaggttgaattcgccgaacacgtcggctatttcgctggaggtgatgggccaccggctacatatttcacaggatccaaactccaagcaccttgggaccacggtctgggatgcatcaatggtgtttgtcaagttcttggaaaagaatagcagaaaaggtcggttttgtccatccaagctaaaaggaaagagagtgattgaattaggagctggctgtggcctggctgggttcggaatgaccttgttgggttgtgatgttacaacaactgaccaagtcgaggtgcttccgctgcttatgagaaatgttgaacgcaacagatcttggatttcgcaatcgaattccgacacagataccatcggctcaattacagttgcagaattggactgggggaacaaagaacatatcaaggccgttgaacctccatttgattacattattggaactgacgttatttactcagagcatctgttgcaacctctaatggagacaattactgcattatctggtcccaaaacaaaaatattgctaggatacgagatccgttcggccaccgtccatgagaagatgatggaaatgtggaaaagcaatttcattgtgaaaaccgtctctaaatcgaagatggatgtgaaatatcaacatccaaacatacatctctacatgatggacctgaaggcaccattgatccctgaggttgaggctaccgacgataatgggaacgacgacgaagaggttgtttcaaatctgggggaagacgaagacaatggactgaagagcgaatcttgttccggctcgtcaccagaagctaagagcggcagcctggatgattgggaaatcagaagatgtggggctatggctgcaaggcttctaaaggatgtgaaactgtaaggccttgttcggttatttctatcctatattcctatttggattggaaatgttttaacttgtttgggattgtaactcatccaatccaaatggattgagaacaaaacgaacaagcactgacatgaaattgaaccacgtttttgtagtc

SEQ ID NO: 30633 - DNA, 2188 bp, Zea mays
  Clone ID: UC-ZMFLB73051A03_FLI
cgccgcctctccgacttctccacctccgacttcaccctctccatccacgacccgcaccaccaccaccggaccatggcggacaagcagctggcgttccgcgccggcgccagctccttcctgcgcctcgccaggatgaactcgcccgagtgggcctacgcgctcgccggctccatcggctccatggtctgcggctccttcagcgccatcttcgcctacatcctcagcgccgtgctcagcgtctactacgcgccggacccgcggtacatgaagcgcgagatcgcaaaatactgctacctgctcatcggcatgtcctccgcggcgctgctgttcaacacggtgcagcacgtgttctgggacacggtgggcgagaacctgaccaagcgggtgcgcgagaagatgttcgccgccgtgctccgcaacgagatcgcctggttcgacgcggacgagaacgccagcgcgcgcgtggccgccaggctagcgctggacgcccagaacgtgcgctccgccatcggggaccgcatctccgtcatcgtccagaactcggcgctgatgctggtggcctgcaccgcggggttcgtcctccagtggcgcctcgcgctcgtgctcctcgccgtgttcccgctcgtcgtgggcgccaccgtgctgcagaagatgttcatgaagggcttctcgggggacctggaggccgcgcacgccagggccacgcagatcgcgggcgaggccgtggccaacctgcgcaccgtggccgcgttcaacgcggagcgcaagatcacggggctgttcgaggccaacctgcgcggcccgctccggcgctgcttctggaaggggcagatcgccggcagcggctacggcgtggcgcagttcctgctgtacgcgtcctacgcgctggggctgtggtacgcggcgtggctggtgaagcacggcgtgtccgacttctcgcgcaccatccgcgtgttcatggtgctgatggtgtccgcgaacggcgccgccgagacgctgacgctggcgccggacttcatcaagggcgggcgcgcgatgcggtcggtgttcgagacgatcgaccgcaagacggaggtggagcccgacgacgtggacgcggcgccggtgccggagcggccgaggggcgaggtggagctgaagcacgtggacttctcgtacccgtcgcggccggacatccaggtgttccgcgacctgagcctccgtgcgcgcgccgggaagacgctggcgctggtggggccgagcgggtgcggcaagagctcggtgctggctctggtgcagcggttctacgagcccacgtccgggcgcgtgctcctggacggcaaggacgtgcgcaagtacaacctgcgggcgctgcggcgcgtggtggcggtggtaccgcaggagccgttcctgttcgcggcgagcatccacgagaacatcgcgtacgggcgcgagggcgcgacggaggcggaggtggtggaggcggcggcgcaggcgaacgcgcaccggttcatcgcggcgctgccggaggggtaccggacgcaggtgggcgagcgcggggtgcagctgtcgggggggcagcggcagcggatcgcgatcgcgcgcgcgctggtgaagcaggcggccatcgtgctgctggacgaggcgaccagcgcgctggacgccgagtcggagcggtgcgtgcaggaggcgctggagcgcgcggggtccgggcgcaccaccatcgtggtggcgcaccggctggccacggtgcgcggcgcgcacaccatcgcggtcatcgacgacggcaaggtggcggagcaggggtcgcactcgcacctgctcaagcaccatcccgacgggtgctacgcgcggatgctgcagctgcagcggctgacgggcgcggcggccgggcccgggccgtcgacctcgtgcaacggggccgcgtaggacggaatggatggatggatgggtttggttcctcgagagattgatgggtgaggaagctgaagctccggatcaaatggtggtactccatgatcgcaacaatgaggggaaaaaaagaaaggagaaaatacggtggttcatatgattgtacaatttgacgatctgtttgagtcggggttttaggatgatgtaaaccttcactcgcctttttttttactcttgtttctcatccgcatcagtatcatctatctacatacagtgtcagagatgggaactgatccgc

SEQ ID NO: 30634 - DNA, 763 bp, Zea mays
  Clone ID: UC-ZMFLB73051C01_FLI
gtgaaagtaacagaggctttttctggatttgactaaggcaagtgcccgatttgatatcacctctggttcattgttcttatgtggtgcttctcgccttgcacaagatttcttcttctctagaagacctgatgtagagacattctgcgatatttgtcctgatgtgacagtttcctttcaacaacagatagttgggcccttcagttttcgtgttgaatcctctgtagccattgaccccagaagccaggaccattttgttcgagtggatgatccgatcttcgcaattgattgggctctcaaagtcctgggttcagcaaaggccacagcgtggtattcacccaagcatcaggaggccatgatggagctccggttctacgaaacctgaagctgttcatcgtgaacgttgtataaaataatgcctggacttcatgattgctatggtcgctgatttcactaggatcagatggtatgaatggctgacgccgtgatggtcaaatgaatcaacccccgtgtaatatctattcatatcctgctttaccggtttgagtcatcagttttttttgcttcaggtgatgtagcttgtgctgttctcggcgttaacagaggaagttaatactgtttgagtctttagtgaacttgctaggtgaaccagtctgagtttctgattgccttttgtcagtgtacaaaaaccatgcccccaccatttttatttctttaaatatatgaattttagggtgagcttattaaataattaatccttttttag

SEQ ID NO: 30635 - DNA, 2073 bp, Zea mays
  Clone ID: UC-ZMFLB73051E08_FLI
ctcaatgtctcatacactttgacggaccacagcagccatgctggcatgccgtcgcgagccgctatccgcatgaagcccccttccttctcggtgtccttaaccacggcgtcccagctccacgacgccatcgaccgcctcctatcgctcctacgcgccgacgcctcccacgcccccgccgctcgcgcgattgccgcggccgtcgcctcgctccggccgccctccactctcctgtccaaccgcatcctccatctcctctcctcccacccggccactctcccggacgcgctcgccctcctctcttctctcccaagcaccgatgtatgctcctacaacaccctcgtcgcagcgctcggccgatccccacgcggcctcgcctccgcgcgcgcgctgttcgaccgaatgcctcggagggaccacttctcttggtccgccatcgtctccgcccacgtgcgccacggccagcctcgcgccgcgctcgcgatctaccgccggatgctgcgggagccggggggctccggcgcggacaacgagttcaccgcgtccagcgcgctcgccgcggccacggccgcccggtgcgcgcgcgcggggagggagctgcactgccacgtggtcaggcgagggatcgacgcggatgccgtcgtctggagcgctctcgcagacatgtacgccaagttcgggcgcctggacgacgcgaggagcgtgttcgataggatgcctgttcgggacgtcgtgtcttggacggccatgctggacaggtattttgatgccgggcgcgatggcgaaggcttcaggctgtttgtgcgcatgatgaggagtggcattctacccaatgagttcacatacgccggggtactgcgtgcttgcgcagaattcacctccgagaagctcgggaagcaggtgcatggtcgaatggcaaagagcaggacaggggactcatgctttgcagggagtgcgcttgtgcacatgtactccaagtacggggacatgggaactgcaatgcgtgtctttagggggatgccaaagccggacttggtgtcgtggacggccatgatctctggctatgcgcagaatgggcagccagatgaggcattgcattgcttcgacatgttattgagctctggattcaggcctgatcatgtcaccttcgttggcgttctatctgcatgtgctcatgctggcctggtcgataaaggtctgggcatcttccattcgataaaggacaaatatggtattgagcacactgctgatcattatgcttgtgtaattgatctcctcagccggtcaggcctgtttgagcgagcagaagatatgatcaacacaatgcctgtaaagcctaacaagttcctatgggcgtccttgcttggtggctgccgtattcataagaatgtgcggcttgcatggtgggcagcagaagcactgtttgaaattgaacctgaaaatccagcaacatatgttactctagccaatatttatgcatccgttggtttgtttgatgaagttgagaatatgagacggaccatggaattaaggggcataactaaaatgccagcctcaagttggattgaagttgggacaagagtgcatgtgtttctggttggggataagtcgcatcctcaagctgaagaaatatatgcgcttctgaagaagctgtatgtgaaaatgagggaagaagggtatgtggcagacaccggatttgttctccatgatgtagaagacgagcagaagcagcaggacattggttatcacagcgagcggcttgctgttgcatttggaatcattgccactccgaagggttctcctatcaaggttttcaagaatctgcgcatttgtggggactgtcataccactattaagttaatatcaaagattgtgcaaagagagatcattgtcagggactctaataggttccatcacttcaagaacgggagttgttcttgcagggattattggtgatctgtgctgaatatacaagaaaattgttttgactttttaagactggaaatgactaaggtcaatgtacggaagtactgatattgtggcattatctgggaatttaacttttttgctgcacct

SEQ ID NO: 30636 - DNA, 1733 bp, Zea mays
  Clone ID: UC-ZMFLB73051E09_FLI
gatgatcgaggaggtggagcgcagcctcgccacgcccacggcgctgctgcggggcatcgcggacgccatggtcgccgagatggagcgcggcctgcgcggggacatccacgcgcagctcaagatgctcattagctacgtcgacaatctccccaccggagatgaacatgggctgttttatgcactggatcttggagggaccaacttccgtgtgctgcgagtccaactaggaggaagggagaaacgtgttgtcaaacaacagtacgaggaggtttccattccaccgcatttgatggtcgggacttccattgaactatttgatttcattgctgctgcattggctaaatttgttgatactgaaggtgaagatttccacctcccagagggtaggcagagagaacttggtttcacgttttccttcccagtgaaccaaacatcaatatcatcaggaacactcatcaagtggacaaagggcttttccatcaatggcacggttggtgaagatgttgtttctgagttgagcagggccatggagaggcagggactagatatgaaagttacggcattggtcaatgatacagttggcacattggctggtgggagatatatggataacgatgtagttgcagccgtaatattgggcactggtacaaatgcagcatatgtggagcatgcaaatgcaattcctaaatggactgggttactgcctaaatctggaaacatggtaattaatacggaatggggaagctttaaatccggcaagcttcctctctcagaatacgacaaagccatggactttgaaagtttgaaccctggagagcagatatacgaaaaaatgatttctggcatgtatctgggagagattgttcgaagaattttactcaagttggcacatgacgcttctctatttggagatgttgttccaactaagctggagcagccatttatattgaggacgccagatatgtcagccatgcatcatgactcttcgcatgacctcaaaactcttggatctaaactgaaggatatagttggggtcgcagatacttccctggaagtaagatacattacccgtcacatctgtgaccttgtcgcagagcgtggagcacgcttggctgccgcaggtatatatagcatcctgaagaagataggccgggacaaagtaccaagcagtggcagtaaaatgccaaggactgtaattgccttggatggtgggctctatgagcattacaagaagttcagcagctgcgtcgaagcaactcttacagacttgctcggcgaagaggcctcttcctccgtggttgccaagctggccaacgatggctctggcattggagctgctctccttgcagcctcacactcccagtatggcgagagtgactagtcttgaaaactggtgtggatcgaacttcgagtgtagctctcatttttatctttttttcccttcaaaacatccctaatattctggctctcctcggggaatttttcggcttcctttcttggctattctgtggatgcacttaaggctctgcagcgggatatagctagtatagagccaatcagtttggaggttatctaatggcataaggtttggacggcaggaacatagaaatggaagctgaacaatgccattcatgttctgcccagtttttcttctccttgtatggtgttgtaaaccaatcaaaacttttaacctttttgtgttggcaataaagaggaggcacgataatttgacc

SEQ ID NO: 30637 - DNA, 1039 bp, Zea mays
  Clone ID: UC-ZMFLB73051F04_FLI
ccgcccggctgcagccggcgctcgccgcgggcgcccgcggcctcgggacggcggcggaggtggccgcgaccgccaggtgggagcccatgggggcgcgggagtactacgactaccgccgggccatgtacggcgacatcacgcacaaggccatcctcgtcgacgccgccggcacgctgctcgccccaaccgagcccatggcgcaggtgtacagaacgataggccagaagtatggggttgattactccgaggatgagattctgatgcggtatcgctgggcgtatgcgcagccttggggtagatcacgtctgaggtatgtcaatgatggaaggcccttctggcaatacatagtgagttcatctactggctgctcaaatctagagtactttgaggagctgtatcagtattacacaactgaaaaggcttggcatctctgcgatccagacgctggacgtgtttttgaggcattgaggaaggctggtgtcaaaacagctgtcgtgtccaattttgacactcgtcttcgaccacttttacaggcactgaaatgtgaccgctggtttgatgcagttgctgtgtctgctgaggtcgcagcagaaaagccaaaccctacaatattcttgaaggcctgcgagctgttacgagtgaaaccagaagaagtcgtgcatattggtgacgaccgtaggaatgacctatggggagctagggatgcaggctgtgatgcctggctttggggcagtgatgtttactccttcaaggaggttgcggagaggatcggggttgaggtataggaagaagtcgctctcctgagccgcaagaagactcgtccttgtacatagtgttagggcgtcctgtacatatttccaagggaaaataacaagagcggcttctcctgtgtgcgactgtgccaaggccttctgtagcaaatactgatgtacatctttgcgtttgaatgttcgttgcggctgtgacctgcagaatagacctttggagacccctgcagcatctttcacgtttcatatcctgaagcatcatcagcgtcacc

SEQ ID NO: 30638 - DNA, 930 bp, Zea mays
  Clone ID: UC-ZMFLB73051H07_FLI
ccaggacatgttcagtcccattagaagtgcaatgagcataccgagagtgataagataaacagcagtcttccacacaagtactttccatctcttctctgcaactcttgttcttctggcactcgattttacggacgcacaagcttgtcttgagaaggtgtcatattcactgctgatctttttctgcgggatgtttatcactgttgatggcttcaacaaaacgggcataccgaacacactatgggagttagtggaaccatattcacgaatcgatagtgcgaaaggtgttgcacttcttgccgtggtgattcttatcctttcaaacgtggcctctaatgttcctacagtcctattgctcggtacaagagtggctgcatcagcggcttcgatttctcatggttcagagaggaaagcctggctcatccttgcatgggtcagcaccgtggctgggaacctcaccctcctaggctctgcggcgaatctgattgtctgcgagcaggccaggcgggcccagttcttcggctacaacctcaccttctggagccacctccgattcggggtcccgtcgaccatcatcgtcacggcgattggtttgctcatcgtcatcagttactgaaacagctgaaggcagaagagcgtagtgtaagagaagcagaatggataaaaatccttccaataagaagtacatgtaaattaggcttgccctataactcaagtgtgtatcggtacgttatgtctccgtctgtgctcttgctcgtgagcaagcagcacatggctgaccgtgtagcttgcatttccattgcataataggcttatgaagaatgctttggtaatatgattttacagtctgacaaggattgtgaagcagaggcagtgtaccatcaagataatacttctggaagcatataaaaaaatttcgtatatttggatttc

SEQ ID NO: 30639 - DNA, 1603 bp, Zea mays
  Clone ID: UC-ZMFLB73052D07_FLI
ctcagactctgaacgccacccgaagatgagcagtggctccagagatggaagaactcgaagtgcacattctctgagttctgttttgagccaatacagaggcgatgatgatacagacttccctggttcagaggctacttctggttccaaacgatggggtaatgttgccgatgttacttatggacggcagaatcagaagcaaagggagcctctgaatttccctcaaagaaaagggcctctggacggcggatttttcagtcgcagatctttcaaggagattggctgcagcgatgaaatgctaggtgcgttgagaaattttgatttccctcgtccgtctcatatccaggctatggcatatgggcctatcttagaggggaggagttgtgttgttgctgatcaaagtgggtctggcaagacactggcatatctttgccctataatacaaaacttaaggaacgaagaagttcaagggctccataaatcatcccctaggaaccccagggtgatagtattgacccctactgctgaacttgcttctcaggtccttaacaactgccggttgatatcaaaatctggggttccatttaggtctatggttgcaaccggaggatttcgacaaaagactcagttagagagccttgaccaagagctcgatgtaattatagcaacacctggccgtttcttgtatctgcttcaagaaggctttgtgcaactagctaacctcagatgtgttgtgttggatgaagtggacattttatttggtgaagaaggtttcgagcaagtgcttcatcagttgatcaccgtggcaccagtgacaacgcagtatcttttcgtgactgccactcttcctcttgacatctataacaaggtcgttgaaacctttcctgactgtgaggtgatcatgggacccggtgtccaccgaacaagctctcgccttgaagagatccttgtggactgcagcggagatgacaacgaagaaaagaatccagaaaccgccttttcgaacaagaaaacagcgcttttgaagattatcgaggagtctcctgtccgcaaaacaattgttttctgcaacaagattgagacatgtagaaaagttgagaatgcgctgaggcgggtggacaggaaggcctcgcagatcaaagttctccccttccatgctgcgctggatcaggcccagcgcatcgcaaacatcaaggagttcctgaacaagcaaacggctgactccatgttccttgtgtgcacagatagggcgtcgcggggcatcgactttgcgaacgtgaaccacgtggtgctcttcgactacccccgcgacccgagcgagtacgtgcggcgcgtcgggcggactgcccgcggcgcgtccggcaacggcaaggcgttcgtgttcgcggtgggcaagcaggtgtccctggccaggagggtgatggagaggaacatgaaggggcacccgctgcacgacgtgccgtgcgtctagagaccctggagggggaggtgtctgatgcgtgcaattgctgcctaaactctaagcatgttttttgtttcggaacgttgtgggtcatctatcctatccctcgcttgactcttctcggaaaaggttctcgttcccatg

SEQ ID NO: 30640 - DNA, 2187 bp, Zea mays
  Clone ID: UC-ZMFLB73052H05_FLI
cgagaaacaactcctgatgacagccaagtaaatgaagtagaatcagacctaaaagaaaccctttcactaaattatgaggaggctcgagcattgttaggtagactggaacatcagagagggaactttgatgcagcattgcaagttcttcaggggattgatataagaagcctgagaccacgaatgaccactgctattgctgaaagtgtcaagcctagaatgcccccacgctcttcaagacgaaaatcttcacaagtgaacggaatgcttatgcatatgtccatgcattctgtaagcttgcttctagaggccatactgcttaaagcaaaatctctggacacccttggtagagcagcagatgctgcagaagaatgcagaaccatcatagacattatagagtctgcatggccatatggtgttccggatggtacttctgaagagtgtaagctaatagacatattccattcggctctagaatatcttcctaaactgtggatgaggagtggttgttttgatgaagccatcatcgcataccgcagagctcttgcaaagccatggaatctaggttctcaaaggtccgccaaattgcaaaaagagttggcagtgagtctgttgtactgtggcgttgaagtgaagttccctcaagaattttctcaggaaaggaatctggtaacccctgggaacaacttagaggaagcaattttgttattactcatgctaacaagaaagctatttctccgagaaatacaatgggatcctgaccttgtgaatcatttggtgtatgcactctcattatctgggcactatgaagttttggccagccatcttgaaatgctgttgcctggaacctataccagatcagagagatggtatatccttgcactttgctacagtgcagctggcatggatgacagtgcgttaaacatcataaggaatggtttttctgtactggagagaaagggaaagcctcatgttccatctcttcttttaggagcaaaactatgttgtaagaacccaaagcatgcttccgaagggataaagtttgcaaataaagccatgaagtctttcagaagtcgtgatctgcatttcatcagcactacaaaacactttcttggtgtttgttatggacctttttctaggtcctccacctcatacttggacaaatcgagactgcaagataatgcactgaggctgttgcaggatgctgccacaacagcgaagtataatcctgaaataatgtatagcctagcttgggaaaatgcgatgcagcgcaaactcaatgcagctgttgaaagtgcaacagaatgtcttgagatggtgatgggtggttctgttagtgcctggaagttactaattcttgtattatctgcacagcagaatttgcaagaagctgaagcagtagcagattttgcaatggacgaggctgagaaaaatgatcagttggatattttgagactgaaagcacaaattcaagcttcccgtggacagttcaagtctgcagttgaaacttttcgggttttgcttgctgctatccaagtaaagaaggaagtctggaaattgaccacttgtaatgaggttaaatgcctacaaaagttggagatggacgcatggttagatttggcatcaatctattcaaagcttgaggcatggcatgactcaaacatctgccttgacaaagctatatccattgatttctattatcccaagtgttggcatgtcagaggtcttctattggaggctcaattcttgcacaaggaagccctgatggcattctctttcgcgctatcaattgacccagattacgtcccgggcatggtttgtatggcaggaattctccgaaatattggaggggattcattatcaattgcaagaacttacttgcgcaatgccctccgtttagagcctacaaaccaccgtgcctggttgagtcttgggcttgtcctgaaagctgaaggatcgctgcaggaggccgcggattgcttccaggcagcatatgagcttagagaattatcaccaattcaggatttctctgagcaactcccgatcatgctgcattaggaatctatagcaaaggagttcacattttttgtggattttccccatagttgtcttagttattaacttatcccttgcaaaggtaggaaacatatgtttttgtgaatgtaaattagtccacttttgttcgtgagg

SEQ ID NO: 30641 - DNA, 1773 bp, Zea mays
  Clone ID: UC-ZMFLB73053A04_FLI
cccaattctcgacggcttcccttcttagttcttccccttcatccgaaaccctcgcactctagcggcccgcacaaagccgccggagcgccgcgccaccatgtaccggcttttccgccgcagcttctccatggctgccgagggttccgccgccgccgcctcttcctctccacccccctccacctccatgtcctcgaccccgcggcaacatctgccggacgagctgtaccgccgcatcatgaatgtcgggcgcccaagcatcccgttatcccccgtcctggagcaatggaatcaagaaggccataccgccaagaagttcgtcatccaggccatcgtcaagaagctcgtcggcctccgccgcttcgcccacgcactcgagctgtcgttctggatgaccgaccgcaggcacctccacctttcggtcggtgacgtcgcgtaccggctggacctaatcagcaaggtgcacggccttgagaaagccgtcgagtacttcggcatggtaccgaagcagctgaggaagccgcagtgctacggctccctcctgaaatgctatgtggaggcgaaggccgtcgacaaggctgaggagcacttcgcgaagatgcaggagatggggatgacgagttcttacgcatacacttggatgatgaagctttacctacagactgggcagcttgaaagagtgcacgccatgttccaggacatggaagagaaaggtgtgaagcctgatactttcagtgtggaggctatgttagctgcgtacattgctgctgaagatgtccagggggttggtaaggtgctcgacaaggccaatccacacgagaagcttgtgacttggcatgggcatgcttcggcagcgagcttgttcatgaaatctgggatgcaggtgggggctgtcatggctctcgtggaagccgagaggcggatatctccaaagagcagtagaatcgcatacgctttcttactcaagacatatactgaactggggatgcatgctgaggccggacgcatttggagtgtctacaaatccaaagtgccgccgtgcaacacgatgtacatgtcgaggctaagcgcgttactcaggacgaacgacattgatggggcggaagcgacactgaaagagtgggaaacggtgcctcttcgctatcatgatttcagattaatcaacgtaatggtcgatgcctactgcagagaaggtctcgtggagaaggcagtagctctcgtggatggcgccatcaagaaagggaggacaccttacgctaatacctggtataagttggctggtgggtttttcaaaactggtcaggtaccagaagcagtggacatgacaaggaaggctcttgattccgcgactcctccatggagacctgacctcgcgaatgtgctgatgagcctgaaccactttgtggaccagaaggatgtaggagcagctgaggagatggtgagtacgctacagaagctggttcctttgactagggatgtttaccattgcttgctgaagacctatgtccgtgcgggaaagccgccgtccgatctgctggagcgtatgaaggaagacggccttgaggctgatgaggaaacagagagaatcctcgcgggagaatgcgagcgagtagacatgcacccgttgtcaatcactaaccatctgattggttagtcgcaccgtctcatcctgtatcagtgcatgcattgattttatttaagtctttgtttggttgcctgtatacttaaagcgtgagctgcatgagtggatgcaaactaatttattttgagaccgtt

SEQ ID NO: 30642 - DNA, 2872 bp, Zea mays
  Clone ID: UC-ZMFLB73053A07_FLI
gggttgcagaagaaaaaggcaaaaacaatccgccgacttggagaaaccctagaatcaagcgcggaaccgccctcatccaccatgctgcgtgcggcggcggctgcagccgccatcttcccggcgcggttcgccgccgcgccggctgtggcggcggcggaggagctcaggtctccgctgctcagggtcattgggacgctgagggacggccgcggctcggtgctgctgggtaggagggtgcgtttctgctccaactcttccgcgagcgacaccgaggcggcggtggcagaggcggaggcgaaggccgaggatgcgtccgctgcggagggtgaggcggacagcaaggcgtcttccgccatcgtgccgaccagcaccaatatcgatgattgcctctcggttatagcgttacctcttccacatcggccactctttcctggattctacatgccgatcaatgtgaaggaccaaaagctgctgcaagccctaatagaaaatcgcaaaagatcagctccgtatgctggtgcctttcttgtgaaagatgaagaaggtactgaccctaacatcgtgactggttcagattcagcgaaaagcattgatgatctcaaagggaaagacttgctgaagcgtcttcatgaagttgggacgcttgctcagattacaagcattcaaggggatcatgtagttctacttggtcaccgacgtttacggataactgagatggtcgaagaggatccacttacagttaaagttgaccatctaaaggaaaagccctacaacaaggacgatgatgttatgaaagctacatcattcgaagttatatcaactttaagggaagttctaaggacaagttccctttggaaggatcatgtgcaaacctacacacagcacattggtgactttaactaccaacggttagcagactttggtgctgctatctctggtgccaacaagttgctttgccaggaagttcttgaggaattggatgtatacaagcgtttgaagttgacccttgagttagtaaaaaaggagatggagattagtaagctacagcaatccatagcaaaagcaattgaagaaaagattagtggagatcagcgacgttatttattgaacgagcaacttaaggcaatcaagaaggttgaagttacagatactgctcttcttgctctcattgaaaactactgtcgagaagctggagtgaggaaccttcaaaagcagattgagaaaatttaccgtaaggtgtgtaaaataacttctgcatactgatctgccccctctatcagggaaggggaaaatgttggctgattgttgataatggttaagcaacctcaaggcattggtatggtataaaaggttactgttagttttagagtcaatgcctccattgatatcttatgctcgccaatataatgatgtcatacagtctttgctggtcgatataatcatactgacttttaaaatgccttgcaaactctttacctctgcagatagctctgcagcttgttcgccaaggagtatcgaatgagccagaccatgagtctgtcagtgcctctgtaactgaggaatctggtaatggtgataacaccacaacaaaagatgagattttgaaggatcctgctgtagaagatgcttcagtcaccaacaatgttacaaatcctgcctccgaggaagctaatgaagaaaatttgacaagtgaagcagcaaaagaagacagcacatctaagggcaacaagggcactgatggagcagcggacaaggcaattgagaaggttgtggtcgattcatcaaaccttggtgattttgttgggaaacctgtgttccaggctgagcgtatatatgagcatactccagttggagtggtcatgggtttagcttggactgctatgggtggttctactttgtacatcgaaacaaaaaaagtggaggaaagggaagggaaaggtgcacttgtgcttacaggacagcttggagatgtcatgaaagagagtgctcagattgcgcacacagttggcagagctgtattactggagaaagagccagataaccatttttttgcaaactcgaaggtgcacttgcatgttcctgcagggtccacccctaaggatggccctagtgctggatgcaccatgataacatctatgctgtccttagctatgggaaagcctgtcaagaaggacctcgcaatgacgggtgaagtaacactaaccggaagaatcctcccaatcggcggggtaaaagagaaaacaattgcggcaaggagaagtgcgataaagacactcatatttccggcagcgaataaaagggatttcgatgagcttgcttctaatgtgaaggaaggcctcgaagttcattttgttgacacatacagtgaaatatatgatttagctttccagagtgacgccgggacagaaacaagctgagatgatttagctttatgggattgagattttttccccctagacccacgacagaaacaagtccgtcaagaggcaggcaaaccagaccattgtaaccaagatgggtggagttaattgatattcacgagaaaaatgaaatcctttttttttgcccccaatataacatcattgaatttaagagatttttggctaggttgtacgtactagtgtggttgcccatctaggtggtatagcctatattattagtaggaataagaaaagcagcatggatgcaccatctgttatttatatttattgatttaagagtgttctctaaaagcagcaggtatgccccagttgttattcattaaatttgtttcagtgagtgttagttacctttggatactgtactgtgcgtcatcaatttataggatgttttgattttttttggatacacaaacttctatcattatgcatct

SEQ ID NO: 30643 - DNA, 1401 bp, Zea mays
  Clone ID: UC-ZMFLB73053C11_FLI
ggggatcgaggccacgccgctgcgtgggcggctgggcgcgcgtctgacgtgccgtgccgtaccatggctgccaggctgcgccgctcgcctatatcctcccctcctcccccgccttccctctgcatctccctctacccgccgccacattcatcagtagaaaccacctatcctgcctgctctacctacctccgctccccagccatgacggtgctggacgccgagtcgcggttccatgtcctggcggtggacgacagcatcatcgacaggaagctcatcgagatgctgctcaagagctcgtcttaccaagtgaccacggtggattccgggaacaaggcgctggagctgctggggctgagggacaacggcgcggaggacgcgtcgccgccgtcatcgtcctcatcatcttcgtcgtcgtcctcccctgaccatcaggagatcgacgtgagtctcatcatcactgactactgcatgcccggcatgacaggatacgatctgctcaagcgagtgaaggggtcctcatcgctcaaggacattccggtggtgatcatgtcgtctgagaacgtgcctgcccggatcagcaggtgcttgcaggatggcgcggaggagttcttcctgaagcccgtgaagccggccgacatgaagaagctcaagtcacacctgctgaagcggaagcagcccaaccagaagaacaagcctcaggcgcaggcggtggagtctcctgagcagcagctggacccgcatccgcagccggtgcacgagccggaggaagccgcggcagatcgcaacggcgtcaacaagaggaaggcagcggccatggaggaggggctgaccgtggtggtgacggcgccggagagcaccaagccgaggaggctgtctacgagcagcctgactgtggagacctgatcaaccgtggcgacctacgggctacggctacgcacattaatctagcagtggatgcaagccccagtcccagccccgccgccaagaaacacattttggttctgggagctaacggagggaagtgacaaacaattaaattatatgtagcggctgctgcttcggcctgcaaattttgttgcgctaacggtcatggacatggacatggacaccatcccttgtgttcgttaatcgttcggaaggggaaaagaagaagaagctgtagataaaaaaaggacaggcggctaattgttaatttccgcatggcttaattctggcaacgacctgctggctcaatcaaaaacctgtgacggacagacggatggatcaactgatgatgttgttgttttggctcggttcttcttccttgtacactgagtgttcagatgaacatgttgtaatctgaacatccgttcatgtcagcctgcctgacgatggaggcaaaagttcttctacatcatggtc

SEQ ID NO: 30644 - DNA, 678 bp, Zea mays
  Clone ID: UC-ZMFLB73053H12_FLI
gccgcaaaggaatcaggcggagtggcgcgatgggagagcaggtcgtgacggagcagatccagcggaagctggaggaggtcaacgctaccgtccaacagcacctcgcgggtgtccaggaccacatcaacttcaccatgcagcaagcatacttcaagtgcgcatatggttgctttgatcggcgccatactcaggaagcgatcagcaactgtgtggagaattgtagtgtgcctgtccttgctgccaacaatatttttgagagtgagatggccaagtttcagggaatgttgaaccggtcattgagggtctgtcaagataagtttgaagctgccaatctccagaagttgaaatcagatgcaactcgggaactggaatcctgtgtcaacagatctattgatgacagcctcagggtccttccgcatgtggtggatcagatcaagtccaccctcaaaatcaattagaggcactattacttttagcaaatgaaccagatatagttgagaatgtttcatattcacattcgctgcataactccacattttcagagctcttaccgatattgatagaacatgatcaccctatcgtagttttttggattctgctcttaccacctagtcctggcatgtcaacagcgtcgacattttgaactctactgagaacacagcttaggcattgaaaggc

SEQ ID NO: 30645 - DNA, 1573 bp, Zea mays
  Clone ID: UC-ZMFLB73054D01_FLI
gtacacgcctcattacgcccatccacgtgctcgcctcgccccatcgcggacctttcctcggcggcgtcgccatctcatcggcggcgggcgtgcggccggtggccggagcccttaggcgatggcgacctcgtctgtggcggcggacatggagctggaccggccaaacctggaggactacctcccgcccgactcgctcccgcaggaggcgccccggaatctccatctgcgcgatctgctggacatctcgccggtgctcaccgaggcagcgggtgccattgtcgatgactccttcacacggtgctttaagtcaaattctccagagccatggaattggaacatatatctgttccccttatggtgctttggtgtagtaataagatatggaatactcttcccactgaggtccttaacgcttgcaataggatggttagcattttttgctgccttttttcctgtccatttcctattgaaagggcaagacaagttgagaagtaaaattgagaggaagttggttgaaatgatgtgcagtgtttttgttgcttcatggactggagttatcaagtatcatggaccacgcccaagcacactacctcatcaggtattcgttgcaaaccatacatcgatgatagatttcattattctggagcaaatgacagcatttgctgtcatcatgcagaagcatcctggatgggttggatttattcagaagactatcttggaaagtgtcggttgcatctggtttaatcgtaatgatctccgggaccgtgaagttacggcacggaagttacgtgatcatgttcaacaaccagacaacaatcctctgttgatttttccggaaggaacttgtgtgaacaaccagtacacggtcatgttcaagaagggtgcctttgagcttggctgcgctgtatgtccaatagctatcaagtacaataaaatatttgttgatgccttttggaacagtaagaagcaatcttttacaatgcacttggtccggctgatgacatcatgggctgttgtgtgtgatgtttggtacttacctcctcaatatctgagggagggagagacggcaattgcatttgctgagagagtaagggacatgatagctgctagagctggactaaagaaggttccttgggatggctatctgaaacacaaccgtcctagtcccaaacacactgaagagaaacaacgcatatttgccgaatctgtcttgatgagactggaggagaaatgaagggacgtaaagccgtacaagtgcacttcgttagggttttacatgcagctaccttgtaattcggttggcttccagaaaaaaaaaagtgagcctgggacacgtcaagtgaccacctcagttttgttgtaaatttgttactagtttgataggattattagtatgtacttatcaggaaaagaattctcagtatgtgttttggctgcccattcaatgataggtcagtgattaacaccgaagcattgtgctctcgtgagatgctgtgttggtcttaatatattgacggtactgtaccatggtttaaatgtgattattgaagcaatgtgaatggattagctggct

SEQ ID NO: 30646 - DNA, 1280 bp, Zea mays
  Clone ID: UC-ZMFLB73055A08_FLI
agccgacatatggcggctcagcctctcctacctcacgcccctgtcactgaggtgcgccgtggagcttggcatccctacggcgatctaccgccatggcggggctgcctcagccgctgagctggtcacggcgctgtctctcccctccactaagctgccgttcctccgccgcctgctgcggctcctcgccgcgtcgggcgtgttcaccgtcgacaagcagagctcggaggaggagcggtaccgcatcagccccgtgtcctacctcctggtggacggcatccctcacgaggaccacatgaaccacaccgctctggtgctcacctgcacctcgacgcgctacatcgaggcggggatagggctggcggagtggttcaagagggacgtggtcacgtcaccgttcgaggagctgcacggggcgactctgttccacgagagcatggggagcctcgacgcagatttccacgacatggcgagcgaggccttggacgcccacgacaacttcggcatcgagatagctatgcgggagttcagggacttgttcgaggggatccagtccatgacctactgctgcggtaacttcggtgatgacaagggtgccagggccattgtcaaagccttcccacacataaaatgcactgtgctggcccctcccaagatcattgccaccaaaccggccgatggagcgatgataaactatgtcgaaggtgacatgttcagtttcattccacctgctcaaactgtcgtgctaaagcttgtgctgcaccacctgaccgatgaggagtgcgtcaagctcctggctcaatgccggaaggcgattccttcacggaaggatggcgggaaagttataatcggtgatattatgattgaccactctgggcctatgctggaaactcacctcctgatggacatcggcatgatgaccatgacaaaaggacggcagagagatgaaaaagaatggagcgagctcttcaccaaagcagggttcagcgaatacaagatcctgaaggaatttggagctcgtgttgccttcgaagtctatccgtgagattgcacctggactatacatatatatttacatacatatatgtatgtgtgtgggtgccttgcgtggcttggcgtgatgatgtcataaataaagagggtgggtgtgcttgcggtattcatggatggccatggatctgagcacatgacgttggatgctttcttaaggctctcgtggatcttctatatttggaagaagctgtaaaataatatatcgccatctagtgttggcgttggcttgt

SEQ ID NO: 30647 - DNA, 570 bp, Zea mays
  Clone ID: UC-ZMFLB73055A09_FLI
gactgacaacaagggtttgtattcaacaaccttcaaagttccagatgtttatggagttttccagttcaaagttgagtaccaaagactgggatatactggtctgtcttttacaaagcagattccagtacgtccttacagacataatgagtatgagagattcataacatcagcgtacccatactacaccgcctcattttcaacaatgggtgctttcttcgtattctcgtttgtgtacctgtaccacaaataaaggactcatgggagcgcacaagtctctggaggctgacgtgaccaagatctgtgggcactgaatgttgtgctataagccaagagttacccggcgccaattttatggaaccatgtttttgtactgccaacttagataacatttgacgaccgtgaccgcactcatgggaaatttactcgtgctaggatgttcgatctgcccccacttcttttttttctttcttggaccctttctgatcagcacttgtcagaacgtttacagtctatagcactgaaacgtgattttggaagtactacacccccagtaattttgcactcgtgccc

SEQ ID NO: 30648 - DNA, 1949 bp, Zea mays
  Clone ID: UC-ZMFLB73055E03_FLI
ccgagacagacacacaccagagggagagggagacggagagaagggcgagcggcactagcaagcatggcggcggccgtcctagcgcccaagccgcctcctccgctgcctaccagggcctttccttcctcatccccctcgcggtttgcccctgccttcatctccccgcgtcatcccctgagaagattgctcctccgccccattccgtgcgcctcatcgccgtcttccgtcttgatgccgaacccggacctcgagactgagcctgcccacgatggagatggagatggagatgaggcgccgccggagtccaggccccgccgcatcgcccttttcgtcgagccgtctcccttcgcctacgtctccggctacaagaaccgcttccagaacttcatcaagtacctacgggagatgggcgacgaggtgattgtggtcaccacgcacgagggcgtgcctcaggaattccacggagccaagctaattggctcatggagcttcccttgcccctggtatcaaaaggttccgctgtcgctggccctcagtcctcgaatcatcgcagaagttgctagattcaagcctgacattattcacgcctcttcacctgggataatggtatttggcgcgcttatcatagcaaagttgctctgcgtccctctggtaatgtcataccacacccacgttccaatttatatacccagatatactttcagctggcttgtcaagcccatgtggctaataataaaattcttgcaccgagctgcagacctcacactggtaccatctgttgctatcggcagggatcttcaagctgctcgtgttacagcagccaataaaatacgcctttggaacaagggtgttgactcagaaagcttccatcctcgtttccgcaacatggaaatgcgttcaaggctaacgaatggtgaaccagaaaagccacttgtattttatgttggacgcttaggagttgagaaaagcttggattttcttaagagagtcatggaccgacttccaggagcaaggattgcatttattggagacggaccattcagagctgagctcgagcagatgttctcaggtatgccggtggtgttcacgggcacgttgcaaggggaggagctatcacaggcctatgccagtggggatgtgtttgtgatgccttccgagtcagagacactggggtttgtggtgctggaggccatgtcatcaggagttccggtagtcggggctcgcgccggaggaatacctgatatcatacctgaggatcaggaggggaggaccagctttttgtacacaccaggggatgtggatgactgtgttggcaagatcaagcggctcctgtcgagcgaggaactgagggaggccatggggagagctgccaggaaggagatggagaagtttgactggcgagcggcgacgaggaagatccgcaacgagcagtacagtgctgcaatctggttctggcgcaagaagagggcacaggtgctgcggcccctccaatgggtgctgcggctgctgaggcggacaatgccaggagctgccgatgccgcagcgaagcaatcctaggagaggggggctactatggttgatggtcctcttttttcccattccttgtattatctccgttttcgaatatttgtcgtccgctagttcatttttaactaaacagcgacaaataaaaaagaacgacgagagtataaaatgggctaaggaggccatggcagatgattggatatgtttcaggattagaggggaggaaggtcaagcttcaacattccaattcactgaagaatatataatgtacgtttaggactgttaggttgtaaatcgtcaaagtgtctatgtaatgcttcttcttggcatgctacactatatagtactaatattgatcctttaacaggaattggtgtgcagtcagacaatgataataatatatcttgctctgtctttctagtatc

SEQ ID NO: 30649 - DNA, 1496 bp, Zea mays; identical to SEQ ID NO: 30573
  Clone ID: UC-ZMFLB73055F06_FLI

SEQ ID NO: 30650 - DNA, 971 bp, Zea mays
  Clone ID: UC-ZMFLB73055H09_FLI
ccagcctcggaaggaaccttccagaagcgcaagactctaaaggccgtcgccttcccattcttcctcgccgcgggggtcgcctgagatcacataaacaatggtgaaggctgttgctgtgcttggtagcagcgatggtgtcaagggcaccatctttttcacccaagagggagatggccctaccgctgtcaccggaagtgtctctggcctcaagcctggcctccatgggttccatgtacatgcacttggtgacaccaccaatggatgcatgtcaactggtgtttatttttctttttctttggcttgcttatgtgatcagggtgtgtgctaagttaatatcagtcattgaactttctacttgttggtgaaatcaaggaccacactacaatcctgcgagcaaggagcatggggcaccagaagatgagaaccgccatgctggtgatcttggaaacgtgacagctggagcagatggtgttgctaatatcaatgtcaccgacagccagatcccactgactgggccaaactcaatcattggcagagctgttgttgttcacgctgatcctgatgatcttggaaagggtgggcacgagctcagcaagagcactggaaacgccggtggccgtgttgcttgtgggatcattggactccagggctgaaaacgatcgccggacttgggggtgcctgagaggtccgtctcctgccgtccccagcagacgagcctgaacattcggagacatcgtgaaataagagcgtcgctgatctgtgatcatcgtatttgtcattatgcacctgtagcaaccgatggactgaactgtgctggattatgctgttggatcacctgagtatgtgttacatgtcggttttgatgtgacatcctatcgtttcgatgtgttttgtggaagtgttgttgcaagatttcaacagtcacgacttggttttgatatgcagtcagcagcagctcctgagttgtgatt

SEQ ID NO: 30651 - DNA, 1625 bp, Zea mays
  Clone ID: UC-ZMFLB73056C10_FLI
gtcatcttctcctcctcagaaacccaccaaccccgtccagccgccggctgtctcggccgccgccgccgccgccgccgccctatcccggtccttcaggcgaaccaggttggtcatggccttcaacaagatcaaggtctccaaccccgtcgtcgagatggacggcgatgagatgaccagggtgttctggaaatctatcaaggacaagcttatattccctttcgtagacctcgacatcaaatattttgacctcgggcttccacaccgtgatgctaccgacgacaaagtcacagtggaggctgcggaggccacactcaagtacaatgtggctatcaagtgtgccaccattacaccagatgaagcaagggtaaatgagtttggcttgaaggctatgtggaagagcccaaatggcacaattaggaatattctgaatggcactgtgttcagagaaccaatcatctgcaaaaacatcccacggcttgttccagggtggacaaaacccatttgcatcgggaggcatgcattcggtgatcagtaccgggcaactgatgcagttatcaaggggccagggaagcttaaatcagtttttgagggaaaagaagagcaagttgagctggaggtgttcaacttcactggtgcaggaggagttgccttatcaatgtacaacactgacgagtccatccatgcctttgctgacgcttctatggccactgcttatgaaaagaaatggccattgtatcttagcaccaaaaacactattttgaagaaatatgatggcaggttcaaggacattttccaggaggtgtatgaagctggttggaaaaccaaatttgaagctgccggcatatggtatgagcaccgccttatcgatgacatggtagcatacgcacttaagagtgaaggagggtatgtctgggcttgcaagaattatgatggagatgtgcagagcgatttcttagctcaaggttttggctcattgggtttgatgacttcggtactggtgtgccctgatggaaagacgatcgaagctgaagctgcccatggtactgttacccgtcattaccgtgttcaccagaaaggaggtgaaactagtacgaacagtattgcctcaatctttgcgtggacaagaggacttgcacacagggcaaagcttgatgacaatgctagactacttgacttcacccagaagcttgaggctgcctgcgttggagccgtcgagtctgggaagatgaccaaggaccttgcccttctcgttcacggatcttcaaatatcacgaggagccattacctgaacacggaggagttcattgacgctgttgctgatgagctcagatcaaggctggcagccaactcgaacctttgaaatccttgccgaagttgtggtgctttcctgcgcgacgctttcgaaccgtttttattatgtcgccattttctttccctgtgccaccaccctgatgaatgaagaaggcctgagctaggcgaacatctgcaggctgcagcagtatgccaaatcattatcattaccgttaccattaccaattggagattgccgtagatttccgcgattatgggaactcatttacctgattatctgatacgtttgaaataaaaggtcgcccattagaatg

SEQ ID NO: 30652 - DNA, 1383 bp, Zea mays
  Clone ID: UC-ZMFLB73056G07_FLI
ggatcaaaagggagtggggactaaccgtgtgcttgctcttaaatactcatgaaagttgtataatttgttttccttgttccccatccttctcagtccaagcaaggtggctttgtaggaatttcattacatctaagatggtatgaaccactaaggaatatcacagaggaccacttggcagtaagccgagctctgtctttcgatgctccatggtatcaattgattcagtaaccttccatcatactagcattttacgattggaactaacttttgatcttcacgattgaatgctcacttgatgatatatgctaaaacaggatcttggatcccttgttctttggtgactatcctcaccagatgcgccaaatcttaggtccaaacttgccaaaatttacagaaggagagaagaaactactgaagaaccaaattgacttcatcggggtaaatcactaccaaacattctatgtcaaggattgcatatattctctatgtgatatggacgcctacccttctgaagctttagtttctatatcaacagaacgaaatgggatacccattggaaaaccggtaaaaatcggcattgtatattgcattattctattcaacaagaatcctagttacaaattaattatgcacaagctaacacaactaaactaatattgcagacacctgttgcaaacacctatgtcgttccaagctccatggagaagttggtcatgtatttaaagcagagatataaaagcatacctttgtacatcacagagaacggtgggttactaggttccctaaaatctacaaattagatacaaaatatatgcctttgtgcataacaatgattcacttccatgcttatttacatatattacacttgtagtacactggtaccataaaaaatatctgtatggatctcttgatcaccctttttttatctttcaggttatgcccaaatagccaatattagcactacagcagaagaaataattaatgatattgaaagatcaacttacattcgtgactacctcacttacttgagctttgcaataaggttgttgcatgcctcaattatcttttcatgtaaactgctctccagccaggtaataataaaactttgctacttttgtgcaggaaaggagcagatgtgagaggttattttgtgtggtctttgatggataacttcgaatggatctctggttacaccgtaaagtatggtctttgtcatgtgaatttcaagtcactaaagcgaacaccaaaattgtctgctaaatggtatagcaagtttatcaagggctatgaacagatagagatggcctctgaagaattgcctaagcatatggtttcctagtacagaaatacagaattctcaaagtccttgtttctacattactc

SEQ ID NO: 30653 - DNA, 988 bp, Zea mays
  Clone ID: UC-ZMFLB73058A04_FLI
ggattatcggaaagtaacgatgggtcagagaggtgaggaaaagcaatatagctacgaagatattcttaggtgtatgaagaaagtcacaccaatggacttgaagcagactgttcaagtagataaagaccttgtgatccgtgcctattatgctggacatgttataggggctgccatgatttatgcaaaagttggggatgctgctatggtatacactggggattacaatatgacaccagatagacatcttggggccgcacagattgatcgtctgaagttggatgtattgataacagagtccacatatgctaaatctatacgtgactcaaagcctgcccgagagagggagtttttaaaagcggtacataaatgtgtttctggtggaggtaaagttctaattccaacgtttgctctgggaagagctcaggaactatgtatgttactggatgactattgggagaggatgggcttgaaagttcctatttatttttcagctggtttaaccattcaagctaatgtgtactacaaaatgttgattgggtggactagtcaaaagatcaaggacagccatacagtgcataatccatttgacttcaagcatgtttgccactttgaacgttccttcattaacaaccctggtccctgtgtactttttgcaacacctggtatgattactgggggattttcccttgaggcgtttaaaaaatgggcaccatcagagaagaatctggttacacttccaggatattgtgtttctggaaccattggtcataagttgatgtgtgggaaacctacaagggttgattacgaggacactcatattgatgtcagatgtcaggtcgattttcacgtcatttcatatcttgcaaaaaatgtacaactttaaataataatgacaagaacatggtcaaccagggggaagccatgtaaatcactagtgttttaaacactgttgaagtctggcttttaaattcgatccatatcaatcccc

SEQ ID NO: 30654 - DNA, 1383 bp, Zea mays
  Clone ID: UC-ZMFLB73058A12_FLI
ctcgccttactccctcacagaacccagtaaaatattgccagtcccgccgtcgagatggccccacgccgcctgctcgtcctcgccgtcgtcgccctcgcggccaccgccgccgcggccaactccggcttcgcggactcgaacccgatccgccccgtcaccgaccgcgcggcctccgcgctcgagtccacggtcttcgccgcgctcggccgcacccgcgacgcgctccgcttcgcacgcttcgctgtgaggtacggcaagagctacgagagcgcggcggaggtccacaagcggttcaggatcttctccgagagtctccagctcgtccgctccaccaatcggaaaggcctctcctaccgcctcggcatcaaccgcttcgcggacatgagctgggaggagttccgtgcgacccggctcggcgcagcccagaactgctccgccacgcttaccggcaaccaccggatgcgcgccgccgccgttgcgctgccggagacgaaagactggagggaggatgggattgtgagcccagtgaaaaaccagggccactgtggatcatgctggaccttcagcactactggtgcacttgaggctgcatatacccaggcaactggcaagcccatctctctctctgagcaacagcttattgactgtggttttgcattcaacaatttcggatgcaacggaggccttccatcccaggcctttgaatacatcaaatacaatggtggccttgacactgaggaatcttacccttaccaaggtgtcaatggaatctgcaagtttaagaatgagaatgttggagtcaaggttttggactcggttaacatcaccctgggtgctgaggatgaactgaaggatgctgttggtctggttcgcccagttagtgttgccttcgaggtgatcactggtttcaggctgtacaagagcggagtttacactagcgaccattgtggaactacaccgatggatgtgaaccacgctgttctggctgttggctacggtgtcgaagatggtgtaccctactggctcatcaagaactcatggggcgctgactggggtgatgagggttacttcaagatggaaatgggcaagaacatgtgcggtgttgctacgtgtgcatcctaccctattgtcgcatgaggcccttacgaagtgttacatggtctgtttggcatcaataatgcatgtttaacctgagcttggcgatgggttatacagaacggaaactctgtttgtgaatagaaaatcatgaagggaaggagttgaccggacccctgcttgtacgtctccccgactgtgtaggtagattgtcagttggggttccgaagtactctactcatacgtgtgtatgacagtttatttatgaaacaaaatacgcattgatcg

SEQ ID NO: 30655 - DNA, 981 bp, Zea mays
  Clone ID: UC-ZMFLB73058C05_FLI
gcagcacgcggtggggtacgtgaccggcgggcagttctacggcgccaaggcgagcctgaacgtgtggccggcgcaggtggcgtcgccggcggagttcagcctctcgcagatctgggtcatctccggcgccttcggcaacgacctcaacaccatcgaggccggctggcaggtcagccctcagctgtacggcgacaacagccccaggttcttcacctactggacagtaagagcagctccctcgatcatccctcgtcaccattttttccggccatcaatcaagtaaaaaaatggaaacgcaacgcaggacgacgcgtaccaggagacgggctgctacaacctccactgctcgggcttcgtgcagaccagcagccgcgtggccatcggcgccgccatctcgcccgtctcctcctacgccggccgccagttcgacgtcacgcttctcatctggaaggacccgcgccggggccactggtggctgcagctcggctccggcgcgctcgtcggctactggccctccgcgctcttcacgcacctcggctcgcgcgccgacatggtgcagttcgggggcgaggtcgtcaacgcgcgccccgccggcgcgccgcacacgcccacgcagatgggctccggccgcttccccgccgagggatacgcgcgcgccgcatacttccgaaacgtgcagctcgtcgactgggacaacaacctcgtaccggccgccgggctccgcctgctcgccgaccggccggggtgctatgacatcgccggcggcagcggcggcgcgtggggcacctacttctattacggtgggcccggcaggaatgcacggtgcccgtaactttactagtatattagctaggaacggaatcgaatgcatgggatgggtgttgtacttgtacgtgtgtttcgtacgtgcgcactcaagcacacattagcagaggctgattgctatatattactccaaatgagtctgctttcacttttttt

SEQ ID NO: 30656 - DNA, 585 bp, Zea mays
  Clone ID: UC-ZMFLB73058D02_FLI
ggtggccagagctttatcgagagtcaagtaaggaaaattgcagaattgagaaggttatgtgcagagaagggagtgaacccctggattgaggttgatggtggtgttggtccgaaaaatgcctacaaggttattgaagctggggcgaatgccatcgttgctggctctgcagttttcggggctccagactacgctgaagctatcaaaggaatcaagaccagccaaaggcctgcagctgtacacgcataaggaactggacgtgtgatcgtgctctgttcaggtttagcagtgttgggattcgtatagatagatgtgtcttgttttcgagccatacgttatactggagatgaaaggagacggaggaaatatttctctacgtgggtgaatcaatcatgtggacggtaatcacatgacgacaaagcatatggacgagcgctggctcacgagacagagtaatcaacgggagaggcttctagacagctctgcatgtccattccctctataaacaggagagcagttcagtctccattgtaaaggccccccgatatagaagaaagaaataaagagctctctatttgtctctgtttc

SEQ ID NO: 30657 - DNA, 1752 bp, Zea mays
  Clone ID: UC-ZMFLB73058D05_FLI
gtctaaaggagtttctgaaaaatttactcaagcttcagataatcagaagttggaagcaaaatctcgccttcttgacctggtcaataaaggtgtagaggcatcgctagtgcagcttcttgagacaggcttgttgcatgctgatcctcatcctggtaacttgcgttatactcctgaaggccgtgttgggtttctagattttggtttgctgtgcatgatggagaggaaacatcagcgtgctatgcttgcaagcatagtgcacatagtaaatggtgattgggcttccgtcgtttatgatttgactgaaatggatgtagttccaccaaaaaccaatctacgtcgtgtgacaatggatttagaggatgcattaggcgaggtaacctttgaagatggcattccagaaatcaagtttagtaaggtgcttggaaaaatttggtctgtggcatttaaatatcacttccgtatgccaccttactacacacttgttctccggtcacttgcctctttggaaggactagccgtggcagcagatgggactttcaaaacatttcaagcagcatacccatatgttgttcggaagcttctgtccgaaaattcacttgaaacaagaagactcttgaatcaggcaatttttaacaaaaggaaagagttccaatggcagaagattgacgcgtttctaaaattggcttcagcaaggaccaacttcaagtataacagtgaagttttgccagagcctgacatgaagtccatgaatgtggctagccttgtggagatcagtgatgcatattcacttgaccgtgctatagctacaccagagagagcattgcatactgcaaacctgtgtgtgaggcttttattatctaaggagagcattgtgattaggagacttattatgacagcgaatgcaaaatctcttgcccgtgatctgatctccagagatgctttgatgttccgggtgctccttagtaaggttattgcggatgttgtctaccaatggatgttgagtgccacaggcttgaaacgagttatggagaccaagatccagacgcccatgaccacaggaaagaacgagggacatctggtgctggctgaagaaccatcgaccctgatggtactccaggcggcagtaaaagaccgaaggattcagctcatgttcaccaagtttgtgagggagttgagagaggagcccgtcttgatgattagggtgagctggaacgtgttcctcatctcggtctcatctgccgctgtaggcctgcaccgtttcttggtgttcttcttgaaggaggatggtgccaggttcttggatgacaaggtcaagaaaatgaagatttggctgatggagttctcgaagcggacggctaatctggagattcaaggaattctgtgaatgttggtggcttttggttgaaggatttaatagctgcttcgcactctggtttttggagttactttctgcatcgagtgaatccagttcctgtttacgctggctgtctgagcttgcttggctgctggtgttcccagagatttataaaaacagggttttcctccgtcattccgccgcagctagtatataatagatggttcttggttgttcatgtactgtgtagctgtatataatagaaacattgcaggatcagtgagtaattctgtggccgagtaaagtgcagtggtggaaggcatgtgttacctactggatataaatatgatgatgtgaatgttcagttgaaaaacttgggtgacatgaactgatgaact

SEQ ID NO: 30658 - DNA, 3168 bp, Zea mays
  Clone ID: UC-ZMFLB73059C06_FLI
gttccgaacttcactgctgctgatgcactaaggctcactggtgttgggagaaacgagtttattgatattatgaacaaatgcagatcaaagaaactaatgtggaaactgaataaatcgattgcaaaagaaatgctgcctacacagcctgttgacttcccagttgagccttggtggggggtttgtcttgttaactttacactggaagagttcaagaaactttcagaagaagagacaacaacaatagacaaaatatgtaaagaggaagccaattcatatgttctttttgatccgaaggttatagatggactttataaaagagggctagtgtacttcgatgtgcctgtttacccagatgaccgcttcaaagtttctaggcttgaaaattttgtttccaataaggatcaatcatatgaagacccaattgaagagctgttgtatgctgtatttgttgtttcaagtgctaatgctactgttgctgaactggctgcaactttacaagctgacctttatcaactccaggcagctgcatcatttgcttgccgattgggctgggctgcgaaagtcatggatgcgaactctgttcttaatgaagaacgtttacctgcgtttcctagtagtattcttagtgatgatgaagaaggttcaaatacaagtatccactcagagaagtctggtcaacaattgaatggcatggattctgatggacccaggaaaatttctggaactgctcatgtgggctttgttgttgatgccaatgttacatcatacttgatgatgggctcactatcgccagggttaaaatctcatgctgtcacactctatgaggctggaaaactgggtgcttcttgcattgcagaactatgtagtgatctggctagcttagagggaaagaaatttgagggtgtgctagaggagtttgcaagtcatgcattcagtttgcgatgcttcttggagtgtttacagtctggcggagtttccgcaaatgaaattactgataatactagtgaagcaaagactccaagaagctctgttcatgatattgacaatgctgctgaccatttgtccaaggtgaacattgagggtgttgctgacaataaccataatgaattttccgagcataaccagtgcgtaggtgagttagataatagtgatgggaatatagtatcaccagctatggttatcttggaaagtgtagaaagcatggtaaaaaatgatgacaagaatgattcaactgtgcagctaaatgtttcaactgaatctcgagttttgaagaacaaaaggaagtacaaagttgatattcttcgatgtgagagcttagcctcacttgccccggctacattagaacggctattccttcgggactatgacattattgtgtcgatggttcctcttccttcttcatcagttcttccaggcccttcaggcccaattcattttggaccaccatcttattcctccatgacaccttggatgaagctagtactgtatacagcaggacattgtggaccagtatctgctgtgttcatgaaagggctacgttttagattgctgcctgaaccattagctggttgtgagaaggcactgctatggtcttgggatggctctgtggtgggtggattagggggaaagtttgaagggaacttactgaagggcaacttattgttacactgcttgaattcgatgctgaaacaatctgctgtactggtgcaaccacttagtatacatgatcttgatacgtcaggaaaccttgtcactgtggatatccctttacccctaaaaaatgatgaccagtcaattgaatctgtggtagcccaaactaatttgccaaaggaacagatattagatttgacttctgtattgaaagacctatctagtaaatttgagctgagcacacttggctacctccgtctactaagacttcacaggatagatgaaccagataaatttgacccagaaaatgtaagctacaagtgggtgcctctgagcttggagttcggggttcctttattcagtccaaagttgtgcgagaagatttgtgaaagggtggttgcatcccatatgcttcagaaagatgatctcattgagcattctgatgtgatgcaaaatgtaagaaggcagctgagagaactttgcagtgaatatcaagcaaccggtccagtagctaagttatttaacaagcgtggaagctcaagggactcaccacgtgccttaatcaatagtattagtggcagatggaatttgtctaatgacccttcaacacctagtggaggagccccaagtgaacacgagaggctgaaatttgttggaaggcagcgaccccgaacagaagttgtgagctttgatgggagcactgtcaggtcatatgcacttgatcctgagcacaatgaagaacaatcatccatacaagacgtaaaaccagatccagaagaaacagacagcaaggatgtagtcttaccaggagtaaatcttatatttgatggagccgaattacacccctttgatattgctgcatgccttcaagcacgtcagcctctgtggcttatatctgaggcatcaactgcttcatcaacattactatgaggggttaattatgctccaatttctacaagttggccgatgaaatttcattagttggggttattcaaaagtattgtctgattcttagaagaacacaatagcgggctgatgctttgttcactataactgagttctttcacaggaattaatcagatgctcctggttaactgggatgcgcgttttgaagcttgtttactgcatcgtatgtttcttggccaatatcttactctacttttcacttgtgtgaaatttccaagtgcgtgctcctacttcaatattgtgaatctttgaggctcgttcagttgagaggctacaggctcgttcagggtgtcaattttacgtttacacatgtaggtctagtttggatattttgggattagagtgttttggagggattggagagggtgtaaatccctaatagatcaaatactctctcaatacatctcaatccattccaatcccactcattactagagtacctaaattaagccgtagtagtttcaatgtagttttggcataaatagcacagctttcttgtttgcggtgaccccgttcccgtggttagtataaaagtgttttcgttctttcttc

SEQ ID NO: 30659 - DNA, 2124 bp, Zea mays
  Clone ID: UC-ZMFLB73059E05_FLI
atgaggacggcggcggtatcatgatcgggccgcctcggccaccgccgccctccgctcgcggcgagggggacgacggcgacggcatgattgggccgcctaggccgccgccagcggatgatgaagacgtcgatgatgatgaggacgacgacgaggaggagatggaggatgatggggagggtggattcaatcggatccctcttagcaacgaaattgttctgcgggggcacaataaggttgtctctgcccttgctgttgaccatacaggatccagagtgctctctggtagctatgattatacagtgcgtatgtacgacttccagggtatgaattcaaagcttcagtcattcagacaattggaaccatttgagggccatcaagttcgtagcctaagttggagtccaacgtctgatcgattcttatgtgttactggttcagctcaggccaagatttacgacagggatggacttacactaggcgagtttgttaagggtgatatgtatattcgtgatctgaagaatacaaaaggtcacatctctgggcttacaggtggtgagtggaatccaaagtcaaaagaaaccattttgacatcatctgaagatggctccatgcgtctctgggatgtgtctgattttacaagtcagaagcaggtcatcaaacctaagctggtacgaccaatgcggattcctgttacatcatgtgcatgggaccatgaagggaaacgaattgtgggtggcataggggatggttctatacaggtctggaccataaaagctggatggggtagcagaccagatatccacgttgagaaaacacacacagaggatattactggggttaagttctcaacagatggacagagccttctgtcaagaagtatggatagtactcttaagatatgggatttgagaagaatgaaaactcctttgaaagtatttgaagatctgccaaatcactacgctgagacaaatgcagcatttagctcagatgagcagcttatttttacaggaacatctattgaaaaagatggtgacaatgggggattactttgtttctttgatagaaagaaacttgagcttgtatcaagggtgggaatttcagcacattacagtgtgataaggtgcctctggcatccaagaatcaaccaggtgtttgcaacagttggagacaagaaagaaggtgggactcatatcctgtacgatccttctattagtcaaaggggagctcttgtatgtgttggacgagcaccaaggaaaaagtctgttgatgattttgaggtgcaacctgtcatacacaatccacatgcattgccacttttcagagatcaaccaagtcgtaagcgtcaaagagagaagatactgaaagacccactcaaatcccacaaaccagaagcacctgttaatggtccaggttttggtggaagagttggtactacaaaaggcagtttgctgacacagtatctcttgaaggaaggtggtttaattaaggagacctggatggatgaagatccaagagaagccattttgaagtatgctgatgctgcggagaaagacccaaagtttattgcgccagcttattcccaaacccagccgaaacctgtttttgcggagtctgattcagacaatgaagagaaataaccatgcgcctggttacctaagctagcatgcacctgcattctgttttctgacagatgtctcttgatgagcttgttgcacatgccctgtaacctgcttttcaacagtggagaaacaaaagagcatcttcaagggtcttgatgataggagctctgccccttcattacagatggatatgattagtatctacgacacttcagcactagagctctatgatttgttggatgttgtacccactgtatgtacttagtcctgaaacagtggccaatctatattatactctgttctttcttttttatttgtcgcggtctagtttaaaaatgaactagcgggcgacaaatattcaagaacggaggtagtatatgaggtagtatatgacttagacgtaactttagtgcaccgaatgtagtcaacctttgtttgctttggagaatgaggatttgttgttctagtatcagtctctttgatgttcctaatgggctagttggaagat

SEQ ID NO: 30660 - DNA, 1473 bp, Zea mays
  Clone ID: UC-ZMFLB73059F02_FLI
tagggttccgaccgcgccgagcgcggggaccgcattccgggaacgggtgatggtgacctgccgcaagatggcacgcgtcgacgtcgccgagctgaagcagcgcctggtgaagcggctgggccgggagcgggcggccaagtacttcgcacacctcaccaggctgctgaatctgaagctcaccaaggtagagttcgacaggctctgcttcgccaccatcggcaaggacaacatcgcgctgcacaacgcgctcattagggggatcataggcaatgctctgtcgggagtgcctccgcccagccggcaggcggtgacggggcagtcgggcaccaccaccgccccgagcgggcagtgcgtgggcgtcgcgctgcccgtggtggggaatgtgggggcagtggtcgattcgggtgatggtgagctggcgagggagcttggggcgccggttgggaaggtggtgtccgtggaagatggggaggaggtggagcagatcaggtctgttccgtgtgtccagagccggagcccgataacacagcccttggggatttcagtcgctgggggcagtggtacgagggtaaggaggaggctggatgatcctttggtgtcatgctacgattgtggacatttgctggatacgggctctctgtgcgaggatttgcatcggcgactgcacagtaccggcactggagtgacggtgcaagctgtcgatgctttgaaccgtggattagatgagttgttgcgaaggttgattaaaccgtgcatggatttgtcgagggtaagagccagcagtagaagaattagcaaagtcaatgaaaaggttgctggtagagtgaattcattgcaacaactaaatcagggtcagcgtacaacgatgcaagattttgcagttgctgtgcaatctgatccacatttgcttggtccaaattggcccacacaaatcgagaaggtacaggcaatgtcatttggaggagaatgatacatagtggcctgttatagctgatgaacatgaacttctctaaaggagatgctgtttgctggcattgaagtaaatgaaacggcagaccaacaccatgactacaaaatctgagtattgcgttgctcacaagcaggagataccaaggcccaccaggtgaacaaagggagatgcaatggacagtgtagcataatttcttccttgggaatctagcctgttgtcaataaatcgaagaatcgatagggttggctgatgttcaggccaagctaagaaactcgtcgacaaacataccctcagctcttggctcaaaaaacatgttctgatagtacttttagagatttgttgtgacgttgtaatagagcattttccccttattagatttaaatggaatcatttttctcagtgatcataaatgatgccttcaatggctcattgctcctgtacattgtattcagattatggcaatgatcacttgcaattaagataaaagtttaaccctgttggat

SEQ ID NO: 30661 - DNA, 880 bp, Zea mays
  Clone ID: UC-ZMFLB73059F04_FLI
gctgtggatgcgaaggaaggtgctggagctgtcaatgaggacgatggagagttgggggcggaatggagtgcgggtggtacgaggagacggcggcggaggcagatggcgaggcgatcggctctgcttgcgaagcaggtgattagtgtgacctcggcgcggagcctcgggttcgtgtcgcagctctggatcgacaccgcctcggaggcactcgtgttggggtcgctcatcgacgacaagaagaaacttgatgactgccagttcgacctctagaaacagtcctacgtggccgcatgtgccgctatgtacgacaagctccggcgcagccgccgtttggacgcggtgcagagcggttgctccgcgctgtccatcgtcaagcagggggacctcatggtcgtcgccaacgtcggtgactctcgggttgttctgggcatcgcattcgacgacgccatcacgtcgtccagctcatcgtccacctgaagcccaacctgccacaggagtagcgcatctggtggtgcaacggccaggggtactaccttgctgatgagcccagggtgcacttgttttacagcccaaccaagagtcatcagtactcggtatgtcgcgcgcgttcgacgactactatatcgaggaccgtggcgtcatcttgacacaggaggtgacgcagaggaggactgacaacaatgacaagttcgtcatcctcgccattgttggggtcgcttttgtgccgacttgcctttaattctcttcgcaaacacacacacttgcctttttgtttaagcaaaagcgtatggtggtacgtgtctgatgactaacgataacgatgtacgggggaatttcttcctgcatgtgtggaacgtgctctccaatgacgagaccatgc

SEQ ID NO: 30662 - DNA, 2581 bp, Zea mays
  Clone ID: UC-ZMFLB73059H03_FLI
aagctgcgcgtgctgcgcaccgacaacggcggcgaattcacggcggctgagttcgcgtcgtactgcgcggatgagggcgttcagcgccactactccgcgccgtacagcccgcagcagaacggcgtcgtcgagcggcgcaaccagacggttgtggggatggctcgggctctcctcaagcagagaggaatgccagctgtcttctggggagaggcggtggtgacagcggtttacatcctcaaccgctcgcccaccaaggctctcaatgggatgacaccgtacgaggcttggcatgggcgcaagccggcggtctctcacctacgggtcttcggctgcctcgcgttcaccaaggagcttggccacatcagcaagctcgacgataggagcaccccgggggtgttcattggctacgcggagggctcgaaggcctaccgcatccttgacccaagaacacagcgtgtgcgcacggcgcgcgacgtagtgttcgacgaagggcgaggatgggcgtgggacaaggcggtggacgacggcacgactccgacgtacgacttcaccatcgagtacgtccactttgagggagctgggggagtaggcaactcttctccgagccggtctaccccagcccccaagtctccaccgactccagcgccacactctccagctcctgctacaacaagctcttcaccaccacgcactccagccacgactccggctacagcgagctcttcgccaccacgtactccagcaccgacggtaccctctccgggaacgtcctctccgacaccagctcgtgtcgagcacgacccagtggagctcgtgacccctctgtcccgcgacgaggagcgcgtcgacgcgtgctacgacggcgagccgttgcagtatcgaagggtggagggccttctcatcgacccgtcggtgccaggccctgcatctcgcattctggcaggagagttgcatcttgcatgcgacgatggtgagcctcggtctttcgcggaggccgagaaacatgcggcttggcgtgccgcgatgcagtcggagatggacgcggttgagacgaaccgcacctgggagctcgctgatctccctcatggtcatcgcgcgatcacccttaagtgggtgttcaaactgaagagggatgaagccggcaccatcgtcaagcataaggctcgcttggtggcacgcggtttcttgcagcaggaggggatcgacttcgacgatgccttcgcccctgtagcacggatggaatccgtgcgactcctcgcgctggctgccctgaagggctggcatgttcatcacatggatgtcaagtcagtgtttcttaacggcgacttaaaggaggaggtctacgtacaccagccgccaggttttgcgatccctggcaaggagggcaaggtgttgcgcctgcgcaaggctctctacggcttgcgacaggcaccaagggcgtggaatgccaagctggattccacgctcaagaggatgggcttcatgccaagcccgcacgaggcggccatctatcgacggggcaatggagaaaatgccctgctggtgggtgtctacgtcgacgacttggtgatcaccggcgccaaggatgcagaggtggcagcgttcaaggaagagatgaaggccaccttccaaatgagtgacctggggcatctctccttctacctggggattgaggtgcaccagggagactccgggatcacacttcgccagaccgcctatgtccggcgcattgttgagctggctgggctcaccgactgcaacccagctctcactccgatggaggagaggctgaagctgagtcgcgatagcacgacggaggaggtggatgctactcagtaccggcgtcttgtggggagccttcgctacctcgtccacacacggcctgacttggcatactccgtcggctacgttagtcggttcttgcagcgaccgacgacggagcatgagcaggctgtgaagaggatcatccgctatgttgcggggactctcgaccacggtctctactacccgaggtgccctggggaggcacaccttgtcgggtacagcgacagcgaccacgccggcgacatcgacactagcaagagcacaagcgggatcctcttcttcctcggcaagtgcctcattagctggcagtcggtcaagcagcaggtggtggccatgtccagctgcgaggccgagtacatagtggcgtccactgcttcgactcaggctctctggctggctcgactgctcggtgatctcctcgggagagacactggagcggtggaactcagggtggacagccagtccgctctggcattggccaagaacctcgtgttccatgaacggagcaagcacatccggctgagataccacttcatccgagactgcttggcagaagggagcatcaaggcgcgctacatcaacaccaaggatcagcttgcagacctgctcaccaagccccttgggaagatcaagtttgttgagctttgctccaggtccgggatggcccaactttctcacaagacgacgcccaagacttagggggagaatgatggaataagtcttgagcatctagaggacaacctgcttttgactgtcc

SEQ ID NO: 30663 - DNA, 2843 bp, Zea mays
  Clone ID: UC-ZMFLB73060C09_FLI
caccggttcgctgccggcagcgctccccaacctcaccgacctcgtccacgtccacctcggcggcaatttcttctccggcagcatcccgaggtcctacggccagtggagccgcatccggtacctggccctctccgggaacgagctcaccggcgagataccggaggagctcggcaacctgacgacattgagggagctgtacctcggctactacaacaacttcaccggcggtataccacccgagctcgggaggctgcgggcgctcgtccggctcgacatggctaactgcggcatctccgaggagatcccgccggaactggcgaacttgacgtcgctcgacactctgtttcttcagatcaacgctctgtctgggaggctcccgacggagataggcgcaatggggtcgctcaaatcgctcgacctgtcgaacaacttgttcgtcggggagatccccgcgagcttcgcgtcgctcaagaacctgaccctgctgaacctcttccggaatcgcctcgccggtgagattcccgagttcatcggcgacttgccgaacctcgaggttctgcagctgtgggagaacaacttcacaggcgggatacccacgaacctcggcgtggcggcgaccaggctgaggatcgttgacgtgagcacgaacaagctcaccggcgttctgcgatccgagctgtgcgccggccagcggctggagacgttcatcgctctgggaaattcgctattcggcgacgttccggacgggctcgcggggtgcccgtcgctgacgaggattcggctgggagagaattttctcaacgggacgatacctgcaaagctgttcacgttgccgaacctgacgcaggtagagctgcacaacaatttgctctccggcgagctccggctggacggagggaaggtgtcttcttcgatcggagagctgagtctgttcaacaaccgactgaccggccaggtgcctaccgggatcggtggactcctgggattacagaagctgttgctcgccgggaacatgttgtccggcgagctcccgccggaggtcgggaagcttcagcagctctcgaaggcggacctttctgggaacctgctctccggagcggtacccccggcgatcggcagatgccgtctgctcaccttcctcgatatctcgagcaacaagctctccggcagcatcccgccggagctcggcagcctccgcatcctcaactacctcaacgtttcccacaacgcgctccaaggggagattccgcctgccatcgccggaatgcagagcctgacagccgtggacttctcgtacaacaacctctcgggcgaggtcccgtccaccggtcagtttggctacttcaacgccacttccttcgcaggcaacgctggcctctgcggggcgttcctctccccgtgccgctccgtgggcgtggcgacttcggccctgggctccctctcttcgacgtccaaactcctgctcgtgctcggcctcctcgcgctgtccgtcgtcttcgcgggcgcggccgtgctgaaggcgcggtcgctgaagcggtccgccgaggcgcgcgcgtggcggctgacggcgttccagcggctggacttcgccgtggacgacgtgctggactgcctcaaggaggagaacgtgatcggcaagggcgggtccgggatcgtgtacaagggcgcgatgccgggcggcgccgtggtggccgtgaagcggctgccggccatcgggcgcgcgggcgcggcgcacgacgactacgggttctcggcggagatacagacgctggggcgcatcaggcaccgccacatcgtgcggctgctcggcttcgcggccaaccgggagaccaacctgctggtgtacgagtacatgccgaacggcagcctcggcgaggtgctccacggcaagaagggcggccacctgcagtgggcgacgcggttcaagatcgccgtggaggcggccaagggcctctgctacctgcaccacgactgctcgccgccgatcctgcaccgcgacgtcaagtccaacaacatcctcctcgacgccgacttcgaggcccacgtcgcggacttcggcctcgccaagttcctccggggcaacgctggcggttcggagtgcatgtccgctatcgccggctcgtacggctacattgctcctgagtacgcctacacgctgaaggtggacgagaagagcgacgtgtacagcttcggcgtggtgctgctggagctcatcgccgggcgcaagcccgtcggggagttcggcgacggcgtggacatcgtgcactgggtgcggacggtgaccgggtcgagcaaggagggcgtgatgaagatcgccgacccacggctctcgacggtgcctctgtacgagctaacccacgtcttctacgtcgccatgctgtgcgtggcggagcagagcgtggagcggcccacgatgcgcgaggtcgtgcagatactggccgacatgcccggctcgacatccacgacgtccatagacgtgccccttgtcatcgagccgaaggaggaggacgggggcccggagaagaagcagcagcagcagcaggaagggccacacgactcgccgccgcagcaggatcttcttagtatctagaagcgcagttgcgagagttggtcgtactgatggtacttggtagcatccctgcctgccctgttctttgagtgaagcgttggaacgtggcgtgtgtgtagtgtaactgtgtatgcaggcggtgatttatatgcatgcttcctttaagtagattgccagtagtatttgcgtatggtgagctggtcggtccttaatgtctgtccccatgtacaaaaccagatcaagatgcttgggcttccggttgagtttacgcctt

SEQ ID NO: 30664 - DNA, 1276 bp, Zea mays
  Clone ID: UC-ZMFLB73060C10_FLI
gttccagaagaagacgaagacgaaggagagcggcggcggcggcggcgagcagcaggcgcaaacgccgggcctgaagctgctggtggaggaggcgaagcgcgagcacggcgtcaggtacgtgtacgtgtggcacgccatggcggggtactggggcggcgtgaagccggcggcggaggggatggagcactacgagagcgcgctggcgtacccggtgcagtcgccgggtgtgatgggcaaccagccggacatcgtcatggactcgctgtccgtgctgggcctggggctggtgcacccgcgcagggcgctgagcttctacgacgagctgcactcgtacctcgcctcctgcggcgtcgacggcgtcaaggtggacgtgcagaacatcatctagacgctcggcgccgggcacggcggccgggtcgcgctcacccgcgcctaccaccgcgcgctcgaggactccgtggcgcgcaacttccccgacaacggctgcatctcctgcatgtgccacaacaccgacatgctctacagcgcgcgccagaccgccgtcgtgcgcgcctccgacgacttctacccgcgggacccggcgtcgcacaccgtccacgtctcctccgtcgcctacaacaccctcttcctcggcgagttcatgcagcccgactgggacatgttccatagcctgcacccggcggcggactaccacggcgcggcgagggcaatcggcggctgcccgatatacgtcagcgacaagccaggcaaccacaacttcgagctgctcaagaagctggtgctccccgacggctccgtgctccgcgcgcagctcccgggccgccccacccgcgactgcctcttcgccgacccggcgcgcgacggcacgagcctgctcaagatctggaacgtgaacaagtgcacgggcgtggtgggcgtgttcaactgccagggcgccgggtggtgccgcgtcaccaagaagacccgggtgcacgacgcggcgccggggacgctgacggggtcggtccgcgccgacgacgtggacgtgatcgccggcctcgccggggacggctggggcggcgaggccgtcgtgtacgcctacaggtcaggggagctagtcaggctgccccagggcgccacactgccggtgacgctcaaggtgctggagttcgaggtgttccacgtctcccccgtcagggcggtcgcgccgggcgtgtcgttcgcgcccatcggcctgctcgacatgttcaactccggcggggcggtggagcagtgcgaggtccgtggcggcgcgaac

SEQ ID NO: 30665 - DNA, 1817 bp, Zea mays
  Clone ID: UC-ZMFLB73061A02_FLI
gcagcacaagcacagcagcagcagcagcagcagcaggcaagaagaatccaaagcggaagggtctctccccccatctctgttccaccaggtgcggcgggcggcgatgggggcgcggaggcggctgcaggcagacgcgccgccggggcatcgccacaggcagggcgcgccggcgccggactggagcgccgggtacctcaacgggtggctgtcgcagccgacgcccgtcttcggcctccgcctctgggtgctcatcggcatcgccgtcggcgccgccatcgtgctcgtgctcctcctcatcttcgtctgcctctcccgccgccgccgccgccgccgcctcgccgccaacccctactaccccgccgacaccaagctgctcaagaagcacctgcagcagcaggccacgcccacgcccacgcccaccaaggacatccaggagatcgtccgccgccagcaggagcccgcggtgcagctcgccaaggccgtgccgcagccgcagccgcagccgcagactcctccgccgccgccgcctccgcagcacaggccaccggcgcggaagacgcccggcagcggcgtgtcggccacgactagcggcgggagcgagcgggacggcgccacgcctaggagcaccggcagcggcgcggggctgccggaggtctcgcacctcgggtggggccactggttcacgctccgcgagctggaggaggccaccggcgggctcgccgaggagaatgtgatcggcgagggcgggtacgggatcgtgtacaagggcaccttgcacgactccactttggtcgccgtcaagaacctgctcaataatagggggcaggccgagaaggagttcaaggtggaggtggaagcaatcggtcgtgttcggcacaaaaatctcgtcaggttgctcggctactgcgtagagggtgcttacaggatgctcgtgtatgagtatgtggacaatggtaatcttgaccagtggcttcatggtgatgttggcgaagtgagcccactgacatgggacatcaggatgaacattatgcttgccacagctaaagggctggcctacctccacgaggggctggaaccgaaggtggtccaccgcgacatcaaggctagcaacatccttcttgaccagcagtggaacgccaaagtatcggatttcgggctcgcaaagctgttgtgctcggagagaagctacgttacgacccgtgtcatgggaaccttcggttacgtggcgcctgagtacgccagcaccggcatgctgaacgagaggagcgatgtgtatagcttcggcgtgctgataatggagatcatcaccggcagatgtcctgtggattacacaagggcggctggagaggtgcagctggtggagtggctcaagaacatggtggccgagaggaaagcggaggaggtagtggacagtaagatggccgagaggcctcctcccaagacgctgaagcgggcgctcctggtggcgctccgctgcgtggaccctgacgcgaacaagcggcctaagatggggcatgtgatccacatgctcgaaatggacgatctccagttccgagacgataagaggcccggggccgggagagatggtcgtcgtccccagggtccggataggtacagctccaagctaggtggaggaagggagcctcagcaagcgcgagcaccagcgtcggtacagatgagatgattgtcattagagagtagcgatattaaccatgttatttttttcccgtcagtaaatacattctttcccaactcgttccatcgattctcaatggtcttcgattgtattatatatgtggagcaaccatcattctgtg

SEQ ID NO: 30666 - DNA, 667 bp, Zea mays
  Clone ID: UC-ZMFLB73061A05_FLI
gaagaagtcagcttggcggagtgggcgttgcactgccagaagaagggcatccttgaccagattgtcgacccctacctgaagggaaagatagccccacagtgcttcaagaagttcgccgagacagccgagaagtgtgtttctgatcagggaatcgaccgcccttcgatgggtgatgtgctctggaacctggagttcgcccttcagatgcaggaaggcgcagaagagagcggaagccttggctgcgggatgtcagacgagggcgccccattgatggtcgggaagaaggacccgaacgacccatcgatcgagtcaagcaccaccaccacaaccaccacttctataagcatgggcgaccaaagcgtcgcgagtatagactcggatgggctgacgcctagcgccgtcttctcgcagatcatgaaccccaaggggcggtgaggtaaagctggccccattcgttaccttgcaggcgtaatttattcattcagaataaatttttttcttcaatgttctctcaagttaaggcttaagaaccagaagtgtgaggattgtttcgtactagatattctgccttgccttgtactacttccttctccgagtattgtaatgactatacaatctgttggcttgtattgtaccgctgctattgacccagccagtattttactgc

SEQ ID NO: 30667 - DNA, 1675 bp, Zea mays
  Clone ID: UC-ZMFLB73061D06_FLI
aggaggggagggagagggcgaagagtagggggaaccaaatcttgaagggtaaacggagagttctttcgtggaggaggaagggggggacagcaggaggagggtagaggtagctcaatagatctactgctctcgggggagttaatgcaaagctgagttgctgcacgttggctttcttcagagatggcttcagctggtgtagccccatctgggtacaaaaacagcagcagcactagcattggtgccgagaagttgcaagatcagatgaacgagctaaagattagagatgataaggaagttgaagcaaccataattaatgggaaagggactgaaactgggcacataattgtcaccactactggtggcaagaatggtcaaccaaaacagacagtgagctacatggctgagcgcattgtaggtcaaggttcttttgggatcgtcttccaggctaagtgtttggagacgggtgagactgttgccataaagaaggttcttcaggataagcgttacaagaaccgcgagttgcagaccatgcgccttcttgaccaccctaatgttgttgctttgaagcattgcttcttttcaactaccgagaaggatgagctttatctgaacttggtccttgagtatgtgccggagacagttcatcgagttgtgaagcatcacaacaagatgaaccaacgcatgccacttatttatgtgaagctgtatatgtaccagatatgtagggcattggcttacattcatggcactattggtgtctgccacagagatattaagccacaaaaccttctggtgaacccacacacccaccagcttaaactatgtgactttggcagtgcaaaagttctggtcaagggggaaccaaacatatcgtacatctgctcccgatactatagggctccagagctcatatttggtgccactgagtataccacagcgattgacatttggtctgctggatgtgttcttgctgagcttatgctagggcagcctttgtttccgggtgaaagtggtgtggaccaacttgttgaaatcatcaaggtcctcggtacgccaacaagggaagaaattaaatgcatgaacccaaattacacagagtttaagttcccacaaatcaaagcacacccatggcacaaggtattccacaaaaggatgccgccagaagctgttgatctggtctctcggctactccagtactccccaaatctgagatgcactgctatggaggcacttgttcacccattctttgatgagcttcgagatcctaatactcgccttccaaatggtcgctttttgccaccactattcaatttcaagcctcacgaacttaaaggagtcccatcagacattgtcgcgaaattgattccagaacatgcaaagaagcaatgctcctatgttggattgtgaaatgaccgcgccttgagactggaacctgtggttgcaattgtgaatttcccctgggatgtttgacgatctgaggcatgcgagcctgttgttgaagatgcaaggttacgtacttgtacgacaatgtgacctgtgtagctgagtagtctatgtcgcagtgacatgtaacggcaccccccttcctactaactgacgcttactcgagattgccatagttgatcttgtaatttgttatagagcagtatgaatgtatttatggtagcttgaatct

SEQ ID NO: 30668 - DNA, 2163 bp, Zea mays
  Clone ID: UC-ZMFLB73061F01_FLI
gttttttgctgcaaactgaaataattcatctgtgcttgcgaaccatggagatgggtagtgagctatccaaaactgcatagaagcaggagctcgcacggcagttggatctcatcgccaggcaggtggaagtgtggttccagaacacacatgttcagataacacacatgttcatgcttatgctgaccccacacaggttcatatcgtcttctgcgtgtatgtagttgtttcttcttcaattctctttgtggggaaaacgttaatgtaagttatatttttactttttgcacctctcactattgtttctacatctttctttcttgaaaactcgtgaatctgaattgtaatgggatttccttccaccaatctacccatcatgcagtgggattttcccagcaatcagcttgataggcgacatcgtcattgtgggggtgagtgagtctaccgctattattcagtctgagtccactaaaccagaattccacaggatatgattgtacctatatttcctgaaaagacaaatgaaacaaacatcaaaagcaagtcactgcctattatttttgacctcctaatcttctacttcattggatttgcattgttctggctggaggcttttctgagcatgtgggtcattcaggtgaagttactgcctaccgcttcactattcatccgtcttgatactttcagttggttgtgaactataagctttgcgtcccgcggcgtggaaggaaatccacattacaatggtagtggcattttatagatttatagattggcataccactattcaatggtagtggtgaattatctagaagcaacaaagcaacagatttaaaatgccagttatagagttaggcttagttttagttaaaatattagtggtgaattatctaggcatacatccagtccacaccctcaacataccgagttaggctcagttttagttaaacaacgtcttggtttcttgtgcctactgatggcttttcttaatattatatcaatgacatcttaggttttggaaggtggtgcagttgtcaggactcttagagatcatagtattccttctaatggggatatcaatgaaagtaaagtttcttatttgttattattatattcttgttggtgcaacctgaaaatgaaaagccaattactgaaagcggagatgaaatctcttatgaaggagcaaaggcaaaaagtccaatatatttattatcgggactacgaaggagatcaacgtaagttcagtttggtccattttatctattttcctttcttatggtatggagtcaacaaatggaattaaatagagcccatgctaagtttggaccaagtcatcacgagagaaaggaatctattggagcacctataaaattggatgtggaagctcatgctcatattcagaagcataggtatgccaatctataaaattggatgtggaagctcatgctcacattcagaagcatagcgtaatcttacatattcagaaccaaaggctgatgaactggcagcatcagaaatggcagttgcatatagctcctcgaattgggtattattagttgagggatgacatccatctactgctgattccaagaacggaagcatttatctgatgtcctgttaagtgtgtgcaaggtcattggatgactgcattccatttggcttatcgagtaagcaatccccatttaacttttcaaacttgtcatataatacatcccagcctgaggtctgtgccttcaagttggttttattttgcacaaaatcggatgtcattccatttggcttattgagagccctgaagcaagattctggtatttcaacttctggaccaatcagctcagtctcttgttcgtgagcaaaataaccttcagttggcacatcttccagcactacaagattatcagaatatgcatactcatggaatatagcttcaatcctttgccttttctaacaagttgggttaacacttgagatatcatcatttaactgggaagggccatcgtctaaccacttataactgccattttcaggataatgcatttgcttataccctaacttgtaatcaatactggcaacattgtcatctgggcggcatgaattagtgatccttccagagaaacgaactatgcaaaacaaatgtcatattaataatctagaaacatgtttgag

SEQ ID NO: 30669 - DNA, 721 bp, Zea mays
  Clone ID: UC-ZMFLB73061F11_FLI
tcacatatagtgattgtaagagttgggaatttggaaatactgtctcgcagaataataagtacacatattctttgtaagcagtttggaaaatagcttgggatcgtgatagttgattttgtgcttcattggaggattcaacttttttatgtgttgcacatgtctgcagtgccttgttgactttgtttatttcggtaataagagccaatgctgataagatttgaccaggtctgtcccatgaatcatgtatatgttttggtttggggttgaaactggtgtgttgtgattttcaggctttgcagcttggacaagatgccaatacaccttttggattctttaacggccagagatgccagatgtgcctccggtctgatcctttgctgaaggtgatggagcgactggctaatcctggggtgcggcgggtgttcattgtggaagctgggagcaaacgtgtggagggcatcatatcactaagtgacattttcaagttcttgctgagcttgtgaggagaggagggcatggcggagtttttttaacagtagcaaccctctgggcctttgggtccttgcggataattggctatcgtcagggttcatggtctgtaaagttccttttttttttgtttcgttttttaccatttggcccctcccgcttgtataacctcaattaatataatggcaaccttcatttaatatgaggttacttgagggttacttgaaaaatt

SEQ ID NO: 30670 - DNA, 471 bp, Zea mays
  Clone ID: UC-ZMFLB73062C08_FLI
gtggaaactcacctcctgatggacatcggcatgatgaccatgacaaaaggacggcagagagatgaaaaagaatggagcgagctcttcaccaaagcagggttcagcgaatacaagatcctgaaggaatttggagctcgtgttgccttcgaagtctatccgtgagattgcacctggactatacatatatatttacatacatatatgtatgtgtgtgggtgccttgcgtggcttggcgtgatgatgtcataaataaagagggtgggtgtgcttgcggtattcatggatggccatggatctgagcacatgacgttggatgctttcttaaggctctcgtggatcttctatatttggaagaagctgtaaaataatatatcgccatctagtgttggcgttggcttgtatgtactttgtacctgctttgttattttgtgtaatatcgagtaacctaatgtatacttgcttactactatc

SEQ ID NO: 30671 - DNA, 1046 bp, Zea mays
  Clone ID: UC-ZMFLB73062C11_FLI
cagacttttgtcctggaggagaattatttgcactactcgatatgcaaccaatgaaacttttcagagaagaatctgcaaggttttatgctgcagaggttgtaattggcctggagtatctccattgccttggaataatataccgtgacctaaagccagaaaacattttgctccaagaggatggccacatcgttctgactgattttgacctctcttttttgacttcctcaaaacctcatgtgataaagcattctacatcaaggcgaagaagatctaaggagtatctgcccccaagttttgtttcagatcctgccactccatcaaattcttttgttggaactgaagagtacatagctccagaggtcatcactggtgtaccacatacaagtgccattgattggtgggctcttggaattctcttgtatgaaatgttgtatggacgtacaccttttcgaggaaagaacaggaaaaggacatttcataatatcctgcacaaagaccttacatttccaagtagcattccggttagtcctgcggctaagcaattaatccatggattgctacagagagatccctcttctcgacttggttcaagtgctgctgcaaacgatatcaagcaacatcccttttttgaagatatacactggccactcatccgttgcatggagcccccagagcttgatgttccactgaaactaactcggaaggaacctgaacaaaaagtgaagcctgaggaggatatatactcatgttcagattattgagacattttaagggcaggttgtacgatcccccctcccgaccccgtgcatgactttcagcctgaagagattttatattaccgagtggaaataacgttgctgagcatgtacatagtaataaaagaggtttataggcatgcaagatttccagcctgaattgcacaagaggtcgttgtaagtcattcttttggttaggttaagtgaataatccatcaacaggataaagttcttgtaaatgtacactttctttggcatatataataaaaatcttactaatttccgttggtc

SEQ ID NO: 30672 - DNA, 1059 bp, Zea mays
  Clone ID: UC-ZMFLB73062D01_FLI
cctctcggctccacccggcgagcgaacaatggaggcggggggcgtcggcctggcgctgcaggcgcgggcggcgggcttcggctccagccggcaccggggcggcctacaggcgcccaccgggagcctgagagtcgctgacccggcgggacctgcggtcgctgtgcgggctcgcgggtccaagcccgtcgcaccgctccgactccgtgcgaagaaatcgtccggaggtcatgaaaactcgcacaactccgttgacgaagctctcctgttgaagagaaaatcagaagaagttctgttctacttgaacgggaggtgtatttacctagtaggaatgatgggttctggaaaaagtactgtggggaagattatgtctgaagtcttgggttattcgttctttgatagtgacaagttagtggagcaagctgttggaatgccatcagttgcccaaatattcaaggtccatagtgaagccttctttcgggataatgagagtagtgtcttgagagatttgtcctccatgcgacgattagttgttgccaccggaggtggtgctgttatccgaccaattaactggagatatatgaagaggggcctatctgtttggttagatgtgcccttggatgctcttgctaggcgtattgctaaagtgggaactgcctctcgtcctcttctggaccaaccatctggtgatccgtacgcaatggccttttctaagctcagcatgcttgcacagcaaaggggtgatgcttatgcaaatgcagatgtaagggtttctctggaagagattgcatgtaaacaaggtcatgatgatgtctctaagctgacacctactgatattgcaattgagtcacttcataagatcgagagcttcgtcatcgagcacactgctgatagttcagctagcgacgcgcaagctgagtcgcagatccagaggatacagaccttgtagaaccttaatccctttgtttgccacatagagcatcgttgagttatttgtaaaggaatggaagaagggagctaataatccgaagtgtgccgttggctgaaacatcgcctgtcttc

SEQ ID NO: 30673 - DNA, 1185 bp, Zea mays
  Clone ID: UC-ZMFLB73062F10_FLI
gaaagcatcacactcgcagttgcagagttccgcttcatcagtcccacactctccccttcctccccccagtcctgagcttcgccgaggcatacggacaataccggcaccggcagcgagcagtcgggagccatggctccgcggctcctgctcttcctcctcctcctcctcccgctcctcgccgccggacaccagcacccgtcctcctacggctcctccgcgctttccgagtggcgccccgccaaggcatcctactacgccgccgaccccgaagacgccatcggtggggcgtgcgggttcggggatctgggaaagcacgggtacgggatggcgacggtggggctgagcacggcgctgttcgagcgcggcgcggcgtgcggcggctgctacgaggtcaagtgcgtcgaggatctcaagtactgcctccccggcacctccatagtcgtcacggccaccaacttctgcgccccgaactacggccttcccgccgacgccggcggccactgcaacccgcccaaccatcatttcctcctccccatccagtcgtttgagaagattgcgctctggaaggccggcatcatgccaatccagtaccgccgtgttaagtgcctccgtgaaggtggtgtcaggttctctgtcaacggtcggcacttcttctttacagtcctaatcagcaacgttggtggcgcgggtgatgttagatctgtgaagatcaaaggaacagagttgggatggctcccgatgggccgcaactggggccaggtgtggcacatcaactgtgacatgaggggacaacctctatcgtttgagctcagctcgagcgatggcaaggcgctgaccagtttcaacgtcgtccctaaggattgggagtatggcaagacatacacggggaagcaatttcttctgtagagaatgagcgccacaagatcagcttacagtttctcattttttgttctgatcctacgagttgggctgtggtgtacattctctgcacttctgcagaacaagtaatatcattattaggagaaaattacttagtgcaaggcctcagatagttgctcttggtcataaatggttttccatgtccccttcatagttgtactaaagaggcttgatgtatcattcaaaatagaagcctccgttgtattacaatattttacctagcaagcaatgataatgtatttctgc

SEQ ID NO: 30674 - DNA, 1335 bp, Zea mays
  Clone ID: UC-ZMFLB73062G04_FLI
accctcgctgcgcctcaggcagcgagcgagcatatagcagcccaccacccacatgccgcagggccctcacccgtcgagccaattgagtggcagccagaaaaacccagagcgcgagcagcgagcgagcgcgggctcctgtgtgcagtgtgtctgcgctagagggcgaagggcacggaccgccttcgtcaataattgcggtacgaacggggcaaatccgtcgtttaaagaggtcgctgatagcgcctgctggtggcgagagagagaaagcagcagaatcgctgagggatcgtcgatccggagaggcaaaaaagccgagagatcaggcagggcaccatggggcgcgggaaggtggtgctgcagcggatcgagaacaagatcagccggcaggtgaccttcgccaagcgccggaacggcctgctcaagaaggcgtacgagctctccatcctctgcgacgccgaggtcgcgctcgtcctcttctcccacgccggccgcctctaccagttctcatcctcctccaatctgcttaagactctagagcggtaccagaggtacatctatgcttcagccgatgctgcagtgccatctagcgatcagatgcagaataactatcaagaatatgtgaagctgaaggcacgagttgaggttttacagcactcacaaaggaatcttcttggtgaagatctggccctacttagcccaagtgaacttgaccagcttgagaatcaagtagacaagaccttgaagcaaataagatcaagaaagactcaagtgttacttgatgaactttgtgacttaaagagaaaggaacaaatgctgcaagatgcaaacagggttctgaaaaggaagctgggcgagtttgaggcagaggcggcttctcccccgcagttagcgtggcaaggcgaaggcggcatgttgtcccatgaccctccacagccagaacacttcttccaggctctggagagcaacccatgtctgcaacctacataccatacgatggacatgaaccagcagccagtgccagcgccgggcggctgctatcctgcatggatgtcttagccagtgcttcattccattgccttgagaagtgtcctgaccttcacagatccctacgagctttattactgcttttgcctgcccctttgctgcttgcggtgcttactgaactgtccaaatgaccacatggtcatatataggttattgctgtctttatcttatgttgatcacggcctgctcagctgctttagcgccatgcaaaatggcttgggcgatgcacgcttgaatgggtcgaactgcttatgttttgggagtataaatcacttagcaataagcattggc

SEQ ID NO: 30675 - DNA, 980 bp, Zea mays
  Clone ID: UC-ZMFLB73062G05_FLI
ccgccaccaggtgcagagtctttcgtcatctcttctccggcgaagaacccccagtcgcccaccagatcacttgttaaactttgttgaggggtgatggcggtttctttcgcaaacctcaactccgaggcagggcttaaaaagcttgatgagtaccttctcactcgcagctacatcactggctaccaagcttccaaggatgacttggctgtctacacttcgttttcggctgctccctcgtccaagtatatcaacgtagcaaggtggtttaaccacattgatgcgctcgtgaggctgagcggaattactgcagagggccaaggtgtgaaggttgaatcctcagcagttccttcagccccaactccagatgttgctgaagcacaggccccagttgctgaggaggacgacgacgatgatgttgacctttttggtgaggagaccgaagatgagaagaaggctgctgaagagcgtgctgcagctgccaaggcttctggcaagaagaaagaatctgggaagtcatcagttttacttgatgtgaagccatgggacgatgagactgacatggccaagctcgaggaagctgttaggagtgtccagatggaagggctgctctggggcgcatccaagcttgtcccagttggatatggtatcaagaagctgcaaatcatgatgaccatcgtcgacgaccttgtctctgtcgacactctcattgaggactatctgtgcgctgagccagtgaacgagtacgtgcagagctgcgacatagttgccttcaacaagatctaggcgtgacttccgatcagtccttcccctggggtgctggcgatggtggtggctgggcaatgcaccagcctaatttatccatagctatatgtctgctttgtgtggccagtgatattgccgtgagtatttttggatcctattcgagtcgaatgtaccagtaccagagttaatttgctttaattcgaaacaccgttccagtt

SEQ ID NO: 30676 - DNA, 799 bp, Zea mays
  Clone ID: UC-ZMFLB73062H12_FLI
ccaccacaattttgcataattacagaatacatgtctggaggaagcttatatgactttgtgcacaagcagcataacgttctaaacctcacgactctattgaagtttgcagttgatgtatgccgagggatgtgctacttgcatgaaaggggtatcatccatagagacttaaagactgccaaccttctaatggacaacgatcatgctgtgaaagtggctgattttggcgtagctcggttccaggatcaaggaggtatcatgacagctgaaactggaacatacagatggatggcgcctgaggttataaaccaccaaccctatgatagcaaagcagatgtgttcagctttgccattgttctctgggagctgataacgtccaagatcccatatgataccatgacccctctccaagcggctgtaggtgtgagacaggggttgcgcccaggacttccgaagaagacgcacccaaagctgttggacttgatgcagagatgttgggaagcagatccatccgaccggcctgctttctcggacattttagccgaactggaggatcttttggcacaagctcagggaacatcgggaaagacggtccaagatccatcaaactcgaacgcgaaagattaacccccatacctgacattttttctcaatccagtgatttgccacatctaggattcgagttgccaattatgaggaaatttgttttgcttgtgtacattcgaacaatcttcttggggccaattttttatgggcacctcattattcttatacaaaagaaattgggctcgacgcttgggat

SEQ ID NO: 30677 - DNA, 1729 bp, Zea mays
  Clone ID: UC-ZMFLB73063A07_FLI
tttccctagccgccatttcttctctccctggcttctcccccacgcgcagcaggcaaagcgcagggagcaaggccagccatggcgcggcaccctccctgcttctcctggcgagcggctgggacagggggccttcttccccaacgccacccctgctccatccaacgcgcggcatctcctctggtccgagctcgagcagcgagctcgccggcatccatggcgtggcacctctgcaccttcacctccagcagccatggcgctcttccctgttctccagcgcccttcctccctccctttttctgtccatggcgagcaggagcttttccctcccatggcgagcagctttcctgcccatggcgcgacgccgctgctctctttttttttccatctcactgtgctctcttggctgccagcagccatggcgtggactcctttttttttcctggcgcagcagcaagctcccccatggcaggcgcccaggcaagcttccccaatggcgccagcagcagggatctcttccccctccccatggcgcccagaaaattccagccggctcccccttcttcttcctccagccagcagctcgtccacctctctcccatggcatttccccctgcgagcagcgctttctccattgtcttcaacctccggtcgctcccatctcgctgcagcaccctgtccatttttttttcacccagccgattccctctactgtccaaggcgcgggcgctatttttcccatggccgagcaggccccttgcagcgagcttctccttttcccagcgctgcgcagctcctccatggtgaaacgccgttgttcctgcagccccgacacctccccttgcttcctcgctgccagcgctgcgcgcgtgccacgtgctcggcaaactgtccaagtggggtgttgcgcagcgaacagcacgtcgggatgcccgccgggtgtttgctgttttgcgcagccccgtcgtcatcgtcgttcgccccggtgagaccgcgacgcctcttgctcgatttccgcatcgacgttattttcctataattaatcatgaatgtgtgctgctttgttttgttttgtggaggagaggaaccccgtgttggcgtggagaagaaggcaagccgctcgacgctcgtcgatgtttgtagcgatgcacaaattggaatcaccgtcgttcttgcaaacgtcgattgggtttgtttatggaccgagagatgatgatcgggctagtgatgtggtgccaaccacaagatgcagtcggtggacgacccaaggaaggattgacttaaccagtggatgctcgccaagcgagtgccacccagcaaacactgcctaagtgttaaattaaggaccgagagatgatgatcgggctagtgatgtggtgccaaccacaagatgcagtcggtggacgacccaaggaaggatggacttaaccagtggatgctcgccaagcgagtgccacccagcaaacactgcctaagtgttaaattaaggtactctttaggatgattggttgctggtgtgacttggccttcatccctgccaccgggatagatggtcgagagggttattgcttccgcaggagaggaccaggaggagtagcgtggccaggcttcgccatgttactcggttttctccgttagttatttccgctgcattaaaatttatggttattatttctgaaactccgataatgtaatcactaatgatacttattaaattgtggtattatgtttt

SEQ ID NO: 30678 - DNA, 1720 bp, Zea mays
  Clone ID: UC-ZMFLB73063A12_FLI
gtgctgaggtgagaaaggtgttgggactgttagtcggacagattcaaactaaaattttggaaaagagaaatcaattccggtattttcgaatcctatctcaagtagcttatctagatgatattgtgaacagttgggcatacacctaccaaagaacacatgttgatacccggacaggaacatcccgcatgaagagttcaagtgccaaagaatgtcaaaggaccaagtatgctgcaggaaccaatgtacaagttgctcctgttgccatccctgctgaggttcaagacattccagcccaacacactcaggatcatgaagttgttcctggtcctactgaggtgcaaggcaatccggttaagcatactgcagaacaacctggaagctattcgatggactgtgaccttgataatcatgtgaactctgtttccagcaaggatgcagtagaacacgatcatgtccattcagctttacctgatgtgcataggggcaatacacatgcagatacagtaacaaatgacggagaacctattggagcaaacaacaatgggaaagtgtccaggttaacctacggtgaagataaattcagaccaggtattcaaagatctgaaaaccacacagaatctatggaaggtttaagctgtttgcaaagggcaggagattccgttggatccccagcaagtattaacaatacagaattaccaaagaacaatgtttcttctgaagctcatattgatgataatgagttgaggagaaatgatcttgtgaatgatgttgaatcaaattcgatcgatggtaaacatgacaccatgatgaatctttcagttccaaaaatttcatgtctctacaaatgttgttctccatgtttccaatctatttataagatggttcatggtattatttcaaatactctaaggcctaatctgcattgcttaacagctgatgatatgcatgacattctgtcatcatggtgcttgaatctattagggtctgttagaaagttgtacagctcacatgatgaggccagctgcacagaagtttttgttagaatgtccaataaagaaacccacttagagcattgtgcttgtcagagtgatatctatctttcaagagaatgtgtatgccacttggaaagcaatggggatgttgaaactgcaaatactgattgtcatcctctatcaggacaaagcttaagttttttctttaaagatggtgtatggatgccgttggatctcactgcggaaacaaaacttcattgcagcttcaggagattctgtgtttgctcgatattaggaacagtttctatgctcagctagatcctcagttcatgatattgtctgatgcagttgcaaaagtacatatagtactctaatgctctaagtgtggctccagttgtgcacataacacaacatcatcaggatgtctttggttgattggaacttctcatccttgatgcaacttttgggcaagcttttattgcacataaattgcctctacctgttatggtcattagtggaaaactggctgttgtagttgcttcgtagactgaatatttaaaaagaagctaagatattagtcttcattttttttccaacgaagttacccatgtaggttggactgttgttgctgctggaaatttcacggttagatgatgactgagtgactgacgccatttcagttctcattgtaatatgtattatggcccaattaagcatcaagttgaaac

SEQ ID NO: 30679 - DNA, 1410 bp, Zea mays
  Clone ID: UC-ZMFLB73063B11_FLI
cgagatctcgattcgtctggaagacatcgctactaccccagccacagtacccattgggtatttatctgctcccttgctgaagctggaatgtgcagctcgatcggttagcgctacgagtcctcgctgaatccagccaaatgatccccttgagcttgccagttagagcacgaagtaacagctagctaagagaagcacaagaaaaatctggtagcttgagttctgactcgaactcagagatggcttatgcaagccccgggactgatgatacgtcgacagatctagatactgacgagaagaatcacatgttggagctagggcagcttgtgtcccttacagcttctgattccggcaacaaagcaaaggacaagctactaggtcaaaaggcactgcgccgtctggcccagaaccgtgaagctgctaggaaaagccgtctaagaaagaaggcatacgttgagcaacttgagaatagcaggctgaaacttagccagctggagcaggaactccagcgtgctcgccaacagggcatcttcattcctactccgggagacgaccagcagccaaactctactagtgaaaaaggtgctttggcgtttgacaaggactacgctggatgggaagacgagcacaggaagcagataagcgagctgagggccgcgctcagcgcacacgccggtgacgacgagctccggcgcatcgtggacggcgtcatggcgcatcaccacgaagcgttcaggctcaagtgcgtggcagccagggccgacgccttccacgtgctgtcggggatgtggaagacccccgtggagaggtgctttatgtggctgggcggatttcgaccgtcagagattctaaagttcctcgcaagccatctggaccccctcaccgagcggcagctcgcgagcgtacacggcctgcagcagtcctcgcagcaagccgaagagggcatctcgcagcgggtgcaagcgctgcagcagtcggtcgcggagaccctcgcgtcgtcagggtccccgtgcctgcctgtgcctgcaggtcgtgctcctccgcctggcgacgacgccgctccagactgctcggggacgatggcggcggcggttgcgaagcttgtcgctcttgaaagcttggtgcatgaggctgacggtctgcggaggcagactcttgagcagatgcagcgcgtgctgaccacccgccagtccgcgcgggcgctgcttgtgatcagtgactacctttcccggctacgcgctctgagttctctctggatcgcacgaccacgggaatgaattcagctcggcttatgtatctttgtttgacccggccgtggagaaaaataagaatcgaagatgcctccgctccttccatcatcactgcatgtaattgtaatctgaacatcattataaacagccgtaaccgttggcc

SEQ ID NO: 30680 - DNA, 1241 bp, Zea mays
  Clone ID: UC-ZMFLB73063E12_FLI
ccccatcgcacgaggtttgcgcccctccccgctcgccatcggcccgtctcaacgcgcacgcaccctaccctctccacaaccaaccccagtaccccacgagatctgctcccatctcttcttctcccccatcgcacgaggtttgcgcccctccccgctcgccgtcggcctgtctcagcccctgaccctccaccgccaccgactccctctcttgccaccgagggaatttggatctaggagcccatgccactacagctctcccccgcccacgattagccctcggctcgggagatgctgacgcccatcgcgaccacgatttgctccctcgtgtcctcggcctcttcctccactctcatcctccctcctccccccgtcctcggttattctcgtcgcctccgccgcgcgttccgctctccccacagcctttgcccgccctcgcccaacgaccctcgccgcacccctccctgtcctcgacaacttcccctctggccccgtccttgccggcatcggcgcctgctctctccgtcatgggggaggggaaagtgaaggaggaagaagagccaagcggctaagccagctcggccggtcgcctcccaccaaaatcccccgagacatcatcgacgaggagatggagatggagtctagccccgcagctcctcggcatcacaatcgttgcctcccgtgttgtgcccttggatccacttctcgtgcgacgcccctgatcgacaagcacgtcgtgcgtccgcaccgcctccctgaccgacaagcatgtcatggctccaggcacttgcagcctccgcgcttcttcggccagcaagcacgcgaccacgcctcccactattcagtcgtggtggttccaggtgcttcttgcctccgtgtctccctgactagcgactatgtaaggagggacctcccctgccctggctccaaacagaatcagggaatacggtcagcctcccatggttgctgccatgtaggcgatctgatagtccacaaaaacctaagattcgacaccaagtcactaaccaaaggaagatcgagatgaggaaggatgtgatttgatctcaaatatcaactacatctgtctagcgtcgagacacatgtgtggtagtgctaagttggttctgtcattcagtttctttctgtatcctatttctgtgaaaatatgttatgtgagtgatgtaaactgattgccagaattaatggatgttttgcagctacgccagaagctgatggttgtgggt

SEQ ID NO: 30681 - DNA, 1487 bp, Zea mays
  Clone ID: UC-ZMFLB73063F07_FLI
ggcggaggccatcggcgggggcggggaccccgaggccgcggcgaggcggcgctgggatctgcccggcaaggtggccgggaacattgcaatggggaaaattgatatgtctactgacgaagaatcagattgtgtagctatatgtccacctaacagaaatgctggtcacgaggaagttgtgagtggcagccatgatgaagattcttcaggaaagcaagagaacccttatgctgtgaactcacatatggacagcaatggccaggaagatgtgtctgtaaacctagacctgctcaagctgattcatcagcaggaatcttctgtcagcaattcaccaacaaagcctgcagtagctagacagcaagggtctggccatactgtccttgagccatgcgctgttgcacctgaaagaagatcatctggagcagggaatattgctcgaattcctcatcccaccagcagcggggaaaaactttcggataaaagtagctcctcaccaagaagcatggcaaagaagagtccatcattcacacccaggaagcctctccaatctgacaacacttctcacagtcaagatgatgactcatattctgtcacttcttcaactgtaacttcagcaagagctgggaaaactaagaagacaactgttgctgttgcacctacattcgtctgtgctaatcgtgctgagaagagaggagagttttacacaaaattagaagaaaaacgcaaggctttggaagaggagaaactccaagcagaggccagaaagagggaagaggaagaagaagctctaagacaactgaggaagaacttggtcgtccgagcaaaacccatgccaagcttctaccaagagggacccccaccaaaggttgaacttaagaaggtgcctccaactcgtgccaagtcaccaaaattgacacggagaaagagctgcagtgaaacccctcatacaccagagggaggaaatggcagtgcagtatgctgccggttgcatcgccacagcattgggaacgccagagatgttagcagcaaggcacaatgttctccaaagagcgcctcaaaggctggatcagctactagatccagggtcaccaaatccagggaagacctgaaggcttccgtgaagaaagtgggactgccaagcgccgcgaacttcgctgtacaaacctaactcatcaggcattcactcccatatgccatttttcattttaatttatacctcacatcaccaaaaagatggcctcgtgttatttttgcattgtccttgtaagaacctggctaccagagacctgcgctgttcccgtcctgtaaatttgttgaaggttttgtaagggggtaaccgagtcagtcctgtgagaaccaagcgggtgggcagctgatgggatattggagtgacatattgtcgttgtgtggcggcattcgcgcgttctatgtattgtatctgagctgtaacttattgtggacattggcaaagcgattctgattgttgtcgc

SEQ ID NO: 30682 - DNA, 3325 bp, Zea mays
  Clone ID: UC-ZMFLB73063H08_FLI
caaatcccaaaacctgatcccagctccgccgccgagcaaaaccctaggggcttcctataacgccgccgccgcgatggacgacagcctctacgacgagttcggaaactacataggcccagagctcgccgactccgacgctgatgatgactccgacgccgccggcgcctcaccgtcctccaccgcgtcccgctcgccgtcccccgcggcgcgctccccgtcgggctccccctcccgccctgcggcgctcatggacgtcgacgaagacgagggcgacccgtcccagcaggccgtggtgctcgccgaggacaagaagtactatcccaccgccgaggaggtgtacgggcctggcgtggaggcgctcgtcatggacgaggacgagcagccgctcgagatgcccatcatcgcgccaccacgcgtcgtgaagttcgaggtcgggacccgcgccgcggccacgtctacctacgcgtccaccgacttcctcctcggtctcgcgggcaaccccgcgctcgtccgcaacgtcactctcgtcggccacctccagcacgggaagacggtgttcatggacatgctcgtagagcagacacacgaagtggacaccttcgactccgagggggagcgtcatgtgcggtttactgacacaagggtggacgagcaggagaggcaggtctccatcaaggctgtgccaatgtcgcttgttctcgaggggggaaacggtaagtcatacctgtgcaatatcatggacacgcccgggcatgtcaacttctctgatgagatgactgcggcacttcgacttgcggatggggctgtgctcattgttgatgctgccgagggagtaatggttaatactgagagggcaattcgtcatgcaatccaagaaaggcttcccatagttgttgtgattaacaaggttgacagattgataacagaactaaagctgcccccaaatgatgcatatttcaagctgcggcatactctagaggcaattaacgatcttatctcatcgtgttctactacagtaggtggcactcagctggtggatcctattgctggaaacgtatgttttgcaagtggtgctgctggctggtcttttaccttacagtcttttgcgcatctttacttaaagattcatggggttcaatttgaccatgagaaatttgcatctcgcctatggggagacctgtattttcaccctgattctagaacctttaaaaagaagccgccaaaggaaggagctaacagatcatttgttgagtttatccttgagcctctgtacaaaatttatagtctggttgttggtgagcaaaaggggaatgtggaatcaaagcttgctgaattgggtgtcacactgagcaatgcagcttataagctaaatgttagacctttgctgcggttagcttgccgctcaatttttggcactggtactggttttactgatatgttagtgaaacatatcccctcggtgaaggatgctgctgcaaggaagatagaccacatatacactggaccacaagattcctctattgtagatgccatgaaaaaatgtgatcccaatggaccccttatggttaacgtaacaaaactatatccaaagtctgattgcagtgtctttgatgtcttcggacgagtttatagtggcacaatacagactggacagaccgtgagggtccttggagaaggctattctccagatgatgaagaggatatgactgtcaaagaggtgaccaaattgtgggtttatcaggcacgataccgtgttgcaattagtaaagcccctgctggctcttgggttctcattgaaggtgtagatgcatcaataatgaaaactgctactatatgtcctatgaatattgatgaagacgtgtacatatttagacctctacgtttcaacaccttgtccgttgtgaaaatagcagctgagcctctcaacccaagtgagcttcctaaaatggttgaaggtcttcgtaaaattagcaagagctatcctcttgctattactaaggttgaggagtctggagagcacactattctggggactggtgaactatatctggattccataatgaaggacctgagagagctttattcagaggtcgaagtgaaggtagcagatcctgttgttacattttgtgaaacagttgttgacacttcttctatgaaatgttttgctgaaacacctaacaagaggaacaaaattactatgcttgctgaaccattagagaagggcttagcagaagatattgagaatggtcttgttagccttgattcaagacagaaagaaattactgacttctttcgccaacgctaccagtgggatgtgcttgcagcaaggtcaatatgggcttttggacctgacaagcagggtcctaacattcttttggatgacacactttcaattgaggttgacaagaacttgctcaatgcagtgaaagattcaattgttcaagggttccagtggggtgctagagaaggtcctttgtgtgatgaaccaattaggaatgtaaaattcaagatcttaaatgcaaacatagctccagaaccattgcaccgtggtggtggtcagataattcccacagcacgtcgtgttgtctactctgcattccttatggctactcctcgccttatggaacctgtgtattatgttgagatccaaacaccaattgattgtgtctctgcaatttatacggtgctatcccggcggcgtggtcatgtaacagctgatgtacccaagccaggcactccaatatacattgttaaggcatttttacctgttatagagtcttttggatttgagacagatctcagataccatacacagggacaagccttttgtttgtcagtattcgatcactgggctatagttcctggtgatcccttagataagagtattgtccttcgccctctggagccagcacctatgcagcaccttgcccgtgagttcatggtaaagaccaggcgaaggaagggcatgagtgaagatgtgagcatcaataaattcttcgacgaggccatgatgaatgagctggcccaacaggctgctgatatccacttgcaaatgatgtagtcaaaaagcgagatgaagtgcacacgtggaagatgcaaatgccctcagcttcttcataccatacatgctgcagatgggactgccggagttccagtcgcacctttatgctggcatttgcccctacctgtttcgttttgattaacacattatgattgctgggtatcatgtagcgaatgtttaaagtgggtaccgtatgcaaatcatgtatgtactgtactagtttttacaccatctgaccaatcagcacccttgaggacagagact

SEQ ID NO: 30683 - DNA, 1759 bp, Zea mays
  Clone ID: UC-ZMFLB73063H12_FLI
gcacagcactccacctcactgctccagtcgcgagccgcagctgcgcgtcgcgtcgcatcgcacgcatctctcctgccctccagctccaaagcttcgtcgtctgcgtcgccccgcgccccgtcttgctcgctccaagctagacaccataccacccagatcccgaggcccctctccctcgatcgccgcctcccggtagcggatccggcgccggctcgcgccccccgacaggttttgttttatgcttgttcatttgtctatggacaatggactagttgctgcactgcttttgtgagtcaccatgggaagcagtggagcagatacatcgtctaagccaaacaaggcatccgccccacaggagcagcaacaacctgctacctcaggtgctgcaacaccggctgtttatccagactggtccagcttccaggcatatcctccaatcccaccacatgggttcttcccctcacctgtggcatcaagtccacagggtcatccttacatgtggggagctcagcctatgattccaccatatggagcaccgccatatgtcatgtaccctcctggagtgtatgcacacccatctatggcctcgggtgcacatccatttactccttatgccattacttctccaaatggcaatgctgatgctactggaactactgctgtagcttgtgatactgatggcaagccctctgaaggcaaagataaaagtccaactaagagacccaaaggaactttgggcagcttgaacatgcttactggaaagaaccccagtgaacatggtaagacctcaggtgcatcagctaatggagccacttctcaaagtggcgaaagtggcagtgacagttcaagcgaagggagtgaaggaaattctcataatgattcatacaagcatagtggacaggaacaagatggagacgtacgaagttcccagaatggtgcatcacgttctccatctgagggaaaatttaaccaagctatggcaatcatgcccatgccatcaagtggcccagtaactggtccaactacaaacctgaatattgggatggactattgggccaacacagcaagctctgctcctgtaattcatggcaaagtgaccccaacaacagttccaggggctgtggtcccagcagagcaatggatacaggatgaacgtgaactcaaaaggcaaaaaagaaaacagtctaatagggagtctgcacgcagatctaggttgcgtaaacaggctgaatgtgaggagttggctcaacgtgctgatgttttaaagcaggaaaatgcttcacttagagatgaagtaaaccgtatcagaaaagagtatgaggaacttctatcaaagaataattcactaaaggaaaaacttgaaggcaaacaacacaaaactgatgaggcaggacttaacaacaagctgcaacattctggcaatgacatccagaaaaaaggaaactaatcgagctatcatgcaatgcttgcatagcatggccctaactagattattgggaggcgcaattgtagtatgcgtgttaactccttactttattgcagttaattgttaccaggttgtgataatgttgatgccaaccttgtgtgtgggtgtttcctgtttcagatctatcttggcttatcttttagaagtcaagatgtgactgaagatgtaggctgtgacccagttcactgtatctgaaatagtggataaactcaaatttacaatttgtattgctgactaatattgttatgtatacctggcaaaaggttttctttg

SEQ ID NO: 30684 - DNA, 1171 bp, Zea mays
  Clone ID: UC-ZMFLB73064A06_FLI
ctcccctcccccgcgttccacttcgcggagatctagcccttgggtttcgccagcggcgaggcctaagtcatcggcggcgagccaaactccacgagcggaggaagaggaggggaagctgagacgaggaggcagctatggggcagcagtcgctgatctatgcgttcgtggcccgtggcacggtcgtactggccgagtacacggagttcaccggcaacttcacaaccatcgcctcccagtgcctcatgaagctccccgcaagcaacaacaagttcacctacaactgcgacggccacaccttcaactacctcgtggaagacggattcacatactgtgttgttgctgttgaatcagtggggcaacaaattcccattgctttcatggatagggttaaggaggatttcacaaaaaggtatggtggcgggaaagctgctaccgctgcggctaacagcctcaaccgagagttcagattaaaacttaaagagcacatgcagtattgtgtggatcaccctgaagaggttagcaagctggccaaagtgaaggcacaggtttctgaagtcaagggtgttatgatggaaaacattgaaaaggtccttgatcgtggagagaagatcgagctgcttgttgacaagactgagaatctgcgctcacaggcacaagatttcagacagcaaggaacaaatgtgaggagaaagatgtggttgcagaacatgaaaatcaagctcatcgtcctgggaataatcatcgcacttattctgatcattatcctctctgtctgccatggtttcaaatgccattaagcacagccagaacactgggtcttgctatttggctttaaaaaaaaatcggtgcaccgccgcggcagcagtcaggtacgagaatgcgccagaagtggtaaatggtctctcgtcaggtgccgggcatcgaagaatcacgtagagggtgtttggttttactgaactcgtatcaaatatttggatatcaattacgcctattatatatatgtttaattagatttaataaactcgaatcgtcttttagtgtttgtaattagttttataattaaactacttaatgttcataattactatttaaacatttgatgtaaattgaacttagttgtgtggaaccaaacacactctaaagttagctcctctggaccgtcaaatgccct

SEQ ID NO: 30685 - DNA, 933 bp, Zea mays
  Clone ID: UC-ZMFLB73064A07_FLI
gcatatagtgtgctcttctcttcctcttccagttggtattctttatctgaaacatagtacagaggaggagaggagaacgagagctaagaagatgaccggcaaggttctccttgtggccgtccttatcttggtgggcgtggcctctcgatgctcgggcagtaggggcctgcagggcgatcacgttgctgaacagaagttcggtggcggtggctatggaggtggcggtgggtacggaggctacggcggcggtggaggaggaggtggtggtgggtatggcggtggcggcggcggcggcggcggtgggtacggaggcggtggcggctacacacccggctactctggcaccggcacctgcgactactggaagagccacccggacgccatcatctcgtgcatcgggtcgctgggcagcatcctcggctccttcggcgacgtgtgcagcgccttcttcgggagcaagctgcagacgctgcaggacgcgctgtgcaacacccgcaccgactgctacggcgacctcctccgcgagggcgccgcggcctacctcaactccatcgccgccgagaagtacgcctacagcacgcagcaggttcaggactgcatcgccgtcgcgctcacttccaaggccgccgccgtcgcgcaggccgccatgttcaagaaggccaactacgcctgcagctactagctaggcctcgcgcatcatcagcgtataacgtacgcacgcaatgttcgttatataattccatacgtatatgggtgtgcaaggtccagaccgaccagctgtatgtcttcatcgttgccttcgtttctgcgtcgtcctcccatgcatgtttatgcatgatgccgtgccgtctcgttgtcagctggttcagtagtgatgcttactttcttgtcgttgttgctaatgtaagaaataagacgatgcgttgactgctt

SEQ ID NO: 30686 - DNA, 1482 bp, Zea mays
  Clone ID: UC-ZMFLB73064B05_FLI
gcaccacccgacggcaagccatatgagataagattgctacaaattcctggtgcaatatttgctgctgcttgtgggcttgtagtggatgcaataatgttcacactgattgccttgtacaagttccccgttatgctattcaaaggatggaagcggttgattgaagatcttattggcagagaaggaccttttcttgagacagcttgcatgccatttgctggtcttgcaattcttctctggccatttgcagttataggagcttttatagcctctgttatttgcagtgttccttttggtgtatatgctgctgtggtggtttatcaggaatcctcacttttcttgggactgtcttatgcaatatcatcagtatccatctttgatgaatatacaaatgacgtacttgacatggcaccaggatcttgctttcctaggtttaaatataggacaaatgaagcttcctcacatggtggctctctctcgagacccgcttcattcaaggacaagcatgatggaaagaaagcccctcagcgtgtaacatcatttaaaagtagctttgatgagttcaatccattcaagttgctagatcaccttttcatagagtgtaagcaccatggcaaggatctggtcgctgaaggagtgataaccccaaaagatatagaaggaacaaaggcaggcaaagccagcactggggtacttaatgttgggttaccagcatatgttatccttaaggcactcctccgatctgctaaagccaattctgatggtctcgttctaagtaatggatctgagataacatccgacaataggcctacgagtaaaatctttgagtggttttttgaccctctgatggtaatcaaagatcaaatcaaagctgaaaacttcacagaagaagaggaagcataccttgagaagcaagtgctcttgattagtgatccaaagcgcatcaaggagaatctcattcggcttccaccattgagtgagagaaaacaagcagaaatagaagcatttgctcgaaggttgcaagggatcacaaagtcgatatcaaggtaccccacatccaagcgtcgcttcgacgcccttgtgaaggctctttcagaagagcttgcaaggacaatgggtggtaatcaatctgccaatgggtctcaggtccggaagataagaagtggtatcgtccgaatgcttagtcagagatcactagggaaaacaacaggcatcccgggcgatgatcatgaggctcagctaacaagcgatggtttcacttcatgatgttctggaggtgttcaactgtaacctcagtttgaaaaggagatactacttttctgtgttattttgctaactggatacaaagaactgacacttctgtatgaagagtttaacctcaaccatctcgaggatgagttgtttgttttcaggactgtatctggacaacactgtagtaatacttcgtaacagaaagcaaaagatatgattcgccctagtgccacc

SEQ ID NO: 30687 - DNA, 901 bp, Zea mays
  Clone ID: UC-ZMFLB73064D06_FLI
cttctccttccctcacctgctctctctctctctctctctctctctctccctttctttcccgcggcgacggtgacgacgaccgcgcgagcgccgccgactccctactgcatcaggtgcctcggccttcgtcgtgctctccgccggcaacgagtatagacgggcgcgcatggccaccttcgagctgtaccggaggtccaccatcggcatgtgcctcaccgagacgctcgacgagatggtctccaacggcaccctcagcccggagctcgctatccaggtcctcgtccagttcgacaagtccatgacggatgctctggagaaccaagtgaagagcaaggttactgtcaagggtcacctgcacacctacaggttctgtgacaatgtgtggaccttcatcttgacagacgcaagcttcaagaacgaggaggccacggagcaggtgggcaaggtgaagattgtggcatgtgattccaaattgctcggacaataggcctgtgtaccctcgaggtcaaggaaggaagcttttaagtgcggcgaggcggggtctgtctgcgcgtcagctgtacacgcctaggctaccgcgaggcggggtctgtctgcgtcagctgtacacgcctaggctaccgcccgaacggcatttcatttgccttcttcgtactgtatgtgtatcttcttttttccccttgtatacaatctgctgcagctataccggccaagagtatggcatggtatggcggcaggcagccgcaaacttgtttttacctacttggtgtagcgcctgtgtaacagttttcgatcgatcttgcttgttgtgttgtcgatgctaataccgcagtgtaattgacgaaatgactaaaatgaagagtagtgtagtagatgtccaactatagcatttcaccagtcc

SEQ ID NO: 30688 - DNA, 2506 bp, Zea mays
  Clone ID: UC-ZMFLB73064F11_FLI
cgcgcgccgccgaacgaaaccatcccggcaaggcaagcaagcaaccgtggccacgccgcggcgcgaccctgacgcccgccgtctccggcacccgataggcctcctccccacacccctcgcgtggcttccgtggcccgtagcccggcgcgcttcccttcaaagccactgcttcgcctcctccttctacttaagcgcagccggccccggccggcattcgcatccggtagctcgatcacttcttcctctggattttgggaaggaggcatcggacgtcggatgcatgacacactcattgcattagcgcctacgcctaccgcaagtggaagcctatggatctcaagcaagccttctctggtacaatcttctgccttctgcttctattctgcgtgggctgcagatgtcggactttggaaatagaggccacccagacagcagccctcaaggttgatgcctcgccacagcttgcccggaagatccctgaaacactgtttgggatattttttgaggagatcaaccatgcaggagctggtggcatatgggcagagcttgtcagtaacagaggtttcgaagctggaggctctcatactccatcaaacatcgacccgtggtccatcattggagatgactcctccgtgttcgtggcgactgatcgtacatcatgtttcagtcgaaacattgttgctctgaggatggaggtcctctgtgatgactgtccagctggtggtgttggtgtttataacccaggtttttggggcatgaacatagaagatgggaaggcctacaatctcgttatgtatgttcagtccccagaaacaaaggatctaacagtttcattaacaagctctgatgggttgcaaaacttggcttcagctacaataacagtttctggcacatcaaattggacaaaagtggagcagaagctggttgctaaaggaaccaatagaacatcaaggcttcaaataacaacgaacaaaaaaggagttgtttggcttgatcaagtatcactcatgcctgaagacacatacaagggacatggtttccgcacagaacttatatccatgcttttggatttgaaaccacgattcttgagatttcctggaggttgttttgtagaaggtgactggctaagaaatgcattcagatggagagagtcaattggtccatgggaagagaggcctggacacttcggggatgtttggcattactggactgatgatgggcttggatattatgagttccttcagcttgcggaggacctgggtgctgccccaatctgggtattcaacaatggaataagccacaatgatgaagttgatactgtagctattgccccttttgtaaaggatgtattggacagtctagaatttgcaagggggagtgcagattcaacatggggctctgttagggctgcaatggggcaccctgaacctttcctggtcaaacatgtcgcaattggaaatgaagattgcgggaaaaagttctaccgtggtaattacctcaaattctacaatgctataagagaggcctatccagacattcagatgatttcaaactgtgatggttcatctagaccacttgaccatcctgcggatttgtatgatttccatgtctatactgattctaagactttgtttaacatgaggagcacatttgacagaacatcacgtagtggacctaaggcctttgtgagcgagtacgctgtctggagaagtgacgcgggtagaggcagtcttcttgcttcgttggctgaagctgctttcctcactggtctggagaagaacagtgatatcgttcagatggcaagttacgctccactcttcgtgaacgacaatgaccaaacgtggaacccggacgctattgtcttcaactcctggcaacactatggaactcctagctactggatgcagacgattttccgcgagtcaagcggcgccatgattcatccggttaatatcagttcccggtactcgagttcgctggccgcgtctgcgatcacgtggcaggatgcagagaatagcttcctgagagtgaaggtcgtgaacttcgggtcggacaccgttaacctcacggtctccacgagcggactcggggccagcgtcaacgcgctgggatcaaccgccaccgtcctcacgtctggcaacgtcatggacgagaactccttcagtaacccgaacaaggttgcgccggtgaaaagccagctgagcaacgccgcggagcagatgcaggtcacgctggctcctcactccttcaccgccttcgatctggcgctggctgagcccaagcttgtggcggagatatgatgtgtgtgctgcacattacagtacacaaacagcgcgcggatggcagcaaccagagggtgtggagtgtggtgtgctgttagcgatcttgatcgataaaaaaggctttgtactggtgtaccacgatacaggataacgtactacgtactgttgcttcatgaaataaaaaccacatcaggtttttgcttggtgttggttggtttcctttc

SEQ ID NO: 30689 - DNA, 507 bp, Zea mays
  Clone ID: UC-ZMFLB73064G03_FLI
gcgacgtgtacagcatgggcatcgtgctgatggagctcgtcaccgggctcttaccgaccgacaagacctttggcggagacatggacatggtgaggtgggtgcagtcaaggatggacgcgccattgccggcccgggagcaggtgttcgatcctgctctgaagccgctggcgccgcgtgaggagtcgtcaatgacggaggtgctggaggtggcgctccggtgcacgagggcggcaccgggggagaggccgaccgcgcggcaggtctccgatctgctgctccacgtttcactcgattactaccgcgcctgcgaaaaacgttaggatttcgaaactgggggatgaagttgtcctagtagctgcttttctaagtcgtccttttaagctagcttaatcttttcattcatgaaactagggaaaaagagacttatttttagggtttgaagttgaatcgagtcaagaatgcccttcaaaattgtatttcttaagttcaaattttgggatcgcttgt

SEQ ID NO: 30690 - DNA, 2017 bp, Zea mays
  Clone ID: UC-ZMFLB73064G06_FLI
cttggtaggttcaagatggggaagaggagctcgataggaagcaaggatgcccttccagcggaggtggaggccccggcgccggcgccggcgccaccggagtcaacgacggagaagcagcgcaagaacagctgggagcaagaggggagggagagggacatcaggcaggggatcgatctagccacgacactagagcgtatcgagaagaacttcgtcatcacggatcccaggctccccgacaaccccatcatcttcgcgtcggatagcttcttggagctgacggagtacacgcgggaagagatcctcgggaggaattgcagatttcttcaagggccagagaccgacatgtccacagttgataagatccgggaagctatccgggaacagaaagaaatcactgtccagctaatcaactacaccaagagcgggaagaagttttggaacttgttccacctacagccaatgcgagaccagaaaggagagcttcaatacttcattggagttcaattggatggaagcgaccatgttgaaccccttaggaatcgtctctctgagaacactgaactacaaagtgctaaattggtcaaagctacggcagagaatgtggatgaagcagtcagagagcttcctgatcccaacctgagaccagaggatctatgggacatttactcacgatatgtttccccaaagcctcataaacgttacaactcttcttggattgcgatggaaaagattataaaatctggtgtgaagattggcttgaagcacttcaagcctataaaacctttgggttatggtgacactggcagtgtacatttggtggagttgcaaggaagcggtgaattatttgcaatgaaggcaatggacaaatcagtgatgttgaaccgcaacaaggttcatcgagcttgtatggaaagagaaatatactcactattggatcatccttttctcccaacattatatacttcattccagacaccaacacatgtttgtctcataacagacttttgtcctggaggagaattatttgcactactcgatatgcaaccaatgaaacttttcagagaagaatctgcaaggttttatgctgcagaggttgtaattggcctggagtatctccattgccttggaataatataccgtgacctaaagccagaaaacattttgctccaagaggatggccacatcgttctgactgattttgacctctcttttttgacttcctcaaaacctcatgtgataaagcattctacatcaaggcgaagaagatctaaggagtatctgcccccaagttttgtttcagatcctgccactccatcaaattcttttgttggaactgaagagtacatagctccagaggtcatcactggtgtaccacatacaagtgccattgattggtgggctcttggaattctcttgtatgaaatgttgtatggacgtacaccttttcgaggaaagaacaggaaaaggacatttcataatatcctgcacaaagaccttacatttccaagtagcattccggttagtcctgcggctaagcaattaatccatggattgctacagagagatccctcttctcgacttggttcaagtgctgctgcaaacgatatcaagcaacatcccttttttgaagatatacactggccactcatccgttgcatggagcccccagagcttgatgttccactgaaactaactcggaaggaacctgaacaaaaagtgaagcctgaggaggatatatactcatgttcagattattgagacattttaagggcaggttgtacgatcccccctcccgaccccgtgcatgactttcagcctgaagagattttatattaccgagtggaaataacgttgctgagcatgtacatagtaataaaagaggtttataggcatgcaagatttccagcctgaattgcacaagaggtcgttgtaagtcattcttttggttaggttaagtgaataatccatcaacaggataaagttcttgtaaatgtacactttctttggcatatataat

SEQ ID NO: 30691 - DNA, 1771 bp, Zea mays
  Clone ID: UC-ZMFLB73064G12_FLI
gttagaattcactcgtttagttctacgctggggttgcggcagagagaacgaactggattagttccagcttctttgcatctatcatcattcaaatctgctgagtacttcggagctatgagaagcatcctgaaggacccaatgccaaatatgcgaaggtcctgttctcaaaggtctcctgggacgatagagaaattaaatgttgttcttgcacgtaaacccacatatatctcatctacttcaaatattatcaatgatggggcacggctactgttaccccagactggatatgaacatgatgtcgttgttgcagtatacgaggatgagcccaccagtattatatcatatgccatgacatcagaagaatatgtagaacaagtaacacacagactgaattccagtttgagtttttctcatcaaccaaatactaatgggattagcagccatggacttgaggcgtcctctccatctcaaggagaccatttgcattccaagggaactcattttaagttatccttcgatgatgactcaccgatttctccagataaaacaaagttctctgtgatttgctattttgcaaagcattttgctgcgctgagaaagaaatgctgtcccaaagatattgattacatacgttctctaagtcgctgcaagagatggaacgcgcagggtggaaaaagcaatgtttactttgcaaagacactggatgaaaggttcataatcaaacaagtcacgagaacagagctggagtcttttgtagagtttgctcctcagtacttcaagtatttaatggaatccttggcttctggtagcccaacctgcctggccaaaatagtagggttatatcaggttggcgtcaagagcttgaaaactgggaaggaagtgaggatggatctgatggtgatggaaaatgtttctttgaaaggaagatatctcgggtgtatgacctaaagggttcattgcgctcacgctacacggctggggacagcaaagtcctcttggatgcaaacctcatagaggcattgcatacgaagcctatatttttggggagcaaggcaaaacgaagattggaaagagctgtctggaatgatacttcattccttgcgttggcggatgtgatggactactctctccttgttggcatcgacgaggagaagaaagagctcgtcatcggcatcatcgactacttgcgccaatacacctgggacaagcagctggagacgtgggtgaaggcctcgggcattcttggtggccccaagaacgaatcccccaccgtcatatctccaatgcagtacaagaagaggttcaggaaagccatgtccaagtacttcctcaccgtcccggaccagtggtcctcttgacggcctggctagctaacaagaattgtccgccttaaccagaagcgtttgccgtgccatgccatgccatgccatagtacatgtccgtcattctttctgtgcctagaccctagagagagagagagagagagagagaggtagtcaaattcattttgtgtccgcctgtaccatctgtagcagccatagataggggatcatcctccgactggggatgctggatgccaagcatatggtcactgcagtgtccagccacagatagagaggcttggtccatgactcccatctccatgtacattacggccagcatataatatgtctgaggagaaaaaaaaaggaaatctgtcgacgaaatgcagagaattcttttgatgcctttgtggcatgtatgcagactgtgaaggctattgcaatgtgtc

SEQ ID NO: 30692 - DNA, 1336 bp, Zea mays
  Clone ID: UC-ZMFLB73064H01_FLI
gtctccttcgtcggcatgcacatggacgtcgtccctgccaacggcagcgagtgggactttgatcctttctcactaacctttgatagcgaggataaggacaaacttcggggacgtgggacaaccgactgtcttggacatgtcgcactggtggctcagctaatgcggcggcttggtgaggtcaagccacccctgaaacattctgtcattgctgtgttcattgccaatgaggagaactcatctgtcactggcattggtgttgatggcctcgtgaaggatggattacttgacaagctcaaaacaggacccttgttttggatagatacagctgataagcagccatgcattggcactggtggaatgattccatggcatctcaaggcaacagggaagctgttccacagtggccttgcacataaggccataaatgcaatggagatgaacatggaagcactaaaggtaatccaaaaacggttttacactgacttccctccacatgagaaagagaaggtctataaatttgctactccatctacaatgaagccaactaaatggagctatcctggcggggggcttaatcaaattccgggagaatgcacaatttcaggggatgtaaggttgactcctttctatagcacttcgcatgtcatggagaagttgaaggaatatgtagaggacatcaatgagagatttgaaacagtacttgatactcgtggtcctgtgtccaaatatattcttcctgatgaaaatctacaaggaaggcttgaaatcacttttgatggagatgtgatgaatggggtggcttgcaatctggagtctcgaggctatcatgcattatgcaaagcaaccaaggaaatagttggccacgtggagccatattccatcaccgggagtctacctctaatccgggaattacaggacgagggatttgatgttcaaacagctggatatggcttactgaagacgtaccatgcgaagaacgagtactgtctgttttcagacatggcccagggctttcaggtgtttctgagcatcatttcacagctggaagaagaggtctgagccttcttgatgggatagaccaatactccctccgtttcgttttagttgtcgctggatagtgcaaaattgaactatccagcgacaactaaaaagaaacggagggagtacctccaatttacattactcgttgctcagtgatctgtttaatacctccaatttacatcactggttgctcagttgtctgtttacaactcttttcaagattccgggacacggacatctaacaagccttcgaggttgtctgtcacccgttgaaaacggagccatttcaccgcat

SEQ ID NO: 30693 - DNA, 1700 bp, Zea mays
  Clone ID: UC-ZMFLB73064H06_FLI
caaggtgtgcacgcgcagccgctgctccatcatggacatcatcgccgggctggacgccgccgtcaaggacggcgtcgacgtgctgtccttctccatcggcgcctactcgggcacgcagttcaactacgaccccatcgccatcgcggcgttcaaggccacggagcgaggcatcttcgtcagctgcgccgcgggcaacgcggggccagagcccggcacggtcggcaacggcgcgccgtggatgctcaccgtcgcggcgggcaccatggaccgcgcgatacggaccaatgtcaagctcggcaacggcgaggagttccacggcgagtccctgttccagccgaggaacaactccgccgcggacccggtcccgctggtgtaccccggcgcggacggcttcgacgcgagccgcgactgcagcgtgctgcgcggcgccgaggtggctggcaaggtggtgctgtgcgagagcaggggcctgagcgaccgcgtcgaggcgggccagaccgtggcggcgtacggcggcgtgggcatgatcgtcatgaacaaggaggcggaggggtacaccaccttcgccgacgcgcacgtcctcccggcttcgcacgtcagctacgagtccgggtccaagatcctggcctacttgaactccacggccaacgggacggcgagcatcgacttcaaggggacgattatcggctcgtacccgtcgccggcggtcaccttcttctcgtcccgcgggccgagcaaggcgagcccggggatcctgaagccggacatcacggggcccggaatgaacatcctcgcggcgtgggcgccgagcgactcgcacacggagttctccgacggcggggccgacctgtccttcttcgtcgagtccgggacgtccatgtcgacgccgcacctgagcggcgtcgccgcgctcctcaagagcctgcacccggactggtcgcccgcggcgatcaagtcggcgatgatgacgacgtccgacgcggtggaccgcacggggctgcccatcaaggacgagcagtaccggcacgccaccttctacgccctgggcgcgggctacgtgaacccggcgctcgcattcgacccgggcctggtctacgacctccgcgccgacgactacatcccctacctctgcgggctggggctgggcgacgacggcgtcacggagatcgcccaccgccccgtcgcctgcggcggcctcagggccgtcaccgaagccgagctgaactacccgtccctcatcgtcaacctgctggcccagcccatcgcggtgaaccgcacggtgaccaacgtggggaaggcgagctccgtgtacaccgcggtggtggacatgcccaaggacgtgtcggtgaccgtgcagccgccgacgctccggttcacggcgctggacgagaagcagagcttcacggtgacggtgcggtgggccggccagcccaacgtcgccggcgccgagggcaacctcaagtgggtctccgacgactacatcgtgaggagccccctcgtgattccagccaagggagagtagcgcggagcagcggcctggcggcaacgctctttgtgctgctcggggtcggggttgaagaaggctaattttgcgaccatggtacagagtatgtctgtatagcgtctctaggctacggcacttgcacaccgcatgtttgtataggctacgaaactatggagtatgaactggagttcttctc

SEQ ID NO: 30694 - DNA, 491 bp, Zea mays
  Clone ID: UC-ZMFLB73064H09_FLI
gtctctcttactgtcatctcagcatggctaacagaagcacgcagcgacaagattaccccacatgttgtatcatggtttactagctagagaggctactcaagatgaggaatttgaagttatgtatggtgaggacgatgatgaagacaaagatgacgaggatgatgatgattatgatacaaagaccaagggggctactggagggggaagggcagcagcgaacgacctgttgagtgcaagcaggagtgagtgctgcacattgaatattggcatgcattggttgtggagcaattagtctggttctacttgatgcaaggtcattgagttattgaagtgatattttgtcgaatattttatatgccattgcaaagcacgggcatctaactagtctttcttatatatgtacactacaatacataatcatttatgccattgtttactacaaatatatatattaggcaactcttgaactggttgcaaggaatatttccact

SEQ ID NO: 30695 - DNA, 2305 bp, Zea mays
  Clone ID: UC-ZMFLB73065B01_FLI
cgattctcaatatgaggatggggaacttagagaatctggtgattgttattgggtggatgatggttatgaagatgttaaacatgccaactggcattatcaggtatcagattacaagaatgaagaagctactcctggcctcacgtctctccatactgattctgttgcaaataatgtggttattcctgttgctaatgacaatggaccacaatctagaaaggaggacattgctgtttcacctgtgtcatctaagtgttcatggttaacaaactgcttagatggtggatctatagctgatggaaagtctcaaagtattcatttgagaggtgatactaacatgtatgggtcaaacccaagccgtgtagcagttagatctgctacaacagtaagccagtctgaaaggtgcaacgatgccctaggtgatatgttaaatatcagaatgaagaacacaggttgggatatgatgcctgaagatcaaaagcactctcaacatgatgcaagggatgtgactgattcgtctaatcggtgtgttttgagctcagatgcggctagagacgatgattcactgcaaaaaaagggactattgaatagagatcttcaaggagtggaacggcaaaaatcatttgacagaccccagaggaatgaattgagcagatctgacgatggttatggctcaggctcaaaatctggaagggcaatggactctcatggatcgcatgacatgtatggcacatcccgtcatgttcagacaagcgctcgggtggagtgggtggaaagttcaaaacgtcctcgttctactcggcacaaatcacctgaatattataattatggcacatcaggtccaaggaatgctgcagaagctgctgtggcaaagatgcagagcagtggctttgttgttgcacgtgatggcactttagtaagagctgttgatgctgcaaatgctggtcagatgcccagaaggatgcgaaatcctttaagtagctcatgccacctgatttctggatggggttccccagttgacagggatgaagcctgtgggatgtccagaggccccgtgcatgctaggaaagcatctccagagcgtcactttggtgcaaatagtaaccggtccagtcgatatggttctgaaatggagaaaaatcatactactgatgcaaatttgagttctgtccattgctcgctgtccagtagacaacgaggcaccccgacatctagagcatcacttaacctttcccgtgctcacagcagatctccttctgggtccaggtctcgatccccacatgattgggcacctaggaacagaggcaagatcatggcaaatggaggttcaactttatggaagcatagtagatctccacctaatcacatgactaaaggtgaaattggtagaatggcttcacctcggagacaacctggatatgatgatcgagctatgtgttacagtccactatcaagaaacaacacatactccaagaatgcttcgacatgggttgatggaaggaatggttcagcagtggatatttctgatgatcataataaaaggtattcaaggagaagctcacctctgagaattacctcacggaatgacagatttgatgtcatggactcccaaggacgaccaaggtctggagaattctaccgtccgacacaaggaagacttctttatggttacaatagggaaaataagcatggcagaaatggtgaagatggaagggaatgcactgatagatatgcgaataattctgtcaagcgatatgaccggagtggtgcagtaaagcaatttagaaatgatactggtgataaatttcggactcgtatttctgctcccagatcgccagatctccaaaggggggtgagtcctcggagatttgacagaagctttgagaggtagctgactagctggctgtgaatttgccttatagaactaaaatggaaaataaagacctgtctggatgattgagccaggaaatgttgcaaaaccttgatggagttcaatcataggggttgatggaggactcttggcagcactgtttttttttctgcttctgctgcatatattcaaggcacagaaatgttggaccatgcacttctgtacggggaattcagattaacttcataattttcctgtttcagtctgtaaatatttatgttggtagcagaattacaatcactcctttcagctttattatagctgttcttttttttaatttctgatactttatcatgtttgtcccttttgttttttcaatgggtattgtccctgtacgaggtccattttaacatgatgaatcaattaaattttgagctc

SEQ ID NO: 30696 - DNA, 2387 bp, Zea mays
  Clone ID: UC-ZMFLB73065B09_FLI
caatcttctagttctcccaaatccttttccggatccgaactgcaagtcctccttcgcgaccatggatccacgcgccaggtatccttcgggcgtgggcaacggccgcggtgggacccctaactactacggccgcggcccatcgccgcaacagccgcatcagcaccaccagcagcagcagcagcagaagcagacatcgggggcgcatcaccaccagcagtacgcgcagaggcagcagcaacagcaccgccacagccacaaccaccagcagcaacagcagcagcaccagagtcaccagcagcagcagcaacagcagcagtggctgcggcggaatcagattgcccgcgaggccgcgggcgcagccgtgaccagcgagccgaaggccctggcgccatccacggccgccgacggcgtcaattcgagttcgcaagattggaaggcccaattgaagcttccacctcctgatacacgctacaggacagaggatgttacagccaccaagggcaatgagtttgaagactattttctcaagcgtgaactcctaatgggtatttacgaaaagggatttgaaagaccctctcctattcaagaggaaagcattcctattgctttaactggtagtgacattcttgcaagagcgaagaatggaactggcaagactgctgcattttgtattcctgcactggaaaagattgatcaagaaaaaaatgctattcaagttgttatattggttcccacaagggaattggctctacaaacatcacaagtttgtaaggagcttggtaaacatttgaagatccaagttatggtcaccactggtggaaccagcttgaaggatgatattgttcgtctgtaccaacccgtgcacttaattgttggaacacctggccgtattttggatcttacaaagaaaggtgtttgcattttgaaggactgttcaatgcttattatggatgaggcagacaagcttctctctcctgagtttcaaccttccatagaacagttgattcgctacctccctgctagtcgacagattttgatgttctcagcgacattccctgtgactgttaaggagttcaaggacaaatatcttcctaaaccttatgtgattaaccttatggatgaacttacactgaagggaattacgcagttctatgcttttgttgaagaacgacagaaagttcactgtctcaacaccctcttttccaagcttcaaatcaatcagtcaataatattctgtaactctgtaaatcgtgttgaactattggcgaagaagatcacagagcttggttattcttgcttctatattcatgcaaagatgctacaggaccaccgcaatagagttttccatgatttccgtaatggagcgtgcaggaatcttgtttgtactgatctttttacaaggggaatagatattcaagctgtgaatgttgttatcaattttgatttccccaagaactctgaaacatatctccacagggttggtagatctgggagatttggccaccttggtctggccgttaatttgatcacctatgaggatcgatttaacttgtataggattgaacaagagcttgggactgaaataaaaccaattcctcctcagatagaccaggctatatattgccaatgatcaggcagttttcatctttgttcatttctccgtgattaataaggagacaacttttgtaaataccagctcatcaggttttatggtgttgatctcatttggtgcatcggagacaattctaagttggtggattacgtgagacgaggcacccgacttttcctgatcaccttgtcatgctgacactattatggctatatgagggaaaatgtcctgccacactaggcacaaagtagtgtatattactaggtgcctattcctagaccctgtcctgctttgagttcgtttgtatttcccttgttttccgtacgccgtgtcgttaagcagtttcacacaggacattttaaccctgttgctggttctgggcgtgtggcctgtgggtgccgcgcacaagggtaaaagacattttagcccaagtggaacttggggatgtgcgcctcagattggttaatgggtgtgacaagtcggccatcacacttgaggtctggagtctgaacggtagtgaagtgattttaagtttgccaataatcagtggtaagctgcaccgtgctgtgctgtcttttacccttgcaaccatgtccctttgcttcttggcatggtcgccatttagattctgtccggcgaatgtaacgctgggataaaacgttcttgtcgtttgtgatggatttatgtgtttggcacaagcaacttggccaggttatgggtaccagaactgtctacttgtttcttccataataacaaactttgcagttcttttgtactc

SEQ ID NO: 30697 - DNA, 1774 bp, Zea mays
  Clone ID: UC-ZMFLB73065D10_FLI
ctgagcttcttgatgaggtgggctcaagataccttgatcacttgataattgaaagaaaatatgctgaagctgctcaacgctgcccaaagttgttgcgaggatccccttcagcatgggagagatgggtcttccactttgctcatctccgccaacttcctgttttggtcccttatattcctacagaaaatcctcagctgagtgatactgcatatgaggttgcccttgttgctctaactaccaatccttctttccatgaacttctcttgactactataaaaaattggccaccgacattatactcagcctcaccggtcatatctgccattgagccacagctaaactcctcatcgatggctgattcattgaaagagtcattagctgaattgtatgtgatcaatggtcaatacgaaaaggcactttctctttatgctgaactcctgaagccagaagtattcgagtttattgagaaatacaacttgcatgatgccattcatgataagattgtcaatcttatgatagtggacaataaaagaacagttcacctactgatccaacatcgtgatatcattcccccatatgaagttgtggagcagctgttgcataccagtaaaaaatgtgacaagagatatttgttacacctgtatttgcatgctttatttgagatagatatacacgctggaaaggattttcatgatatgcaggtggagctttatgctgactacgagacaaggatgctactacccttccttcgaaccagtcagcattacaggcttgacaaggcatatgaaatctttgcacaaaaagaacttgtaagggagcaagtttttgtccttggtcgaatgggcaatgctaaggaagctctgtcgacaattataaacaaactggaagacatgcaggaggctgttgaatttgttacggaacagcatgatgatgaactgtgggaggaactgattagacaatgcctccagaagcctgaaatggtagggaatctattggaacatacagttggcaatcttgatcctctgtacattgtcagtttggttcctgatggcttagaaatacctcggttgcgggatcgtcttgtgaaaattgtgacggattaccggacagaaacttcattgcgaaatggatgcaacgatatacttaaggctgactgtgttaaccttttggttaaatactaccacgaggctcggcgtggggtatacatggtaagcatggacgaggaggtacacggaaacagagctgacgatggatcatcgcggggacacgagagatcatctagcgtccgggctctagatatcaagtccagaacaagatgtggtgcccggtgttgtttgtgcttcgatcctttgcctatccaggacatatctgtcatcgtgttctactgctgccatgcgtatcatctgtcttgccttgaaggtggcttagactcgatgagatcaaacagtggtcaggatagtgacggaggcatggacgatgaggatggttccccatcaggccagtctcgcatgcgctgtgtcttgtgcactactgctgcttcataattttataccgtgttgggtagtacacactaccttgtgttgtgttgtaagttttgagccatgtaattattgtgttcttttcgcgtgttacacataacacatgcttacaatagcgtaattcttttgagggaggccatgtcctcggcaaggagagttctgtgtaaatttgatgaaccagcatgagcaaagctgtgcggcatttccatctttttttaatgccacgtttgccagat

SEQ ID NO: 30698 - DNA, 1061 bp, Zea mays
  Clone ID: UC-ZMFLB73065E11_FLI
cggtgttaaatctgaggagttagttcaaggactggatgctaagtacaatcaggagcaagctggtgaaggtgctaaatctgaggagttagttcaaggactggcatccattgatcttccgggggacatattttcgtctcccttgatggttggtggacgcatctttgttggatgccgagatgatcgattacattgtctcaccgtcaccacatagtttcaagtgattttgctggaggtgatatagttttgcccatgcctgctgcccgacaacctctcttccgcgacaagggcctttggcctttcctattggtaaggtgcgtggcaggctggcagcacaacacaggccacgaatgagtttggttgaagctcctgattgcatttggtgatttgggtctccaatgattgctttccatgtctacacaagaagctttccacagcctgctctcgcctaagcaagtgctacttgatgtcttgatcaaagtgagtggaaacctctcaacctcacattctccttgcagcatctgtattcagcccatgtggaacctttgccactgtcctgcaaggctggtcagtcatgccgctgttcccttcagtggaaattaactgataggaagaccagtgatttgcggagactgtaaaaattgttccacatagatctatactatttcctaaaaggagtttatgacagggacaatattctccaagaaatggttcgagtcgatccagcttcctgcaccagaaatgtactagtctctaggagtagaagttttttctttgcattaggtttcatgtttttttacttaccttgcatgcttccagaactctcgctgggaatgcacacatttttcatttcctttggctattagtagggatgccaatggagaattccccgtcgggttttggctccactatagaaaacgatccccgcggggatccctacgaactcttcctaattccccgttctctcgcggggataaattcccgtcggggatctctgtccccgtttaaattataatcatgatatacttttttttgttatgaatacaaaatattgtcacttgtat

SEQ ID NO: 30699 - DNA, 1412 bp, Zea mays
  Clone ID: UC-ZMFLB73065F02_FLI
attcttttgttcattgtttttagtttatcttatatatttgtgaagcactaatagcatgtgtgtttccatttattgtgttcattttgttacattctgtcactgcaaacaggtcactacttttcctttttcttctgtaaaatgtaactggttgctccctgtggttccactctcactttgcaggcgacaattagaaagtaatagctcacatggagatgatggttcagaccgcctggttgggaagggtgatctgagactgaaactcatgaggaaaggcttgttgccgaggagcaatggtagtgcagaacagaatgacatagatctccgtgaaaagctttctcgaaaccataagttaccaaattatgattctagaggtcatgctgcagaatcaagggctagttatgatatgagagatgagcctccagagttaagttccagatattcttcgagggaggatgtcctagggtcgaggcactcttctgttgtaagtcgagttccttatgcaagaagtgtggatgatttgttaaagttggattattcaagaaaatcctacccgtcatggacagatgatggtttgaggcacagatcacctgaaaggatgttaaaagttcggagcgatatgtatccacggatagcttatgatcagattaggcccatgccaccccttaggtctgctggttcctcgagacctcaaagttttattacaagagatgctcctgacacgtcaaggagccaaccatatgctggcaaatccaccatttctattgatacagtacagaggactaatggaatcactccatctactgcagctctgcctaaggcccctgttatggatgaagccccgcttacagttactggattgctgaactcgttgggtcttgagaagtatgttgttctctttcaggctgaggaggtggatttgtctgcattgaggcaaatgggagagagcgacctcaaagacatgggggtaccaatgggcccgaggaagaagattctccttgcagttggccctcagtccaaataacgccaaagatgagcaaacagggtgtgggtctaagaacatttgttggcaaccgaaaatattggtgtaagaactccagatataagatattgtatacccaattatccatagtggcggtcttaatccacccttttgttgccgatgacgtttcgtgccgtagttgacatgtaagtctgttcggtcagctgttaatccaggttctatcgttctcggtctgtccggtgcctgccttactgtttttttctttttctttttttaaacagcctgccttactgttattattgcttcgaaatgggacgatacgccatatgcttggtgtacccattgatagttggcttgggaattgatgatccattcagttcttgtgtcagaaatcacaaggcgacgatacttt

SEQ ID NO: 30700 - DNA, 1315 bp, Zea mays
  Clone ID: UC-ZMFLB73066B12_FLI
gtttccttctccgtcagccgcgccgccgcccgcctccccaactgtcaggcgccgcgatggaggctctccacgaggagatgcccttcgacctcgacttccacccgtcgtctccgctcgtcgtcacctccatcatcaccggagagctctgcctgttccgctacggcccggagtcgcagcctgagaggttacttttgttaaaagcccacaaggagtcatgcagagctgttcgttttgtggactcaggaaaagtgattttgtcagggtcagctgattgctcagttcttgcctcagatgtagaatcgggcaaggccattgcccgcttggaggatgcacatgagaatgccataaaccgccttgtctgtcttactgaatctacaattgccacaggtgatgatgaaggctgcattaaggtatgggatacccgggagcgatcttgctgcaacagttttgaagtccacgatgattacatttcagatatgacctatgtggctgagacaaatcagatactggccacaagtggggatggaactttgtctgtgaacaacctgcggaggaataaagtaaggtcacgatctgaattttcagaagatgagttgctatccttggtgttaatgaagcatggtaaaaaggttgtgtgtggaactccaagtggagcactcttattatattcatggggatactttaatgattgcagtgaccgctttatcggacacacgcagtctgtggatacaatgctgaagctggatgaagacactttggtttctggatcatcagatggtgtgatcagattggtgggcatcctacctaataggataaaacagccacttgctgaacattcagaataccccattgaggcccttgctttgtcaaacgacaagaaatatttaggcagcatctcacatgataaaatgctgaagctctgggacttggaagaactcttgagtggcccacaggtagccaatggtgatgaacctgctgaagctggtagtgatgacagcgatgacgatagcgatgatgatgtgatggatgtagacatggcggcaacctcttctaaaggttcaaggagtaaaaaggcaggtaaaggacagagttcgagtcggccggcatcggatttctttgcagatctatagtcgtcaagtttcctaagttagaagctgtgtactctcctctctggttttttttgggttactgtacgcgagtgcgtgtgcgagtgggcaactttgaccgccggtgcaaggcatgccaaatgttgttttatttataagtatattgctgatggcatttatcagaagtagaagcagtaagtgttgtggac

SEQ ID NO: 30701 - DNA, 660 bp, Zea mays
  Clone ID: UC-ZMFLB73066C01_FLI
gtcgggaaagaaaacctgggctcagatgtcatgtgctcggcctgtcagatggctgtcgtgtggatagagaaccagctccgcgaaaacaagaccaaggagctcatactgcagtacgctaaccagctgtgtgagcgtctgccgagccccaacggagagtcaacagtcagctgccaggagatctccaagatgcccagccttgcgttcaccatcgcaaacaagaccttcaccctaacaccccagcagtacattgtgaagctggagcaaggaggccaaaccgtctgcatcagtgggttcatggcgtatgacgtgccaccgccgcgtggtcctctctggattcttggggacgtcttcatgggagcttaccacacggtgttcgacttcggcaacgacaggattggcttcgcggaatctgcatgagtgtggagagcactctcatctttataaagacgataccctatgtattagggatgtgtagtttactgtctatccactacatgccaacagtacgctgcaaataaatcggtggccaaaattgctgaaaccagaaacgtgaacagtactgctttctttgtttctggagaagagcaaatggatgcttcaagacatgcatgtccgatgtgtattgagaaatagagcgacgagtgctgctcgatcgtcttg

SEQ ID NO: 30702 - DNA, 1014 bp, Zea mays
  Clone ID: UC-ZMFLB73066F01_FLI
gctgggaacttatgaaactgcgacggtggatgtgatcggtgacgggttccgtgcgagggatataacatttgagaacagcgctggtgctggagctcatcaggctgtagcgttccgttctgacagcgatcggtcagtgctggagaatgtggagttccgtggacatcaggatacgctgtatgctcacacaatgcggcagttctaccgcaggtgccatattgtagggacagtggattttatatttgggaatgcagcagcagtgtttgaggaatgtgtgattaagactgtaccacgggccgagggagctcagaagcgcgcacgaaacgtggtggcggctagtgggaggattgatccggggcagacgacagggtttgtatttgtgaattgcactgtggatgggaacaaagggtttgtggaattgtttcggagaaagccagattcatacagactgtatttgggccggccatggaaggagtatgccaggacattgtatgtcagctgttacttggggacagttgtcaggccggagggatggcttccatggcgaggtgattttgctctcagtacactgtattatggagagtttgacagtcgaggccctggtgcaaaccacacagcaagggttgagtggagcagtcagacaccagaacagtatgtcaaacacttttcaacggagaacttcattcagggccatcaatggattgcgtactaactacagtgtaaattgttgttcttggatcagtgacttattggcaccttaagactgtctctagtaaactatgcagaataggagatacggaactatatatgacactgagaggagtttgaaataaggaatgtgatagaggatgtgatagtgaatctgctggagatagcctaacagcacgatagtgaaaattttctggaacggtaaatacattcatccattattccaaggatctcgagacacatgtggttcctgttagaaaatccaaactgatgtggttcgtgttttgttttcttactatatatgtacct

SEQ ID NO: 30703 - DNA, 1598 bp, Zea mays
  Clone ID: UC-ZMFLB73066F02_FLI
ccgctgcgggccgtcatcgacgcggcagaggcgagcgggctcagcctcacggcggcgccgtactgggagggcgtcagcgtcgcggggctcgtgagcacagggtcccacggcagctcgtggtggggccgcggcggtgccgtgcacgaccacgttgtggggctcaggctcgtcgttaccgccggggaggctgacggctgggccagggtcctgacgctgcgcagaggcgacgagctcttcccggctgcgcttgtctcgctcgggctgcttggggtcgtctccaagatcacgctgtcactggaaccgaggttcaagcgcagcatcaccttcgactacaggaacgattccaccttccaggacgacttcgccgctcacgcggcgagccacgagttcgccgacatcacctggtacccgtcccagcacacggccgtgtaccgcatcgacgaccgcgcgccggccaacgcgcctggggacggcgtcaacgacttcatcggcttccaggcgacgcccatcgctgtcaccgccgggctcagagtggtagaaacttcactggagcggtccaagaacatgaagggcaagtgtgcgatggcggcggcggagggcgtggcgaagcggctggtcggcaacgggctgaagaacaacggcctgctgttcacggggtaccccgtggtggggtaccaggggaagatgcagacgtcgggctcctgcgcgcgctcctcggcggcggacctgctcagcgcgtgcgggtgggatcccaggttccacggcctcttcttctacgagagcacggcgatcttctcgccggcccggttccgggacttcatcctcgacgtgaagcgcctgcgggacctcgccggctcggacagcctctgcggcgtcgacgtgtacaacggcctcctggtccggttcgtgaaggcgtccgcggcgcacctcggccagccggaggactccgtcgtggtggacttcaactattaccgcgcgtcggactcggcggcgccgcggctgagccaggacgtgtgggaggaggtggagcagctggcgttcgtcaagcacggcgccaggccacactgggccaagaaccgtttggtggcgttcgccggcgtgcggggcaagtacccgcggtggggccagtttgcggcggctaagcggcagctggacccccggggcttgttcgacagcccgtggtcggacgaggtcgtcggcggggtggagctggccaagggcgacgggtgcgcgctggacggccggtgcgtgtgctccgaggacaggcactgcagccccgagcaggggtactactgcaggccggggctcgtgtttacggacgccagggtctgcaggtactcggggtcgcagaaccagtgagtcaccatatttctctgtggattggtttcgagcttgactgaaagctgtgagccgtgtggataatagatttcacatttaaagagtgcttgtagctatacgttagggtcataatacaaaaaggagaagaatttctgtaatattggcattctagaaattaaatcagtgacaatgaagaagttacatgtatcaaatatccttataaaggaagggaatcctaagaatatatgatttaaaatgct

SEQ ID NO: 30704 - DNA, 1349 bp, Zea mays
  Clone ID: UC-ZMFLB73066G01_FLI
ctttcttgatgttgattaaagacagcgataggcatgtgagaagagcagcagttctggctttgagcacagcagcgcacaacaagccaaatttgattaaaggtcttctattgctaagtgtgttgctgttctatgcttagcagctggtgaccagaagtgtgcatctacaattgaaatgcttaaaggcattttgaaagacgacagcactactaactctgctaaacaacacatggccttattatgtctgggagaaattgggaggaggaaggacctcagcaatcatgttcaaattgagaacatcgtcattgaatcgtttcaatcaccttttgaggagattaagtccgcagcatcctatgcacttggaaacattgctgttggcaacctctccaagtatttaccatttattttggatcagattgacaatcaacagaagaagcaatatctgttgctccattcacttaaagaggtaatcgtgcgacaatctgttgatcatactggccagagtgagctacaggattcaaacattgagaagatattggcattgctcttcaatcactgtgaaagtgaggaggagggagttcggaatgttgttgcagagtgtttaggaaaaatttctctaattgaaccaaaaaaactagtccctgctttggaggtacgcacgtctagcccagcagcaaatacaagagctacggttgctattgctataaaatattcaattgttgaacgacctgagaaaatagatgaaatcatgtactccaagatatctactttcttgatcaagtgaatccatcgtccttcattgtacctttcctcttgtctggtttaggtgaccattacgacgtgaaaatgccttgccatttgattctatcaaagctagcagacaagtgcccttccgccgtccttgctgtcctggactccatagttgaaccaatcgagaaaactataagccacaaacccaagggggatgcagtgaagcaggaggttgatcggaacgaggacatgatccgcagcgctctcagggcaatatcttctctaagccgcataagcggcagcgactacagcatacggttcaagaatctgatgaacaagataacggccacccccgcgctcgccgagaagtacaactcggtgcgcggcgaatgagacctgggttcttgtacatggtagaggaataggttaaacacccagagttgtcgcgcgctcgtcaatcctgttgccgcttccccgcatggttgctgaggcaaaagtctgtactctgatgatgacggtggttgatttttgactgctggacatagttgtcttgtacaaaatctggtggtaaattcagtagaattgccgccgatacatttacc

SEQ ID NO: 30705 - DNA, 1739 bp, Zea mays
  Clone ID: UC-ZMFLB73066H03_FLI
ctgcagacaccaccgctcgtttttctctccgggacaggagaaaaggggagagagaggtgaggcgcggtgtccgcccgatctgctctgccccgacgcagctgttacgacctcctcagtctcaggagcaagatgggtgccggcggcaggatgaccgagaaggagcgggagaagcaggagcagctcgcccgagctaccggtggcgccgcgatgcagcggtcgccggtggagaagcctccgttcactctgggtcagatcaagaaggccatcccgccacactgcttcgagcgctcggtgctcaagtccttctcgtacgtggtccacgacctggtgatcgccgcggcgctcctctacttcgcgctggccatcataccggcgctcccaagcccgctccgctacgccgcctggccgctgtactggatcgcgcaggggtgcgtgtgcaccggcgtgtgggtcatcgcgcacgagtgcggccaccacgccttctcggactactcgctcctggacgacgtggtcggcctggtgctgcactcgtcgctcatggtgccctacttctcgtggaagtacagccaccggcgccaccactccaacacggggtccctggagcgcgacgaggtgttcgtgcccaagaagaaggaggcgctgccgtggtacaccccgtacgtgtacaacaacccggtcggccgggtggtgcacatcgtggtgcagctcaccctcgggtggccgctgtacctggcgaccaacgcgtcggggcggccgtacccgcgcttcgcctgccacttcgacccctacggccccatctacaacgaccgggagcgcgcccagatcttcgtctcggacgccggcgtcgtggccgtggcgttcgggctgtacaagctggcggcggcgttcggggtctggtgggtggtgcgcgtgtacgccgtgccgctgctgatcgtgaacgcgtggctggtgctcatcacctacctgcagcacacccacccgtcgctcccccactacgactcgagcgagtgggactggctgcgcggcgcgctggccaccatggaccgcgactacggcatcctcaaccgcgtgttccacaacatcacggacacgcacgtcgcgcaccacctcttctccaccatgccgcactaccacgccatggaggccaccaaggcgatcaggcccatcctcggggactactaccacttcgacccgacccctgttgccaaggcgacctggcgcgaggccagggagtgcatctacgtcgagcccgaggaccgcaagggcgtcttctggtacaacaagaagttctagccgccgccgctcgcagagctgagaggacgctaccataggaatgggagcaggaaccaggaggaggagacggtactcgccccaaagtctccgtcaacctatctaatcgttagtcgtcagtcttttagacgggaagagagatcatttgggcacagagacgaaggcttactgcagtgccatcgctagagctgccatcaagtacaagtaggcaaattcgtcaacttagtgtgtcccatgttgtttttcttagtcgtccgctgctgtaggctttccggcggcggtcgtttgtgtggttggcatccgtggccatgcctgtgcgtgcgtggccgcgcttgtcgtgtgcgtctgtcgtcgcgttggcgtcgtctcttcgtgctccccgtgtgttgttgtaaaacaagaagatgttttctggtgtctttggcggaataacagatcgtccgaacgac

SEQ ID NO: 30706 - DNA, 1790 bp, Zea mays
  Clone ID: UC-ZMFLB73067A02_FLI
ctctccttttgctcggaacgcacacaccgcccggtctccgatctccgatccccgatcccctcgtcgatccaagatgcagatcttcgtcaagactctcactggaaagactatcaccctcgaggtggagtcctctgacaccattgacaacgtcaaggccaagatccaggacaaggaaggcattcccccggaccagcagcggctcatcttcgctggcaagcagctcgaggacgggcgcacacttgccgactacaacatccagaaggagagcaccctccaccttgttctccgcctcaggggaggcatgcagatcttcgtcaagaccctcactggaaagactatcaccctcgaggtggagtcttctgacaccatcgacaacgtcaaggccaagatccaggacaaggagggcatccctccggaccagcagcggctcatttttgctggcaagcagctcgaggacgggcgcacgctggccgactacaacattcagaaggagagcaccctccacttggtgttgcgtctcaggggcggcatgcagatcttcgtgaagactctgactggcaagactatcacccttgaggtcgagtcttctgataccattgacaatgtcaaggccaagatccaggacaaggagggcatccctccggaccagcagcggctcatttttgccggcaagcagctcgaggacgggcgcacgcttgccgactacaacattcagaaggagagcaccctccacttggtgctgcgtctcaggggtggcatgcagatcttcgtgaagacacttactggcaagacgatcacccttgaggtggagtcctcggacaccatcgacaatgtcaaggccaagatccaggacaaggagggcattccaccggaccagcagcggctcatctttgctggcaagcagctggaggatggccgtacccttgcagattacaacatccagaaggagagcaccctccacttggtgctgcgtctcaggggtggcatgcagatcttcgtgaagactcttactggcaagacgatcacccttgaggtggagtcctcagacaccattgacaacgtcaaggccaagatccaggacaaggagggcattccaccggaccagcagcggctgatcttcgccggcaagcagctggaggatggtcgcaccttggctgactacaacatccagaaggagagcaccctccacttggtgctccgcctcaggggtggcatgcagatctttgtgaagacattgactggcaagaccatcaccttggaggtggagtcgtctgacacaatcgataatgtcaaagccaagatccaggacaaggagggcattccaccggaccagcagcgcctgatctttgctggcaagcagctggaggatggccgtaccctcgccgactacaacatccagaaggagagcaccctccacctggtgctccgcttgcgaggtggtatgcagatctttgtgaagaccttgactggcaagaccataaccctggaggttgagagctccgacaccatcgacaacgtgaaggcgaagatccaggacaaagagggcatccccccagaccagcagcgtctgatcttcgccggcaagcagctggaggatggccgcaccctagcagactacaacatccagaaggagagcactctccacctggtgctccgcctccgcggtggtcagtaagccatggttcatttaagctgctgctgtacctgggtatctgcgtcgtctggtgccctctggtgtacctctatatggatgtcgtcgtctaataaacatctgtggtttgtgtgtcatg

SEQ ID NO: 30707 - DNA, 2559 bp, Zea mays
  Clone ID: UC-ZMFLB73067A12_FLI
ggaaggctcgaaggggatgggttctcctgggtgctcggagatagtcgaactggtggacgagccgaaagatgctcgttcgtgtgggcttacccacttgagggtgagggtcaagccagtggggcaggagcttggggcacggtcgtgctcggtggaggatgatcttgaccagctcatcagatcgatcaacgtgcgcacgtcggcgagggcttctgggcagacgagcacggataggcggcttattgcgcttgggaagtcgccagtgtcgagctcagagattgtggagtccgtgagcctgaagcaggccctgaggaagatgtgcatctcacaggcgtcggagatggcagccatgaagagactgtcaaaaccgacaggggtgtccaccccttctgattctggagcaatcaagaagctacatggctctgttgcagttcaaaccaatgaggagcaagatgacaagagtaaggcagggaaagtttctgtgaagcctgagaaatcggcaggaagttcagtgggtaagccaagtgaaatcagtaaggggcagagcaagagctcagccaagaagaatttgagatcagcatctcctaccacagggaatgttcataaaaccagaatccaagatgtgatcagtaacaagtcatcagagggagttgaaggtatttctgtagaagtaactctgccaaagcagagaaaaggtaaatcaatgaaaacatctagcccccgggctgttcctgtaggtggctcacggttggtgaggccaatgtttcggaataaaacctcgacgaaaaagaaggtgaaacctgaacctgctatagtgcccgcatcacacaagcattgtgagacgaaaggtcctaaatctcacactagtaaacatcaggagtcccttcaggatgaacccagaaccccagcgccaactgacaagaaggctgctgtcagctccaccactgttgatggagctgattttggcactaaaggatgtggtgtcggtgtgatccatggctcgaaggttggtgagttgttaagatcaaaggagaagggagaatgctcccaaagctctaagagtagcattggtgattatagcaccagcacaagcatcagtgaggacagttatggcagcttcagtgctaacagaagcaggcctcacatgtcaaaggatgtgagatggggagccatcaggcgcatggctatccaacaagggagcttgggattaaagaacttcaagcttctcaaacaacttggttgtggggatattggcactgtttatttggctgagttagtgggctcagactgcatgttcgcattgaaggttatggacatcgagtacctcataagcagaaagaaaatgctcagagcacaaactgagagggagatactgcaaatgctcgaccacccattccttccaaccctgtattctcatttcacgacggacaacctttcttgtctggtaatggagttttgccctggtggtgacctacatgttcttaggcagaagcaacctaccaaaaccttttcggaagcagctgcaagattttatgtcgctgaagtcctcttagccttggagtatctccatatgttgggggtcatataccgtgatctgaagccagagaacatccttgttcgtgaagatgggcacatcatgctctcagactttgatctgtcgctgaggtgctcagtgagcccaatgcttgtgagaacatcatcagtagacagagatgagccaagtaggccttctggtccctgtgcacaaagctgcattgatcccctgtgtatccagccatcgtggagcaattcgtcttgcttcacgcccagtctggtttcatctacaccgtcaaggacacggaggactagagctgaacccctgaagaaaccatcacttccacagctcgttgttgagcctacggaagcaaggtcaaattcgtttgttgggacccatgaatatcttgccccagagatcattcgaggagatggccatggcagctcggttgattggtggactcttggaatcttcctttacgaattactctatggcaagacaccattcaggggaccggacaatgacgaaacactctcaaatgtgatctcacagggcttgaagttccctgacagtccagcattaagcttccacgctcgagatctgatcagagggctgcttgtgaaagaaccggagtaccggcttggctcgtcgagaggagctgctgagattaagcggcatcccttcttcgaaggtctgaactgggccttgatccggtggacttcaccaccagagaccccgaaaaatattgatactgcagcaacactcgcgggaacacgcaagaaaaaggaaggcaaatgtctggaattccggctgaatggcgacgacatcgagttcgagctcttttagttgtagctgtagtggtagtcccaatgatatatcagtaccacgtaagcgcaagagtagtctttagtcccccttccttgcagatttctgttcatccttggtcatttcggacgttgggaagtaaggtaaggttggctgataagcatgtaactttatgcgttgttaatactatccaatattagaag

SEQ ID NO: 30708 - DNA, 1253 bp, Zea mays
  Clone ID: UC-ZMFLB73067C03_FLI
gtcgtcctcatctggctttacgccttcttcctgacggtcggcggtgcctataagaatgctgctcccaagacccaattccactgccgcactgatcgatctgggcttgttgggggcgctccatggataagtgtaccctatccgtttcagtggggagctccaacctttgatgctggtgaagcctttgctatgatggcagcttcttttgttgctcttgtggagtccaccggtgcatttatcgctgtttcacggtatgccagcgcaacaccatgccctccttccgtcatgagccgtggcatcgggtggcagggagttggcattttgctgggtggattatttggaactgccaatggaaccactgtatctgtcgaaaatgctgggctgctcgctttgacacgcgttggtagtagacgtgttgtgcagatttctgctggatttatgatattcttctcaatccttggtaaattcggggctgttttcgcatcaattcccggcccagttatcgcagctgtatactgtcttctcttcgcatatgttggtatggcaggtgttgggttcctacagttctgcaacctgaacagcttccgaacaaagttcatcctgggattctccttgtttatgggtctgtcggtgccacagtatttcaacgaatacacttccgtcgcgggctttggtccagtgcacacgcgtgcaagatggttcaacgatatgatcaacgtggtgttttcctcgaaggcgcttgttggcggggcggtggcgtattttctggacaacaccctgcacaggcgcgatggcgtcgcgaggaaggaccggggccaccatttctgggacaggttcaggtccttcaagaccgacccgcgcagcgaggagttctactccctcccgttcaacctcaacaaattcttcccgtccttctgatccttgctggtgctggtaactgagagcagaaaaaatggctttggactgtgattttgttggcaatgccacgccgcccaagagggctgtttctcctacttctgttgtggtgagctttgaatcttgcagagctcagcgtaaactatttcgaaaggagtggagaaattgcttggtattgctggatgtaaattgggtcgggaaccgggatagattgataaaatgaaaacagaactgcgccagtactctttctgtagattataaactattgagctccagtgctattttagagtaaactaatgctggttgatgtgcaatcattgcatactctgcagtgagatact

SEQ ID NO: 30709 - DNA, 2439 bp, Zea mays
  Clone ID: UC-ZMFLB73067D07_FLI
aattcctctccgggccgagcagccgttccaatccgctcacgccgcctctctcgctgccccgcttgaccgcctgctagcgctgcagtttgatgctgatgacctgatccctccgttgggtaggttcttgggcgcggaaagaacaaagaactcgtggtgggtccgggtccgcaagaccctaggtgttcgtcagcagcgaggatgcccggcctgcctctgcctcaatcgttaaatcagaatattggatgtgaatatgcctatcctgggtctacaggccaggccttccgtcagcagctaagaactgcattgtctccagatgagaaacttaccgctgaaaaagatttggctctgtattgcaagccagtcgagctctacaatattattcaacggcgagccatgaaaaatcccctttttattcaaagatgccttctttataatatacatgcgaggaggaaaaagaggattcagataaccatatcactttctggaagtacaaatactgagttgcaaacacattatgtctttcctctttatgttctgttagctagacccactagtaacctttcacttgaagggcattctccaatttatcgattcagtcgggtttgcttgcttacttcctttagtgaacatggaaataaggacaacagtgaagctacattcatcattcctgacgtgaagagtttgtcaacctcccgtgcttgcaaccatgatattatctttattagctgtgggcaagttggacaaagtaatggtgaagataactgctctgggaaccatgtggaagattcttctctccaaatgcttgaagggaaatgctcctggggtaaaataccaactaatttacttgcttcatctttggagagttgtgtcaatttaagtttgggacatattgtggagttggcatctaaagttacaatgagaccaagcttcttagagccaaaatttctggagcaagacagttgcttgacattttgctctcataaggttgatgctgtgggttcatataaactacaactatgcatgtccgcacaagaggctggtgcaagagatatgtctttgtctccatatagtagttactcatataatgatgtcccaccttcgtcattatcagatatcataaggttaagatctggcaatgtactttttaattacaagtactacaataatacaatgcaagagactgaagtcactgaagatttctcttgtccattttgctatgtacgatgtggaagcttcaagggtctaggatgccatttaaactcatcacatgatctattccactatgagttttgggttgatatctgaagagtaccaggttgttaatgttagtctgaaggctgatgcttggagaacagagtgttcttccaaaggttcgtttaaatggaggctccacttagttgggcaaaccgaaggcattgcatgttccttagtccaggacgactccctgctttgtgatttccttcctttcttgagtgcagaagccaaggatgaaagagcattggctattctatatctccaatcaaattccttacatagtgtattgtgtacctcaatgattttttggtggataatgttttacatgcttaacaatgcatggttactatttctttaaatggaagcactcttaactgtatttggtaactaatgatcctaactggcagctttttgcggagggcgttgatccaaggcatcaaacattttcttatcgctcaaggtttaagaagcgtagacgatcaaagaacacaatggagaaaatcaggcatgtacactcacatattatggaatcaggttcacctgaagatgaggcaggatctgaggacaactttgtgcaaggggagaatgggacttctgtagcaaatgcttcgattgatcctgctcaatctttacatggcagcaatctttcaccaccaacagtactacagtttgggaagacaaggaagctatctgagagatctgaccctagaaatcggcaactcctgcaaaaacgacagttcttccattctcacagggcgcagagtgttagctgatggtcatataccttgggcctgcgaggcattctcccagttgcatggacgacaacttatacaaaatcctgctctgctgtggggttggcgtttcttcatgattaaactttggaaccataacattttagatgcccgcactatgaacacatgcaatacagtccttcaaattttacaagaagaaagcacaggactaaagtaattttgatgcttctgatgaaaattcaagggaagaagatttctttaccatttccaagaagaaagcatagaattggagtaactttttattgataatttcattcatatctattgtcaattgtattaatggtttttaaaagagacaaatcatgtctaactctcacgctgtaatattctaagtcgtacgtgaatttgatgaatattcattgttgttttactt

SEQ ID NO: 30710 - DNA, 708 bp, Zea mays
  Clone ID: UC-ZMFLB73067E04_FLI
cgaattccccagggtacggtccacttcgctcgcaaccttccccagccatggcgaccgcgacgcggaggctgctccccgcgctcctcaggaccctagctccagccggcgcgcgcggcctctccaccgagaaggctgttggcgcagccgccgtcgtcggcagccacaccgctaagtggatgcaggacacgagcaagaagtcgccaatggaactgatcaacgaggtacctccaatcaaggttgatggtcgcattgccgtctgtgatggggcttctgaaggtgttggacttggccacccaatcgagtacatctgccttgatctggaggcacctaatgtgtgcaagtactgtggtctccgttatgttcaagttcaccatcactaaattgagaagataatgctgtctaccgctgcagaagctgagttgaggagtttatgtgcacacacatttgttccacaatgttctgtagcgtactttgaactatgcttgcgggcaaaatattacctttgatgatcatcctcttctcgggcgatcttttattaatcctgtcttagtatggttcatttttctacagatgaattgtgctcctttttcagaatctatacaagctgtgtgtattgaagttttactctgaataagcatggaactaactctaaggcaatttaatctcagaagttctagttttctggagttccatgatccagacgttttc

SEQ ID NO: 30711 - DNA, 1155 bp, Zea mays
  Clone ID: UC-ZMFLB73067E05_FLI
gaaatttcgtgagaacaactaccatgcgggaattgtgagggcagcaatttatccgggagatgtgctctctattcacatgaagaagccacagggtttcaagtacaagagtgggatgtatctgtttgttaaatgcccagaagtctcgcccttcgagtggcaccccttctctataacttcggcaccaggcgatgactacttgagtgtgcatatccgtacgctgggtgactggacatccgaactgcggatgctttttgggaaggcttgccaggcacaagtaacttccaagaaggctacccttacaagacttgaaactacagttgtggcagacgcccagacagaggacactaggtttcccaaggtctacatagacgggccatacggtgcaccagcacaaaattacaggaaatatgacattcttctgcttattggccttggaataggagcaactcctttcatcagcatactgaaggatatgttgaacaacctaaaatccaacgaagaggtggaaagcatccacggctctgagataggcagcttcaagaacaatggtccaggaagggcttacttctactgggtcaccagagagcaaggatctttcgaatggttcaaaggagtcatgaatgaggttgcagggagcgatcacagcaatgttatagagatgcacaattacctgaccagcgtgtatgaagaaggtgacgcaaggtcagctctgattgccatggtacagtcacttcagcgtgctaaaaacggcgtggatatcgtctccggcagcaagattcgaacacattttgcaagaccaaactggaggaaggtattctgtgatttggccagcgcacacaagaactctcgcataggagttttctattgtggatctccgacgctcacaaaacaactgaaggatctttcgaaagaattcagccagacaaccacaacccggttccatttccacaaagagaacttctgagacgtgtacccgaagatccgatggactggaaacataattgtatagggaaaaaatacgatagcattggcatagcagatttagttttacaagttttgatgtatgcggggttgtacaaaatatgtgtagaaagctagatgtcaccatcatacatagattctgaaatgcttgcagctatatatattgcattgcat

SEQ ID NO: 30712 - DNA, 1353 bp, Zea mays
  Clone ID: UC-ZMFLB73067E10_FLI
ccacatcctcccctccttcctccttgggttcccagcccgtgcgcccgcctgtcgcagtcgcaccgcagccgccggccatggcctgcctcaccgacctcgtcaacctcaacctctcggacaccacagagaagatcatcgccgagtacatatggatcggtggatctggcatggatctcaggagcaaagccaggaccctcccgggcccggtgaccgatcccagcaagctgcccaagtggaactacgacggctccagcaccggccaggcccccggcgaggacagcgaggtcatcctgtacccgcaggccatcttcaaggacccattcaggaggggcaacaacatccttgtcatgtgcgattgctacaccccagctggcgagccaattcccaccaacaagaggtacagcgccgccaagatcttcagcagccttgaggtcgctgccgaggagccctggtatggtatcgagcaggagtacaccctccttcagaaggacaccaactggcccctcgggtggcctattggcggcttccctggccctcagggtccttactactgtggaatcggcgcggagaaatcgttcgggcgtgacatagtcgacgcccactacaaggcctgcctgtacgcaggcatcaacatcagtggcatcaacggggaggtcatgccggggcagtgggagttccaggtcggaccgtccgtcggcatctcttcgggcgatcaggtgtgggttgctcgctacattcttgagaggatcaccgagatcgccggcgtggtggtgacgttcgacccgaagccgatcccgggcgactggaacggcgcgggcgcccacaccaactacagcaccgagtccatgaggaaggagggcgggtacgaggtgatcaaggcggccatcgagaagctgaagctgcggcacaaggagcacatcgcggcctacggcgagggcaacgagcgccggctcaccggcaggcacgagaccgccgacatcaacaccttcagctggggagtcgccaaccgtggcgcgtcggtgcgcgtgggccgcgagacggagcagaacggcaagggctacttcgaggaccgccggccggcgtccaacatggacccctacgtggtcacctccatgatcgccgagaccaccatcgtctggaagccctgaggcaccccgtggccgtgtcgtgtcggtttgctccgcgtacggcgctggccgttgcatcgcagggcccagcggttgcgcaactattttcccttccccgttctgtttgcttgtactactactctaccgctagtcctgcatagcattttagctagaacacaacaacagccaaaaaaaagtattgttgcttgcttcgacgcttgccacc

SEQ ID NO: 30713 - DNA, 1185 bp, Zea mays
  Clone ID: UC-ZMFLB73067F03_FLI
gaagacgctgtcgtttgatgtgggcatcgtgacgatcttcggcggccggctggacgagcggcgcaaggcggagctgaggaagaattactccgtcgtggagaaggggtacaactccttccccaacagcctgccggggacgctccattacaaggcgatgcaggcgcggcggcggctgcacggcgtgctgtgcgacatcatgcgggagcgtcgtggccaggcccaggcggcgggcaccggcctgctgggctgcctgatgcggtcccggggcgacgacggcgcgccgctcctgagcgacgagcagatcgccgacaacgtcatcggcgtgctgttcgcggcgcaggacacgacggccagcgcgctcacctggatcgtcaagtacctccacgaccaccccaagctgctcgaggccgtccgggcggagcaggcggcggtccgcgtgggcgcacacgaagagcatggcgctaacgcatagggtgattttggagagcttaaggatggcgagcatcatctcgttcacgttcagggaggccgtggccgacgtggagtacaaagggttccttatccccaaggggtggaaggtgatgccgctcttcaggaacatccaccacagcccggactacttccaggatccacacaagttcgacccttctagattccaggtggcgccgcgtccgagcacgttcctgccgtttgggcacggcgtgcacgcgtgccccgggaacgagctggccaagctcgagatgctcgtcctcatccaccacctggtcaccggctacaggtggcaaatcgttggatccagtgacgaggtcgagtacagcccgttccctgtgcccaagcacggcttgcctgtcagattatggagacaaaacaatccggtcgacagaaaggggcgtgagaccgacgacgatcatgtggagaggatatttatttagtttgactcttgagttaggcatgaatttaaccccaagctagctagagaagttttttttcccctttgaaattcttctttgctcgcctcttcctcctggatcaaattgcgttggaggagaagaaacggcagctttctctctttcgttttctttgcctgcttcaccgctacgataatggtgaaaatatgtaagctacgtggacatcaatgatccacagcatcgttgatatatataatatatagagaaaattctctgc

SEQ ID NO: 30714 - DNA, 1047 bp, Zea mays
  Clone ID: UC-ZMFLB73067H10_FLI
acataagcaaccaggttttaaacaagaatgcatacagaatgcatacaagaaagtcaccatggttttaaaccaacaatagaagaatatctcaaagtgcaactgccattcagtttagtgcaactgccatacaagaattaatttaaaccagcaatacaagaactatactgaaccatacaaggcatcatttctcataaggtagatggttctcagtgatctgcttgtccaggaaattactgggaaaatcattccaccaacagattagtgcaactgccattcaatttttcataggttagagctgaaactgaactacaatcaccattcaccataacagaactgcagttgtcaaatttgctcatatcatttgttcaggccatgcatcactcccacgaagcaacctaattttgcgcttgaagccaaatttctctaacatcatgctctgttgttaagaagaaattgttgctcatgggtcatgggttaaaggacagtgttggcttgcagtcccaggaatggtatcagccatcaaagagatgttcatgaagacaaccaaccaccagcatatgctcaactaccacttgcttcacttcacctccatgttttcacgttggccaatactgaggttgagcaatagatgaactcgccggagcttgatcttcttcttgtgggtgacgatggtaggaggcttcctgttcgggtcgacggtctgcgtggccttggcgtcgtccggcgcgaagagcacggcgtcgatgccctgcacggagatcctgccgtcggtgtagatgtccgggtccaagaggtagcggatcttgtgcggcagaaaccagaatcaaatgtacctagtgcggcaggcgcagggtgtcgtagctggctgcaatagagttctactgctgcaagagctggagtggcgttggagttgttcggtggagcggcggaggcgctcgtggcgttggagtggcgttggaggcgctcaagcgttggagcgttggagcggcggaggcgctcgtggacgtggtgcatagcgaagacgagacgaggcggcggagaatcgcc

SEQ ID NO: 30715 - DNA, 383 bp, Zea mays
  Clone ID: UC-ZMFLB73068B08_FLI
tccgagccaagccgctgcctcgacgtccgccacgtcgacgaccgccagaactgcatcgccgcccgccccgaccagcgccccgcagaccagtgcctcgccttcctccaccgcccgcccgtgcgctgcgacgacagcggctgcttcgccccgccgccgccgcactactagagatccatgcgtactctggctctgccggcggtgggagagagacagaaggagagggagacagtcgccgccggctcgccgcgtcggggcttgtaaacttcgcttgtgtggacgtgtggtgagggatgtgagagtgagaccgagagggggggtaaatccgtaaacagaaaacgaccgtatatattatacagctgtaattctttttttcttcttctttt

SEQ ID NO: 30716 - DNA, 1674 bp, Zea mays
  Clone ID: UC-ZMFLB73068B09_FLI
ggggcgacccgggctgcctgagctgcagccccgcatcgcggcctagtagaggcccatcgtcgcgcgacgcgacctagcggcagacgtccttcgtccagccccagcccaagctccagccgccgcttggctcctgccgtcctgcgtcctggtccagcgcttcctctccagctccagcgccgcagcgcgctcgcccgtgcctcatctccagctctccagcgccgcagcgcgctcacggcccaccagcgccagccgccaggccgccaccgcggcaccgccaggcgcccaggcgcgctcgcccgccgaccgccgttgtccttgtccagccgccggagtccggagcaccgagcacgggagcagccgaggcgagcaaccgagcaccgccattgagcaacagtgaccgtgagccaagccgggctctctcaatatcaccacaggaacaaaggatcagaaatggctatgcaggccgcaaggaggctagcatctttgaaactccaacgacccctactccttccctctcaggccgagtccccaagcataagcatcccaaccgcagcggcggcggcagccttcctccactcccatgccaccagcttcgggtacaagcaggttcgcgaagaggataagagcaaattggttggcaacgtgttcagcagcgtggcttctagctacgacctcatgaacgatctcatgagtgtcggcctgcataggctgtggaaggacaggcttatttccaagctgaaccccttttcggggatgaagcatctcgatgtggctggtggaacaggtgatgttgcttttcgtgtactggaaagagttaagagtgtgggtcacagagctatgcagggtactcttactgaaaccgaagaaggcacccacatttatgtctgtgacattaatccaaatatgctaaatgttgggaaaaagcgtgctgcagaaagaggttatagcgaagaacattgtcttagctggatacaaggagatgcagaagctctgagttttgaggatggatctatggatggttacactatcgcatttgggatcagaaatgtgacgcacattgagaaagctctgtcagaagcttacagggttctaaagcaaggggggaggttcctatgcttggagttgagtcatgtggatgtccctatttttaaagagatttatgatgtttactcgttttctatggttccggctattggagagctggttgctggtgatcggcagtcgtaccaatacttggttgagagcatccgtcggtttccgaatcaggaaaagtttgctcagatgattcaggaagccggattccagagggtggaatatgagaacctcgtgggtggtgtagttgccattcattctggactgaaactgtagagctgaatacggatggatattttttcatacgtgcaccgcttctacaattagtagtatttgttttttaaattaattctataataggttcggtggcttgtaaaagcagctggtgctggctgtcagcatcagcacaataagtagtatttgctaataagtagtatttgcgagaagtatatgctggagcagtagcgtcagtggctattttggcttttaagctagctgacctcttccatttgtaaagttttttcttgaaaacgtgaaaccatccagaacatcaaattagtcttatcacatacctcctgcaat

SEQ ID NO: 30717 - DNA, 1885 bp, Zea mays
  Clone ID: UC-ZMFLB73068B11_FLI
ctactttttagcctggtcatttgtccaacctaaaacaatgggttggattcagacattcagtatgggcagtcaattgttggcatttgttcagacttgccgtgactgttagagaccaatgcaggagtgtccgcttgtgattgcaggaagctgaacgcagtttttttttcatttccattttgtaggcaagatttcagacttcagcaacgcggatgttgcagttgaccagtaccaccgtttcgaggaggacgtgcagctcatggcggacatgggaatggatgcgtatcgcttctctattgcctggtcaagaattttgccaaatggtacgggccaagtcaatcaggccggcatcgaccactacaacaaagtgatcaatgcactactatcaaaaggaattcagccatatgtaaccctgtaccactgggacctcccccaggccctggaagacaggtacaacggatggctggacaggcagatagttaatgactttgcggcttatgctgagacatgcttcaaggcgttcggagaccgtgttaagcactggatcacgctcaacgagccgcacacggttgcagtccaaggctacgatgctgggcttcatgcgccagggcgttgctcggtgctgctccatctatactgcaggacagggaactctggcactgagccctacatcgttgctcacaacttcatcctagctcatgccaccgtttcagacatgtacaggaggaaatacaaggcagctcagaatggtgagcttgggatcgcatttgacgtcatctggtacgaaccaatgacaaacagcacgatcgacattgaagctaccaagagggcgcaggagtttcagctaggatggttcgcggacccgttcttcttcggagactacccggcgacgatgcgggctcgggttggagagaggctgcccaagttcaccgcagacgaggctgcccttgtcaagggggccctggacttcatgggcataaaccactacaccactttctacacgaggcataacgacaccaacatcatcggacggctgctgaacgacaccttggcggacaccggaaccatcagcctgcgtgagtcctcatcgtgtgtgtttgcaagttcatttcaactgaaaaaaaagaaacctgaaagatgagaaaccttgaaggctgctactgagccttcaaactgacaacacgtgccaagcttcctatctgtctgtccaaaaaaacttctagcgacacttgaaatttgaaaccgtgggtagctgatacttcgcaatttcacagccttcgacaagaacgggaagcccattggagatcgggctaattcgatatggctgtacatcgtacccagcgggatcaggaagctgatgaactatgtcaaggagcggtacaatagcccaacggtttacatcactgaaaatgggatggacgacggcaacagccctttcacctccctccagaacgccctcaaggacagcaagaggatcaagtaccacaacggctacctcaacaacgttgctgcctccataaaggaggacgggtgtgacgtgcgtgggtacttcgcgtggtcgttgctggacaactgggaatgggccgccgggtacacctccagattcgggctctacttcgtggactacaaggataacctcaagaggcaccccaagaactcggtccagtggttcaagaccctgctgagctccagctgaaggcgtcacacgggctgtgattggactgaccatttacccgacaccatacccttatcctgttgtgtcaagcactcaagctccaatcaatgtaaaataatgttacccctctctctctctctctggtagaaaaacatgtcgtgtagggctacatttagttacacattaaaagggcatatcagtaacttcaaactt

SEQ ID NO: 30718 - DNA, 1265 bp, Zea mays
  Clone ID: UC-ZMFLB73068E05_FLI
ggagaacgaagaggaggggaggggggcgacgtcgccggcggtcggaggcgacggggatgagtcggaaggaggcggagccggcaggacaggatgggtcttcttcgtctgccactgatgggggaggaggaagtggcagtggccgggagctggcagatgcgctggcgcggcgacgtttgtaccgggaggtgacgctggcgctgcactcagggttgcgcgacgccaaggcggacttctccttcctccgcgcgcgtgggctccgcagcctgctcggattccttcgctccaccgcctccgcggccgacgacgcgctgctgctccttttccgccactcccaatccatccccgatctccaagttattcctgttctctttcagaattcgttgcatcaaccaaagcaagatcctgttgtgacattggatcatatatttggaacggaaccaatgaagattacaagcccccctacaggttctgaaattgctcttgcacttagagtcttggaaggttgttgccttttatatagccgatgcacagctctggcccacaaatacaaggctgtgaaggtactcttgaatatattagccagccgaggtccaactgagcaaggagtttgcttggacacactgatatcgctgatgttggactcaccctccaatcagatggatttcgaagaatacagtggacttgaaaaggttgctgaacttttaaaggatgtgcaagtggaaaagcatataagattgaaatgtggggaattcctattgttgctcattggacatgtttttgtgaaggaaaactctcccatacatgaacaaatgaaaaatctgtttggtgagcagtgcgcatcacttatatgggcagcaagccggttcggctccaccttggatgcagagcaaaggcagacgaccttgcaaatacaagcaatgagagttgtcgaatccttggaaccctactaggactggtgcattcatctgtgtaacttacgggtgatgacaatttgatgtctctaatctgagctgcatgctccattttgttcatgcaagctttgttgtcattctcttctgtgtaaagccattcttatgctactctttttagtaagctttgttaaaaggatcgtattagttccatttgagaacaatgcattagggagacactaggaaaacattaaaatatccattttgttgtggtagatttgagctgttgtacctgtgattcaaataaaagtggttagtccaaagtgctagtgaatgttattgatcccttaactgatt

SEQ ID NO: 30719 - DNA, 784 bp, Zea mays
  Clone ID: UC-ZMFLB73068F04_FLI
gatcgttatatatcctgtctatgaaatatcttatattttcatttttttactatgttgacttcatttaatatattttaaatccttaactgcatgacacgtatgcatacttcaaaaagctggattacttttccacagaatgtaatgtctggatcttttttctgttcagttcttttcattttttcccgcattgaaggagaccactttattccaatatcagaaaatgctaggatgtcacttgaatcaaaatataggtctcaaacatcactgtcagctctaccatttataggttatactgtgttctcttccactaagaccgtaaacttaagtgcacttctgctcaacttcattcctccaaacgcatctattcaccaaatgcataccgtggttttgctcgtgaatttattaaagatttagaaagaatgaggcctagagctatactagacatcataaaatccggtgaaaatttcagaatctccacaacaacaaggatgccagagcaaggaacgtgtgaacgatgtggctacatttctagtcagaaattatgcaaagcatgcgtcttgctggatggattgaatcgaggcttgccgaaactaggcattggaagtaccaaagcaggtgctagagctgacagtgatggtaagcaacgcaccaaacgttcagagaggaatacatcgagtctacaagggaaacatgggaacttcgatttctagatctctactgctatttttctccaaaaattgtaataaattttgatagtcattggtcatttagtggattttcttct

SEQ ID NO: 30720 - DNA, 1325 bp, Zea mays
  Clone ID: UC-ZMFLB73068F07_FLI
ctgtattttttcaaatcttgctatagtgtggagttcagttgttttagtgctttaggtgtactttctgtttgtaaaacatttaaaacaggctgacaatctgaataatgagtacagaggaagggaaggaacgagtttgccttcccatccgctctcaaaaaataatatataatacaataaaaatatttttctttccctacatctctatcgaataatacatcatcatgataagttgtcatttggtctatgacttgtgaaactgcaatccctcagcaatctcttgtgcatttttccttttagattcatgcaattcctgacccaagtcaggtgtgtgttcttataatgtttctcgcttctttttaatgtttcttgctcccttgttgctcagacagagcagttcggaaccttggacatctgatcaggaatgaagaggaaaacaaaaacaaacagtttgttcattactactcaaaagaacttggccattcgtatggtacattcatccatcatatacgtatgttattacaaaaaagaatggtgatttttaaaaagaatcaatagaaaatcagacagctgaccaaaccaaaaggaggaaataccaagaaacagtagcaagcattacagttcatcaaagcaagagcaaattaataaatgaagtagagaataggaaagataatcaattttggtttagctacacttttatcgtctgataccagacgcatgctactgtaggcgtgcaacacgcgcctactgctctagctactcactgtgtttagtaattaaactttaatatgatcttattttgcttttatctcttcacatgatattgacatgaccaaatgcatttactgtgggttctaccaagaggcttgcccagtcgatgctattgttgaggggcctaactttgagttttttatgtcttgctgctaagccttgatatgcatttagccatatgatttcctctcgctggtacctgtcattgaaggagctggagggtcaataactgattggagaggggacaagctctattggcctgttactgcagaatcacaacccacaagttttaatgtggtagcagttggggatgcccgtgtccacaaagaggcccttgatgcgttgcggtggcgctagcgtgctctttagataagcattatactaataaccaactatttagacatttacatgtgatatttgtatgaccaataataagctttacctgtatgcttgttggttggcctcaacctttgcaccaataatagacagcttggttgtaaactaccaagcagtggcttgctgtttgcaccaagcagatattatgtcttgggaacgct

SEQ ID NO: 30721 - DNA, 468 bp, Zea mays
  Clone ID: UC-ZMFLB73068F11_FLI
agctcctactacttactaccctttcagtgagacgcagacagaatctcaggtcgttggatacgaagaagatttaacaggcaggcagaagatcatagacagggttcggtctcagagcattaatgtgactccgtcgagtgagattctttagttgtggaggcgaaccataacttctcccagatctgactgtcaaattgcgatagggaagatgtgttatgaaatctgcttgttgtgccatgtcggcttcaaattaagcagcatgaatggagtctacgaatgtggagtcgtattcctagccagatgacccgcgcagcataaatcaagaagatttccattgcatggcattcgatgaacggaacctcgcgctattacatcgtgatcttgtggatgtaaccacccttgtttgtagaactgacagacactaaacgcctgtgatccgtttggtcctgtacattaacaatcttgtaccct

SEQ ID NO: 30722 - DNA, 1176 bp, Zea mays
  Clone ID: UC-ZMFLB73068G06_FLI
ccgaggttcttggcaagggcacgcacgggaccacgtacaaggccgcgatcgagtctgggccggtcatggcggtgaagcgcctcaaggagacctcgttgcccgaacgcgagttccgggacaaggtcgcggccatcggcgggatcgaccacccaaatgtcgtgcccctgcaggcctattacttcagcaaggacgagaagcttatggtgtacgagttcgtggccatgggcagcctttcctccatgcttcacggcaatcgcggctccggccggtcgccactgagctgggagtcgaggaggcgcatcgctttggcctcggcgcgcggtctcgagtacatccacgccacgggctccatggtcacgcacggcaacatcaagtcgtccaacatcctcttgagccgcaccgtggacgcgcgcgtggccgaccacgggctcgcgcacctcgtcaacccggcgggcgcggcgacgacgacccgcgtcgcggggtaccgcgcgcccgaggtggtggcggacccgcggcgggcgtcgcagaaggcggacgcgtacagcttcggcgtgctgctcctggagctgctgacggggaaggccccggcgcacgcggtgctgcacgacgagggcgtggacctcccgcgctgggcgcggtccgtggtgaaggaggagtggacgtccgaggtgttcgacacggagctgctcaggcacccgggcgccgaggacgagatggtggagatgctgcggctggccatggactgcaccgagcccgctccggaccagcggccggccatgcccgagatcgtggcgcgcatcgaggggctcggcggcacggcgtcgacgtcgacggcgacggcgcggtccggccggagtgcgtccgtggacgaggcggacgaccggccgctgaggaccaccggatcgatccgtcagagctgaggtccgtccgcgtccgatcacttgtgttattgtcactgacggaaggttctgaacaagggggaaaaaaagaagagatctttctgttctgtcttcttgcgcttgtcgtaggggcgttgtcgtgtgctgtttattctttcatgcgtctcttgacgcttgttcgccctcagatgaattctttcgttttagcagcggtgatgagtgtgcgctgatggtgtgtgaattggtggtgatagtaatgcaatgtgtaattgcttct

SEQ ID NO: 30723 - DNA, 2366 bp, Zea mays
  Clone ID: UC-ZMFLB73068G09_FLI
ctctaaggaagggcctccacaaaatttccaactgtacagctgggagacctatcagcctgttagtggcctacttgcacaacctgagtggactgtgtgggaccaaactgttgagtattgtgcatttgcttatcagcagtatatagtgatttcttccttgcggccccaatttaggtaccttggagatgtttcaattccctttgcaactggtgccgtttggcatcgaaggcagttatttgtgtctacaccaacaacaattgagtgtgtctttgttgatgctggagtggcagcgattgacattgaaacaaaaaggataaaacaagaaatgaaagcaagagaagctcagagtcgggcagctgaagagcatggagatttggctcttatcactgttgaagctccccaggttactgtgagtgaaaaagtatcattgaggccaccaatgttgcaggttgttcgtttagcctcctttcagtacgctccatcgataccaccatttatagtaccaaagcaatccaagttcgatggagatgattcagtgtttcagaaagaactggatgacagaaggtatgctgaagttgctgtcgctggaggaggtgtgtctgttgcagtaactcgcttccctcctgaacagaagagacctatcggacctcttgttgtggttggtgtaagagatggagttctctggcttgttgacaggtatatgtgtgcacatgccttatcactcagccatcctggtataagatgccgttgccttgcagcatatggggaccctgttagtgctgtgaaatgggcaacgagacttggcagagagcatcacgatgacctggctcagtttatgctgggtatgggctatgccactgaagctctccatttgcctggaatatctaagaggctggagttcgaccttgcaatgcagagcaatgacctgaaaagagcacttgcttgtctattaacaatgagcaatagccgagatgtgggacaagaaacagctgctgctgatgccactgacgttacccagattcttagtttggcagtagctaagcaagctaagcaggaaagtcttacagatgccgtgcagggaatagtgaaattcgtcaaggagttttttgaccttattgatgcagcagatgccactggtcaatctgacattgctcgtgaagttttaaagagattagcggctgcagcttctgtaaagggagcactccatggacaaatgctgcgaggcctggcactccgtcttggaaatcatggggagcttactagattgtcgggtctggtaagcaatttgattacagctggccatggacgcgaagcagcatttgctgccgcagttctgggagataatgccctaatggagaaagcatggcaggacacaggaatgttagctgaggctgttttacatgctcaggcccatggtcgtccatcattaaggaacttggttataacatggaacaagatgctacaaaaggaactggatcacacaccgactgtaaaaaccgatgccgccgccgcattcttggcttctctcgaggatccaaagctcacaagcttgggggaaactgagaaaaagcctcccatcgaaatacttcctcctgggatgcctcccctatctgcacctccgatcgtgattaaaaaggctggagcaaaacctggtctccctaatgcagcaaaggcgtcaaatgggcctataggtgctcctatggctcaaggtgctcccatggctcatggtactcctgggccacaaggagtccccatgaatcaagttactccatcacagggcagtcatgacgaggcaaggccatcagatgctacagtggctgatgcagctgccgcggttgcagaaggtacagcagctcccccggctgcagaaggtacatcagctcctccggctgcagaaggtacagcaactcccagcagtgaggaagctaaagcagcacctggtaatgaggaaggcacatcaaatccaatcaacgaggaagccacagcagctgcagtttcagttgctgcaggcagccctgactctgctgctgctcctgcagctgatactagctcggacgcacctgctgttaatcccacggaagataccgtctctgccccctcaacggaggcaccaccagagttgacggataagccatcttcagcagaggcatcgttgccacctccacccagtgtttctggtgtataaatatttctgattctcttttagcagtgtgccgaattttctgtattctggttcgttcgttccaccacgcgcgctggtataggtatttgttgcctgtggtatacagatttcgcagacgccaggcagtatgtgagtagctttgtacatctgctgtctgcgtctcacgagaacgtgctaccgttgtgtc

SEQ ID NO: 30724 - DNA, 1160 bp, Zea mays
  Clone ID: UC-ZMFLB73068G12_FLI
gaagccttacgtcaaggatggtcatcgctggttcttggttagctccaactcctgtatcgtccacgctactagctgcaaccgcgagcaagctaccgatgaaaggcagtggtatgcacctgtttggtgaatctctcaggactgcatttctatgtggcacacattgtttcctagctccaaacgggcggaaggctgaggtggagtcggcgctcttgcttgtcaaccttgggttggcaaggaaggcaaacaggcatcctggttgctggatccagttccatcctatcacgcagctcttcggcaagatcaggggaggtttggtgcctacgactgcagcagtgaatggagtgatgaggactggaaacccctcggtatactctgaccacttgtgggctagcgcgttcctcgtgtttggtttcaagtccgagccgcccgccgtccagcttaaggcggtcgacatggtcctcttcatcaagaagacggcgctgcccctcgcggtcgactccttcatgtcgttctcgcggtgcggctcggctctggagctgctcaaggtgtgcacgaacgtcctggaggaggtggagaagtcgtacgcgtcgcggatgcaggactggagccgcgggtcgctgtgctggaggaagaagctgcagccgaaccaccgcgtcgacgagctcgtctggcaggaggtgacgctgctcaaggcgacgctgctggagacgagggcgaagctgctgctccgcggcgggctgttcgacacgggcgaggagctgtgcaggacctgcatcagcatccggactgtcatgctcggccacggccacgcccagacgctagctgctcaggagacgctggcaaagctggtcaggtataggagcaaaatatgagatgagatgatggtgtccaagaccctttgcaagcttcttcccccctgctgtttcagaagttttcacgcccccatttttgttcctgaatctgttatgccaccggctacagttttgttagcgatcatcagtataatagccaaggtccatgatgccatgtgtaacttattttagagcaggtgccatatgtaagtggaggtgttatgtacagtgcagtccatctgctatttggtagaactaccattgagcttcccatgctgaactttcagaattgaagatgttcttcctttt

SEQ ID NO: 30725 - DNA, 1396 bp, Zea mays
  Clone ID: UC-ZMFLB73068H08_FLI
ggcttctgaggttgtccgccctagcgacgccgagctactaaaggcacaagccgacatatggcggctcagcctctcctacctcacgcccctgtcactgaggtgcgccgtggagcttggcatccctacggcgatctaccgccatggcggggctgcctcagccgctgagctggtcacggcgctgtctctcccctccactaagctgccgttcctccgccgcctgctgcggctcctcgccgcgtcgggcgtgttcaccgtcgacaagcagagctcggaggaggagcggtaccgcatcagccccgtgtcctacctcctggtggacggcatccctcacgaggaccacatgaaccacaccgctctggtgctcacctgcacctcgacgcgctacatcgaggcggggatagggctggcggagtggttcaagagggacgtggtcacgtcaccgttcgaggagctgcacggggcgactctgttccacgagagcatggggagcctcgacgcagatttccacgacatggcgagcgaggccttggacgcccacgacaacttcggcatcgagatagctatgcgggagttcagggacttgttcgaggggatccagtccatgacctactgctgcggtaacttcggtgatgacaagggtgccagggccattgtcaaagccttcccacacataaaatgcactgtgctggcccctcccaagatcattgccaccaaaccggccgatggagcgatgataaactatgtcgaaggtgacatgttcagtttcattccacctgctcaaactgtcgtgctaaagcttgtgctgcaccacctgaccgatgaggagtgcgtcaagctcctggctcaatgccggaaggcgattccttcacggaaggatggcgggaaagttataatcggtgatattatgattgaccactctgggcctatgctggaaactcacctcctgatggacatcggcatgatgaccatgacaaaaggacggcagagagatgaaaaagaatggagcgagctcttcaccaaagcagggttcagcgaatacaagatcctgaaggaatttggagctcgtgttgccttcgaagtctatccgtgagattgcacctggactatacatatatatttacatacatatatgtatgtgtgtgggtgccttgcgtggcttggcgtgatgatgtcataaataaagagggtgggtgtgcttgcggtattcatggatggccatggatctgagcacatgacgttggatgctttcttaaggctctcgtggatcttctatatttggaagaagctgtaaaataatatatcgccatctagtgttggcgttggcttgtatgtactttgtacctgctttgttattttgtgtaatatcgagtaacctaatgtatacttgcttactact

SEQ ID NO: 30726 - DNA, 1949 bp, Zea mays
  Clone ID: UC-ZMFLB73069A02_FLI
gtcggctggtccggccccagcgattcggtttggtgcgcctcgtggtccacgtgcgcgggctttgtgctctctcttccctctgtgtgtgtgtcagttcgtcgggtaggttggtggcggcgtgagagatgaagagctgcggcgggggaggagcggacgggcagcagtgcccgtgcgactactgcggggaggcggcggcggctctgcactgccgcgcggacgccgcgcgcctctgcgtcgcgtgcgaccgccacgtgcacgccgccaacgcgctttcgcggaagcacgtgcgggcgccgctctgcgcagggtgcgccgcgcgcccggccgccgcgcgcgtctccctcggcgccgacccggcgttcctctgcgcggactgctgcgagggctgcgccgccgcttccgcggcgcgcgtgtcggttgagggcttctcggggtgcccctcggcggccgagctcgccgcgtcatgggggctcgacctccgccgcgcggccgtggccgtgggcgacgacggcgacggcggcgacgacgacgaccccttcctctcggtgctcgactactccgtgctgggggtgggggtggccgacacggacctgcgcgacctctacgtgccgtgcgacccaccgcgggtgcccgtccccgacgccggcgcgcgcccgctcaggggcgaggcgctgtgcgaccagctcgcggagatggcgcggcgcgacgaggcggacacgtcccacgcgcacccgcactcggatctgagcccgcgcacgcctcgccgcacctccgcggcttccagcggacgcctgccgtcgggcaagatggcgccccccgcggcgctgccggtgccggctcatcctcctcccgccgcgccgcaggaggtgcctctgccgtacacgtccctgctcatgatggcgtccgccaactgcagcgacctcattggcggcggcgaccgggtgggtgataccgacgaacaactgctctgggactgcgctgcgccctcggtgccgcccacccagatatgggacttcaatttaggacggtcaaggcatcacgatgagaaatctgctcttgaagttggatacggttctaaccatggcggctttatgattaagagttacagtgacatgcttaaggacatttcttcggggacaacgaaagatctggaagatatttatgactcaagatactgctcaaccgccgaagatatcatgtcctctaatatctgtcagttgtcatcgaaaaatgtgagcaccgggagcaacaaacggaaggtgaggtcatgtgctgcgtcgacgatggatggaccaacgacctccgggaaccacaaccacgtacccgcttcagcttcaggtccaggagcagcgctcaccagggagatctccttcggggatcagacggtgtccgcccccgcggccgagaccgagaggcctgccgccgtgaggatcgacagcgagacgcttgcgcagaacagggacagcgccatgcagcggtacagggagaagaagaagaaccgcaggtacgagaagcacatccggtacgagtcgaggaagctgcgggcggacacgaggaagcgggtgaaagggcggttcgtcaagtcgaccgaagcactcaacgccgccagatacaacggatgaggcagccatatatatatatatatatgcatggcctgcgggcggatgagtttgctgcgcgcctgcgttattacgtgcggtagttacctcacggagaggtaggtactgctacctggaggtgctacgtatgtatggcgcggccggaatcgctacgcacgcggcccaagtttaattttgcgttgaagctatagcgatcgtggccattgttgggcagtcaactccagagattgcacggtactgcttgtttgtaacagacgaccctccctttccccttttttctctgttgttgccgtcatccccaccagaacagaaagtatgtagcttacctac

SEQ ID NO: 30727 - DNA, 1877 bp, Zea mays
  Clone ID: UC-ZMFLB73069A06_FLI
cagcagcggcagcagcagtaaggccacttccactttcggcctcctacgaaccgaggcagtttttcagccgccgccgccggccacgaccatgcctttccacgacggtgccgacataaagcccgctcaccttggagtcccgtcggcaagtctactcctcaatcaacaccaagcgttgtcagcagcctccttcatgccgctcccctccttccctgaccatcagcaccagccacatctcccgcccccgccgaagcgccaccactctatgcccgaaaacctgttcctcctccaaaaccaactccagccgccgccgccgccgccgcagggtctacgattcccaccactgcataccaccgcgcccttccagctccaaccatcgctgcaaccaccgcgaggttcgatgaaaacaaccccggcggcgcagcaacatcaacagcttctggatgagcttgcggcggcggcaaaagcggctgaggtcggcaactccatcggcgggcgcgagatattggcgcggctcaatcagcagcttccccctatcgggaagcctttcctccgctccgcttcctacctcaaggaggccctcctcctcgcgctcaccgacggccaccaaggctccactcacctatcctcccctctcgacgtcgccctcaagctcggtgcatacaagtccttctccgacctctcgcctgtgctccagttcgccaatttcacggccactcaggcgctcctcgacgagatcgcctcaacaacttcatcttgtatccacattattgatttcgaccttggtgttggcggccagtgggcttccttcttgcaggagtttgcacaccgccgtggaactgggaacgcccccctgccaatgttgaagctcacagccttcgtctcaagtgcttcccaccatccccttgagctgcatcttactcgggagaacctcacgcaatttgctgtggaccttggcattccatttgagttcactgacatcaatcttgatgcgtttgatccggcagaattcattgctcctagccccaatgaggttgtggctgtttgcatccctgttggttgctctgcacgcacgccaccgctccctatgttgcttcagttggtgaaacagcttgcgcctaagattgctgtggctattgaccatggcagtgaccggggtgacctcccattttcacagcacttcatgaactgcttccagtcttgtatgttccttctcgactcacttgatgctgctggcactaacgcggatgctgccagtaagattgagaggtttctgattcaaccgagagtagaggatgcagtacttggccggcggaaagctgaaaacgcaatggcttggcgggcagtgtttacatcggccgggtttgctccggtaccgctcagcaacctcgcagaagcacaagctgactgcctgttgaagcgcgtgcaggtccgaggattccatgtggagaagtgtggaatgggtctagcactctactggcagagcggcgagctcgtgtctgtctcggcatggcggtgctgatcatacggaccccatccatcaaccatcatgacacctacaccaatttgcaggcatgtttaaccctggtaatgtgcattttgtcttgcaatttcaaacatcgtgaagaaaactattgtatttgttgttacacgcctctgattgctttgctgatgttggagtaccgcctctctaaaatgtaacatgttggtctagggtctcataactctgttcttgctctcttcttggttagccagaggataatttggcaaatctgtggcaatgatgttgttattttactaggtaattcagatgaaaactgacatggactgaaatggttgggtatattaactttcttggcctcatattccaagattgatgt

SEQ ID NO: 30728 - DNA, 1728 bp, Zea mays
  Clone ID: UC-ZMFLB73069B11_FLI
gcaaccaaaatcaaaccaagcaaagcgcaccgcaggcggcgccagccagcggcagtagcttgcttacctggtccccgcccccacacctcttcccttcccttctccctcccatcacacaactccatctccaccccgtgaccgacccacccatccatggcggcggcgcccaagtccatcgagcggctgccggcgtgccgggtggtcccggccgagcccacgccagccggcccgctccgcctctcctggctggaccggtaccccacgcagatggcgctgatcgagtcgctccacgtcttcaaggcggcccccgaccggccggccgccgccagaggcagcccggccgggaccatcgagcgcgccctcgcccgcgcattggtccactactaccctctggcgggccgcctggtcctgtcggagtccggcgcgcagcaggccgtggactgcagcaacgccggcgtgtggttcacggaggcccaggccgcgtgcacgctcgaggacgtggactacctggaggccccgctgatggtgcccaaggacgacctcctcccgcccaccccggccgccgaggacgagcgcgcgctggtcctgctcgtccaggtcaccgccttcgcgtgcggcggcttcgtcgtgggcttccgcttcagccacgccgtcgccgacggcccgggcgccgcgcagttcatgaccgcggtcggggagctggcccgcgccagcgccggaggcgccggcgccggcgcggtgtcggtggagccgcagtggggccgcgacgcgatcccggacccggcggcggcgctggtggggcggctcccgacccccgacgccggcaccaggcggctggcgtacctcgccatggacatctccgccgactacatcgggcactacaaggcggagtacagcgcggcgcacgcggcgggcgccgggtggtgctccgcgttcgaggtgctcatcgccaaggcgtggcggagccgcacccgcgcggcggggttcgagccggacaccctcgtccacgtctgcttcgccgtgaacgcgcggcccgcgctgcacggctcgctcccgcgcggaggcgccgggttctacggcaactgctactacatcatgcgcgtgtcggcgcccgcggggaaggtggcgggctcctcggtggcggaggtggtgaggatcgtcaaggacggcaagcggcggatgcccgcggagttcgcgcggtgggcgacgggcgaggccggcgccgccggcgtcgacccgtaccagatcacggccgactaccgcacgctgctggtgtccgactggacgcgcctcggcttcgcggaggtggactacggctggggcccgcccgcgcacgtcgtgccgctcaccaacctggactacatcgccacgtgcatcctggtgaagccgtgggcgcacaagcccggggcgaggctcatcacgcagtgcgtcaccccggaccgcgtcgccgccttccacgacggcatgctcgacaccagctgctgagctgagcagctctgcctgcctgtgctggattcgaggaaggcaggattggtattggattggatggggggtgggggagcgtggatgcattggttggtggtgattgtttgtcagtgtgtgtgtgttacctgctgaataactcccagaccccctcgattcagggagtttgggggagctgagctgtgttacctactcgcaccaatattgaattattcatctccgaaaaaaaggagatcaattaaccgt

SEQ ID NO: 30729 - DNA, 3806 bp, Zea mays
  Clone ID: UC-ZMFLB73069D11_FLI
ggggaacgaaagcaagcaaggagcaccgcaccacgccactccagtactccactccactctcgtcccctcctcgatccagccatggcggcctagcccccccccctcccctagggttctctgccagcccccacccacccaggcgcctcttgccgctcccacccggtggtcgcgctgcccgcgtcgaatgggaggccacccggcgctcggagtcgggcgtgaccgcgcgctgccggaggttccctgagctcggcggcggcgggagcgtggctggtccggagcgcgccgcgcgtgcaatgggaggttcgagtggggttcctgcgagccgccgcggcggtctcggttctgcgagcgcgtggcccatgcttcgcgaagggtagggttgtctgtctgtctagctagctgctagctgcttggtctgatgagctcagctccggcgccccgcctcggcttccccgcgcgcttgctccgtcggctgcccagaacccagcttgcccgctccggcgcttctcttcgcttcttcggggaaaggttggagctttgaggtggtgcgggtgctcagccgaggactccgggcgatgacgcccgcagtggcgcgcgtttgccgcgacagtcctgggttcgggtagcgagttcctcgagcggatttggctgctgctgcgtcctgcgtgggaaggggaggcggcggcggcggcagcagcagaggaaggggaacggttgctctgaagcggagggggagcgggctgacattgcttctgggagcatggcgagcttctaaggacgcgcagctcccgcagcccagccattctcatcgccgcaccttggtgttcttgcccccaggtcgtactggttggtgggagggaacatgaacctctccccgcccaagatgtcggagccatcacctgaaagtgacggggaacaaaggtgtctgaactcagagctatggcatgcatgcgcagggccccttgtgtccctgcctgtggttgggagccgggtcgtctactttcctcagggccatagtgagcaggttgctgcatcaactaataaagaagttgatgctcaaatcccaaactatccaaacctacctccacagttaatatgccagcttcataatgtcacaatgcatgctgatgcagagactgaagaggtgtatgcccaaatgacactgcaaccattgagcccggaagagcaaaaggatccttttcttccaattgaattgggtgctggtagcaagcagccaaccaattacttctgcaagacgttgactgcaagtgatacgagtacccatggtggattctctgttccgcgccgagcagctgagaaagtcttccctccattggatttttcacaacagcctccagtgcaagagctggttgcaagagatctgcatgataatgaatggaaatttcgtcatatttttcgtggtcagccaaaaaggcatctactgacgactggttggagtgtttttgtaagcgcgaaaagactagtagcaggggattctatcatatttatctggaatgataataaccagcttctcttgggaattcgccgtgcaagtcgtccacagactgtaatgccctcttctgtgctatcaagcgatagcatgcacattggtcttcttgctgcagcagctcatgctgcagccacaaacagtcgtttcactattttctacaaccctcgggctagcccttctgagtttgtcattccactggctaagtatgtgaaagctgtttaccacacgcgcgtatctgttggaatgcggtttcggatgctttttgagacagaggaatcaagtgtcagaagatacatgggtacaatcacaggcataagtgatctggactcagagcgctggccaaactcgcactggcgttctgtgaaggttggttgggatgagtctacagctggtgataaacagccaagagtttcactctgggagattgagccactgacaacctttccgatgtacccaactgcttttccattaaggctaaagcgtccgtgggcttcaggactacctatgttcaatggtgggaggagcgacgagttcgctcgttattcttctctcatgtggcttcgagatggaaaccgaggggctcagtcactgaacttccagggacttggagcatcaccatggcttcagccaagaatagattatccattgttgagtctgaagccagatacttaccagcagatggctgccgccgcactagaagaaattagagctggggatcatttgaagcaggcatcttctctcctgccagttcagcagactcaaactttgaatggtggattagatcatttgtatggaaatcctgttctacagcagatgcagttccaatctcagcagtcaacactgcaagctgtgcagcaaggttatggtcagaatgcaaacgactctgggtatgttcaaaatcaactgcagcagctgcagctgcaaaagcagcaggagccaccaccaccacagcagcagcagcagacacaagtccttcagcgacaagcacatcaggaaatgcaacagcacctctcagctagttgtcatgatattgctaatgtagcttctggtgtgtccatgtctggatctgcttgtcaatcacaatcttctctgctttctgggtcatcgttctaccaacagaacatctttgatggaaatggtggtccagatctgcatctgcacaacagtttccacaacttttcaagccaagagtcctccaaccttcttaacctcccaagaagtggccaattaatggcatcagagggatggccttcaaagaggttggctgtggaatctcttgctggtcatgagatccaacctctgcagcacaagcttgagaaagttagtcaccagagtactgtgtctcactgttctggcaccttgccgccactatcagcaagagacggttctagtgcccaggcttgtggtacaaatgttcagagtcacctgcttccatcatcatttgcaatccatgatggattgtcaaccatcaggagtggtggtgttggcagtggaactgatgcgataaccatagcttcgttgagatatagtgatgcgaatttgctacctgaaaactccatagcaacttccagttgtttgggtgaatcaggaaccttcaattctcttgacgatgtttgtggtgtaaacccatcacaaggtggaacctttgtgaaggtttacaaatcagggtccctcgggagatcgctcgacatcaccagattcggcagctactacgagttgcgtgtcgagctcgagcggttatttggtctcgaaggccaactggaggaccctgcaagatcaggctggcagcttgtattcgtcgaccgggaaaacgatgttcttctcctcggcgacgacccgtggcaggagtttgtgaatagcgtagggtgcataaagatcctctcgccgcaagacctgcagcagatggcccgcggcggcggaggtgaccttctgtctgcgcctggagcgaggatgctgcagggcagtgtctgtgacgactattctgcaggccacgacgtgcagaacctcaccggcagcattgcgcctgtggtgcctctggactactgaagaggactgaggcgaaggccgggatctgaagctctgaaccaaaaccggcaatccagcatttgcaggatttgccatccgcaagtcgtttcgttcctgtgttatgatcctctcagtctcaggccctgttgatcgggaataacctagtcgtttaatatagctagatgatgatccatgtatcattatggtaatggacatgctgtacgatagctactgtagctctaaatgcaggcaaggcaagaattgatctatc

SEQ ID NO: 30730 - DNA, 606 bp, Zea mays
  Clone ID: UC-ZMFLB73069E07_FLI
catccgcagagagcttgttccgtccaggcaaccaaaaagcaagttgccccgccgcgcagaggaagaagagagcagaggaggatggctcgtacgaagcagaccgcccgcaagtccacgggaggcaaggccccccgcaagcagctcgccaccaaggcggcgaggaagtcggcgccgacgaccggcggcgtgaagaagccccacaggtacaggcccggaaccgtggcgctgcgcgagatccgcaagtaccagaagagcacggagctgctgatccgcaagctgcccttccagcgcctggtgcgcgagatcgcgcaggacttcaagacagacctccggttccagagccacgccgtgctggcgctccaggaggccgccgaggcctacctcgtcggtctcttcgaggacaccaacctctgcgccatccacgctaagcgcgtcaccatcatgcccaaggacatccagctcgcccgccgcatccgtggcgagcgcgcgtagccatcatctccggggatctgatgaatgtctagttaccaaacaaataggctgtattagcgtcgttgttctgtattcgttattttggattcggttgcagtgaaaaacagctttact

SEQ ID NO: 30731 - DNA, 1169 bp, Zea mays
  Clone ID: UC-ZMFLB73069E11_FLI
ttccctcctgtctcctgaagcaagcgcagcaatgccagcgcttcccgcttttcccctcacccgccgcccatccgatgccagacgccgcggtcgcctcgtcctttccctcgtcgtcttcgttgctgtctccgccgccgcagccctcgcctacctatctttcccctctgccgggcggacatcgcccccggcggtccggacggaggccgactgctgcaggggtatggagggcctcgagctctggggcccggcggtcaagtggggctcagaccaccgcctgccctccgccgccgcctgctgcgccgcctgcaaggccatgtgccctcaccctaaggacggggcctgccgctgcgactcttgggtcttctgcggtgacgagcgcaaatgcaaggacaggctcggggagtgctggctgaagaaacagaaggatgtcatggcccctgctgttattgcaaagggggaggacgtcatgtggacttctggtctaatctttggaaaaggagaggggattgtggggcttgaaacaaatttagggacacttcatattcaattgctgcctggttgcgcgccccgttcagtggaccacttcatcgagctcctgggcttgcgcaactgtgctggatgcagattttatcgtgcagaaggacgtgggaacgtctgggatgcaaaaggcgaccatgaaaaaaatgttgcatttggccccccatatgcattgcttcaaggaacactggaagttgatggtgtgcccttcaagaagataccaagagaagcatgtccggcggtgaaaagagggtccgttgcctgggtagggtcagggccagagttcctgatcagcttagcggaccacgaggagtggagggacgcctacaccgtgttcgggaatgtgcttcccatggacatggcgatcgctgaggagatgacactgctgccgacaagcacagacgtgtggagcaacgtgaaagtgaaggtgctgaaagatcctgtctacttcaaggtcaagagaagcagcaatgctagcgctgtctaggtgatgggcatatttcttcttgcttgtttggatggaaggctgtggcaacaccggcaaatggttgtttgaccatgaaaacctgtgttataactcacaggagacgatggtctcgcttcattgtgcaaagaaaggggagagttctaat

SEQ ID NO: 30732 - DNA, 1251 bp, Zea mays
  Clone ID: UC-ZMFLB73069G05_FLI
cgtctcgcgctaccgatgcccagccggatcgccgcctgcttccgctgcgccgcggcgccgtcctcgggcgcgggcgcgggcgcggcggggcccagcctggcgacctccatctacgagacccacctcggcttggtcgcgctctcctggtcccggacctcgctcggcctctccctccgcgccgtgctccgcctgtcggccacgcccccgcccggctcctcctcctcggcgtccggagcgggctacctcgacgatgacgcggacgaagagattctcgccttccgcgtcagcccatggctattctggcgccgccgcgggtccagacggttccgcgctggcgaccgcctcgtcgacctggcgtgggatctctctcgcgcgcgcttcccggtctccgggtcccccgagccctcatcgggcttcttcgtcgccgtcgtcgtctgcggcgagatggtcctcgcggccggggacctgaccgatttggcctaccggaggacccgggcccggcgcccatcaggcccgcgtccggtcctcctctcccggcgggagcacgtctcgctacgcgacggcgagcgagtgctgcacgtccggcgcctgcgctggaagttccgcggcagcgagcgggtcgacctcgggggcggcgacggcgtccaggtctcttgggatctccacaactggctcttccccccacgcgagccgccccccacggaggcctcgacgcacgcccacgcggtgttcgttttccggttcgaactcgccagcggcggcgaggagagcgaggcggatttggggaagaatccctcccccagcaaggacgcaaggaggaacacgggcgtttggggaggctacctcgcgcggtgggggcaacgggactggagcgagacgggcagcaacggtgagaggaggaagggcagggggcggaggctggccaaggagagctcgtcgtcgtcggcgtccgtggcatcctccacggcgtcgtgggccagtggctccacggtgatggactgggccagccccgaggaggtcgagatgcagcgcggcgacggcttctcgctgctgatctacgcctggaagagctaacaccggcgacgacggcggcagcatagttctgatcaactagcggtgatggtaaattttctctggactgttgtagtttgcagtgttcttgtgcagttaaagcctggagagattgaattgagcttgaattacagtagtgccattgctaagtggaacgagcgattagtgtgattttttttc

SEQ ID NO: 30733 - DNA, 2189 bp, Zea mays
  Clone ID: UC-ZMFLB73069H09_FLI
cgcctcaccaccattagagcgcgcgcgccaagctcgtggtgaggttttcgagatgaaggttatcgagaagatcctggaggcggcgggggatggccggacggcgttctcgttcgagtacttccctcccaagacggaggagggggtcgagaacctgttcgagcggatggaccgcatggtggcgcacggcccctccttctgcgacatcacctggggcgccgggggatccaccgctgaccttaccctcgaaatcgccaaccgtatgcagaacatggtgtgtgtggaaaccatgatgcacctgacatgtacaaacatgccagtagagaagattgaccatgccttggaaaccatcaaatccaatgggattcaaaatgttttggccctcagaggggatcctccacatgggcaagacaaatttgtgcaagttgaaggcggatttgcttgtgctcttgatttggtgcagcatattagagccaagtacggtgattattttggcataactgtagctggttatccagaggcacaccctgatgcgatacaaggcgagggaggtgctacattggaagcatatagcaatgatcttgcgtacttgaagagaaaggttgatgctggtgctgaccttattgttacacaacttttctatgataccgacatctttctcaagtttgtgaatgactgccgccaaattggtattacttgtcccattgttcctggcataatgccaataaataactacaaaggtttcctgcgcatgactgggttctgcaaaactaagataccttctgagatcactgctgcactagatcctatcaaagacaatgaggaggctgttagacaatatggaatccaccttggaactgagatgtgcaagaaaattcttgctactggcattaagactttgcacctttacacactaaacatggacaagtctgctataggaattttgatgaatcttggattaattgaggagtccaaggtttcaaggccattaccttggaggccagcgactaatgttttccgtgttaaagaggatgttcgacctatattctgggccaacagaccaaagagctatcttaaaaggacattaggttgggatcagtatccccatggacggtggggtgattctcggaacccatcatatggagcacttactgaccaccagttcacaagaccacgaggccgtggtaagaagctccaagaggaatgggctgttccactgaaatctgtggaggacattagtgagcgcttcacaaacttctgtcaagggaaactcacaagcagcccatggtcagaattggacggtcttcaaccagagacaaagattatcgatgaccagttggtgaatattaaccagaagggtttccttacaattaacagccaacctgctgtaaatggagagaaatccgactcgcctactgttggttggggtggtcctggaggctacgtttatcagaaggcctacctcgaattcttctgcgcaaaggagaagttggaccaactaattgagaagatcaaagcattcccttctctcacttacattgctgtgaacaaggatggagaaacattctccaatatttcaccgaacgccgtgaatgctgtcacgtggggtgttttccctggcaaggagattatccagcctacggttgtggatcatgcaagttttatggtttggaaggacgaagcatttgaaatctggactcgggggtggggttgcatgttccctgagggtgattcatcgagggagctactagagaaggttcagaagacctactacctggtcagcctcgttgacaacgactacgtccagggggacctgtttgctgccttcaagatctgattatgctctcatggtctgtattgttgtatggttggacccaacaatattcttgcatccccgactacaggtctgatcgccatgaaagcttctgttcatttgagctcgggggagtccgctagtcttatttttcttgatttctcttggctttctggaaccatacgaatcaataagaaatgagctgtgttcgctttccagttcctccatgtgcaagtggcgcaactccaggttctagatgtaaaattcgtcctctaatacagaggttggtattgtatgttagtgtaggatgcgctgctcgcattgcactgtattgtgcttctgtttggtggaaataaagattggtcgaaatctgagggcc

SEQ ID NO: 30734 - DNA, 682 bp, Zea mays
  Clone ID: UC-ZMFLB73070C02_FLI
gatgggctcctcttcatcagattctctcgagcatcactcaaaccactactgtactggccgccaccaccaccaccaccaccatggacaccaatgctgtgattcaatgggcctggcatcaacgccaaagctgtcaagtatcagtggagccaaaacagaaacctcatcgatggacgcgtcaatgaggacaagctcgtcacctgaggagatcgacaggtctggtgagctctcggtgtccgtcagcaatgcgagcgaccaggagagggagtgggtcgaagaagacgagccaggcgtatatatcacaatccgggctttacctggtgggatcagagagcttcgccgcgttcggttcagccgggagaagttcagcgagatgcatgccaggctgtggtgggaagagaaccgagcgaggatacacgaacaatacctctgagaagagacgcccgacaccatcagcagcacgagcacatgaatagagctggcactaacacatccacatgcatttccagcttcatacgatgttttgctaacctaagaggtccggtttccggtattttacatttcgttcagtctcacgtgtggtggtggtggggtgggaggatagtgtacgtatttcacagtttcactactgaatctgtaggtctcgtttttcatcaataatgtatatctacctgttgtttcccat

SEQ ID NO: 30735 - DNA, 1042 bp, Zea mays
  Clone ID: UC-ZMFLB73070D04_FLI
cgaacgcagaccgtacaacagctaacacttcatcatatcacctccagaagcagagtcctacagtctggctactagacaataaccataactaaagctaaaagacacctggattgcatctgatgtttactgaggtactattttcaggctgttaccgccccaatgtcaacattgaacgcgattgctgtagaagcttacaagaagtatatcctagtttcactcattgtgaatggacaggtcccatcatttcctaagtatacatccatatcagcccaaaggagtatgaaaaaccatgctcagatttattttgagctttctacaagctatagcaacggtcgctacactgatttagagacatttgtcgaatcaaattcagcagcatttcaatctgacaacaacctagggttggtgaagcaagtgctctcatcgatgtacaaacggaacatccaaaggctgacccagacttacttaactctttcacttgaagatattgctaggtctgttcaacttgaaacaccagaggatgctgaaatgcatgtacttcgcatgatcgaagatggagagatccatgcaaccataaaccagaaggatggaatggtcagctttcatgaagatcctgagcaatataaaagtgttgagatggtggagcatattgactcgtctatccagaggttaacggcattgtccaagaagttggcttcaattgatgagaacatgtcatgcgacccttcatatttgttgaagacgggaagggatcgtggaagatttgactacgatgacttcgactctgttccacacaagtatttttgagatgatccgagccctacgtgattctgaagtacgatcatcaacgtagcagccattttgtaaagttgtctttagttcgatcgattaatggcttttgaaaattttgaaaaatcttgtttaaagaatgggtctgctagcatatttctcctccaatttggagacaagatttcatttgtagatcattttgttcggtagagtttgagcggcatgcattgcaaactactacctctactaaaat

SEQ ID NO: 30736 - DNA, 1440 bp, Zea mays
  Clone ID: UC-ZMFLB73070D10_FLI
tttacgtttacccatcaccaccagtccagcaccgagcaccgaccagatcaaccaggcccgccccgacccgaagatgcagcggtggctcccggcgctcctccgccgcgccgcgcccggcggcggggcggcgcggctcttcgcctcgtcctccctcctcttcgacgacacgcaggagcagttcaaggagagcgtgcgcaagttcgcgcaggagaacatcgcgccgcgcgccgcggccatcgacgcctccaaccacttcccgcgggacgtggacctgtggaggctcatgggggacttcaacctccacggcctcaccgcgccggaggagtacggcggcatgggcctcggctacatgtaccactgcatctccatggaggagatcaccagggcctccggcgccgtcggcctctcctacggcgcgcactccaacctctgcatcaaccagcttgtccggcacggcagtcccgagcagaggctcaagtatctgcccaagctcatcagtggggagcatatcggggcactggcaatgagtgaacccaactctggctctgatgttgtcagtatgaagtgcaaagctgagaaagtggacggcggctatgtccttaatgggaataagatgtggtgcaccaatgggccgtctgctcagacgctggttgtttatgcaaaaacagatctagctgcgggatcaaaaggaataactgcattcataatcgagaaagggatgcccgggttcagtactgctcagaaattggacaaacttggcatgagaggaagcgacacatgtgagcttgtttttgagaactgctttgtgccacgcgagaatgtcctcggtgaagaaggcaaaggtgtttatgtcatgatgtcagggcttgatctggaaaggcttgtattagctgcgggccctattggccttatgcaggcatgccttgatgttgtacttccatatgttcgacagagggagcaattcgggcgtccaattggtgaatttcagttcatacaggggaaaatggctgatatgtacacctcattgcagtcatcaagatcatttgtatactcggttgctagggactgcgataatggcaaagttgatcgcaaggattgtgcaggggtaattctctttgctgctgaaaatgcaacccaagtggcacttcaggcgatccagtgtcttggtggaaatgggtacataaatgagtacccaactggtcgtctcctgagagatgcaaaattgtttgagattggtgctggtactagcgagataagaagaatgataattggccgtgagctcttcaaagaggactgaaacttctattttgcaagccagataccagtgcatattgttaactgggggaggtgagcgagatttagatatttagcaaattacccctgtggttcaatgcttttgtataactgcagacatacatcaaataaagttcacttccttgt

SEQ ID NO: 30737 - DNA, 1255 bp, Zea mays
  Clone ID: UC-ZMFLB73070D11_FLI
gatctcacatggcagaaatggacctataaggttggtctgaaaggtgaggctttgagtcttcattcacttagtggcagctcttcagtagagtggggagaacctgttcagaagcagcctctgtcatggtacaaggctttcttcaatgcacctgatggtgatgagccattagctttggatatgagtagcatgggtaaaggtcaaatctggataaatggacaaggtattggaaggtactggcctggctacaaagcttctggaacctgtgggatctgtgattaccgtggagagtatgatgaaaagaagtgccaaaccaactgtggtgactcttctcagagatggtaccatgttcctcgttcatggcttaatccgacggggaaccttttggtgatatttgaggagtggggcggtgatcctaccggaatttcgatggtgaaaagaatagcagggagtatctgcgctgatgtctccgaatggcagccatcgatggcaaactggcgaacaaaaggctatgagaaagccaaggtccacctccagtgtgatcatggacggaaaatgactcacataaaatttgccagctttggcacaccacagggctcctgcgggagctactctgaaggcggttgccatgcacacaagtcatacgacatattttggaagagctgcattggtcaagagcgctgtggggtaagcgtggttccagatgcatttggtggagatccatgccctgggactatgaaaagagccgttgttgaggctatatgcggctgagtcatatgatccatataacgtactggtttctacaataatgttaccctatatcaagctggcaagaggtgaaagtggcggcaactgcgacacacggattgccagggtttacaggaattagttgtatgttagatttaagcatcgtatgtgtatgtaacttaggtcacatgagacttgcatggaagaagtggttaggaccctagctgtgagaaactaagtcttgtagctctctacacagtagaattggtctggcaggtgagggtgcagatgagactctgctttattacctgagtccatgtgcgcggtggctcttgggttggagattgccaaaaggccagcaattggctttgcattatctggtcattcatttttttggtcattggagggtgcaatgtaaatgttcagggtcaatcatttatgaatttttctagctagtaatgaaacagtaaagaaaatgttggttcagattataaaacaccagttatcttcc

SEQ ID NO: 30738 - DNA, 1719 bp, Zea mays
  Clone ID: UC-ZMFLB73070G02_FLI
ccccctctcgctctccgacggctggtcggccgccgccgccgtaagccgccaggtgctgaggctttcgttggtctcttcgccggggacgagcacccactagtgattcctgaacagtttgttttagatggcaaatgaagagaagttgttcaagatgggaaatgcagatacagatactgctgcactgcacaatgaatgggatgatgctctctgtccgatatgcatggaccatccacacaatgctgtccttctgttgtgcagctcccatgacaaaggatgccgatcctatatatgtgatacaagctataggcattcaaattgcttagacaggttcaagaaaatgaaagtgaatgatggggacagtccttcacagtcaagctcatccatgcctaggggtacaagaaaccaaaatgttgtccacggatctcgttttggtcttactagagagagccgcagactacacatagacatatctgaacccaatgaagcttccaatcatcaaggtgccagccatagacctgctgccataggtggagaacaggaagataacagctacaatgaaggcacagatttgacattggaaggtcaagaggttgagatcaatggtacttcagagtcaagtgatatgtcaagcttaaaccaattgttgtgcccactgtgtaggggggctgttagtggctggaagatcatcgaagaagctagacagtatttggatgagaaatccagagcttgctcacgagaagcctgcatgttttctggcaactacagggagatccgtagacatgccagaagggtgcaccccactacaaggcctgctgatgttgatccatcaagacgccgtgcatggcaccgcctggagcatcagcgggagtatgctgatatagtaagtgcaatcaggtcggctatgcctggggcagttgtgtttggtgattatgctatcgaaggtggtgaaatgttttcacatgaccgggaaaccagtggcccaagtgaaccgagtgggtctcttctgacaacattctttctatttcatatgctcagcagtagtccgattagatcaggtgatgagccaggaggcacatcaaggggcctgagaaggcatagaagacgctatctgtggggagagaatttgttaagtcttcaatacaatgataatgatgatgatgatgatgatgatgatgatgatgatgagggggaggagggcgaaggagatgctgtagatgaagaagttcagagaccaaggagccgccggaggttcataagatcaagatcggaggagcgagtataatacattggtggcttgtggtaattacattcttcgctgctgtgaagttcttttgccgtgaacccatgatgactccttgcatggcagtggatgatgtgcttccttgcattgttaaaatgctgcgcacatccttgcaatcaaagacctaaaggcttgtggacctcaagttcaagtttagatgactcaaatgtgtttaacaccatccatgagaccctcttgaatccgacacttacggggaacactcgttcttatggcaaagctggactgatctcagcacaattacacaagtgatactagaagctagcttttggagatgctcgctccatcacagttggtgctgtcgctggtgcaccatgtctttttaccttatgcactgtgtgtcatctgcatttgttgtatattcttcacatattacattccattgagttcatgctgctact

SEQ ID NO: 30739 - DNA, 624 bp, Zea mays
  Clone ID: UC-ZMFLB73070G09_FLI
agcgcagccggagccggcgggaaggcgaagaagggcgcggccgggcgcaaggccggcgggccgaggaagaagtcggtgacgaggtccgtcaaggccgggctgcagtttcccgtcggccgcatcgggcggtacctgaagaagggccggtacgcgcagcgcgtcggcacgggcgcccccgtctacctggccgccgtcctcgagtacctggccgccgaggtgctggagctggccggcaacgctgccaaggacaacaagaagacccgcatcatcccgcgccacgtgctccttgccatccgcaacgacgaggagctcggcaagctgctgtccggcgtcaccatcgcccacggcggcgtcctccccaacatcaacccggtgctcctgcccaagaagaccgctgagaaggcggcggccaaggaggccaagtcgcccaagaaggccgccaagtcccccaagaaggcatagaggggcgggcgcctttaccgctgtgatgttgaatgctcgtgttcagtagatctttacgtctgtagtgtcgtcgttgttattggaactggttagtagatctgtgcattgtggttgaaacgtgattccctgatttcagaaatctaatttgcaatttgggtgcac

SEQ ID NO: 30740 - DNA, 1156 bp, Zea mays
  Clone ID: UC-ZMFLB73070G12_FLI
cacagcagaggatcacacgcactcgcctcctgtgtctgcgtgggttgtggtcgagacatacatgcacgctagcctcgcctcctacgccgcggcagctatgccggcgctggacctccgccccgagatagcgcacgcgcaccagcccgtcatgtcgccctcgcgccacggctgggacggcaatggcgccgcagcagtgtccagccctatgcccaagaggctggacggcaaggtggccattgtgacgggcggcgcgcgcgggatcggcgaggccatcgtgaggctgttcgtcaagcacggggcgcgggtggtgatcgcggacatcgacgaggccgcgggggacgcgctggcgtcggcgctgggcgcgcgggccagcttcgtgcgctgcgacgtgtccgtggaggaggacgtccggcgcgccgtggactttgccctgtcgcgccacggcggacggctcgacgcctactgcagcaacgccggggtgctgggccggcagacgcgcgccgccaggagcgtcctctccctggacgccggcgagttcgaccgcgtgctccgcgtcaacgcgctgggcgccgcgctcgggatgaagcacgcggcgctggccatggcgccgcgccgcgccgggagcatcgtctccgtcgccagcgtcgccggcgtgctcggcggcctcggcccgcacgcctacaccgcctccaagcacgccgtcgtcggcctcaccaagaacgcggcctgcgagctcggcgcgcacggcgtccgggtcaactgcgtgtcgcccttcggcgtcgccacgcccatgctcatcaacgcctggcgccagggccaccacggcgccggcgccggcctcgacgacctcgacgtcaccgtgcccagcgacgaggaggtggggaagatggaggaggtggtcagggagctggccacgctcaagggccccactctcagacccatggacatcgccgaggccgtgctcttcctggccagcgacgagtccagatatatctccggccacaacctcgtcgtcgacggcggcgtcaccacttccaggaacctgatcggcttatgaatgtgatccgttccatggctacgctaaatagagaaggaacaattaaattggtaacttagttgtactagcttggagtgatcgatttcatttggttgattc

SEQ ID NO: 30741 - DNA, 633 bp, Zea mays
  Clone ID: UC-ZMFLB73070H05_FLI
accaccccaagagacagcaaccagaggatgctgatcgaggagaacctcttcgggagggctgccctgaatgtcattgcgtgtgagggcacagaccgagtggagcgccctgagacgtacaaacaatggcaggtgcggaaccaacgagcaggcttgaagcagcagccattgaaccctgatgtcgtgcaggtagtgcggaacaaggtcaaggattgctaccacaaggactttgtgatcgacgtcgatcaccgctggctcttgcagggatggaaaggccgcatcctctatgccgtctcaacatgggtggcaaatgatgccccctcttacatctagctgttctgttgactcacttgtctacaaattttaggtttaggtatgtcatctggatatatctagtgacaagtgtgttcagtgggttacatggactcacttgtgattgatggtaatgcgaactagatgcttatcactcaaccatgttgttgcatagtgctaaacatgattagatctaggtcctgggtctgggcaatgtcctctgcagcatctgccgtgtttgatcaatccagtcagttgatcaggttgtaattgacacttggtcctctctgtttccggtgtgattactgcgctgtttcagacttc

SEQ ID NO: 30742 - DNA, 2264 bp, Zea mays
  Clone ID: UC-ZMFLB73071A05_FLI
acagacttgacacgaaggagcagtgtgtatgttcataggagctgttgttctggacatggttttggagtctgcagcagctttagaacattcgcacacctgattgcgatgaattcgtagaaatgcttttaaaacttgattactggtctaaactggctaggccccgtccgaatgtcatcacataacaacagtatggtggccaaatcacaagcttttacacgtatagtatagtgtgtttcatctttacaagatcctttcccttttccttttcacccctatcaccccaacccacctacgctacattacatttcctgctataccaccaatctgtatacaattgaaaaactacaggctactacaacccaatgcttcctgagaatctagacaaatttggacagtgcgagtttcaagtcctgatggtattgtggcatattggttcctgcatgcattttgcaaatgaacaaggctaagagttattttataccttgcattgctgtaatttttacttctccccaccagggacatgggttcttgttgagatatcttgttaaccctttatttttgatcagttatttctcttcaagtttatctgttggggcctaatcctcttagcgacgcgtcatattagaacccgggtgttgtgttaaagcttggacaaccaatcatttattatccgagaatttaatttggttttattaatcaatttaaacctttctataggaagagagtggctcttcactcccatcggattaacaaaaagtgagtctcatgttttcttatttgtttgactcatgttggtgtgatattttgctaaacagattttgcatatcatagcgacgtttgtcattttgtatctatacatttatgctaatttttaactctcgtggcaacgcatgggtacgtacctagtaaatatctgtaatgttagaatcttagtatttccatcacttgccattcctcaaatataaatatattgcatctattatatggctcttctgacaaaagaagtttgaaaatagagaggaaggataaggacgcaaagaaaagaagtaaaacgaggagaaagcacaaaagttcatcagagtcaagttccagctcatcttcagaatcttcaagcagcgacgatgagggtaggggttcaaggaagtccagatcacagtcgagatcaaagagaacaaggaaggaaaagaagagtcggtcaaggtccaagcacagaggcagtgaaagcgaggaggaaggcctggtacgcctctctaaattcttcgggaagtaaggagtagacgctgttgtacccaagacgcccttttcattttgaaacgtagattggtgggtttggatgtatcattcaacacagattacttctgaaggttgagcgagccgtttaccatggtgttctcaatatgatgctcagctgttaagagggtttggtcaagttgtgtggcttccaaaaactttgtaagcaactggtaagtcattattaaatcgctgtaccttggaggatttgatgccatatatttgagacattgaactgctatatttatgttaagactttacatacgcagtcagttgtttcagttatatgctcttttgctatatttatgttaagactttacatgcctagtcagtcgtttccaatatgtaaatcttctagcgcctgacatggtgaggaaggttgttagaccctactgaaacttccctctctttgttacatcactttgcatcttccagcgcctaacatggtttagtgaatctggaatttagtgttgtgagagctgttttgttgtgacgtgctttggactgttaggtggctgaattctgaattttcagatttggagtagcgtctaagtctgaatttccaaagtagtttttttggacagttaacatcgcggatcctttgcacgatgcatcattttaaataacacggtgctgcgtcttgaaatgaagtctgttttcactctcatgttcatgttcatgcacaaatatggaagccacattttgtgtttatcatgctttcctatatctttgtgtacatgtgatttaatgccagttgtgtatttatgagaattttggtttattttgtaggatttcggctctcatcaagtgactcctccccctcatgttgactttgcggacagatgtctcaattttagtggtggagctacgaacaacaatccgatgtcctgatcgagagcgatggagttaatgtttgaacttgtgtgtttgaacttgtgaactaaaaatgtgaactatggatgtaaacttgtgtg

SEQ ID NO: 30743 - DNA, 1173 bp, Zea mays
  Clone ID: UC-ZMFLB73071B04_FLI
tggagctcaactggtacaccagtcccgaggaggcggacgacagcgccgctaccttcgcctctgatgtctatagactgggtgtgctcttgttcgagctgttctgcacattcgaaacgatggaggacaagatgcgggcaatggcgaccgcgaatctgaggcaccgggtgttgccgccacagttgctgctcaaatggcccaaggaagcatctttctgccagttgctaatgcaccctgtgccagaaaccagaccgaagatgagttatatgaagagccatatagcatctagagattttgagggtatagtgcaggtttgggatgttactaggagtcaagtttttgttgagatgagggagcatgagtgacgtgtgtggtcggtggacttctcaattgtggacccaacaaaattggtcagtgggagtgatgatggatctgtgaagctatgggatatgaatcaggctgggagtattggcactattaaaacaagggaaaatgtgtgttctgtgcaatttcaacctgatactgctcgctccattgccatcggctctgctgaccacaaaatttactgctatgatctacgtcacatacgagctccttattgtacactagttgggcacacaaagactgtaagctatgttaagtatctggatgcatcgacaatagtatctgcatctactgacaactcattgaagctttgggacttatcgatgagtccaggaaggataattgacagtccagttcaaacatttaaggggcatacaaatacaaagcaaggtcactggagttgacgaagctaaagctgaacttgaggaaattgttcactacctacgagatcctaaggccgcacttgaagaaatcttatatcagtttgaggaaaaactccaagctgaaagagaggaagctgctaggaagcaggaagagttgcaagcacaagtacaagctcaacaggccgcatttgaagaaaaccaaagtttgctgcgccaggccaagcacaactaccttgctagaacatatctgtggttagaactttgtcagaactacgtgcaatctgtttgaatgcttcaaacctttgtggtggaacctttgtatgtttgaacctctgttgtggaagaactagtgtgctggaattgtgtatgacttgtgatgagtatgttgtgtatgatggcttttctgtgt

SEQ ID NO: 30744 - DNA, 1202 bp, Zea mays
  Clone ID: UC-ZMFLB73071B08_FLI
ggcaagcagcctaaaaaaaccgtatcgtctcgcctgttcagtttccttctcctcttcccgcagcccggtttgccgaccaggttccaccgttccagagtagccaagcgaatcccgtgtctggttcgcgcgatggcggaggagcagtccaacccccagcaccagcaagcggaggagagggaggttatggtggagcagcagcagccgaggagggccccgaagctgaggtacctggacttcgtccaggtggcggctgcccaggccgcggtgtgcctcgctgggctctacggcctcgccaaggaccacgccggcccgctccgccccagcgttgacgccgtcgagtctgccgtcaagggcgtcgttagccccgtctacgaccgcttcggcggcctgccgctcgacgtcctcgccttcgtcgaccgcaaggtggacgacacggtgcacgaggtggacaagcacctcccgggcgcgctgaaggcggcgtcggcgcatgtctacgcggtggttcggggcgtgccggaggtggcgcgcgagctggcggccgaggcgcagcggtcgggcgtgaggggcgcagcccgtgcggcgctcgcgatgacggagccggtggcgcgggacgtgtacggccgcgtggagcccgtggccaaggacctctacgtgcggtacgagcccgcggcggagcacctggccgtctccgcctggcgctcgctgaacggcctgccggtgttcccgcacgtcgcggagatcgtcgtgcccaccgccgcgcactgggccgacaagtacaacagggcggtcgcagccgccgcggagcacggctacgcgggggccaagtacctccccgccatccccaccgaacgcatcgccaaggtgttttcgtcggcgccagaggccgagccgctggcagagggccagtagtgtgtgtgtgtgtgcgcgcgcgcgcgagctcgtctttgccggtggtgactctggatttggatcaccttccgaactgaactgaaaataaggaagcgtgaatccgggggccagttaaagatggtggtatggtatggtagcggcgttgtactagatgcgtgatgggacgatggttacggaccatgatgatgacgctgtgttccatttagctctctgctgcgtgcttttgtataaaagaagtggttcgatgtcgcaatccctgtgtttatctgacgatgcggttttttggctgtttt

SEQ ID NO: 30745 - DNA, 1265 bp, Zea mays
  Clone ID: UC-ZMFLB73071D02_FLI
cacagccaggagccagcagcggcagctttccctctgtcacgctcacacgcctgcaggccggccagctccattgccaaccatcgtcgagcttgcagctcgctggtcgcatcgtccgtccaacgccacctatggccgccgctcctcctgcccggcaccggcaccggcaccggcacgcgctgcttatttttgttgttgttactgcagctgcagcaggagcagacgcgcagcatccgccgttgccggggttctacccgagcaagcgttaccgcgcgcgtcccttctcccgcgacttccgcaccctgtggggcgcgcagcaccagtcggtgtccggcggcggcggcggcggcggcgtgaccatctggctggactcgacgtccgggagcgggttcaagtcgcggcgggcgttccggtcgggctacttcggcgcgtcggtgaagctgcaggccgggtacacggccggggtcatcacggccttctacctgtcgaacgcggacgcgcacccggggttccacgacgaggtggacatggagttcctgggcaccacgccggggcagccgtacacgctgcagaccaacgtgtacgtcctcggctccggcgacggcgggcctggcagggtcgtcgggcgggaggtcaagttccgcctggactggttcgaccccaccgccgacttccaccactacgccatcctctggagccccacgcacatcatcttctacgtggacgacgtgccgatccggcggtatccgcggcggagcgagacgttcccgcggcggccgatgtgggtgtacggctccatctgggacgcctcctcctgggccaccgacgacggcaggtacaaggccgactaccgctacagccccttcgtagcgcgcttctcggggctgctcctccgcgcctgctcgccgcgcgccccgccaaggtgccgcgcgccaagcggcggcccgaccggcggcggcggcgatgcgctcagcccgcagcaggaggccgccatgcggtgggtgcagcgcaatcacatggtctacaactactgcctcgaccccaagcgagaccacagcctcaccccagagtgcattattcaccacgcagcagctggcgatacctactactagctaattacataattagatatatacatattcatcatcttatgtatgtgtctacgtaccatatgtcctatcgctatatatctctagttttgttgtaatattaaagagatgacatttgcttcagcagattctgagaaacacatgcatctgtatcccatt

SEQ ID NO: 30746 - DNA, 949 bp, Zea mays
  Clone ID: UC-ZMFLB73071E05_FLI
tttgctaatacaggagggacaatctaaaagtattgtgcaagatatagagcatgcactcatcatatctaagtgatcggagtgatattgattagcttattagatggatattggcccagtttatctttcatttttttctatagctgttagaattttactttgctcagttcatactataaataatatgagactcttgttttgtggtccaagtgtttagcgcttagggtgccttggaagtacgctagcttgttgtcatgaagaagtcattcaagttccttccagtgagttattagttcttatgtatatttctgtaacatgtaattttacaatctttatgcacattggaggtgtatttacgacataattaagcatcataaacaaatatattttagagtagaaagaaggacaatgcactccattatgttttaaacattgacttttatgtttacctcattgcaaccttttcaggcacttcctatatttcttgacataatgtttcatcatgttcttggtgtaatattgtcattgtcatttgttcttgtctttggagaggtattcatctgatgtcaaaatttactatttggtcattatgtgatttaactgatagtgattgtgtgggcatctcttgcttcctcatgctcttcttagggatcatgtctgggctcacactggggctcatgtcgctcggcctcgtcgagctggtgatcctccaatgtagcgacataggcatctcaagagaccattaatattatgaagaggtcgatggaagaaaataacaacctccaactattaaacttcaatcgagaacaagtgcctccagcttatgtctgcttgaccactatatgatctacaaccttatggctactatagaagatagttatagtagctctgaatgtgaagttatacgatcattttcaattatccttaatatttatcactttgagtttaagtt

SEQ ID NO: 30747 - DNA, 1137 bp, Zea mays
  Clone ID: UC-ZMFLB73071F11_FLI
agagaatcgagcagagccacccggttgctcctcatttccactttccactctgcctccgctgccgatcgccgtccccgaccgcagcgcaggactgaggatgagtgaagaggataaggctgctgcttctgctgagcagcctaagagggcccctaagctcaatgaaaggatcctctcctctctgtccaggaggtccgtagctgctcatccatggcatgatctcgagatcggtcctggtgctcctgctgtattcaatgttgttgttgagatcacaaagggaagcaaagtcaaatacgagcttgacaagaaaactggactgattaaggttgatcgagtcctttactcatcagttgtataccctcacaattatggtttcattccaaggactctttgtgaagacaatgacccaatggatgtgttggtcctgatgcaggagcctgttgttcctggttcgttcctgagagctagagcaattggccttatgcccatgattgaccagggtgaaaaggatgacaagataatagcagtatgtgctgatgatcctgaataccgtcactacaacgacatcagcgagctgtctcctcaccgcctgcaagagatcaagcgcttctttgaagattacaagaaaaacgagaacaaagaagtcgcagttgatgcattcttgcccgcgacaacagctcaagaagccattcagtactccatggacctgtatgcccagtatattttgcaaagcttgaggcagtagattgcaagcaacaatttatctatcatgcgtcttggatgggggcgtgattttaataagccaaatcgcttgctatattgggaaccttggaattgagaacagcgtcactagctgtgattcgctcctttctcgttaaattatcatatgaataggccaagtccatacgtttaccgtgtggcgctctgtcagtcttcgtctacccaagtagctagctgcatggagggatgtctagcgttgctatgagatggcactcgtgggtctgcgggctggctacatgggtccgttcctgtgttttccgtaaaataaaattataattctatataattgaatcatttaatttatgtgatctttttgtgtattccaatcagttattgagtgtgacgacggtgtttttggct

SEQ ID NO: 30748 - DNA, 1114 bp, Zea mays
  Clone ID: UC-ZMFLB73071G12_FLI
cgccgttcatgatcaacccgtacccgtggttcgcgtaccagtcggacccgcggccggacacgctggccttctgcctgttccagcccaacgcggggcgcgtggacggcgggtccaagatcaggtacaccaacatgttcgacgcgcagctggacgccgtgaagtcggcgctggtgcgcgccgggtacggggacgtggacgtcgtggtggcggagacggggtggccgaccaggggcgacgccggggagcccggcgccacggcggagaacgccagggcgtacgtgtccaacctggtggcgcacctgcggtccggcgccggcacgccgctgatgcctgggaaggcggtggagacgtacctgttcgcgctgtacgacgaggacctcaagcccgggcccacgtcggagcgctcgttcgggctgtaccacacggacctcagcatggcctacgacgccgggctggcctcctccgcggcggcggggggtcggggcgggggcgggggcggcgcggcgcagcccaggggcggcgggtggtgcgtggcgcgggccggcgcctcggacgcggagctgcaggcggacctggactacgcgtgctcgcaggtgggcgtcgactgcagcgccatccagcccggcggcgcctgcttcgagcccaacacggtgcgcgcgcacgccgcgtacgccgtgaaccagctgtaccaggcggccgggcggcacccgtggaactgcgacttccgggcgtccgccacgctcacctccgacgacccaagctacggggcatgcgtgtacaccgggggaggccaataatgcacggcgcactggaagaaatttcccgttccttttcagctgcaggctacggggcatgcagtgcagatcctcttgtttgtttcgtcgtaccggaagaaatttcccgttccttttcagctgccctgactgcctgcctgccttgggacaggctgggatgtgtcatgtgtgagtgtgacttcgtgtaaaagaactattggacgctgtcagtgtcgccgtgagctctgtggacggtagtagtacatgtgtctaatgtacaagtagagtgagattgtatctatatatgtattttttccctaaaaataaaacttcattcggct

SEQ ID NO: 30749 - DNA, 507 bp, Zea mays
  Clone ID: UC-ZMFLB73072A01_FLI
caacgacatcatccactcgatcatcgacatggacgcggacgtgatcaccattgagaactcgcggtccgacgagaagctgctctccgtgttccgcgagggcgtcaagtacggcgcgggcatcggccccggtgtctacgacatccactcccccaggatcccgtcggctgaggagatcgccgaccgcatcgacaagatgctggcggtgctggacaccaacatcctctgggtgaaccccgactgcggcctcaagacccagcgccaagtgagcaccttttttttgcctttttcgtttccgaggagggcgtcgtcgatgccaatttgtttccaataaacagggctgtgcccgccgttctgttgtactccgtctgtggttaggttagtagttttcttgatctcgcccccacgcggtacctgttttactactctctgtttggtggtttctgaggaagttgcccgtgtacttgtatcgtaaaaaccgagtgggacatctgcatcgtttcatctgcc

SEQ ID NO: 30750 - DNA, 510 bp, Zea mays
  Clone ID: UC-ZMFLB73072D10_FLI
cttgaaagttcctatttatttttcagctggtttaaccattcaagctaatgtgtactacaaaatgttgattgggtggactagtcaaaagatcaaggacagccatacagtgcataatccatttgacttcaagcatgtttgccactttgaacgttccttcattaacaaccctggtccctgtgtactttttgcaacacctggtatgattactgggggattttcccttgaggcgtttaaaaaatgggcaccatcagagaagaatctggttacacttccaggatattgtgtttctggaaccattggtcataagttgatgtgtgggaaacctacaagggttgattacgaggacactcatattgatgtcagatgtcaggtcgattttcacgtcatttcatatcttgcaaaaaatgtacaactttaaataataatgacaagaacatggtcaaccagggggaagccatgtaaatcactagtgttttaaacactgttgaagtctggcttttaaattcgatc

SEQ ID NO: 30751 - DNA, 1346 bp, Zea mays
  Clone ID: UC-ZMFLB73073A05_FLI
cacgacctggggggttcagatcggatcggaagcttccataagtttccatcgggcttcgccggtatggcgatccgcaaggggtcttcgtacgccgtcgcggcacttctcgcgctcgcctctgtcgccgccgttgcaggggaggtcttcttccaggagaagttcgaagatggctgggaaagtcggtgggtcaagtccgagtggaagaaggatgagaacatggctggtgaatggaaccacacctcgggaaaatggaatggagatgccgaggacaaaggtattcaaacctccgaggattacaggttctatgccatttcagccgaataccctgagttcagcaacaaggataagaccctggtgctgcagttctctgtgaagcacgagcagaagcttgactgcggtggtggctacgtcaagttgctgggtggtggtgatgtagaccagaagaaatttggtggagacacatcttacagcattatgtttggaccagatatctgtgggtacagcaccaagaaggttcacactatcctgaccaaggatggcaagaaccacttgatcaagaaggatgtgccttgtgagactgatcagttgactcatgtttacactttgatcatccgtcctgatgcaacatacagcattctcattgataatgaagataagcaaactggcagcatctacgagcactgggatattcttccccctaagaaaatcaaggacccagaggctaagaagcctgaggactgggatgacaaggagtacattcctgaccctgaggacaagaagccagagggctatgatgatattcccaaggaaattcctgaccctgatgctaagaagcctgaggactgggacgatgaggaagatggtgaatggactgcccctaccattcccaacccagaatacaagggaccatggaaacaaaagaaaatcaagaacccgaactaccagggtaaatggaaggcacctatgattgacaacccagattttaaggatgatccatacatttacgccttcgacagcttgaagtacattggcattgagctgtggcaggttaaatcgggcactctgtttgacaacatcatcatcactgatgaccctgccttggccaagacttttgcagaggagacctggggcaagcacaaggaggcagaaaaggctgcttttgatgaggccgagaaaaaaaaggaagaagaggatgccgccaagggtggggatgatgaggatgatgacctagaggatgaggaagacgatgagaaggcagacgaggacaaggccgactctgatgccgaggatggcaaggattctgatgatgagaagcacgacgagctctagatggcgaggatgatgtt

SEQ ID NO: 30752 - DNA, 1612 bp, Zea mays
  Clone ID: UC-ZMFLB73073A06_FLI
ccaccgagctcctcctcgctgctgctccgccagttggactgggaggcgacggcggtgatggcgccgccgcggtggaagtccggcgacgggcgccgccggctcctgctgctcctgtgctgctgcctcctcgccttcccctgccacgctcaagtactcaccaacaacaatatctcccaccggtccgatcaaggcggcatccactcgtttgtgggcacgtacggcatcaactacggccgcatcgccgacaacctgccgccgccggaggtggtggtgcggctgctgaagctggcccggatccgcaacgtgaagatctacgacgccgagcacaaggtgctggacgcgttccgtggcaccgggctgaacctcgtggtggccatccccaacgagttcctcaaggacatggccgccaacccggccaaggccatggactggctgaccgagaacgtgcagccgtactacccgtccacgcgcatcgtcggcatcaccgtgggcaacgaggtgctgggcgggcaggacgcggggctcgcccaggcgctcgtcggcgccgtgctcaacgtgcacgacgcgctcaagatgctccggctggacgccaagatcgagctctccacgcctcactcggaggccgtcttcgccaactcctaccctccctccgcctgcgtcttccgcaacgacctcatggtgtacctccgcccgcttctcgacttcttctccaagaccggcgcgcccttctacgtgaacgcctacccgttcctcgcctacatgagcgacccgtcgcacatcgacatcaactacgcgctgttcaagccaaacgccggcatcgtggaccccaagaccggcctgcactacaacaacatgttcgacgcgcaggtcgacgccgcctacttcgcgctcgaggccgcgggctactcgggcatggaggtgcgcgtggcggagaccggctgggcgtccgccggtgacgccacggaggccggcgccaacatggagaacgccatcacgtatgaccgaaaccttcggaagcggctgttcctgcgcaaggggacgccctacaggcccgaccgggtggccaaggcctacatcttcgcgctcttcaacgaggacctcaagccgggacccacctccgagcgacactacggcctcttcaagcccgacggcagcgtctccattaacatcggtctcaaggggcttctgccgtcatcggcaccgccgcgtcctctcgtggccttcaagagagccggagcgtggggctggattctacaatactcggctgcgcttcttccgtgtacattgttttctctagcattgttagggatatgaacgcagattagcacctgcatgcctgctcgctgtatagtgtgttagatccaagcttcatggactggaagctagcccgtggcgcttacgaggggctagtaagctgctccaggacaagtgcatgcagtttactacaaattatcttcgtagcaaaatcgcgctattgcgaatctctcaattcagggttcggagatggttaagaattctagtagtataccaaatttccgaataaatcaatcaaaagctaaacctcatgtttcattgttcagcctcatccggtccctttacaaactgaaacatc

SEQ ID NO: 30753 - DNA, 911 bp, Zea mays
  Clone ID: UC-ZMFLB73073B12_FLI
gtgactccaatacctagccaggaaccttcaagaactggaactccactagggtcaaggacaccaactcgaagccctaactgttcagtaccgtcaacacctgtaggggggaggtcaatagcatctcctcctggagaagactgcacagacgatggcccatttttccacaggaaatgcggcgtacatgcaaatgaattgtcagatactgagacgaggcttaaaacaaggcaagaaatcgctgcgcttggcatacagctaggaaagatgaacattgctacgtgggccagcaaagaggagctagagctagtctctgcggcaccgagcatcgctgatttggagcgcatcaggaaggaatatgctgctcgtgctgcatcgtatgaggaggcagaaaatactaaacatacagcaagattcaaaaaagaagaggtgaagattgaagcttgggagggtcgtcaaagagcaaaaattgaatatgaaatgagaagaatagaggaatttgctgagagaatgagaagtgaggccatggaaaagatggccgaaaagctagagatgacgcgccgcatagccgaagagaaacgagcttcggccaacgccaaaatgaaccagcaagcagctatagcggttcagaaggccgagaagattcgccaaacgggacgagtcccaggatcgagtatcctacgctgcggtggctgcttctgtggaccgtagtagatcatacataggattcgacagctagtatgttggtctgggatatatagtggtgggaaacctgaactccaccctctacaagtcagcattccttgattttagcatgaaaaaaggaatgtctctaaggtattcagatgcaaacgtgttcttgtttgtcatgtatgtaaattattccaatgattttaacttgggtcggtgtacaaggt

SEQ ID NO: 30754 - DNA, 556 bp, Zea mays
  Clone ID: UC-ZMFLB73073C04_FLI
ggagatccggtctgatgtttctgaagtagttgcagctgacgagtttgagtacaaggatcctgttgatggctctgtgtccaagcaccagggcatccgatacctctttggagatggttcacgactggtgttccgcctctctggaaccggttctgttggtgccaccatccgtgtctacatcgagcagtacgagagggactcctctaagaccggcagggattcacaggacgcccttgctccgctggttgatgttgcgctcaagctctccaagatgcaagagtacactggacgctctgcccccaccgtcatcacataaattttgaagagtgttttagaatgagttgaggcgcttacacaaactttcattccggcctcttgttccatagtttttcttgcatgttacatctcaccgatgaataaaatgtatgtatcagacttgtctcgtttttttgcccatccaagcagcaaattagccgctggcacagcatgcggtaataatcttgtcacagtgctgtaattgggagcgtttttcttgttagaagtgtttctggtttgtttg

SEQ ID NO: 30755 - DNA, 1514 bp, Zea mays
  Clone ID: UC-ZMFLB73073C11_FLI
gtgctgaggcgctttgtcgagaagtgcctagtatcgtcatctcagagactgtcagcaagagaactgcttgaggatcccttcctacagggcgatgacgtggctgtttctttggatggtggagattatcatgtaccgaccaagtacgtacggcagccttcatatctagggcatacctatagcaatggctccatggtgagtaatggattctcagaaagcatggatgaggacgctctgagtgaagactgcgaggatgatgacatgaaaggccaagatggcattgacctgttcaacgagaatgaggatgaacctcttggcaatgtggacataacaatcaaagggagaaagagtgaggatggaggcatattcctcagattgcggatttctgataatgatggacgggtacgcaacatctattttcctttcgacgttgaggctgataccgcactaagcgttgcaactgaaatgatagccgagctggatataactgaccatgaagttactcggattgctgacatgattgatggtgaggtcagtgcattggtaccagattggaggcctggtccgggcatagaggaagctcctgacacttcatactgccataactgtggatccaacgtctcatcgtgcggttcactttacgcctacatgtcatcaggccgtcgaggttgccaatgtgcagagctacatgggcggtttgaagagatcacgttccaagccgatggagagcagtgtgatttgcaggaatcggcaggcagctctgacgatggaggtggccaaacagagcattatgtcaaaagcaacgagtccactcatgtgaatggcctcgtacagatgggaagaagagatctttctaatcagctttgcttcagttcattccaagagcaatcatgttcatataaccgttacgagaatgacactaaccatcatgtgaatgggttcgacataaagcatgaggtaaagatcgccaagtacaaagcacggaaaatggcacagtttaagagggctatccatccatctcttgacttcgacaatgcatatggagtaaataggggtaagccttcactgaacaagctgcaatctttccatgttggaaagaaccacaatttccgtgtgccaacctgtgatcgaagcccgggtaaagtaagcacagactatcattctgacttgaacagccaagtattgcaaagtaggcaccccgatccgggagcccaaagggcccggcattgtgaggtcaatgcagctgggagcagcacggagtgtatgtttacagggaggcgctactacaccggagctcagctgccgccgaatctcccaagaacaaaatctgtacccctgaatgctgtcgacgcctgaaatgctttcttgccatgtaaatttttatagagtgtacatttgttttggttccttttgtacccattatgaaacatcgttgttgggcaggagagactggatgtggattctggctgagctgtttgtaaattttccatcttgtgaatccagagaggttaggctgt

SEQ ID NO: 30756 - DNA, 1416 bp, Zea mays
  Clone ID: UC-ZMFLB73073D01_FLI
gggaaattgatcatgggcttcaggaaggcaactaacaattctttcgaacaggagcaagctacaaagcctgccaatggcgccctagcaacttcagaagcaaatggtaaagtttctgccccagattccagtccaaatgctgcagtttcccgtcaaaacaagctcaacacagagaccaaaagttctagtcctgtggaacaagccactgcattgaaaatggacaaggatggattaacacagaaggaagggcctggaactggtagttcttccccaggttctgtcaagagaaaaacaactattcttggtcaaaagaataaaagattacggatggataatgaggaatcaatggagttgaagataacatgggaggaagctcaagaattgcttcgccctcctcctaaggccccatccattgttattgttgatggccatgagtttgaggaatatgaggagccaccggtacttggaaggaagacttattttgtagcagataaatcaggttcgaaccatcaatgggcccaatgtgaagattgttccaaatggaggaaacttccaatagatgctctgttgccctccaaatggacctgctctgacaacaaatgggatccagagaggtgttcttgcgaatctgcacaggaaataagtatagaggagcttgcagaattcattcctataaaacctgccaaaaagcccaaattgaagatagaatctgatgctatcgatgcttcagatgggctggacacgcttgcaaaccttgcgattcttggtgaaggtgaagctctcccttcacagccaacaacaaaacatccccgccatcgtccgggctgctcatgcatcgtctgcatccaaccaccaagcgggaagggtccaaagcacaagcaaacttgcacctgtaacgtttgtatgacggttcgccgccgtttcaggacactcatgcttcgacgcgagaagaaggcgacaaaggatctgtctcgcaagaaagagacgggccaatccagtgagaaggccacacaacaagctgtgtccggacctccaggagccaatgccactgcaaccagatctgcccagaaagcagatggaaacaccgatggacctgaagacatggccgtcgatcacaaggtgacaacatcctctcccgtcaagaaccatattgacctgaacatccaacctgaacgggacgatgagcagtcaccgaaatctggtgcggctggtttgttgagccgagacaatgcaacttagagagtggatagcgtggattgattgatcataccataccaatgagtggacatagataaccgatcgaacatatccttccgaatgtctatacccttgttttttttttaagatagatgtggcgtgaggcgtggggccttgtagtgtagctgttaccttcccataccatagagccggtttcctttt

SEQ ID NO: 30757 - DNA, 1507 bp, Zea mays
  Clone ID: UC-ZMFLB73073D04_FLI
agctaacccaatcccaaatcaatcttccatggcgccggcgaccttgctactggcgagactggccgtggcgtgcgcgctggcgctcggcgccatggcgcagctgtcgccgacgttctacgacgcgagctgccccagcctgcaggccatcgtgcgggccgggatggccgccgccgtgcagcaggagccgcggatgggggcctccatcctccgcctcttcttccacgactgcttcgtccaggggtgcgacgcgtccgtgctcctcgacgactcgccgacgctgacgggggagaagaacgcggggcccaacgccaactccctgcgcggcttcgaggtcatcgactccatcaagtcccaggtggaggccgcctgccccggcaccgtctcctgcgccgacatcctcgccctcgccgcgcgcgacggcgtcaacctgctgagcggtccgacgtgggcggtgcagctgggtcgccgggacacgcgcacggcgagccagtcggcggcgaacagcaacctgccgtcgccgtcgtcgagcgcggcggcgctggtgtcggcgttcgcgtccaaggggctggactcgcgggacctggtggcgctgtcgggcgcgcacacgatcggcgcggcgcggtgcgccaccttccgttcccgcgtgtacaacgacaccaacatcagcgccgggttcgcggcgaagcggaggcagatctgccaggcgcaggccggggccagcgacggcaacctggcgccgctggacgccatgagctccgtcaggttcgacaacggctacttccgcaacctcgtggcccagttcggcctgctccactccgaccaggagctcttcggcgccggtggcggcgccgtcgactccatcacggcgcagtacgcgcgcaacggcgccgccttctcgcgggacttcgtcacggccgtcctcaagatgggcagcatcggcccgctcaccggctccagcggcgagatccgcgccaactgccggaagcccaactagacagacgtctacgtataccatagcatagacagacatcagtggcagtggtcagtttcgagattcgtgcgacacggacggacggtctggattcctcgacatggccagctaagagggccgtggctttttgcgtggaaagtgtggagtgcgttggaagggagcggcggaggcgatgatgattccgggcgatttggtgggtggagcgccgctgtcaggactagtactcatttcaggggagaggggagagctggggggggggggccagcgtgccgtcacacatcgatcaacccgcatatgagaccattgctgattttcattcttttttattttatttggccgcgttattctttcttttctctttcgtttctttgtgccacgattttagcctgtgatgagtctgtacgtacactgggcgattcatgattattattctttttttttgttcaagaaatgtacacatgcatatccaatgtgcaaccgatcatgcatgattaataataactctctggtcagaac

SEQ ID NO: 30758 - DNA, 669 bp, Zea mays
  Clone ID: UC-ZMFLB73073D06_FLI
ggtggttgaggtaccagcagaagaggaagcaccaaagccaaagccaaagaatcctcttgacttgctgccaccaagcaagatggtccttgatgactggaagaggctatactcaaacacaaagaccaacttccgggaggttgccatcaaaggtttctgggacatgtatgacccagagggctactctctgtggttctgtgactacaagtacaatgacgagaacaccgtctcctttgtgaccctgaacaaggttggtggattcctgcagcggatggacctgtgccgcaagtacgcctttggcaagatgctcgtggtaggttctgagccacccttcaagctgaagggcctttggctcttccgtggccaggaggttcccaagtttgtaatggatgaggtctatgacatggagctctacgagtggaccaaggtggacatctctgatgaggcccagaaggagcgtgtcaatgccatgatcgaggaccaggaacccttcgagggcgaggccttgcttgacgcgaaatgcttcaagtgagtgtgctgtatccagagctgtttagccctctaattggatgtctatgttgatctggtatatcttgctatgaactggttaaagtttgtgctggtttgagaatttttgtttaccttgtcatcatttaagtgtttcgccgtaac

SEQ ID NO: 30759 - DNA, 725 bp, Zea mays
  Clone ID: UC-ZMFLB73073D07_FLI
ggtagatgcaccagaaatcctggctgtaattggcaaagtacctcacctctccgagtttctcaactccctgtacaactgccagtataagtcgttcttcgttgcattttgtaagttcagatattgaaataacatgtccatactcctgcagtattataagattactgtcggtgcattttgtggcttgcattgatatggtctataattgtttccagctggtctgacagagcaaatcaagttagaccgttatcttcagcctcatttccgctactacatgagggaagtgcgcaccgtggtatactcacagttcttagagtcatacaagagtgtgacaatggaagcaatggccactgcgttcggtgtaactgttgatttcattgaccaggaactgtcacggttcattgcagctgggaagctgcactgcaagattgataaggttgctggtgttctggagactaaccgacctgatgagaggaatgctttctaccaggcgaccatcaagcaaggggacttcttgctgaaccgcatccagaagctttcacgggtcattgacctgtaaggactgtttgtgttggagctattcctgcaatcggcgcctgcaaatgtttcccaccctacgtcttccacaagacatctctccttgagtggggattggggaacaagccctaagaacatctgtgttttaagtgcagaatatttgtgttttaatcagtaaacgctgtcctgtc

SEQ ID NO: 30760 - DNA, 1888 bp, Zea mays
  Clone ID: UC-ZMFLB73073F08_FLI
aatttgaactgatctttgagaaaaatgtgatagtttttgttagcaacttttatgtatattgatagtcacttgtgttccaaaagaagctgcttccttcagctgagtatccatgtggaagatgaggtccatagatgacgtcttcagaatgtgggagatgaggtccataaacaacgttcccattcataagtgtcatttggttcacctgcggtgttgcttgataagcatttggagcattaacttgattgggggcgttaacatggggatgaatatttgcattggtatccttctggttagcctttggcttgctcctagcagtccgtttgttctccacaggactgtctgcagtcagcctgcccatttgctgctggatttcattcagtggactactggacagttttgacctgacgcttcttttggagctagaggacttgtactcaagacggtacaaggcgagggcatcagacttttgatgttccaattggctaatcccatgcaggttattgaactgatcttcattagttcagaaatatttattttgtaatcatcaccacaaagaaaatcatcaatacaaagttcacggtctatatctatatagtacatctgatgagttggcgactggaaccagaagcgccaggagcagctcggcggcagctacagcctgcagcccgacctctttggcttgcccgcgtcacctgggccagtgcctgggcccgcacagccaccaccgcctatattgctgctggggcgacacctgctgcgcagcctgcgacggcgacctctcatatgttgattggctttatcctctcccattcaatatagtttgcctggtctttatctgtcttccacatttgaaatcagtgttcgatgtatccaaacccacattttggacctaccatattgtactcatccagccatttctcttcctcgcaagccagcagccacttgtttatcttctccatgatttctctcctggacggctcctccctggctttccgctatctgttcgtcaatgctggtcaggagcttagaaggattcacgagacctggtaaattttgtcagcgttaaaaatatcaagccatctgaaccagagtcgatcagtaagtacatgtactgtaaacaggaatgtcagattctgcagagaccatgtcacgacaggtagggaaaaccacatgatggctcatcagattcgcaaattcatttcttggtactgagattgaatcgaaccgatgtacttgaaaaaagaagaaggaaagaacaatcagggcccatgtaggcttgcagatcccatttcaccctcgcatggcacccgacaaggaggatgtacgccgtctccactcctttgcctcatcctcctcactgctgccagccactatttccacttcaccgttcccttcctcgttgccggcaaggaggttggtgtgcgcgctgactgacagcgtgatgttacggttggacatcgcgcccctcatgcgcagcctcagcgccgatgctgtggagctaccagcgcgctggtacgcatagtggaagcggtcggacccggactccgcatatgcgccgtggtagtacggttgctgcccccgcgacgtcgccggggaggcggggaggacgagccaacggccaacgcacagcttgtagtgccagtttctgcttctcccggacgaagtcaaggtacattcctgaagtgggttaaatccatgaaccccgccgtggtgaccatcgttgagaaggaagccaacagcaccggcagcgacgactgctccgatgacctgccatagcgggtgaccgcggcgatgggctactactcgacggtgttcgatgccctagaggcgacggtgccgtcgggcagcgctgaccgcctcttggtggagagcgaggtcctcggcagag

SEQ ID NO: 30761 - DNA, 594 bp, Zea mays
  Clone ID: UC-ZMFLB73073F11_FLI
aataaccattacccgcaccagaacccctggttcaatggtgctggcgccccccctgtggctaatggtaggtgggggagttacactttctcggccgccatcggagggctgttcccgttgctgagcttccaggtgcacggattcccgcaggcgactgcctatgggcctgctgcagggtttccttatgggtacggccattctttccatgggtggcatggccatggcttcccgcgccaggcaccacaaggccagcaggtcgatgcgtacttgaaggtgctgctgctggcagttggtgtgcttgtaattgccagcctaatcgcattttagattatgtatggctggcgatgtcgctgatccttgttggtgtgtaccgtagttctagcatcattgcatcttagatggctcccaaagtttgatgtcaatgtgtagagtattgtggatgcttcggctagtaatagtacttgtgataattggtggcagctgttattcattgtgtaaagttgctatcgaaaattataggtgcatctgttgtgttcatgccttgaactttggtcatgttcatatttcttcaatgaagtttccctggaatgttctgtt

SEQ ID NO: 30762 - DNA, 644 bp, Zea mays
  Clone ID: UC-ZMFLB73073H01_FLI
gcggcgcgcggatgctcatcaccgagcagttcccggacaacgccggggccatcgcctccatcgtcgtcgacccggacgtggtctccctcgacggccgcagggacgccatcgagacggaggccgaggtcaaggaggacggcaggatacacgtcaccgtgcgccgctccaacgcctcgcgctccgacatctactcgcgccgctccatgggcttctccagcaccacgccgcgccccagcaacctgaccaacgccgagatctactcgctgcagtcgtcgcgcaacccgaccccgcggggctccagcttcaaccacaacgacttctactccatggtcggccgcagctccaacttcggcgcggccgacgcgttcggcatccgcaccggcgccacgccgcgcccgtccaactacgaggacgacgcgtccaagcccaagtaccctctccccgtggtgaatgcgacgtccggggcgggggcggctcactaccccgcgccgaacccggccgtggccgcggcgcccaagggcgccaggaaggcggcgacgaacgggcaggccaagggcgaggacctccacatgttcgtctggagctccagcgcgtcgcccgtgtcggacgtcttcggcggtggcgccccggactacaacgaggcc

SEQ ID NO: 30763 - DNA, 1014 bp, Zea mays
  Clone ID: UC-ZMFLB73073H11_FLI
atttcttctaggtgtcgcttcttgggcacagatggcaaacttgatcagctgataataaattggagaaagaaccgtaaaaaatgggatacaaagaaaaaattccatgagaatttggcagccgtcttggactttgcactgccttcacccccttcggtcggtgataaagcgaaagatgacgagcaagctgattgtgggatatgttatgccaagcatctgccagttgatgacgaactcggtgcccacagcgggtgtgcgacggactacatgtgtgagaaccccagctgcagcagagccttccattccgtgtgcctgagagactggttgcgctccatcaccacgactaggcagtcgttcgatgtcctgttcgggaactgcccctactgcagcgatcccgtcgccgtcaagatcaccggccactaacactgtatcttggtcagcgtttacaaagtcagccaggcgattttaggtgcaccttaacttgcgtttcacgtcacacaagggagaaaacgagactattttggttcctgcttacatgtacaatagccaagtgtcaccttcggttacgttatctaaatgagctcctgcttacatgtagtattatgtcagtttcctttcagaaaggtcaagatcgctctaggtggatacattcgtccgatttagcggagctgcaactgaaatatgtcaaaatttgccgccggcttctagagaacaaacgctcttctatagaagggaaggggttattcgataataattctacataagagtggttttacgaggcgactcgactcgtttcggcttgatttcagacctagtcgtagtcgagtccttgtgctctccatcgagcccatggacccatctataatgtatagcttgatctgaatacccatagtatatattcttaacattattctcttagtcgtccatagtatacattcttaatagtaggtcctgagttttatttgtccgagttattaaatcaagcagataagacacttatcttgaaccttctaggat

SEQ ID NO: 30764 - DNA, 988 bp, Zea mays
  Clone ID: UC-ZMFLB73074C06_FLI
cactacacagccaggggagggggcagccgggcaggcaatggagcacgcacgcagcttccatttgtagcggcaggcagcttctttctggaggaagctccgtcgtaaatgcaatggagtattaattctcctgctcctgctgcatgccgctgctgcctcctctagtcttgacgcttcctttcccttccatgccctctctgcattgttcacctttgctagtacttccctctcatgtcgtcgcagtggcagctctgccgccggcacccacgcacgcacgcacgcacaattcaatgcgcaccactgtactcgctctctgtgcttcctgctaggagatcgacatcgactcgactactaggagtatctttaatgtcgttgctgctgctcccctttctcgatcggcttgctgatgatgtgcctttcttgctccccttccggcgatggcgtggtgatgacgacggtggcggtaatggaacagtgggcagacaagcagcagcaggcggccagcaccaacgccgcagcggcggcggcgcagatgcccttcctggcgctgctccagggcgcgggcgttgtggtggaggcggagcagcaggaggagcagcaccacgacgggcgcaagcggcaggccttcgcgcgcgccgtctccgaccttgatctgctcgagagctgcgtcacgcaggcggtagctcccgcagcggcggcgtctgcgcccgtggccggcaggaccgagaggcggaggaagcggcagaggccccgcgcgcgcgccgcgccgccgccggagaagcgcaagaagcccgaggaggccgagagccagcgtatgacgcacattgctgtggagcgcaaccggcggcgcctcatgaacgaccacctcgcctcgctccgctccctcatcccttccagctacaccccgcgcggcgaccaggccacggtggtgggtggcgcgatcgactacgtgaagcagctggagcagcagctggtggcgctgcaggcggcc

SEQ ID NO: 30765 - DNA, 877 bp, Zea mays
  Clone ID: UC-ZMFLB73074E05_FLI
gtgcggaccatggtccctgtgtatctggtgctcataactctatagttactgctagggctggaaaggaccttgtttccagcttggtgtctggattattgacaattggcccccgttttggcggagcaattgatgatgcagcccgatacttcaaagatgcatgtgataggggcctcacaccatacgagtttgttgaaggcatgaaaaagaagggaatccgtgtgcctgggattggtcacaggattaagagcagagacaacagggataagcgtgtgcagcttctacagaaatatgctcacacgcatttcccttcagtcaagtacatggaatacgctgttcaggttgagacctacaccttgtcaaaagcaaacaatttggttatgaatgtcgatggtgcgatcgggtcactttttttggatcttctgtctggaagcggaatgttcaccaaacaggagatcgacgagattgtggaaattggttatcttaatggtctctttgtccttgcacgttcaattggcctgatcgggcacaccttcgaccagaagaggcttaagcagccactctaccgccacccatgggaggatgtcctgtacaccaagtgagatagagccattctttgcaaagcataaagtattattgtcgcttagggctttcagctgtctgtacacttcataaatcgagcagttgcaaaaaaagctcgaaattgtgattgttgatgaagttaggggcagggggagagacatcgaggggaggcactactagattgtgtgttttgtgttgagttgtttcacgatatacggcctcagaatagaagttccctttgaaatgaagtaacgctcgctgatttatgagttgataaattgcatttgttcaggcacgc

SEQ ID NO: 30766 - DNA, 740 bp, Zea mays
  Clone ID: UC-ZMFLB73074E12_FLI
ataaaacaaaaatattgcttggtagcttgtctttcaaatgctttggcatggttaattcattgcctctgctaatttgttgcataattatgattaattgttagccaaatgattttttcattaatgcacatcaatcaaagttctgcatattgattctgccacttgagtttgtgtagagactagcgcatattgactgtacatactgtggtatactatccgaatcttgtctgatctgcatatgtaaacacgtcttgaatttctactatctgatcaattatatactttgcctagtttaaattgacactatccttgcaccatttgttatacttctaatagtaatgaattttaatattttgaattttatgttgacatttagtaatatttttgaattttatgttgacatttagtaatatttttgaattttatgttgacttaatagaaaagatccttctttgtacggtataactgtcagtatatctataacattttctgttgggatctgcaggtcggctggtacgcacactgacaaaaagaaatagagagcatttcaagttcatggagctggctgccagagattatgttccagtgtctgattttccatacatgtagaacctaatagacatgtcaaagtattatgtatcgaaccagctcatgggattttgctccttccaatgcatccagggtttatgtatcgaaccaatttatgggatcttgctcttattctaatgcatccatggtttgtg

SEQ ID NO: 30767 - DNA, 1997 bp, Zea mays
  Clone ID: UC-ZMFLB73074G10_FLI
ggttgatcttttcctctctcgcgttcccctcgccttcctcttcctcccccacacccaccggtcgccgcccccgtcgccccgtcctcctcggtccagagacgagggggtccgcgccgttccgacgccacaccgcaaccgcatcacatcacacaccgcctgctcccaccgtccgtccgccctccctcgatcgcgccccccggatcgctggtacctccgcgcgcggctccgacctcatcttcctccatcgactggcatcggcagcggcggcgtgttcccggccagccttcgaaagggtaatcaatcgccagacttttgggagctctgttgggggggaccggggggaagagccaagttactgcagaggctaacatttcggttgtcgagtgatggcgcaaggcatcaacttccctgacttcatcggcgccgtgggtggccatgatggtggtgtggactttggtgggaacttctgtgacatggccttctaccagaagctaggggagggcaccaacatgtcggtcgacagcctcaacagcatgcagaccagcatgcatggggggtccatcgccatgtctgtggacaacaacagcagcgttggctctaacagtgactcccgcactggcatgcttggtcatcctggtctcaaggggcctgccattgtgggaagctactcggttgggcacagcatcttccgccctggccgggtgtcccacgccttgagtgaggatgcgctggcacatgctctgatggacaataagttcccaactgagacactcaaggattatgaggagtggactattgatctggggaagctccacttgggaatgccctttgcacaaggtgcctttgggaagctctacaggggaacatacaatgggatggatgttgctattaagcttttggagcgacctgaggctgaccctgagaaagctcaactgttagagcagcagtttgtccaagaagttatgatgcttgcaacactgaggcacccgaatattgtcaagttcattggtgcgtgcaggaagccgttggtttggtgtattgtgacggagtatgcaaagggtggatctctcaagaatttcttgagcaagaggcagaacaggtctgtcccgctgaagttggcagtcaagcaggcattggatgttgcacgtggcatggcctatgtccatggccttgggttcattcatagagatcttaagtcggacaacctcctgatttctggtgataagtccattaagattgctgactttggagtggctaggattgaagtcaagactgaggggatgacacctgaaactggaacataccgctggatggctcctgaaatgatccagcataggccatacaaccagaaagttgatgtctacagttttgccattgtcctgtgggagttagtgactgggaatgtcccctttgcaaacatgagcgcagtgcaagctgcatttgctgtggttaacaagggcgtgcgaccagccataccccacgactgcctccctgcccttgcggagatcatgaccatgtgctgggacacaaaccctgaagtccgtcccccattcgctgagattgtgaggatgctggagcaggtggaggtggaggttctgaccactgtccgtaaggctcgcttccgctgttgcatcgcccaaccgatgacgctggactgacggactgagtcgtccgcaatccaggaaaagaacctggagaggggtttaatcctatgtgtttataatcccaatagacttgtgcttcagaaacagaaggctgactcctcagtctgctcctcagtctgccttctgtctttgacatgttatcgtagagtacacctagctgtcgtcaccagtggttgtaatagaggtagctttatgcttgactaaatacccttccgttataacaagtgcatgctcttgctgctcgctgttatgtgtcttcatcatcatgcggcagcatgtggaagctttgcttaatggtatatatatatgatatatgtattattagtaactagc

SEQ ID NO: 30768 - DNA, 664 bp, Zea mays
  Clone ID: UC-ZMFLB73075A11_FLI
gagagatctggtctgccattccctcgctccttcccgtgaaccacaaacctaacgcggagcggcgcgggccggccgccgggcgaggtgcgcgtagctgccgtcgattgtcgccggatccatccaccatgggcggtggcaacggccagaagtccaagatggcccgcgagcgcaacttggagaagaacaagggggccaaggggagccagctcgagaccaacaagaaggccatgagcatccagtgcaaagtgtgcatgcaaacattcatgtgtaccacgactgaagtgaagtgccgggagcacgccgaggccaagcatcccaagacagacgtgtaccagtgcttcccccatctgaagaagtgaaaggcctgaacttagcaaccagtgctggtttggtcactacgatcgggccagggggcgttccttgtgttgagggtgttcattccgtgttatcttcccgtcagtcatgcgtcctgtcctatgttaacctacataagaaagcgatgtggtgtccacttctagtgaaactactgtctgctgttaaaacctggttggtttcagaacgatgattttcgtgtgcaaaacagattactggtccgtgggagttgggccagtttgcattgtcttagtatgtgcctcctgcccagcgcaagaattcctttgcaaat

SEQ ID NO: 30769 - DNA, 715 bp, Zea mays
  Clone ID: UC-ZMFLB73075B08_FLI
caataatctgacggcacatcttggaggcatggatctgcaggattctgctagctctgctggcgctgtggagccgaagcataatgatgtggtccagaacggatcgccttctggtaatgaagaggctgcagtagctgaggacagctctgatcagcagtagttacaacaaggcagtggtttggattcacaccatgactgcaggggttttgtcggtgcgcgaatgacagggcacaagtggtaacttttttttggcaacttttggaggggaggcgagaggcgtattagactgacaagcgaacgtgtttactggcgttcaggtaagattttggtttaccttgttatattcaggggtagcgatgaagatttggggcagttggtggaatggagatgaagcagaatagtgggaaaacgaaggtggtgatatctggaggcgcctaggaccgaggacaaagattatgtgtgataagttagtagcccccctgtggttgtttactggggggggttgcgtttgcacacgggcgcttggatgctatcatgctgttgttacgatgaactagttggttttcgtctgcgttaggatgggggatgttgtaggacctccgattttttttatggaggagctgaacttggagagccagggagttttttttttttttggacttgttgttttgtggcatgatggtgttaaattgaagtaagaagatgctcattctgctgt

SEQ ID NO: 30770 - DNA, 807 bp, Zea mays
  Clone ID: UC-ZMFLB73075E03_FLI
ctcacggcacgaataattgacgagacaaactcaatgacagatgtctatactgctttctatgagttttcttcattgatagagtcaaagattgatgacagtgatccaaatgctgctctaacacagagacgtgtggattcaataaagcaaacttgcaagtcatttggtttggtaaagcaaagggggtaccatttggagaagtcaccttacaggcctatgctgatcatgattgtcctcctgctggtagctattcttttcggggtaatgttctagctggccctttcttttccgcgatggagacttgagagaaactatgccaatcagatcctttttgtactgtgtattctccaaaggctgcagcaaattcggaagtactgactgtagatcgatacggctgcatgctactgtttccatgactccgttgatgctctcaattcgtttgttcattttattttctcgcgctttgtattgtttgaagctgttttaaggcagaaaatactatcgtgacatgtatgatgtatcctacgaacatgtgtctcagtttagttagcaatggctgcacctctgttcttaaggcgtcgcctaggcgtccgggcgatgggcgatggtctaacgcctaagcgctttgcccgcctacctcacctaggcgttcagaaggtgctccaacgtcttggaccgccttaccgctttaaaaactatgggctgcactgtagttattctatgtgttgtcttgttttcatatctgatatgtttgtgtttatcataactgtgtactctcccatggcgctaattatattcaatattatatgt

SEQ ID NO: 30771 - DNA, 930 bp, Zea mays
  Clone ID: UC-ZMFLB73075G04_FLI
gtggaactgtggaagcgttgagcttttttcttctttgtcttgctgcgcaagaagaagggaaacgagaggcgggcggcgatggcgaagaggctgctcccgtcgctgaaccgggtgctggtggagaagctggtgcagcccaagaagaccgccggcggcatcctcgtcccggaaacatccaagcagctcccacctcctgcattcgtgaagaacgactgaaccagccgccactcgcccgtccgactccggctccggccagctgcctctgtccctccgccgagctgcccgtccgccttcgtccctccggcccaggcgagcagaactccgcccccacccgccccgagccgagcagcagccagcagagccgcatcgccgccggggaacgctgagttgccggtccgccgccctgagaagatttccgtcccagcagcatagccgcagcgccgctgcccgtcgcctcaaggcaagtccgagcgccctgtcacaggccccagattaggttgatgtctttcctgagactgttgcctcaaaggctaccccaacttatcaggcaggtggagcaagatgttgagactgtaatccacgttctccagccgggtccaataggaattgtggagcacaaattcacagacgcggagatcttagaggccagggctacagtgaaaagagcagtggataattggcgaagaaattggacccttgagagaaatgttagcagataaatggaaaaaatatacccctggtgtcttctatcaacagtaattgaaataaatagggtgccatggctggatgcagttgttgccattagttagatttgagcacgatctgcttatcgggagttatgttaactgttctaaatgatcagtctgtttctctttgtttcatggtttgaaacgttcatatttagagaatgcagtaattcgactccgattc

SEQ ID NO: 30772 - DNA, 1099 bp, Zea mays
  Clone ID: UC-ZMFLB73075G11_FLI
cgggatggggctgctaataggagatatccgattgacgaatcgctaccggactatccgggaataccgacccgtccgctctgacgcaaaccagatcaatctgtggccgttgttaccatcggatattgtttttgtttgacttcttctcggccgaagacgtggcggcggcgaacggagctgccggtgcggtgctgttcagcgaggaggacctgagggaggtgagtggggtgcgctggggagaggacttcgtggaggtgacgtgcggatgcaccagccaccgctacggcgacgccgtcggccgcctccgcgtctttgcgtcaggcgacctggagatcaactgcgagtgcacgcccggctgccgcgaagacaagatgacacctgctgcctttgagaagcactccggaaaggagacagctggaaagtggaggaacaccgtctgggtaatggtccagggggaaaaagtgccactgtcaaagacggctctgctcaaatactactacctggcgcacaagtcaggcaacggttctcacaagggccgtaacggacgtccgtcccaccgcgacgagttcatctgctgcgcaggatgtggcaaggagaggaggtttcggctccggtcaaaggaagagtgccgtgtttaccatgacgctcttgccaaagctagctggacgtgtgcggatttgacaactgatagggtcacctgtgacgacgaggaggagcgtgcaagccgcaaggtcctgcggggctgctcccgcgcgccgtcctgcacgggctgcatgaagtgcgtgtgcttcggctgcgagacctgccgcttcaaggactgcgactgccagacctgcgttgacttctaccgcaactccaaggaataataaaaacacaaggatctaacgccattggttccagcaggagtgctctcaacaacaatgccgatgactgtagggcaggccgctattctattctattctaaacaattccattcgcctaccattctccatggctggctggtgctatagtatccgtcgagcagcgatggacgccggccgattttgctacagtgcagtctaccaatggttcccgacttcccgttaaaacgcgcattgctcac

SEQ ID NO: 30773 - DNA, 1490 bp, Zea mays
  Clone ID: UC-ZMFLB73076D12_FLI
ctcacttgctttcctggccgccgtctcctccgcggctcttaacgccgcatccactcgccggttcttaacgccgcccgccgcctcctccgcggctctgccctcccgccgctgccgccgcctacccaggaatcaggatgcgggtgaagaagcggtcgaagcaccgcaaagcggtcaagttctacgccacatgcttcggcttccgcgagccctataaagtcctcatcgacggcaccttcgtccaccacctcctcacccagcgcctcctcccggccgacgaggctctccgagacctcctctcggcctccaggacgccagccctcttcacctccaagtgcatcctcgcagagctcagacgtctcggcaagtcacatgccgaatcatttgacgccgcgcagcttctcaccacaaccaagtgtgagcatgacaaggtggtcggtgcagttaactgtgtccagtcactgataggtgataaaaatcctgaacatttcttcgttgccacccaggatcctggtctccgagaaaacttacgagagattcctggggttcctgtgatatatggtctgaagaactctttatgcatagaacggccctctatgcagcaacgcaagtttgctcaattggatgaggagaagcgtctcaatatggatatctctgaatacaagaagttactgaaggctgcatcagaaggaaagacaattgccagtgaaaatggaagtggcgaagaacaacatgagatgcctattagttctcttgtaaaaaatgcacttcatgttactgataaaaccaagtttaagaggaacaaagcaaaggttatatttatagccattggtatctcttgttatgcgattgactatacaatgtttattatctagtaagcataagttcactacacttatctatttcctgtattatttaacgtttacaagtatcattatgcagggtccaaacccactctcctgtaagaagaagaaaccaaagctccccacggctattcaaaagcaggcaggtacggctgatggcgaggcaaagaggaagagggttcggaagcggaagagaggccaaaaagataacaagcaattggaggctgcgaactagaaggatgggcttgcgtaggaagtttcagtgctcttgctagacatccatcctgactccggagcaagtcaactatggaggagttcctttctcccacacaggattcagtatgccatgccataccatgctcattatatgttgaagatgcttcttgcaacgtaacacttgattggttatggtgatcgtgaatccttctctagaggatgttattggatgtttcttttgtcgcaagatgcaactttaaatgttttttgaagcaaaagtttgatgccagtagctctaccaggttcttgcttgccctgctacatgtgtgatcccattcttcaattgtaagatgtgtttgttgagaatatgtataatagataatacttctattattttagattttagacagtagt

SEQ ID NO: 30774 - DNA, 1287 bp, Zea mays
  Clone ID: UC-ZMFLB73076E07_FLI
gcgttctcctggtaccgccggcagaaacagaagatcggaagctcgctggaggtttctgatagcaggctcagcaccgaccatttccagcagaaggaagcctgcagaaggagcgcctctcctttgatcagcgtcgagtactcgaacagctgggacccgttgtctgcaggtggggctggtgttggatcacccggtcaagtagttggtgatagcttcagattcaacctagaggaggtagagtgcgcgacgcagtacttctccgacgtgaacttgctcgggaagagtggcttcgccgccgcgacgtacaaagggatccttcgggatggatcggtagtcgctgtcaaaagcctcagcaagacgagctgcaagcaagaggagtcggatttcctgcgtggtctgaagatgctcaccctcctacagcacgacaatcttgtcagcctgaggggattctgctgctccagggggagaggggaatgcttcctcgtgtatgacttcatggttaatggctgcctgtcgcggtatctggacgtcaaggatggttcttccggtgctaccgttcttgattggcctacaagagtttccatcatcagaggcattgcgaaaggaattgagtacctccacagcaagaagggcagcaagccaccggtggtgcaccagaacatatcggccgacaagatcctccttgaccaccacctggcgccgaggctctcggtgccggggctgcacaagctcctcgcagacgacgtcgtcttctcggccctgaaagcgagcgccgccatgggctacctcgcgcccgagtacgccgccacgggccggttcacggacaagagcgacgtcttcgcgttcggggtcgtggtcctccaggtcctcacgggaaggagggacgtctcccagctgaaggtcggcgccgccgctgtcagcgacctcggcggcctggtcgacgcgaacctcgacggcgcgttctcgagaacggaggcggcgaggctggcggctgttgctgcgtattgcacgagcgagacgccaggtcagcggccgaccatggaggccgtggttcagcagctcagcagcacccagtgagtgagtgagttacaagctgctgccgaggtgtagtgtctagcgaagtagcgagtgagtcgtgtgatgacacggtgatggaatggaagctaggctggctgggtattgcggtcagagatgatggattgtgggagcgatggtagtgaactgatgttttgtaatgacggggcaatgacccagttgccacttacatgctagtggagttttgattattgt

SEQ ID NO: 30775 - DNA, 2110 bp, Zea mays
  Clone ID: UC-ZMFLB73076E10_FLI
gcgctcgccttcctcctccccactccactccattccaacgcaacggcctcgccccgctttataggccgccgcccgcgccacatcgccaccgtctcgcaccgtcgcggccacccattctctctcgtccatcgcatcgctccggctcccagcgcaatcgatccatccgtccctaggtgtgcttcagctatgcagttcagcagcgtgcttcccctagagggaaaagcgtgtatgagcccagtgaggagaggcagtggaggttatgggagtgagaggatgaggatcaactgctgcagcatcaggcgcaacaaggcactgaggaggatgtgtttcagtgcaaggggtgctgtgagcagcacgcagtgtgtgctcacatcagatgctggcccagacactcttgtcgtccgaacatcctttcggaggaattatgctgatcctaatgaagtcgctgccgtcattttgggtggtggtaccgggactcagcttttccctctcacaagcacaagggccacccctgctgttcctattggaggatgttacaggcttattgatatccccatgagcaactgtttcaacagtggcataaacaagatatttgttatgactcagttcaactcagcttctcttaaccgtcacattcatcgtacctatcttggtggggggatcaacttcactgatggatctgttgaggtgctggctgcaacacaaatgcctggggaggctgctggttggttccagggcacagcagacgccgttagaaaatttatctgggtacttgaggattattacaagcataaagctatagaacacattttgattttgtcaggagatcaactctatcgtatggattacatggagcttgtgcagaaacatgtcgatgacaatgcagacataactttatcatgcgctcctgttggagagagtcgagcatctgactatggattagttaagttcgatagttcaggccgtgtaattcagttctctgagaaaccaaagggtgctgccttggaagaaatgaaagtggataccagcttcctcaatttcgccattgattccccagctgaatatccctatatcgcttcaatgggagtttacgtttttaagagagatgttttgttagaccttctaaagtcacggtatgctgaactgcatgactttggttctgaaattctgcccaaggctttgcatgagcacaatgtacaggcatatgttttcactgactactgggaggacattggaacaatcagatctttctttgatgcaaacatggccctctgcgagcagcctccaaagttcgagttttacgatccgaaaacaccattcttcacttcccctcggtacttgccaccaacgaagtcggataagtgcaggattaaagacgcgatcatttcacacggctgcttcttgcgtgagtgtgccatcgagcactctattgttggtgttcgctcacgcctaaactctggatgcgagctcaagaataccatgatgatgggtgcggatttgtatgagaccgaagacgagatctcaaggctactggcagagggcaaggtgcccattggcgtaggggagaacacgaagataagcaactgcatcatcgacatgaatgccagggttggaaggaacgtctccataacaaacaaagagggcgtccaagaagccgaccggccggacgaaggatactacatccggtctgggatcgtggtagtcctgaagaacgcaaccatcaaggacggcaccgtcatatagagactaactttggccttacgcatggcgtgcaaggttacaggttagtcatcgtcttgagagttgagacttagtttgaggcgcgcgcccgaccttgacttgagccgtcggagggacaagaacatgaggaagaagggctggtggtgccggatgttgccatggacgacgagaaatggtttggtgcggtcgcatcggttccagtagctagctcttccgatgttattaatatatgtatctagtggagtagtgcgaacagtgcaataagctgggcgagcaaagccgcggcaactcttggcttggggattgttggtgcatcttgtaaataataaactcggacgcagcaaatgaaacatgcccctcatcttcttcc

SEQ ID NO: 30776 - DNA, 2906 bp, Zea mays
  Clone ID: UC-ZMFLB73076G02_FLI
attcgagagagagagaacaaaaaatcaaacaggcatccaaaaagaagggagaggaagagggagggattgaaaagctagggttttcgccatggccattgcccacctcgagctcccctctctcgaatccacccttcccaagctctcctagctcccgcatctcgtatcttcacaaaaagcagacgcctttgattccccttcccgctgcgtcgcccccattcgagggttttccctccttccccaaatcgaatcgcagcattaccgaccgagcaagcaacccaccaacccacccgctttaagggtccgagccgagcgacggcgctggcgatccagctgggcgtgagggcggcggaggcggccggataatcaatgtgtacgctgtgcgccgtgcagcggtggtcgcggcgcgtcgccaccatgctcccgtggctcgtcgtcccgctcatcgtcatctgggccgccactcagctgctcctcccggccgcctaccgcttcgaggtcacctccccacgcctcgcctgcgtctccgtcctcctcctcaccctcttctggtacgagatcctcctcccgcgcctctccctctggcgctcccgccgctccgcgcgcctccgcgaggagcgccgggcccacgctctcgagctccataagctccgcaagactgcaacacggcgctgccgcaactgcagcaacccgtacagggaccagaaccctggcggtggtaagttcatgtgctcttactgcggtcatgtctccaagcgccccgtgctcgacctcaattcagccgggaaggcccctaccggatggccttgtgctcaggattgtggatattggctggacctgcactgctcctccagcaataacagctccttcttgggattctcgtggcgcttactttcatccttttgctcgacagcaatgaggtggttattaaggaatatattcagatttacattgtcaggggatggtgagggcttgaacatagatggtaaaaggttggcaaagagtggggagaatggaggaaaaaccgaggagagcaggaccaacaaggcaagaaggaaggcagaggagaagagactggcaaggctggagcgagaaatgctggaggaggaggaaaggaagcagcgagaggagatggctaagctagtagaggaacggaggaagctgagggatgaaaaggcagaggctgaagagcggtcaaaaagcgctacccctgttggggagaaggatgctaggagggaggtagagaagcggtgtcaggagaggaagaagaaagaggacaagggatcaagtaaaagcaattcagattgtgaggacattgatagaagattgaaccaagaaggcgatagaaagcgagactttgacagaaagagcgacttggacaggcgtgagagttacaagcctcgttacttcgatgctaacagtcacagtaataaaacaggggagagcagatcaagatactttggccgtgtgacaggtggcttcttatcttcttcaagagggtttggtggcggttccttctttggcagaagtgctcaggcccctgctcctcaagttagcaaggttagtagatctgtagttcctgcaactgaccagggtaatgcaatcaaaagagatgtccagcatgcagccacgcaagctacagacaaatctgctacagctggagaaactagaaatgcatggactaattttaatcgacctgttagtccaaatgtgcagccacaccctactggccttaaaaagtcatggcatcagctttttatacgctcagcatcagtggccccttatcctgacgttacaacttcagctcatgatatgattcggaagccagaaccaaatggagcacaaataaacaatgctcatacatttctctctcagtatcctcctctggactgcaagccaagttcaagccagtccatgcaatatcctggttttccaccacttaatggagcacctcccagtaacccactatttcatttttctgctggacatatgcccttctatgatgatgcagaatcaacactactcgaagaatcagagcaatttgaggacccatgctatgatccagatgcaattgcattacttgggccagtttcagaatctttagataacttccctccggacttagattgtggattcttctcgagtgatgttgctaaagaaccacatgggtggccttcaccaattgagtctcctctctcaagatcccacacggttgaagaaaagcttaccaagccctcgcactcatcagttgcaagaggttctggtggtcccattctgcctgtgactagcagtgaacaaggcacatggcaaatgtggagcacgccattggttcaggaaagtttaggtttgcaaggtcctcagagtcagtggtttcaacaaaacacaaatcaatttaaccatagtgctaaccttttcagtagtggaggcagggcaagaagtcccctgggtactggtttgaatgacagtgatccatggcttcagaaagcacctttccaacaattgccacctgatacatcaagcctgttcctttcacatgaaatgccaggaaaattgcacaatgacttggctttcgggtctccaaacaaatcagcccgcgaacacccctttgggccacctggttatttgttgcctaaggaggaactggtgctggatggagctcaggaaggcggcggcgggcatgttctgtcgccgtccggtgcacatgttggcttgttttctccaacaagtcctgatgtgcagccactgtggccattcagtgaaaaaagagagcatagaacgaacagacttttgtaatagaaggaagggaaaatgtggagccaaggcttccttgcctcctctcatgtagggtttacggtcggatataagctggactgtgttcctcttttttgcactgcattgggccttgtttc

SEQ ID NO: 30777 - DNA, 636 bp, Zea mays
  Clone ID: UC-ZMFLB73077B05_FLI
gcgacggtggatcgccaccaggcctagcggcagcggaccgcgacgagacggcgcccggtgcgccgacgacgacggccgtgtcgcccgcggcgacgtgggacgccgccgagcgcgccaagcacatggccaggtatcggcgcgaggagatgaaaatacaggcctgggaaaaccggcgacggcaaaaggcggagctgcaaatgaaggtggccgaggccaaggcggagaggatgaagctacgggcgcaggagaagacggcgagcaagctggcctcggcgcaggcggctgcgagggagaagcgcgcgcaggcggaggccaagctgaaccggcgcgccgcgcgggtcgacagggcggacgcgctcaggcggaccggccacctgccgtcctcctcctccgtgttctcgctcaagctgccgctgatgtgcagatgagagccgaccgaggggggtgtggcacagcagttcacacggatgctgttcagagtttcagtcaactgtcctgttagaattggtcgggacgctgctcgcgtccttgtgtttcagccgagcggtttgcgatgcacacaggcacatggcacttagaattgtagacatttgtttttttatctgcacaaatcagtgaagaacaaaaatattttat

SEQ ID NO: 30778 - DNA, 2843 bp, Zea mays
  Clone ID: UC-ZMFLB73077C05_FLI
aatctaaagtttatatgctgctgcagggtggaagtaagtcgattgtaatttatatgattatttgcagtaatttgtgtccacgccttctggttgcttatttagtcactcatttttgacacagacggtatcccacacctcaagtggtatggtgttgagggggagtacaatgttatggtgatcgatcttcttggcccaagcttggaagatttgtttaattcctgcaacaggaaattttctatgaaaacggtgcttatgcttgctgatcaactggtgagtttattcattccatattcaaccttacgctgccctgcaacagttaggaggcaagtcaactttctggaatttgataacagctattggttgggagttacatgttcagaagtttcatgagcattctgccataagtgttgccttcttttgtgggttttaattccaaagtattagatcattgatggtacaaatggatttcatgaacaccgtatgttgttctaagtgtatcgcaggcaagctttgcaagattgtacatattttaagtttgattctttttccttagtgggtgttggaaggagagcgagattttattattgtcctggacttacattattaaatcttccatttttagataaaccgagtggaatacatgcattccaagggatttattcatcgtgacatcaagccagacaacttccttataggcttaggtcggaaagctaatcaggttaaaccccaaatgtcatctgcttttgttattttcagtataaaaagagcatagtagttacttctctaatactaataatatctggtaataatccccgagattcttactcgtcaatgaacaatatgtgaagacatatcctttttattctgcaggtctatatcattgattatgggcttgctaagaaatacaaggaccttcagactcataaacacatcccatacaggtgaagcatattaatgaagttttcacttataactaaccctggactttgttgggccaaacaattattccattaaattgcaagttcataagcagaaactgggatgtgataattcgtgcaacctctatactgcacctatgtgataattcgtgcaacctctatactgcacctatgtcacaacttcctaggtgttgtttggtttatatatttgtaacgtaataggtaacagataatgttaaattatatttgtttaaatccaaccgtaatcatataccacactacaaattgataccggtctattcaagtgtgaatcgttatcattgtcatttacgttacatttcgtgaatcaaatggcaccctacattttgtcaagagacactggctaatggtacactgttgggcaatccaactgaggttttgtatattaaatatagtatcggatcatggtagagaggcaacctgagtggattgtttgatcttgcgatatttacatgtaaatttcagaaataaaatgacaaattactcaaaatgttcatgtccaatcgtgtcatgttgttgtgcattagtatcttcttgaaagcccaagaataagttttaacaccaaggttaaaagtagtgtcacatcacatgcaaatatttaatgcgttttctgtgatatttgcaaactaggacgctaggttcaaatttaatcgatagattagacataaagtgaaccttttcatttttgtgactacttgttttttatggtaaatgattaattttttttatgcacagggagaacaaaaatctgactggaacagcacgttatgctagtgtgaatactcatcttggaataggtgagctcaatgagcaaatcaaatatgttaccatgtgtctgcaattgcattaaaatcatacgctttttaattcttggatgcttggtcatgaaataaacttaacctgacgattgacgaaggagaagctacttaatctaatgctttcaaaaggagggaaacacaatgtatttgtttttcatgtacctgtacttgtttcatccagaacaaagcaggagagatgatctggagtctgttggctatcttctgctatattttttaagaggaaggtttgtcccgaaaatctgtatattttactgtatttcctcttttactaatactatacttgacatgcttttacgttatgcttagcctcccatggcagggccttaaagctggcactaagaaacaaaagtatgataaaattagtgaaaagaaaatgcttacctcggcagaggtacttctttttgccaacacgaacattgtaatcctgtcatggtagctgttgcagacactgtttgaactaacattgtcttaaacagattctgtgcaaatcttacccgccggagttcgtctcatatttccactattgtcgctccctttcttctgagtgaccccgctaatgtgaccattgttctcgccaggttgccgactcatcagagaaaacgcgcatcttgtcccggggagggagctcgtcgaaaatgcccgcagctccgtccacccggccgacctcttcgggggactgcagtgaccagaaccgccggtgggtctccggcagcagtggcggcagcgggcgcccgtcccccgcgcagaggctccaccactcgggaggcgccgagaacagcaggtcgtccccgcgctcccccgtggcccggaacgcggccgggaggggaggctccgcctcgcgggacaacacgacgttccgcagcctcgagcgcctcaccatcaccaccagcaggaggaagtgagctgccgaggaccacgccgacgaattctgagagtggaaggcggttactaggccgaggaacttttgcgggatccttgctctctgcagctaaagcaaatcggcaaatagatgatggatggatggtta

SEQ ID NO: 30779 - DNA, 1270 bp, Zea mays
  Clone ID: UC-ZMFLB73077D05_FLI
caactatgtcctcaagggaacggaagaccaacagtcatgcacctctggccttatcactcccaacgatgaccggtgctactttaaatactcatacaccaaaggctggtgagccgtatgctgatctaagcgaccaatatgctgtactggtatcttatcgctgtaattacacagaatcgaaaccttttttcaagcaagcaacaagctggcgaccctctgcagccagcgatcttatgatctcagtatcatccgaactgtctttacggaatcctagtcttggtgctcgtgttcctcaactccccgtgcagatactaacactcgaagctactaatatgacatccgaaaaccttacattaactgtccttgctcctgaagcatctggttcttcttcagttgtatccttgaactcatctccaaccaccccaaatggttcttttgatggtgttaatgagtcatcaaaaagatctgggctgggaaaagatggaattggctttcgaagattgaattctgtcctagctactccaaaagaaggtgataatggaggaaacagaatgagtaatgcttcaggctgtactcatctgtggttgcaaagtgcagtgcccctagggtgtgttcctgcccgctcaagcaccactgtcaaacttgagctgctaccattatcagatggaattatcacacttgatactctgcaaataaccgcaagggagaaaggccttgcttacattccggagcactccttggagatacatgccacctctggtatgtcatcaggaaggtcataggataggagagcatcaagaggtatactgttctgtatattgggggcctgggactcagcctgtacaaatgagttggaaacaaccaggccaagcatgttttttttatctcatttgtattggatggacataaggcgctcaccctggagagaaactaccccaagattttaccgaaggatggttgctgccaacatggggaaactaccccagatgaatcataatgtatcacaattgtgttacaaatccattcatttcatactgaggtcgccgagacactggtgttcgtcttcacaaaggcttatgaaattcgtaacgtgttgcttagttttgatgccgttattgttgttggtggtgttcatttaatcccactcatgttgctgagttgtaccatatgcgggctctgatcataatatactggagaaatagaaacatgtgtgtccattggccattgctcatcttcatgatgatatatcagttgctcatgaatcattatgatc

SEQ ID NO: 30780 - DNA, 1111 bp, Zea mays
  Clone ID: UC-ZMFLB73078A07_FLI
aaaggtgacgtttctctttcttggttccggcgccccaccgggagagtgagctgctgcctgcgcaactcgagcgccgcttgtcgcgagcaccgcggcctcgatccgtcaagctaaaagcatgtctggacagcaggaccacgctagtaaaagctctagctcaagcatcagcagcagtactcaagagagcgaggaggaagcacctgtccgaagcgtcaccattggtagcctccttgcccaagcaaatagcaccagtggacatagtcttgggaagcgcctgtcccatttggggtcaatcccgtatactccccgagttaatggaaaaatccccaatgttggtaatgcaacactggaccacgaacgattgctggaaaggttgggcacttatggtctagctgaatttcagatagagggggatgggaattgtcagttccgagctttggctgatcagatatatcacaatcctgactatcataagcatgtgagaaaagctgtcatgaaacagctgaaggaattcagaaaacaatatgaaagttacgtaccgatggaatataaggtgtacttgaagaaaatgaaaagatctggggaatggggagatcatctgaccttacaagcagctgcagatcggtttggtgccaaaatttgtttgctgacatcatttaaagacacctgtttaattgagatagtccctagggatctaactcccacaaaagagctttggctaagcttctggtgtgaagtacactacaattccttgtatggaatcgacgatctcctgacccgcaagacgaagaagaagcactggctgttctaggagggttctgaaggatccaaattctttcagcagctcctgctctgtccagccagcgcagcctctgtcttagtacttactagttggccaacactgtatcatatcctaagttgagtctaggctttacgcttttatgtacagtcgatctagatcttgtaaaattccctcaaggagcaacaggaactgtacaactcttagatccatgagattttggtgatctctcctccatgggaatgatagtgcttgggtgtatgtacattataaaagctaccaggggcattttgacgtgggcgtttggatgcc

SEQ ID NO: 30781 - DNA, 1538 bp, Zea mays
  Clone ID: UC-ZMFLB73078B07_FLI
ccttccttccttccccacacaccatctctctttcacatgaggatttctttcccttctttctttcccacaaatattcccaaagaatcttctgtgttgcttctctcctcggattcctcttcccctcctcgcctcccactccaattattcctctccttactgacttgcttcgcttctctgttatctctgtcctctcctcgtgtttgttcttcctaccagcggagcgcgagctacgcgctgtgcctcgtgcctagacgaacggcataggcaccggacggtggcgtcatgtgcgtggaggagccgaaggacgccgaacggtttggttttggagacccaggggtcgaggagcccgctaagtttcccttggctcagatggagagagtttgtgaaaatacaacttctgctgatttcaggcagaagttaagcaattttgtcccagtaatccgatcgggggattggtctgatattggaggtcgccaatacatggaagacacccacgtgtgcattccagaccttgctaagaactttggtttcccatcattagataatgaagttgtttcattctatggggtctttgatggtcacggtggaaaagatgctgcccatttcgtttgtgataatttaccaaggatgattgtggaagattcagatttccctcttcagcttgaaaaagttgtgagaaggtcctttatgcagattgattgccagtttgctgagacatgctctctccatagagcatcgtcctccggtacaactgcacttacagcaatggtttttggaaggtctcttctggtcgctaatgccggtgactgtagggcggttctttcccggtgtggcaccgcagtcgaaatgtccatggaccacaggccttgcagtctcagcgaaaaactgcgcgtagaatcgcttggtggctacgtggacgatggctatctgaacggtctgctaggagtcaccagagcacttggtgactggcatctcgagggcatgaaaggagctggtgagacaggtggtcccctgagtgctgacccagagctcaagatgaccacgctgacgaaggatgacgagttcttgataattggcagcgacgggatctgggacgtcttctcgaaccagaactcggtggacttcgcccggaagcgcctccaggagcacaacgatgtgaagttgtgctgcagggaaatcgtcgaggaggcgatcaggcggggggctactgataacttgactgcagtgctggtctcgttccacctggaggccccgcctcggatcagagtggaccgtcctggtagggtggagaggagcatatctgctgaagggctcaatagcctcaggatactcctgggaaggcagtagctgcgttcttgtcgcgattttaggtgctgtgccgcattgccgagctgtaattgtttgtagtcatctcggctcctcattgtcgttagctgttacccgttgctgcgactgcgacacgtgttacgattcttgttggtgattgaaccaacaaacctgatattattcttgttggtgattgaaccaacaaacctgat

SEQ ID NO: 30782 - DNA, 1294 bp, Zea mays
  Clone ID: UC-ZMFLB73078D02_FLI
ccctgaatgggcgaggaggcatgcccttgacaagggtgaggcagttaattttttgaaaggtgcagttgtgacagcagatcgaatcgtgactgtcagtaagggttattcatgggaggtcacaactgctgaaggtggacagggcctcaatgagctcttaagctccagaaagagtgtattaaacggaattgtaaatggaattgacattaatgattggaaccctgccacagacaaatgtatcccctgtcattattctgttgatgacctctctggaaaggccaaatgtaaaggtgcattgcagaaggagctgggtttacctataaggcctgatgttcctctgattggctttattggaagattggattatcagaaaggcattgatctcattcaacttatcataccagatctcatgcgggaagatgttcaatttgtcatgcttggatctggtgacccagagcttgaagattggatgagatctacagagtcgatcttcaaggataaatttcgtggatgggttggatttagtgttccagtttcccaccgaataactgccggctgcgatatattgttaatgccatccagattcgaaccttgtggtctcaatcagctatatgctatgcagtatggcacagttcctgttgtccatgcaactgggggccttagagataccgtggagaacttcaaccctttcggtgagaatggagagcagggtacagggtgggcattcgcacccctaaccacagaaaacatgttgtggacattgcgaactgcaatatctacatacagggaacacaagtcctcctgggaagggctaatgaagcgaggcatgtcaaaagacttcacgtgggaccatgccgctgaacaatacgaacaaatcttccagtgggccttcatcgatcgaccctatgtcatgtaaaaaaggaccaaagtggtggttccttgaagatcatcagttcatcatcctatagtaagctgaatgatgaaagaaaacccctgtacattacatggaaggcagaccggctattggctccattgctccaatgtctgctttggctgccttgcctcgatggaccggatgcagtgaggaatccagccgaacgacagttttgaaggataggaaggggagctggaagcagtcacgcaggcagcctcgccgtgattcatatggaacaagctggagtcagtttctgctgtgccactcactgtttaccttaagattattacctgtgttgttgtcctttgctcgttagggctgataacataatgactcattagaaaatcatgcctcgtttttatt

SEQ ID NO: 30783 - DNA, 1076 bp, Zea mays
  Clone ID: UC-ZMFLB73078D08_FLI
gggagctacaggagactgttcaatatccagtggagcatccagataaatttgaaaagtttggcatgtctccttcgaagggtgttttgttttatggccctcctggctgtggcaagactctgttggccaaggcaatcgctaatgaatgccaggctaacttcatcagtgtgaagggtcctgaactgctcaccatgtggtttggtgagagcgaggccaatgtccgtgagatttttgacaaggctaggcagtctgctccgtgtgtcctcttctttgatgagctcgactccattgctactcagagaggaagcagtgttggtgacgcgggcggtgctgctgacagggtgttgaaccagctgcttactgagatggatggcatgaatgccaagaagacggttttcattatcggcgcgactaacagaccagatatcattgaccctgccttgctgaggccaggacgcctcgatcagcttatctacattcctctgcccgatgagcagtccaggcttcagatcttcaaagcctgcctcaggaagtctcctgtggctaaggacgttgacttgcatgctcttgccaagtacacccagggtttcagtggagcagatatcaccgagatctgccagcgtgcgtgcaagtatgccatcagggagaacatcgagaaggacatcgagcgggagaggcgcaggaaggacaaccctgaggccatggaggaagacgaggtggacgacattgccgagatcatggctgcccacttcgaggagtccatgaagtacgcccgccgcagtgtcagtgatgccgacatccgcaagtaccaggccttcgcccagacactccagcagtcccgtgggtttggcagcgagttccggttctccgaccaaccgacggcagctgccggtgcggccgacccctttgcatccgcagccgacgatgacgacttatacagctaaactgcacttctattgtgacgcatctttcctccctccgtatatatgattatatcatatgttaatgcgtgtgtgggggtgttgctgtacctatacagtgaagttaatatttctgttttgcatgcttgcctgttgcct

SEQ ID NO: 30784 - DNA, 1395 bp, Zea mays
  Clone ID: UC-ZMFLB73078E06_FLI
gcgcactctagcaatggcttctgaggttgtccgccctagcgacgccgagctactaaaggcacaagccgacatatggcggctcagcctctcctacctcacgcccctgtcactgaggtgcgccgtggagcttggcatccctacggcgatctaccgccatggcggggctgcctcagccgctgagctggtcacggcgctgtctctcccctccactaagctgccgttcctccgccgcctgctgcggctcctcgccgcgtcgggcgtgttcaccgtcgacaagcagagctcggaggaggagcggtaccgcatcagccccgtgtcctacctcctggtggacggcatccctcacgaggaccacatgaaccacaccgctctggtgctcacctgcacctcgacgcgctacatcgaggcggggatagggctggcggagtggttcaagagggacgtggtcacgtcaccgttcgaggagctgcacggggcgactctgttccacgagagcatggggagcctcgacgcagatttccacgacatggcgagcgaggccttggacgcccacgacaacttcggcatcgagatagctatgcgggagttcagggacttgttcgaggggatccagtccatgacctactgctgcggtaacttcggtgatgacaagggtgccagggccattgtcaaagccttcccacacataaaatgcactgtgctggcccctcccaagatcattgccaccaaaccggccgatggagcgatgataaactatgtcgaaggtgacatgttcagtttcattccacctgctcaaactgtcgtgctaaagcttgtgctgcaccacctgaccgatgaggagtgcgtcaagctcctggctcaatgccggaaggcgattccttcacggaaggatggcgggaaagttataatcggtgatattatgattgaccactctgggcctatgctggaaactcacctcctgatggacatcggcatgatgaccatgacaaaaggacggcagagagatgaaaaagaatggagcgagctcttcaccaaagcagggttcagcgaatacaagatcctgaaggaatttggagctcgtgttgccttcgaagtctatccgtgagattgcacctggactatacatatatatttacatacatatatgtatgtgtgtgggtgccttgcgtggcttggcgtgatgatgtcataaataaagagggtgggtgtgcttgcggtattcatggatggccatggatctgagcacatgacgttggatgctttcttaaggctctcgtggatcttctatatttggaagaagctgtaaaataatatatcgccatctagtgttggcgttggcttgtatgtactttgtacctgctttgttattttgtgtaatatcgagtaacctaatgt

SEQ ID NO: 30785 - DNA, 973 bp, Zea mays
  Clone ID: UC-ZMFLB73078E10_FLI
ctagcataggaggcaaagaagtacagagggaggaggcgggcagcagatacgcggcgtgacagacacccagggccaggaagggtgctgtttatccatgctgctccggctgaagatcgtcgtcggcgtccactcggtggtgctcccggttcctgttccaggcggctatggccatggcgcctgctacgcggcagtagagccctgctggcgccgcagccggaggccagcgctagcggcggcgggtggcctcgtcgcgaggcggccgaggcagagcgccacggtggtgatggcgctgaaggaggagccggagggcagcagccgccgcggcttcgccggcggcggtccgagctgggaccccgggctggagatccaagtccccttcgagcaaagaccggtgaacgagtactctgctctcaaggatagcgccctctactcgtgggcggagctgagcccagggtccttcttcctccgcctcggcggcctgtgcctcgtgaccttcactgtgctcgcggctccaattgccgccgcaagcttcaatccaggaaaggatccactcaagttcgtgctagcagctgggatcgggacgctgcttctggtgtcactggcggttctcaggatatacctggggtggagctacgttggtgatcgcctgctgtcagcggtggtaccgtacgaagaaaccggatggtacgacggccagatgtgggtgaagccaccagaggtgttggcccgtgacaggctcctgggatcttacaaggtgaagccggtggtcaacctgctgaagcagacgctggtgggcaccggcgcgctgctcgtgggcgccgtgtcgctcttcgcgttcgccgcgccggtcgaggacttcctccacgccctgagccagcctccctcctccgccaccgcctcgtccaagccgagcttgaggaaggaggagctgctgcggctaccagtcgaggtgatgcaggacgacgacctcgct

SEQ ID NO: 30786 - DNA, 458 bp, Zea mays
  Clone ID: UC-ZMFLB73078F06_FLI
gtgaaggagaacttcgacttcaggcccggcatgatcatcatcaacctcgacctcaagaaaggcggcaacgggcgctacctcaagacggcggcctacgggcactttgggagggacgaccccgacttcacctgggaggtggtgaagcccctcaaggcggagaagccgtcttctgcatgaggcgcctcctctgttttggaagaagcttttggtctggtctggtctggtctggtgtgcctgcgctctatcatgcttttttatggctcctacttgtgattcttgatctgccccttgcttatcatttgtactgtactgtcactgtcctaataagtggtacgtgtgcggggtcgtattgtgtctgcttattcacctactagaggattatttctggttttgctgcttatgtaatgcttttaaaaccatgaaagaagctacaggctcctacagctgctttgagaagt

SEQ ID NO: 30787 - DNA, 1988 bp, Zea mays
  Clone ID: UC-ZMFLB73078G12_FLI
ttcgtcgtcaatcgtcatccattcccaacccaaacactctccgtccgtccctcctctcctgttccctccccgagtcgatatctcaccgtcgtgcgagtaaaacaaagcctcgccgccacggcgccacgcgagcaaagacctagcgcgagcaagcaagggaggcagagaccttagtgcgtcgcgcaacgcggctcggcccgacggcatggagagcctcgtcctcgcctcctcctgctccccgtccccacggctgccgctactctccccctccgcccgcttccgccggctgcccggctccatgccacaggcgccggcgtccaccagcggtgccacgcggaaaggtctcaggaggcacatgctcttcgtcgccgccgccaccgcgactccttccggatccaggaacgttttcaaggaattgagagcaaaaggctttgcaagcatgtcatcttcgactgccaatgagaatatgtctactgaaactggcaccctgcctcccatgcctcccccatcatcatacattggttcgcctgttttctggattggagttggtgtagcattgtctgtggcgtttaccacggtttcttccatgctaaagaaatatgccatggaacaagcatttaagtcaatgatgacccaagcaccaccaaactcatttggctccaactcgcctttcccatttggcatgccaccacaggcatctcctactgcaccaagcagtttttcgtacttggaaccaaggaaaggtacctccccacaggtgtcaactgttgatgtctcagctaccgaagtggatgccgctggaacatcgaaagaggtggatgtgactgagacaccaaaaccttctaagaattttgcatttgttgatgtttctcccgaagatttgcagcaaaaggacctccaatcttcactggagatggtagatgtaaaacatgatagtacagaaagtgaaagtaaggaggatactgaggaaaaggctcccagaaatggagcgacttttaagctgaatgaagatgctgctcgtgggccaactgaatccagtcaatcaggacctatgctatctgttgagacaattgagaagatgatggaagatccagctgtgcagaagatggtttatccctacttgcctgaagagatgaggaacccagattcgttcaagtggatgctgcagaatccaatgtaccggcaacaactacaggatatgctaaagaacatgggtggatctcctgatcaatgggataaccgtatgcttgatcacctgaagaactttgaccttagcagtccagaagtgcggcagcagtttgcgcaagttggcatgactcccgaggaagtggtatcgaaaataatggcaaacccagatgtagctgtcgcattccagaacccaaaaatacagacagccatcatggactgctcgcagaaccctcttaacattgtaaagtaccaaaacgacaaggaggtcatggatgttttcatgaagatatcacagatctttccccaaatcaacggctagctggtcttcactgcgggattgcagtcttgattttttttgtcggcctatcatcccctgtgtctggagggcctgctgcggtaaccatctttgaaggaaaagggaacacctgttgctgttgggccgtgacgctctggatacaccctccctgtgtcgagctttttgagtttcatatgtagtagtacatcgtgtgatgtagcggccttggtctagctatgagtatgattgacccaccctcttcccgcttcataaagtcaggctagtgagcgtagcaggggcaaatatttgttatttacattgcatgggcagccagccggtctgcgctctgacgttgcatggtttatctcgtaggatgtgaaaggcgcagcagacagacatggttcgtatcagatcaattttgatatatactaattgctattgttagtgtgtaatacgtcagtgacacaatggcaatgcaagtaatctgtttcgagacttgctgacc

SEQ ID NO: 30788 - DNA, 1368 bp, Zea mays
  Clone ID: UC-ZMFLB73079C10_FLI
aacaggcacttcctattgttgctgctggtgttatccctggaggcaaacttggcccacattgtcatcggcttccactggattgagctgactgctgtagctttaatgtcagctgcctggtgtcaccgctcctattcctggggttggggtgcttccaaacttgtataatttggctgcaggacagccacaagccatgacacaacaggctaccaggcatgctcggcgtgtctatgtgggcggacttcctccaactgctaatgagcagaccgttgccatattcttcaatggagttatggctgctattggaggaaacacagctggtccaggtgatgctgttcttaatgtctacataaaccacgacaagaaatttgcttttgtggagatgagatctgtggaggaagcaagcaatgcaatggtcttagatggcataatgtttgagggagcaccggtcaagattagaagaccaacggactataatccttccctagcagctgctctgggcccgagccagccaaatccaaatctcaatctttctgctgttggcttaacacctggctctgctggaggattagaaggtccagaccggatctttgtaggtggtctacaatattacttcactgaggcccaagtgcgggagttgcttgagtcctttggacctctgcgtggatttgatcttgtaaaggatagagaaactggtaactcgaagggatatgccttctgtgtgtaccaggatcttaatgttaccgacattgcctgtgctgctcttaatggcatcaagatgggagacaagactcttactgttaggcgggcaaaccaaggagcttctcagcctaggccagagcaagaaagcatcctgttgcaagcacagcagcaggtgcaaatgcagaaattcgtataccaagttggaggtgccctgccaacaaaagttgtatgcctgacacaggtagtgacagaagatgaactgagagatgatgaggaatatgatgacattgtggaggacatgagggaggaaggacacaaatatggtaacttggtgaaagttgcaattccacggcctgaccccagcggtgctcctgttgctggtgttggaaaggtgtttttggaatatgcagatgtggagggctcaaccaaagcaaagacagggatgcatgggcggaaattcggcgggaaccaggtggtggcggtgttctaccctgaggacaagtttgcagctgagcagtacgactgaaaagttttagaacccctattctagagttgcagttgtggcacacaatgtggttgttttgaccttttgtagttaagtttggtgattgatccgctgataagtgatataagtttcgtgctcaagtattatatcagctggtaagagtg

SEQ ID NO: 30789 - DNA, 1105 bp, Zea mays
  Clone ID: UC-ZMFLB73079D08_FLI
cgcggagaaccaaccagccttttgacgctgtcgcccgccgatagagcactagacgcgctagcccccggatctcctccgcggcctcgccgcacgcgtggggatggatttcgacggcgccattggcgatcagggtgagttgtgggaatggcaaagtcaggagtattgtatgcagaaagattcgttagctgctccatgtagcagtttgtgggccgaagcaagcaacaatgtgggtggtgattggagcatatttgaggagcaaacaccaattaaacactgtacagacttcgaatttcagttctgtgatgtaggaggtgaagtcttgttctcatggcaaaacgcacacgcatgctgcagttctgtccagaaaatcttgagatgacatgttcagtgactgaagatgggctcttggaaagtcttcaggagatgatttttcaggtactgactgtttactgaactctgacgggactgatgaactgccagaagaatggctagttagttgatcacaagatatcgagcccggttttccggcagaagaaatgtacttgtttcattccattgttcataagagtttggattcctgagttgttgagttcactgtctttgaagatgagatattgctacttatggtgtcgaaaatcttcttagtaggaataaccctgctgctgcaacggaagaaactgccgatgtcttggcttgagctcttcgcctgtcgtagtccacgacaatcctgcatgctctagacctacttctctgaaaggtgcagctggcaaaatttattatcggagcaaagaaggcgagaccatccgtgtccctcccttttgtgctgatcaaaccatacagcatccatggcgacatcaccctgaacgacatcaacgagaagatccacgccccttcgccgcataagatcaggcacaggagcgacgaggagcccgacccgctccaggcctcagcagcgatctcagggaaacctgtggcccacaagacgaagatccacacggagggggggaagggggaaggggagcatcacgatcaccagaaccaaaggctaggctgatgaccatttgtgtgacgctggcgaagtggctaacagttgattcgcctttgc

SEQ ID NO: 30790 - DNA, 377 bp, Zea mays
  Clone ID: UC-ZMFLB73079E01_FLI
ctgaccttgttcagaggtttgatccgtcatcatcagtggataccattggtttcttcatcgcgaaatttgatgttggagagaaagatgaataaacaaacgtgactgaaattccaatgtttggcattcacaacttacgctagggatatcagcattgaattttctgcaatcagatggctcacgtatacccatggagtggaatgcagcgtgccccctgaaattttgtttgccagtgtttgatattttcttttgttcgaagaacattgttcattatggtgaaatgatggggcaaattagattcaagctcctgtagtcccgtttccaagaaaaaagttaccgggtacccgtatccgtccgggtgtaccgggtattttctgggt

SEQ ID NO: 30791 - DNA, 1137 bp, Zea mays
  Clone ID: UC-ZMFLB73079F10_FLI
gctgatgaacgactggctctattattatataaagaagatcgtatcatcacacaatgacacaaacagaatgcagggaacgtaaccaaagaagacgacccataccatacccaaactgccatgcatgagaatagatagacagaaagaacaggaaccaaccaacacaagacacaacaagctgcagcagcggcaggcatggggcaccgcgccactgacaccgggccccaccaccattaccacccgacgcacactttatttagcccacgtcactcgcagcccgcaccggacacgtccacgcgacagtcactgctagctacgtaccgggctacgtacgagacacacacacacacagagagagacgccagtaataaccgtagcgtactgaacagcaaaatcccgtgtcatactgccatgtacgcgcgcgagcgactaccccgccacgcgcgcacgccgatcccctgggccctggccgccgccgctgcgtgcgcacggcctcactcgctggccttctcgggctcctcaggagcagcaacctcctccgcctcggcggccggctcctggggaccagcaggagcaggagcctccggctcgtccgcggcgagctcctcgggagcagcagcctctgcctcggcgaccggctcggccgcggcgggctcctcggcaccagcaggaggagcagcagcagcctcctcctcggcggctgcctcctgctcggccgcgggagtctcctcgggaccagcaggagcagcagcctcagcctcggcggccggatcggccgccgcgggctcctcggcaccagcaggagcagcggcctcgggctcggcggctgcctgctgctcggccgcgggaagctcctcgggatcagcaggagcagcagcctcagcctcggcctcggcctcggcctcggcgggggcagactcctcgggcacgacggccggcggcggggtctccaccacgggcgcttcctcggccgccacgacggtcggggtctggacctcggcagtggccattggtggcgatgagaaggctgatggctacacgaaggagtggcgcggctagctagagcctagagctaagagcctaagactgagtgaagggtggagctgcaagagtgagcgaccagctgagagtgagatcgat

SEQ ID NO: 30792 - DNA, 1282 bp, Zea mays
  Clone ID: UC-ZMFLB73079H02_FLI
gtcgcatttgagactgcatgtatttgcttgtttgaaacctgattcagtttagtgattttgttgaaacacttgtttcctatatgccacccaaaaagccaggaatatgttactaaaaaaccctagggagctgttacttgcctttccatggaagatgtgggttactttcttctcagtgatgtgtgactgacatcctaaattaaagtaacaccagaaatggcctttttgcatccgacactagatataccaaacttcgctcctccctgccaacatttcactgaattgcacattttgctttattcatctacccctgccatcgaacacactcagtttcacctgcctgcctcaatcttcagggcctgtttggttttagttcagacagctttgcatggctctccttgcaatccaaggctttagattttctgttcctggggtggcaggctttgaaccaaacaggccccaagagcattgttgaactgacgttagctagctgaacacacatctgtacttgttcgattgcaatgctgttgcaacttgctacacatgggcaagtttatgtttaaacattgaagtcatttttttgaacgagaacattaagccaatttgaagtacgttggtgttttaagtataagctttctaacttaatcggttataaatatatactttggtgtgagtagctaatatccgaaactttgggtagctggaactttttttagtcgtattgatttatcacaatgacccaaaaaatgggttagtcatgatcttactgaactctttaacctgatgcatatgttataatgctttattgactaaatgagtattggtgattgaagtcccgataacgtacttgccaacatgctatgatggggaaactatatgccaacggttgaaccatgtgcatgaggctgcagtacgcaaagttttttttgcaggttcactgttcatttcatgtagatttagcaggttgtaagttccactgggcttgattcaagattgattcttcttcatgcccgtgagtcttgttaactaggaatgtgcaggaacatgcaaagggtaaaccatatgcaggtattgtttatggatgagaatggattagcctacggagttgcacaacattgttaaccttcgaaatgttgttagcggaatggttactattcgttcattgaatcttctgccaatctgttttatgtaaatgctgtatcggattttgatgagcaaattctattgcagtgcctggaacgattgtggttttggcatagtaagtttcataagatttgattctgag

SEQ ID NO: 30793 - DNA, 2421 bp, Zea mays
  Clone ID: UC-ZMFLB73080A04_FLI
cgagcctcatcaatcgatcacacgcgacgcgagtacgagtacgagtatacggccacgagcagacgagctcctccgccaccagtgtcatcgcgcagcctcgcgctcgtccatggcgtccgtgtacacggcgccgcgcgccccgctcccgacggtggcgtcctcctcgtcatccgcgcggcaggtggatccgaaagtggagctgggagaggtggaagcggcattttgctctcattgaggagagcgagcgtctcgttgatgagctccagttgcaactccaggcgtctgtttatagagaagactacagaagtgctcataagctgaggctagctattgctactatagtgaaaaatgacactgtgggtagagctgtctctgacttaaatatggccatagatgaggaacgctacaaggatgcagcatatatcagagatcatgctggcacaggactgctggggtggtggtctggaatttccggaaatttgtccgatccatatggtcttataattcgtataagtgctgaacatggtcgatatgtggcaagaagttatgatacaagacagctgacttctgacagctctggtctccctatatttgaaatatactttgcagaggcaaatggtggatacaacctgcaggcagtgcatctgaaaccagatgatagtgattctgaccaagtgccaaacatgttaagggagaaacttggcatggacagtataaatatatctagcagttcagtagggtctaaccatgaagaattcgatggaagtgtaaacatggatgataaagatagtgatgatagcaacattgatgctggccctggttcgaaagacttgtcaagcgatccaactgcagttcccaggattaaaatcttgaaagtggtacccatgcagaatgttgacaaagactacataatcaatatttttgatcagatttcagaggaaaatgatgatcctgaagttgaaaatgaatcttcagaagatgctggtgatgaagataacagtggagtagcagaaacagtttctgcagaagagaacggtgatgaatctggtgacgaaagtgatattgaacccttggtttcaattgattttgtcattgagaataacgatgactatgcttctcatccatctgctgaagcttttgaacgaatgccagctagattagaaaaaagagaccgcttctcgttttccttctatactgaagaatatagtaaaaaactagatgctggaaaggcccagcagacttcaaagaaaacagttcgtttgcataccgatcagcaggattatgatggttttgttgagcttgatcgtgtaaagttgagcggcagcaacaaaaaactttcgatactacaacttggcatcaaacgaaataacaaggttcagaaaaaactgcatggagttacccactttagtcgtattcagatgcctatatcttcagatcctcttaccggcttatatttgaccgcatcaggatttgactcagaaattcttagtttacaacgaaaatttggtcaatggcgggaggatggtccatctgaggagcatagtgacctattgttctatgagtatgttgaagctgtaaaattaacaggggacaacctcatgccagctggtcaggttgttttccgtgcaaaagttggtgaacactatcggctccctcataagggaattatccctagagaacttggagtgattgctaggtacaaggggcaaaggaaaattgcagatcctggtttccaaaaccctcaatgggttgacggggagcttttgatactagatggaaagttcatcagagatggtcctgtgatagctttcttttactggacatctaatgttcatcttttcgaattctttagacagttgaagcttcctgactagttcccttctaaaagtagttaaaggccattataatttcagcatagctgcgtttggagccaaccggagttgcctggcatcgagtacagattctgatgtggagaacagggcgcctggcatgaatcagtggcatctccacccaactctgatagcttgccacaagggtggaaaagagatcgcagtcgcaagaggaatatcatcctgccaacatgggtgagccgcgggcgcatcatacttactaattacgtttctcctctgctcgtccaccgccagtttctgtgtttctcatagcaagtagaactaaagcacctcaaagatgtaaagttatgtatgcagtcgcaaatagtttaggattttgagcacatattgataatttttatacatggagagtcagtatgtatgtgaaatagtacgagcaagagttttgtgcagcgtgatcaagctgtggccataatgcttgtacatgtgtcgcaatcagcagcagaggcgtagagccaccacggttacacagattgttagggggtgtttggtttaaggaatcactacattt

SEQ ID NO: 30794 - DNA, 1116 bp, Zea mays
  Clone ID: UC-ZMFLB73080A10_FLI
caactgcctgcgccagcgcccccctcgattgaaatctcgccgccagttcggtcgcagtcgcaccgcagccgtcttctccttcccttccctcctcgctaaaaagccaacgcaaccgcttctcctcctcctcctccgcctcctccctcctcaactcaccccagcacgcctcagcccgcattccgccacccacgcgactgatcgaccgacgacttccccattcccgccccgcaacccgcagggctctgggttcggaggaaccgagggcgggggacctccgaccgggccgggcgacatgttgggcgacctcctctccaggatcctcctgctcctgttcggctacgccatgccggcgttcgagtgcttcaagacggtcgaggcgcgccccaacgacgcccgcatgctgcgcttctggtgccagtactggattatcgtggccatggtgatagctgttgagagcgtgatctcttggatgccaatgtattcagaaatgaagctagctttctttgtgtacctgtggtaccccaaaactaagggaagtgacgttgtatatgacacctttcttcgccccatagttatgcaatatgaaccgaacatcgagcagagattgttccatctaagggcaaaatctgggcagttaatttccttctacatgaagaattttgcggataaaggaacagccttcttcatggatgtcctccgttatgtcgtatctgagaaacctgaaggatccaatgcagagcaaaggagcaagaagtccggctggagccccttcgcgaccaagcgccgaccaccatctccgccgccggagcccctcttcgacagcaacccggacgccgcggtgctagccgaggccctgcgtggcgccatcggtgcaaagccccggcgtgcgcccaacgacaagcattactagagggaattattaagagcgattttagggatgattgtttgtacatagaatgaatgaacgaatcaatcaaaggcagaggggggaaaagagttagtacatagcaaaatccagcaatacattcaccattgtgaagaacggatggatggatttgtacctagtacggttcaagtaaatctgatatgatggaaatggttagtttttattgcgtc

SEQ ID NO: 30795 - DNA, 1294 bp, Zea mays
  Clone ID: UC-ZMFLB73080C03_FLI
gggatggagtggcgccgttagcgaggcaaggttcagtctactcgttgacgttcgacagatcccagagcaccctcggcggggccgccgccagctgtggcggtagccgtggcatccccaagggtttcggctccgtgaacatggacgagctgctccggagcatctggaccgcagaggagacccaggccaaggcctccgcctctatcgcaggagcgagcgcggggatgccccccacgccgatgcagcggcagggatcgtcgctcacactgccccgcatgctcagcaccaagacggtcgacgaggcgtggagaaatctcgtgcgcgacgaaccgccgcagggggcggacggcggcggacaccagccgccccaccgccagtcaacgctcggggagatgactctggaggagttcttggtcagagctggcgcggtcaaggagaaccccgcttctgctcctccagcgccgccacccatggtgccgccgcggccggtacctgttgcccctaaaagctccgccttttttggggatttaccgggtgccgacgacgacgcagctacggcagcggtagggtttgcaccggtcggcatggtggatctggccctgataccgcccagggcggcaggcatgggaggcagcgccatggctgtgcaaacagcggtgagccagcttgattctgtcgggaagggatacagcgacctgtcgtcgctgacggagccgcaaactttttcgtttgaaagaatgattcgggggagaaggcatggaggcggagtggagaaagtggtggagaggcggcggcggaggatgatcaagaacagggagtccgccgcgaggtcccgagcgcgcaaacaggcttatacaatggagttagaagccgaagttcagaaactcagagagcagaatcaggaactggagaggaaacaggcagaaattatggaaatgcagaacaacgaggtatcagaaatgttgaaggatccattcggacggaagaaacggctgtgcttgcgaagaacgttgacggccccctggtgacgattgcctagaacagcacatgacttgcacttgctacgtacctgcaggggcgtttgggatctgtagataatttctctcctatagtgtagcgatgaacccatgaacatgaacataatctaaatgattgtactgttagctcccttctgccgcttacgtagtactggagtaccgtattggtggagtcgaaaactgacatgtaaattatgtacgtagtagagaacaaaatggagtgaagccggtcgcaagagttgtggcttcagtcatcctcc

SEQ ID NO: 30796 - DNA, 957 bp, Zea mays
  Clone ID: UC-ZMFLB73080D01_FLI
aacttctagaagacctacagggtagaagtggttcttatgttgagacagcatctttgtcacaccaacacaccagagctaaacattggaagccaaagttcctttcttccgagaagaaaacaatagctattctaggagacaggagtattgacagtgaggaccccttggagcatgtaattgacggaacatctagcgaggaggaagatgctactcaaaaccacttgagtttggtgaacaaagatgagaaccagcaaactatggctgacctatttcaagaagtttttaatccaacaaacatggatggtgccatgaaatcaatgagatcaacaggagctggtaactatggaagaatgcaacagattatgcagatggagaaagattggcatgtggaattcttgagacagtatagcagagagcacagttattcaggtgatttaaagggaactactgttcagattctgtcaaggtcattggaaggaaagctaacagtctgcagctgcatgttccaggaaaagggcaatgatgccactataagtaatgcctcagcagacggcaccatggatgaaagcagaactaggaggactattatcttcagtccaaagatatgtaacaatgtagatcttctggttggaaacataattcatatcttcccaccatggaaggaagttaaaatacaagaagagcatgtgattatttgcacctacttctcgcaccaccaccggacttgatactcggagatatttctgtgctagctgcaaagcttgaggcagaccgccagcataaccgttgctgacagtttaatgttgatgtactcgcagtgtctattctgtttgttttgtaatcacaagtgtactggctgcaaagctataggcagaccgcaagcataaccgttcctgatagcctaatgctgatgtacttgcagtctctcttctgttttacaatcacaagttcccgaggcct

SEQ ID NO: 30797 - DNA, 1979 bp, Zea mays
  Clone ID: UC-ZMFLB73080D03_FLI
ggctggacttgaacagtaaccagcttaaagggtcaataccggcggaactggcaaaacagtctgggaagatgaacgtcggccttgtccttgggcggccatatgtgtatcttcgaaatgacgagctgagcagcgagtgccatggcaaggggagcttgctagagttcaccagcattcggcctgaagagctcagccggatgccaagcaagaagctgtgcaacttcactcgggtgtacatggggagcacagagtataccttcaataagaatggatccatgatatttctggatttgtcatttaatcaactcgactcggagatcccaaaggagcttgggaacatgtactacctcatgatcatgaatcttgggcacaacttactgtctggcgtcatcccaccagaactagctggtgccaagaagcttgcggtacttgacctgtcacacaaccagttacaagggcctattcccaactccttctcaacgttgtccttgtcggagatcaacctttcaaataatcagctgaatggttcaattccagagctgggttcgctgttcacattcccgaggatttcatatgagaataactctggtctttgtggcttcccactgttgccatgtgggcacaatgctggctcaagttcttcaggtgaccatcgatcccaccggacccaggcttcgctcgcaggtagtgttgctatgggactcttgttctcgctgttctgtatagttggtattgtcatcatagccattgagtgcaagaagcggaagcagatcaatgaagaggcaagtacctcccgtgacatatacattgatagccggtcacattctgggacaatgaattccaattggagactctctggtactaatgctctcagcgtcaacctcgctgcatttgagaagcgactgcagaagctaacttttaatgatcttattgtggcaacgaatggcttccacaatgatagccaaatcgggtctggtggttttggggatgtctataaggcccagctcaaggatggaaaggttgttgcaatcaagaagcttatacatgtgagtggccaaggtgaccgggagtttacagcagaaatggagaccatcgggaggatcaaacaccgcaatcttgttccgctccttggctactgcaagtgtggcgaggagcggctgttggtttatgattacatgaggtttggcagcttggaagacgtgttgcatgaccgaaaaaagatcgggatcaagctaaattgggcagcaaggaaaaagatcgccattggggctgcaaggggattggcatacctccaccacaactgtataccgcacatcatacaccgagacatgaagtcaagcaatgtgcttatcgatgagcagttagaggcaagggtatccgatttcggtatggcaaggatgatgagcgtggtggatacccacctgagcgtgtccactctcgccggcactccaggctacgtgccgccagagtactaccagagcttcagatgcactaccaagggcgatgtgtatagctatggcgttgtattgctcgagctgctcactgggaaaccgcctacagattcaaccgacttcggcgaggacaacaatctcgtaggatgggtcaaacaacactcaaagtcgaagctggcagatctgtttgaccctgtactactggtggaggatccggccttggagctcgagctactagagcacctgaaaatcgcctgtgcgtgcttggatgaccgaccatccaagcgcccgacgatgcttaaagtcatggcgatgttcaaggagatgcaggccagttcggctgtggactcgaagacctcagcatgcacggtcgccgtggatgatgcgtgttttggcgacgtggagatgacgaccctgaaagaagacaaggaggagaaggactagagcaaggcccaccgacacgcgagaagctgcccttggttcctgcccagggccgagcggcagctacacggtcagtcagatctcagatgc

SEQ ID NO: 30798 - DNA, 2004 bp, Zea mays
  Clone ID: UC-ZMFLB73080D07_FLI
gaagagattgtggaagacctgggcccctcctaaatgcaagtttttcctttggttggcaataagaaacaaatgttggacagctgacagattacagttgaggggattgccacacccagatgtttgcccaatgtgtgatcaagcccaagagacaattcagcacctccttactgcgtgcatttttgcccggcaattttggcatacaattcttgctgctattggcttggggcatctcactccgactgctgatgaggagaaaggtgagccttagagttatcaagaccaggaaaaaaaggaaaaaaggaactctctgatcatcctgggggcttggtgcctatggctccagagaaacagagcagtgtttcatggggagtctccttccttgcccaggatttttaggtgtttctcagatgagtgtgcttgctgggttttagcaggagctaaggagatcggtagtatgggcttagttgctgccctgggcgaggtcgggtctagtttcagttctactatgtaattcccttcgggataatgtgggtctttgggagatttgctctgcaacatctcctcttttgtaatgtttcctttcctctttaatatataagatgcgaagttctcctgcgcgttctcaaaaaaaaaagtcccactgtttggcaatttagagactaaataagactaaaatgaagggactaatctttagtccctcaaaccaaacagggctttaatcatgtcccataacattagtcagggaggttcaaatctcctcgattattattgtagtgctctgattcagattcatcatgctgttcttctagtcatattctggataaactcgaaagcttcttatttcagctctcctggttatcgttattgactacaatgtgtttagcttgattctttttgtctgactctgttgtactgtctttgattcttgaaaacagatatggcagtgcaaatgtctggaagatcttcactgatctttttgattattttccgttgacagcattggtggaatcagaaattttctgcctccatggtggtttatctccatccattgagaatcttgataacgttcgcagtttagaccgtgtccaagaggtccctcatgagggacctatgtgcgaccttctgtggtctgatccagacgatagatgtggctggggcatatctccacgtggtgctggatacacttttggccaagacatatcggagcagtttaatcacaccaacaatcttaaactcgtagctcgggctcaccagttggttatggagggatacaactgggcacatgaacaaaaggtggtgaccatattcagcgcacctaactactgttaccggtgcggcaacatggcgtccatcctcgaggtcgatgactgcaggaatcacacatttattcagtttgagccagctcctaggagaggtgaaccagacgtgacgcggaggacacctgattatttcctttgagttatctgccaggccatttttggattttgcccaatgttggaatagtgatgctggccagtaacaatttttgttggatctatatggtaacttaaccgaccagcaacagtaagaaaatgtggaacttaaccgaccagcaacagtaagaaaatgtggaagctgcatttgtcattgcaagaggtgctcgctaacttaaccccaagctgtcaaaagatccgcttgtctacccaacccacccagtggtgcctcccttgggctttgggacgtcgagtttacgctttcagcgtagagttgcctcagttctgtcttgtgtgtcagctagttttgtgtttgtgtcttgtgtggttgctcgttgtagcttctgtggtctcgagtgttgcaagaattggaattctgctagctcctcctctgtttggttgtccatgcccttggtacacgagtgttggccacccttctcatgtagcaccaaccacgttacagtcaagctgttcgcatcttatttttgtcatgttaatactcctgtcaattaaatgaacaatgtttgctccc

SEQ ID NO: 30799 - DNA, 1947 bp, Zea mays
  Clone ID: UC-ZMFLB73080E06_FLI
tgaacttgcacaagatattgcatctggagtgttcatgaatcaaagtcaagttcgtgttatgggggcaaatgctgcacctgatgaccctgaaaagacaatcgtctttattgatcttgtgccactgggaccaaaatttgacaatgcgacagcatttttagtatttgaaaggttttgtaataagcaggtcatcataaaccctatggattttggaaagtatgacgtattgtatgttctttaccaaggtctccctccgtcaccaccagcagcaagcatgaacaatggtcttagcaatgttaatgatccaagtttacatccgcttgctgccgatgtggtaaatcataaggaaagaaaaggcaggggcataattataattattattctatcaagtgcttttgcttttattttatgtgctggagctgcactggtggtttatttcaagcttagaaaccgcagccatttaactgaagcatcacctgtgccaacaaaacctgcaggtcctggttctgcaatgttggggaacaggctagaaagcagacctatttcggcatcaccatccttcagctcaagtttggtggcatataaaggaactgccaaaacgtttaatctggttgagatggagagagccacactaggatttgatgagtccagaattattggggagggtggttttgggcgtgtctatgaaggtattcttgaggatggagagcgggttgctatcaaggttttaaaacgggacgatcagcaaggtacccgggagtttttggctgaggttgagatgcttagccgattgcatcacaggaacttggttaagctgataggtatatgcacagaggggcatagccgatgtttggtatatgagcttgttccaaatggcagtgtggaatctcacttgcatggatcagataagggagccgctcggtttgactgggacgctaggctcaaaatcgcactaggtgcagcacgtggacttgcatatttgcatgaagattcaagcccacgtgtcatacaccgcgatttcaagtccagcaacatcttactggaacatgacttcaccccaaaggtgtcggacttcggcttagcaaggacagctctgggtgagggaaacgagcatatttcaactcgtgttatgggaacttttgggtacgttgcacctgaatatgcaatgactggccatcttctggtaaagagtgatgtttacagctacggcgtagttctccttgagctccttacagggatgaaaccggtggatatgttaaggcctcctgggcaggagaacttggtggcatgggctggttcgcttctgacaagcagggatggtctggaatcgatcgtagatccttcactcgggagcagcattccgttcgacagcatcgcaagagtagcagccattgcttctatgtgtgtccagcctgaggtggaccagcgcccgttcatgggcgaagtagtccaagctctaaagctggtgtgcgacgaaggcagcgagttcaacggatccacgagctttagccaagatctgcgtatccaggatgttgaggctatgagtagagcgagtggggatgtagacttcgttgacccaacgctatctgccgagctgttcacctcatcagcgcgttatgatgctatggatgcctctggttctttccgaagatactcgagttcaggtcctctgagagtagggagagctggactggacaaagagagggggctgtcaacaggcagctcaagtgagcacgttgggctacaaaggtttagaattgattcagaatagtcagcctgcatcctgcaagcagcttatcatgattgggagtgcagaactagacttcttcggaagcttaaactagacttcgcacagattttttgtacagttctagagatgtgtagatgcctttaggaaaaagaggtgtacacaagcgagtttttcagctttaatcccccacggtccgtaat

SEQ ID NO: 30800 - DNA, 1994 bp, Zea mays
  Clone ID: UC-ZMFLB73080E11_FLI
gtctgatcaatttgatgaaatggttcatccaagtgacgttcttggtccatcaattcctggaccaactgttcttctggtggattgccccacacagtatcatatgccagaacttttttcactgcacccccttagctgcttttatgaagattctccagaacaaagtggcaagaaagtaaattgcataatccacttaggtccatcacctgtgactagatctgttgactaccagaactggatgaaaaaatttggtgcaacgcaacatatcatggcaggacatgaaattaaaaacatggaaattcctatcttgaaaggtagtgcaaggatatcatcacacctcaattttgtatgccctcagcttttcccatcctctgggttttggtcggaacaaccttcaaatgatgtcatggaaaatgataagagtgtttcatcggaagcctgtggaagtgtgtctgcgcaaaacctcctaaagtttcatctgcgtccttatgctcaattgggtttggatagaacttctattccaaacttgttcacctacaaggattttgtagaagagcttgtatctgagatcccagcgattagagaagttcctgaacaggtttgcaaattctggcaaaataatgtgaatgataataatatactaacaccaactggcaatcatatgggtgaagaacaatggatcaataaaaaatcagataaggtagatgatggcactctttttcaagaaattgtcttgagaaagcatccaagggacaatcaggaaatcccttgttgtgtggaggatgcaacaagggaagatatggagatcacttttttgggcacaggttcatctcagccttcaaaataccggaacgtaagttccatatatattaacttatttgaacgaggaggtatacttctggattgcggcgaaggaactttaggacaactgaaaaggagatttggtgtaaatgatgctgatgaagctgtaaaaggtttgaggtgtatttggatttcccatattcatgctgatcaccacactgggttggccagaattcttgctctaaggtcgaaattgttaaagggggtgcctcataaacccttgcttgtgattggaccaagaccacttgagagattcctaaatgcatattctacactcgaacatcttgacatgcagttcttagactgcaggcatactttgaagtctagtgttgaggcctttctcagtgaaaatgatactgacccagccacacctcaactggagaccaccatgtttgcccctggaactagaatggagaactacaacaggaagcctgcaagtccaagggataccacagctcttgctaatttcaaagaagtcctacaggaatcaggtttagagattttgtacagcgtccctgtactacactgtccacaagcatttggagttgttttgaaggccatggaaaaagcgaacagcactggaaaggtaattccaggctggaaggttgtatattctggcgacacacgaccctgtccaggtcttatagacgcttccagagatgctacagtgctaatacatgaggcaacattcgaggacagtatgaaggacgaagcgattgcgaggaaccatagtacaaccaaggaagccatagaagtcggcacatcagctggagcgtaccggataattctgacccacttcagccagcgatacccaaaaatcccagttatcgatgaggttgatatggagaagacctgcatcgcctttgacctgatgagcgtaaacctcgcggatctgccggttgtgcccaaggttctaccgcacctgaaggtcctgttcaaggacgagctggtagttgatgaagccgaagaggtccaagaggctgctgtgtactgacatattgcatggataaaaatgatgtaaattaacttggatcgccttgtagcttagcgacattgtttttgacctgaactccagtccaattgaaggtctggatcatctgtctctgtgtctccctttaatggttgcatcgattttt

SEQ ID NO: 30801 - DNA, 586 bp, Zea mays
  Clone ID: UC-ZMFLB73080F09_FLI
ggaaatcttcctttccctaatgcgcttgctggaaccgagttatgatggcggtggagcaggagagaatcctaataacaacataaaaatgccccttggaattgtgcagtatcccgttatccctgtgtcaggtcatcttaggtgagccagctgcccagccagcacaaagatcacaggacaggaggcatctttgaaatgctaagagcgggaggtcgacccacttctgccatgactagcattatcaacccaggacgagcgggaatctcgtggcatgcagtgcatcgtccctgcagtgtgcattcggaaagcctaacagtagaggggaatggagacatggatagttggttcggcgggtgatcattagacgatcgatgttttgactgtataatcttaactgttgctgatgcttttgccttttgttcttctgcatattagtgaattttgttatgttcttctgctgaatggaaattctgagttgaattgtagaccttgttcagttgtttctggtactagctcgaagtcggagctctctttttcttaccgttcctgtgtgattactaatgagaaactagttttactgtttacagtt

SEQ ID NO: 30802 - DNA, 1334 bp, Zea mays
  Clone ID: UC-ZMFLB73080F11_FLI
acgagagccagctctcccagcacacgagcacatggcgtccaccaccctcctcgctgtcttgctgctcgtggctgcgtccgcagcgccggcgcggtcttgctcacctcgcgacctgcaggcgctgttgagcgtgaagcaggcgctagggaacccgtcaacgctgtcgacgtggaccccagcgtcgcccgactgctgctcgtgggaccacctccggtgtaacgacgccggacgcgtgaacaacgtgttcatcgacggcgcggacgacgtgcgcgggcaaatcccgtcggcggtgggcgggctgacggagctcatgtcgctgaccctgttccggctggcggggctgacgggccccatcccggcctgcctggccgcgctgtccaacctgcagttcctgaccgtctcccacaccaacgtgtccggcgccatcccggagtccctggcgcggctgcgcggcctcgactcggtggacctctccagcaaccagctgacgggcggcatcccggcgtcgttcgccgacctgcccagcctccggtcgctggacctcgggcacaaccagctgacgggcagcatcccggcggggctggtgcaggggcagttccggtcgctggtcctgtcgtacaaccagctgacgggcccgatcccgcgcgacgacgcgcgcgacgagatcaacaccgtggacctctcccacaacaagctgacgggcgacccctcccacctgttcgccgccggccggcccatcggcaaggtggacctgtcgtggaactacctcgacttcgacctgagccagctggtgttcccgccggagatgacgtacctggacctgtcccacaacctcatccggggcaccgtgccgctgtcgctggagcggctgtccacgctgcagaagctggacctgagctacaaccgcctgtgcggcccgctccccaagggacacggcgtcatcaagcacgggtgcaagccgtacgcgcacaaccagtgccgcaaagggaccccgctcgcgggctgccaggacctggagtggagtgagtgagccggccggtatggttttctatactctgctctgctctccctcgccggcgtgcttcccgatcgtggtgtgtgtaaggaactaaggacgacggtgcctggtttaggcgtttagctatagacgaaagcacgtacggccgcgtgcctggtctagctacgcggccggttgatcttgagcagttaagcgtgtacgaaacgacagcgctgtgtacgtgtactgtctgctgaagtgtgagatgtactgtctgtgtgtatttggtatggatccgatcggcctgatgtatgaaaaggatgtttacgtactatat

SEQ ID NO: 30803 - DNA, 1254 bp, Zea mays
  Clone ID: UC-ZMFLB73080G10_FLI
gagtttgtcgtgggcccgatctcgttctctgggccttactgtaaaccgaacatcctgttccagctagatggaactattttggcccaaaccagcgcaagagcatggggctctgctggtctgttgcagtggctggagttcacgaagctaaccggaatcgcggtccaaggcagcggtgtgataaacggcaggggccaggactggtggacgtatgcagacccaaacgatgccgacgacgagtctgtggagatgctgctgccacggactaagcccacggcgctgaggttctatggcagctccaatgtcacggtagctgggatcacgatcgtgaacagctcccagtgccacctcaagttcgacagctgcgagggcgtcatggtccacgacctgagcgtctcgtcccccgaggacagtcccaacaccgacgggatacacctgcagaactccaggggagtcgacatccaccacgcgacactggcctgcggcgatgactgcatctccatacagacggggtgcagcgacgtgaacatacacagcgtgaactgtgggccagggcacgggatcagcatcggtggtctagggaggttcaacacgaaggcgtgcgtgtccaacgtcaccgtacgagatgtcaagatgttcaggacaacgacgggtgtcagaatcaagacatggcagggcgggtcggggctggtgcagggcgtgaggttctcgaacatccaggtcacggaggtgcagacgcccatcatgatagaccagttctactgcgacagggcgacgtgcaggaaccagacgtcggcggtggccgtctcgggcgtccagtacgaggacgtcaggggcaccttcaccgtcaggcccgcgcacctggcgtgcagcgacagctcgccctgctcggggatcaccctcgccgggatacagctccagcccctgccgctgccgcagcaccgccgcctgtcgtacgaccccttctgctggcaggcgttcggggagctgtacacccccaccgtgccccccataccttgcttgcagatcggcaggccggcagcagggaacagcgtgctgtccgacggcgacctttgctgaaacgccgatcggttcatcagttaagctaaggcggtcgtcgtgatgcttccgacccctgctttgcacgatgtggattgtggagtgtcagttgatgatgcatcatgcatgcatgcgtacgtgggatacttgaggccgatttattatattgatgcgagccgatcaccactattgctatgt

SEQ ID NO: 30804 - DNA, 1727 bp, Zea mays
  Clone ID: UC-ZMFLB73080H01_FLI
gggcgctgcaccaccacttcctctactcgcgctaccactcgcaccaccactcctccatcgtcaccgagcccatcacatccgtgatccatcccttcgctgagcacatggtctactacgtcctgttcgccatccccatgctttcgactctctacatggggaacgcctccgtcctgggcatcgtgctctacatcgcctacatcgacttcatgaacaacatggggcactgcaacttcgagctggtgcccaggtggatgttccagctcttccctcccctcaagtacctcatgtacacgccgtcgttccattctctgcaccacacgcagttccgcacgaactactcgctgttcatgccgctctacgactacgtatacagcaccatggacaagtcgtctgaccagctgtacgagacctcgctcaggggagcggaggagacgcctggcctcgtccacctcacgcacatgaccgacctgcagtcggtctaccacctgcggatcggcttcgcctccgtggcgtccagaccgtctgccaccggcgccatgtggtggtacatgtgggtgctgtggcccgtggcgtggctgtccatggcgctcgcgtgggcctacgggtcctccgcgttcgtcgtcgagaggatcaaactcgggaagctgaggatgcaaacgtgggcagtgccaagatacaacttccagtacggcctgagctgggagagagaatcgatcaacggcctaatcgaaagggcgatactagatgctgatgcgagaggtgtcaaggtgctcagcctaggactgttgaaccaggcgaaacagctgaacggcggcggcgagctgttcaggcacaggtatcccaagctcagagttcgcctcgtcgacggaagtggcctagcgactgctgtggtgctcaggagcattcctcgtgacgcgaagcaggttctcctccacgcaggcccttctaaggtagcgtgcgccacggctgctgcgttgtgcgagaggggcgtccaggtcgtcatgaacccaaacaaggaatatgatatgctcaagtcacagattgcagatagcaaagcaagctatttggaacgacgctccgacaaccaccacacgcctcaggtttggctagtagacagcatcgacgacgaggaacagaagatggcaccgaaaggagccgtattcgtcccaatctcacagttccccatcaagaaaatccgcaaggattgcacctacctgagcactccagcaatgaagatccctgaaaccatgcaaaatatccatgcctgcgagaactggctgccaagacgggtgatgagcgcctggcgcatcggcgggatacttcacgccctggaagggtggaccgtgcacgagtgtggggacgccatggtgcatgctgacaaagcatggtcagctgctattaggcacggattcgttcctttgacgaaagcctgaaagcctgcgaagcccggggttctgtggctggggcctgcgatagatatatgtacgcagatctggacgccattcgacgatggctggaaaactacgtttcagcaatcggtagcacaaattctcccccgctagagaaggcgacttatatggtcggcgtgatgaatgacgaccttgattccaacagcatatagtaactacagttatgttgtggcattgtatgatgcaagtgcgagaaactgctttgtggctgtctgggtgacatatacaattataataaaatgtcgatttggcttgtcc

SEQ ID NO: 30805 - DNA, 2114 bp, Zea mays
  Clone ID: UC-ZMFLB73080H09_FLI
atcggtttggccaaagagaatgaagaattgaggctgcagcttaaggttttgattgaggataacaagagattggttgagctctatgaacacactgttgtcaatgttgaggcaaatcaagatggaaaccctgtagatgatctgttgaatgcccaaccagcagccacatcagatttccatgcacataactcatctagtgtggcacaggagtctaagatagtagacgaaaaatgcaccaatgaggacaatttctcaagagttacatctgttgaattgcgtcttcagctggaggagatgcatgaggaaaatgatagacttatggggttgtatgagaaagctatgcaggaaagagatgaattcaaacggaaaattttagagcaaagcgactctgaagctgtaaaacatattcagttggacgagaaagatgtcgaaatgagtgaagcagctgagaatcctgaagtgaaacatattcatgactccacaattgcagctttgaaagaagtgctgcagattgttcggagtaagttggagcttgtccaagataaggttgtgtctgctcaggatgcagtaaaatattttaaggcactcgaaatagctagtggtaaggccgaagaactttctgcaagaattgagcttcagcgtctaggtgcgcagcgtggtcaggaagaaatcactttcctgaagtctgtgctatcagaatcacagaagaagaaaaatgcttttgaaggcaagtatttcttgcctgcagcatcatgttggaacttggttttgaagaccaaaagtcttgcggagtccaagtttgatgccagctttggatcaatgaatcagaagaaagaacagttgaatcatctccaaactcgcaaaattgaactatctgctgcaagaacgagagcacgtgaatctgaaactgagttgaaaagcaaaattgatggccttaaagcgaaacttcgcgctcatgaagctcaaagaaaggaggaagaaaaggtcctgtttgctattgataacctggatacttccactacactaatgcataaacccaagaactatggcaaggcaaccgacctgctgaaatctgaggaggatcggatgaagcttctgtgtgaactacagaaggcccgcgaacagcgctccatggtacataaggaaataagaagcatgaatgagtgtgattatattgatcgtgagattggagtccttgaagcagaaatagaggattcctgcatctccatactggaaactgacattgagaagtttgtccgtgacaacactttagcagagatttgggagggtagcgcaaaggatctggaggcattgctggtcgattaccaagactgtgttttccaagtcaacttgaaggaggaagagatcaaggtgtgcagtgagtccttgcagtatcaagccagggacatggataaacttcagtcgaagctgaaccaagcgatccgggagctgggtgagcttctgcaagatagaagaagcctaaccgcttgcagtctggatgaacccacgctgcccgttggtgaaaaggtggcagcagaccttgaggccgtccggattcatgtcgatgaagctaagcagcttttgattctcgacaaccaagctaattcatgaacctgcgcagctagtttcaggtcccttataaagatgcgacgagtgacaggctagtctgtcttggcttctgctgttcagatccttagtacgtagtagcaagacatcagagatgggaagctgcggaatttgcttcattagttggaagctatctgaagccgaatctgctgattcttttttccgtggatcagctaccttcttctggtggtcttgcttcgagtcaaaacaacaggtcctgcaagccactgttccggatccgatttctcctctggtgtacacttcaagatggagcggagaaactgatccgacttaggcttgaccttttgcttctgtaactctccagagactggtagcaactagcaaccagtgggtggacttgtatcacaacttaatctgagccaggtgtcttattttatttatgctataagtgcacaaatgctgcactccagtttcttgtagaaattttcgggctgatcttgaattttacctgctgaagagtttccgtgttc

SEQ ID NO: 30806 - DNA, 1084 bp, Zea mays
  Clone ID: UC-ZMFLB73080H11_FLI
cccgagctcagcttagctccactccagctccaatcacagtcgtgaccagagcgcgagagctagctagagggccgtgaaaatgccgatcaataggatcgccctggggagccaccaggaggtgtaccacccgggcgtcctcaaggcggcgttcgctgagttcatctccaccctcatcttcgtcttcgccggccagggctccggcatggccttcagcaagctgaccggcggcggcccgacgaccccggcgggcctgatcgcggcggcggtggcgcacgcgttcgcgctgttcgtggcggtgtcggtgggcgcgaacatctccggcgggcacgtgaacccggccgtgaccttcggcgccttcgtgggcggcaacatcaccctgttccgagggctcctgtactgggtggcgcagctgctggggtccaccgtggcgtgcttcctgctccgcttctcgacgggcgggcaggccacgggcaccttcgggctgacgggcgtgtcggtgtgggaggcgctggtgctggagatcgtgatgaccttcgggctggtgtacacggtgtacgcgacggcggtggacccgaagaagggcagcctgggcaccatcgcccccattgccatcggcttcatcgtgggggccaacatcctggtgggcggcgccttcgacggcgcgtccatgaaccccgccgtgtccttcggccccgccctcgtcagctgggagtggggctaccagtgggtgtactgggtcggccccctcatcggcggcggcctcgccggcgtcatctacgagctgctcttcatctcccacacccacgagcagctcccctccaccgactactaaaagccgaagccgaccgacccaggggtgcgcagcgcagcgcagctagcatccagcgctctctccccgctcgccgccgtttagtttctctcgtgcacgtgcatgcatcgtagactgtctcaggccgccgctgcgccggcgccgctcgcatcgtttgcttccttggaccagcagtcgtcgccgtcaggctgaactgcttgtaaccgtgaattccggacccgtttgcttctgtaagatttgtgcatttgcctgagt

SEQ ID NO: 30807 - DNA, 1079 bp, Zea mays
  Clone ID: UC-ZMFLB73082C06_FLI
actatccgcagatctcatcagggtcataatagacacggctggtgccaccacatccattggtgaggacatcaaatttccaccgacttcgtccctgcgttctgtttgcctcaaggatctatatagcgctctatgctttgtgccgcttgtggcatcctcaccagaactccgctcgctcaagatactgcggtgctccggcgcctgggacctgccattggaggtcatcactgcacgtgctcctggacttgttgagcttcacctcgagaaactacaggtcggcgaccgtgggcttgctgcgctttctgcctgtgccaatctggaggtcctgttccttgtcaagacccctgagtgcactgattcgggcatcatcagtgttgccgagaagtgccacagactacgcaagctgcatgttgatgggtggcgcacaaaccggattggggattttggactcatggctgtggcacgaggatgtccaaatctgcaggagctcgttttgataggggtcaaccccaccgtgctgagcctccggatgcttggcgagcactgtcggacactggaacgacttgcactttgtgggtgtgaaactgtgggggatgctgagatcatttgcttggctgagcgctgggctgcgctcaagaagctctgcatcaaggggtgcccagtatcagatcgtgggatggaagcactgaatggtggttgtcctagtttagtcaaggtgaagctgaagagatgccgtggagtgtcatacgagtgcattgagaacctgaaggttactagggggggatcattttccatcagcttggatattgtgttggagcatgatgctaggagtgctagtgaaaatggtgcccaggagaacggacaagcacaaattactgcgctgactgatcaaatggcaggcatggaccttccagtcaatgctgctggcgcacaatcatcgactcatacaattaccaggatgaggagcgtcgtgtcagcactccggcgtaggtttggcaatcctccgccaccgtgatttgtgattgaaattaatgaactgtttttacagctttctattttctaatgaaacattcatgttgcct

SEQ ID NO: 30808 - DNA, 729 bp, Zea mays
  Clone ID: UC-ZMFLB73082F03_FLI
caccagcagggtgtcccggccctctctagtttgtaccccccaacattggcctgatgctgctgccatgtagcccatatatgcagcgctcccccctcggcttcaccggcggcggcaacgacggtgaaaactacatcgggtgctagctccgacggtggtgcgtgccctgttgacgatagggcgcgcggggcgcgggcagcttgtaggcgttcgatcggccatgtagggcaactatacatctttggcaggtctccatcatcctccgtgggagagaagatgcatggtaatggagtgcgtgtgtatgtatgtgtatgcccatggcgcgcgcgcgcggctctgggcgagtcacagtagagatgcaatatcatgtatccagtatctttcttacaacacaaacagtgagaaattattagtaaagtgtgcattgtggtgcagccactgttccatgtccgtagcgacaggtcacggcccgttgcctttcggagcttcccggtcccggcatgcgctccaaccgtaagggcaaggcgtcaggagcgacaggtgcaaggcggcggatcggaagaactcggcagtcggcactgggtgcggccgtggagggaaggggatggtcgccgattttatgccaatttactcgcgccccacgccgcgagtctttgatcgatgtgtttgtacagtcgaaagagcattgctttacataggaccatcaatatatatatatggatacatacgcat

SEQ ID NO: 30809 - DNA, 1280 bp, Zea mays
  Clone ID: UC-ZMFLB73082F04_FLI
ttccggccatcctacctcctaccctctccacctctcctcccacccctcccctccccttccgtgtcctcccctcgcctggggatcgattcaggctacgcgtggggttgcgtccattgatgcgagggaggcaatggcggtgtcctcgccttcttctgctccggagaagaagaggaagtggctgctcagcaacaggaaggtgaccgacaagtacctgcgtgaggcgaggaagattcttgcggcggcgccagagtgtggcggcggtgacgcggtggcggcgctcggcctggtcgacgcggcgctggagctgtcgccgcggatggaggccgccctggagctgcgggcgcgcgcgctcctcgcgctgcgtcgctacagggaggtcgcggagatgctccgcgattacatccccagctgcggcaagtcgtgctctggcgaggacacctcctcgtcctcgtcggcgtccctcttgtccactggctccggtgatctcggcacgatctcccgcgccaagctcctctcgcccgaccgccaccgctccgacgacgcggaacctgacgcccgccccgtccgctccttccgctgcttcgacatctccgagctcaagcgccgcgtccttgccggcctctccaagaacccgaacaccgatacccagtggaggtacttggtcctcggccaagcttgcttccacctcggcctcatcgaggacgctatggtgctgctgcagaccggccgccgcctcgcttcggcggcgttccgccgcgagagcgtgtgctggtcggacgacagcttctcgtcgtcgtcgtcgtcctccgcgaccgccgcggctccctgcgtcccgtccggcaagacatccagctccggttgggcgttcataatcccggcgacggagtcggaggctgtgtcccagctcctggcgcacgtgaagctcctgctccggcgccgcgcggctgccatggccgcgctggacgctggcctcccggccgaggccgtgcgccatttctccaagatcctcgaggcgcgccgtggcgtgctgccgcacccgttcgccgccgcgtgcctcgtgggccgcgccgccgcgttccaggccagcgggcgtccggccgacgccatcgcggactgcaaccgcgcgctcgctctggaccctgcctacatcccggcgctccgcgcccgcgccgacctcctgcagtccgtgggcgcgctcgcggactgcctgcgtgacctggaccacctcaagctcctgtacgacgccgcgctacgcgacggcaagctcccggggccccggt

SEQ ID NO: 30810 - DNA, 1962 bp, Zea mays
  Clone ID: UC-ZMFLB73083A11_FLI
ctgcggatcgatcgtgcgtcgtctcctgcgccggcctctcttcaagtcagccaagggtcgttttcctcgcttcactgagtctctcacaaacactaatcgaaatttgatttattaacacacatggcgtcattttcaagttcccaagcagcccacagattctattgattgtgggtgtctttcagcatctgagggtttctaccagtccaggttacacacaagcttcaaattatcgcaaaattcctcttacatatctacatctcataccggaccaggtctcataccggaccagaaaaatggaatacactttattacctgatttagcaccgcataagatacatgcaaagattcaagtacatgtatctagaaagtggcttttccgaggtgctactgatagtggaccactacaacatgttgatatggttttgtctgatcgagagggtaatgctatttatgctgaaatccctggaaatttagctgaacaaaaagcaacaaatattgaagaaggaggagtttatgatatcaacagattcagagtgtgcgcagcaaaaactgttttcaaaatagtggatggggacaaaatgatccaattcacatttcataccatagtaaaatgtgccacaagccctccaacaacatttccattatatgtttatcggctaacatcatttgatctaattgagcctcatgttcaaactacaaataactttgttgatgttcttggtgtcataactgaaattcatgaactgacacctgtgcatgtccgaagtcaactaacaccaacagtgacaaggaccattatcatagaagatctcaggtgtctacctaagtggtggtcctgcctgtagatggtacttcaatccaacaattccagaggcagaaccttatcttaccagccagtctacaaaaagaattgtgttacagcttccccaaaatttacaacatcctccagcgatggaaacgaagccaattgtcgaacataaatccctctatgaacttcttacagttaacccatatgatttcccggaaacaggatttgaatgtactatcacaatagcagaaataccagctgaacacaaatggtggtttccatcttgcacaaaatgcaataaagcaacaatccctcacactacaggttatcactgtgaatcatgcaattgggatggatacaaatttaaatacaagctcaaattcctggcatctgatgaaacagatattgcagaaatgttttgttttgacactgtagcaaggcacatcgttgttgcccaaacgtgttccgcattaattctattgttgctgcacatgggagacaacgttctttaccaatgcaaataggaatttctgatcaacaaggaccatcaacacctcaaaacaaatcaaaaccgatgttattggaagactctccatctacaactttggaaaaattatctactacaactcctacaactgtagtaaggaagcttctatattccgaaactgacaacacgccgaaaacgcactcaatttcttttactcaattatcttttattcattttaagatttagtgagtattgacagttaaaaatacttatatttgttccatgttgacagtgcaaacaagagtaatatcaatagcccagaaaaagatgatggcgataaggaaaccgcacagcttgatacaatacccactaacaaaggaaaaggaccagcagatacaattgaatcgccacctaaaaggttcaaacaagggacgatacgcatcggaaaagaaatggacatcaaatcctccgagaactaaagtttcactcagatcttcgtcgaccttttgagttgcacaatgtctattttgcaacatatgtataattatatatgatgacctactcagctctttgaaaacaatttatgtaaatataacagcctaattctacgtagtggacaaaaatgttgactctgattacagctaaggtaactctatttcatataaac

SEQ ID NO: 30811 - DNA, 612 bp, Zea mays
  Clone ID: UC-ZMFLB73083B06_FLI
gaacgaccgcatgatgcatttctggcaaggggagtttcgcggacggacgctgtggcatccgtcgggtgcagcgcgatcgcatcaaagaaactttacatgataccagctgcggactctgactggagaatgccggcttctttttttatccatatcgtccatcagggtccagtgctaacttctgactgctgtaaagagcgaatgcgtcgtcacacccagcgtagccaattcatcagggatctggaggaggccagaaaggacgaagcggcggcggtgccgtgtcctacggtcctacctgtcagttgccgcggtgtcctcctgtcctgatccacgtcgccgccactgacagactcctctctcaccgtggcacgaattgatgagccacgaattgaggattgatcaaggtcttggcatcaacaaagctgccagcggtttttcagcttcattttagtttgtttatatagatctgtgccttgatcgaggtaggacgattcctagttatgagtttcaatttcttgtacgccaaggactggatctggaactgcggtcggtcggttgtaacgttgctttattatggcttcaaagaggctaggaaaggagactttgaggcgctag

SEQ ID NO: 30812 - DNA, 1160 bp, Zea mays
  Clone ID: UC-ZMFLB73083D02_FLI
ggggctggaggaagaggacggcgaggaggcggctccggcttctccgtgggcggaggctgacgcgcaagccggtggcgcggaggcacagaccgaggtgctcggcgccggcgagcctgatctcgagagcaagatcgtggccatcagggacttcttggaggaccctaatcagcccgagaacgagctggtgagcttgctgcagaacctggcagacatggatgttacctacaacgcactccaggagactgacatcgggcggcaggttaatggtctgcgcaagcatccttcggccgaggtcaggcggctggtgaagcagctcatcaggaagtggaaggagatagtggacgactgggtgcgcctggacaattccggcggtgacggcagtgcctctgttatgactgatggtgactccccacataaaatccaaggcagaagccaccaaagccctcgggtttcggggtttcagtattctccaagcccacagaggtttaatggttcaacttcagagatggctaacaatgggtttgagtcaacaatggatgcgaagcgtagggccagccctgtaccagcacatcataactccaggcagatgaacaacaatcatcattctactactattaccaccagcacgtcatctgctccagctttctcggtgcagaaagtgacaagggagcaaaagcagagtcttgtggaccttgacaggcttgattctgccaggaagaggctccaggagaattaccaagaagcacaaaatgccaaaaagcagaggacaatccaagtgatggacatcaatgacataccaaagccgaagagcagaaacgctttcatccgcaagagcggcagcggtgggctcccggcgaggcaccgatagcctaacctccttcgtcggctggatatctgcgacacttgcgaagttgtgccctagaaccgcaacgggaaagaaaaagaagcaaacggtttcttgttctttttttccctgtaccttgactgcctaggtttacctccagtgtaatattgtcaggtacataagggtgaaatgatatgatgtttctcgaggaaaaagaaagaaattagtcactgtttttgctatggtttggttgctgttattgctgttggtcagtgctggatataatatgcataaaatgtatcaagcctgcacacat

SEQ ID NO: 30813 - DNA, 1568 bp, Zea mays
  Clone ID: UC-ZMFLB73083D04_FLI
gatcttgtctggtcctgtcttggctccccgccaggaatagcgcaccgagatcccttgcgcgcacggaccagcagatcgcgcgcgggagtgagagggcgacagggcgtggccgcgaggtgggcatgggatcggagggacgggtctggaatggcgcgggcgtggccgccggcagcggctatggcggcagcgtcgaggcgaaagcgaccaccgcggcgcccgcggacgttcccacgtcggcggcctccgtcgacatctcgctgccgctcccggagatgtcgcctcacatcataggtctctgcaaggagttggtcaaagggtggtcgtcgattgacagctcgcgcttctccatcgagaccgtgtctgggggcatcaccaatctattgctcaaggtttctgtcaaaggaaacaatggcaatgattcttctgttactgttcggttgtatggaccaaatacagacttggtgattgatcggaaaagggaattgcaggcgataccgtatctctcagctgcagggttcggggctcggctgcttggaatgtttgaaaatggagtagttcagtcattcatctatgctcgaacactgtcacctgcagacatgaaagaacctaaaatagcagctgaaattgccaaggagctacgcaaatttcatcaagtagatataccagggtctaaagaaccacaattgtggaatgatatattcaagtttttgaagaaagctgcagcattgaagtttgaggataacgagcagcaaaagagatatgtaaagatctcatttacagaaatacaagatgaagttaaagaacttaaggatctcttggacattctgcatgcacctgtggtttatgcacacaatgacttgctttcaggaaatctgatgctcaatgatttggaagggaagctatattttattgattttgagtatgggtcatacagctaccgtgggtatgacattgcaaatcatttcaatgagtatgcaggatttgactgtgactttaatttgtacccagataaagatgcccagtatcacttcttcaggaattatctgcatcctgatagacctagtgaggtgcaggcacaagatatggaagtgctttatgtggaaacaaacactttcagactagcatcgcacatttactgggcattatgggctcttattcaggcaaaggtatccccaattgactttgactatcttggatacttcttcttacggtatggtgagtacaagaaacaaagggactcctgcttcgccttggcacaaagtttcctctccgggctaagaaatggctagagcctgagaatctggtcaagggtttgcactgttgtacgcatactcggggcgggtacgcgttgtgatcatcgtctgctactcagaaactctattatagtggtggtagcagcctcattttgttgtatctgatggtagtttcgtcatcgcctgataggaaagtctcatgatcgccctcgggaacgcagggtggcgagatctgtacttatatttgtaataaacacaatccggatgggttctgtcctgtgcaatttgttgtgcgcataagcattccgtgttttt

SEQ ID NO: 30814 - DNA, 1173 bp, Zea mays
  Clone ID: UC-ZMFLB73083D08_FLI
ggtctacaaagcagtgatgcaggatggaagcaaacttgcagtaaagcggggcaaccagaagtcccaccaagggctgagggagttccgtacagagattgaattgctgtcagggctgcgacaccgtcatctcgtgtcgctcattggttactgtgatgaacacaacgagatgatcttggtgtatgaatacatggagaaaggaactctgaagagccatctttatggcggtgatatgccgcctctcagctggaagaaaagactggaaatctgcgtaggagcagcaagagggctccactaccttcacaccggttttgcccagtcaatcatacaccgtgacgtcaagtcagcaaacatactactcgatgaaaatctcttggccaaggtttctgattttggcctctcaaaggttgggcctgaattcgaccagacgcatgtgagcacagcagtgaaagggagcttcgggtaccttgatcctgagtacttccggagacagaagctgactgacaaatcagatgtgtactcttttggtgtggtgctgcttgaggtgatttgtgcgaggccggttatcgacccgactcttccaagggacatgatcaacctcgcggagtgggctatcaagtggcaaaagagaggagagcttgatcagattgtcgaccagcgcattgctgggacagtcaggcctgaagcactgaggaagtttggagagacggtggagaaatgccttgcagagtatggtgtcgagcgtcctactatgggggatgtgctgtggaacctggagtttgtgctgcagctgcaggaggcaggtccagacatgtccaacatcaacagtatgaatcagatctctgaactcccttcaaatccaaagagagttagctccctggatatcagcagtacagatcaaagccgcgtgcccatcgactactccgacatgtcaacgagtaacgccttctcgcagctaatcaatgcagaaggaaggtgaactggatagaattgttccagtcactgaaaaaaatgtttgttacaaaaactagagatgcctcttgtgtgactacccagcctatcccttctcacatatacaacaccaagttgtgaatcttattgaaattttgtttgccacttgtaactacttatgttctagaaaagggtgagtagctttattgcaatcgtcttttgctc

SEQ ID NO: 30815 - DNA, 814 bp, Zea mays
  Clone ID: UC-ZMFLB73083G10_FLI
cttccagcgaaatggcaagagcggcggctcctccgcctctgcaccggctgcccggtctggccttgctgtgccttgccgtggcagtttgcttctccggcggcgaaaacgccgcggcggcggcctggacgaggaagatagtcggcgttcacgagctcagggtgggggatttctccgtcaaggtcaccaactggggggcgactctcatgtccgtcatcctccccgactccaaagggaacttgggcgacgttgtgctcggctacgacaccgtcgctgaatacgtcaacggcaccgcctacttcggcggtctgatcggccgcgtggccaacagggtcgccggcgcgcggttcacgctggacgggaaagcctaccgcctctaccgcaacgacggcaacaactcgctccacggtggccaccgggggttcagcaaggtcgtatggacggtgaaggagcacgtcggcggcggtgactccccgtacatcacgctctactaccatagcttcgacggggagcaagggttccccggcgacctggacgtgtacgtgacgtaccgtctgtcgcgcccgtacgtgctgagcgtgcgcatgaacgccacggcgcggagcagggccaccccggtgaacctcgcgcaccacgcgtactggaacctcggcggccacggcagcgggcccgtcctcggcgaaacggtgcagctcttcgcgtcgcggtacacgccggtggacgccgcgctcgtgccgacgggcgcgctggcgcccgtggccggcacgccctacgacttccgcgcgccggcgcccgtgggggcgcgcctggcggacct

SEQ ID NO: 30816 - DNA, 1402 bp, Zea mays
  Clone ID: UC-ZMFLB73083H03_FLI
ggaggaggccggcgacggcgacagcatccagagcctcgcgcttggggcgcttgacaacagcttcttagtcggcggcgccgggatacaggtggtcaagaacttccgccacggcttgcacgggaagggcgcgtcggtgaagatctcgggaggccgtggcggcagtgggagcgcttattcgacgccgaagaaggcactgctgatgcgcggcgagactaacatgctactgatgagcccaggagaggctctgcattccaatggtgttcaccatgttgacgttgagactgggaaggttgtcgcagaatggcggtttgagaaggatggagctgatatcacaatgcgagacattgccaatgacagcaagggagcgcagttggaaccctccgggtcgacattcttgggcctggatgacaacaggttgtgtagatgggatatgcgcgacgccagaggccgggtgcagacaatcggtagctcatcagactcaccagtgctgaactggtcacagggtcatcagttctcgcggggcaccaatttccagtgctttgcaagtactggggatggttcaatcgttgttggttctgtggatggcaagatcagactctattctaagagctcgatgcgtatggcgaagacagcattcccaggccttgggtccccgattacacatgtagatgttacttatgatgggaaatggattctgggaacaactgacacatacttgatcttgatatgcactatcttcaaggacaaagatgggaaagaaaagactgggtttagtggccgaatggggaataggattgctgcaccaaggcttctgaagctcactccacttgattcagttttagccgggaccgacaacaaattccacggcgggcaattctcatgggtaacggagaacggaaagcaggaaaagcaccttgtcgctacagtcggcaaattcagcgtcatttggaattttcagcaagtcaaggacagcaaccatgagtgctaccgtgatcagcagggcctcaagagctgctactgctacaaagttgtcctcaaggatgaatcaatcgtcgacagccgcttcatgcacgagaagtttgcgacgagtgactctcctgaagctccgctcgttgtcgctacgccaatgaaagtcagctccttcagtatagcaaatcgacgctgactccgaagctcttttccccagttgtgcagaaataatctgagaagttgcaggtttttgttcagtttgttcctttttcctcttttagacggtttggttagttctgttggtacagaactgatcgaggttcctcccgagaagaactggtttttgtgtcgtgtgcatgtctggtcatttgtagcgggctagcggctcggtaaaatggtgtgtatgtctgttggataaaatgtaccatgtgac

SEQ ID NO: 30817 - DNA, 886 bp, Zea mays
  Clone ID: UC-ZMFLB73083H12_FLI
cgaccgcaagtacgcgacggggcagcgcactaaccgcgccacgcactccggctactggaaggccaccggcaaggaccgcgccgtcgtcgccggcggcgaggtggcggtggggatgcgcaagacgctggtcttctaccggggccgcgcgcccagggggaagaagacggagtgggtcatgcacgagttccgcctccacccccatgccgcgccgtgcctgctagcagcagctgcgccaaacaaggaggactgggtgctatgcagggtgttctacaagagcagaacaaccagcccaaggccagaatctgaagacgcccgggacggcaccccatcagctgaaccgcaactgccggctgccctgccgcttgcgcccctcgctgacacctacgccgccccaacggttgcagagcaggtgtactgcttctccggtctgccggcactgccattcagaagaccagtgagccttggggaccttctggagttcgacgcctccgagaaggaatctgtcacgacagcgatgaccagtgtctcgaacaacactagttcagtgctggagctggctccaaattgcaactggaaccaggaaaatggcatgtcacggatgtggagcccccttgggatatgagatagatctgtgttgtttgctggatctggatgtatggagtgttagtactgagtggccagtagggttctgctgcttagatttgattagcagtgtgacttgcagattgtgtagattagattatccgttattggactaatggcttggcgtagtatttgtacatattactactgaaggaacagtgtccttatccttgtttggcgtagtatttgtacatagcacctgctaaacttcagacaatcagtgaaagacaaatgtgtacattgt

SEQ ID NO: 30818 - DNA, 1182 bp, Zea mays
  Clone ID: UC-ZMFLB73084A05_FLI
gctggttgtcagagcaggccttggttctcgggtgaatgtccagaatgtgctgatccacatgtactcaagttgtcaggatgttgttgcagcacggagattgtttgataatggtgagagtctggaccacttctcctggaactcgatgatttctggctatctaaagaatggccgtgtcgaagatgcaaaagcgttatttgatgtgatgcctgacaaggacaacgtttcctggagtgcaatgatagctggttgtgtgcacaataaccagtcatctgaggcacttaatgtttttgacagcatgagagcccatgaaatcaaaccagatgatgttacgctcgtgagtgtcatctctgcatgtagtaatttgtctgctctggagcaaggaaagttagtgcatgagtacattaggaaataccaatataacatcactatcgtacttgggactagcctcattgacatgtacatgaagtgtggatgcatggaggctgcactagaagtctttgacatgttggaagaaaaaggaacaccttgctggaatgctgtcattgtgggactggccatgaatggtcttgttacaagatcccttgacatgttctccgagatggaagccactggcactgctgtccccaatgagataactttcactggagttctgagtgcttgcagacatggtggcctagttgaggagggccgtcaattcttcaagttgatgcagaataagtaccagattgtaccaaatatcagacactatggatgtatggttgatctccttggacgtgctgggtatgtcagagaggctgaagacatgattcagagcatgccgatgtcacctgatgtcccagcatggggtgcgttgcttggtgcctgttggaagcatggcgatagtgaggttggggaaagggttggtaagaaacttgtcaagctggatcctgaccatgatgggttccaaactatgttatctaacatatatgcttcagaggggatgtggcagtgtgtaaaggacctaaggggttccatgaagcaacaacatgtagcaaaagttgcaggctgtagtatggttgaaccatcacattcttcatgagattctagaatgtgattgtattagaatgtagaatgcatagagtgtggtttaagttgaagtatatatggtcataatccaatgcttatctgcttagcctgtgttct

SEQ ID NO: 30819 - DNA, 719 bp, Zea mays
  Clone ID: UC-ZMFLB73084B12_FLI
agaagattgcgctcgcagaatcaacgggcctagaccagaagcagatcaacaactggttcatcaaccagaggaaacggcactggaagccatcggaggacatgcctttcgtgatgatggaaggcttccacccgcagaacgccgctgctctgtacatggacgggccgttcatggccgacggcatgtatcgcctcggttcatgaactacacacttccatggacgactgtgggggcctatccaatcgtcggaccgtgggagtatatttcagtgttgcggtgcaaggacattggataggcccccgcagaacgccgctgctctgtacatggacgggccgttcatggccgacggcatgtatcgcctcggttcatgaactacacacttccatggacgactgtgggggcctatccaatcgtcggaccgtgggagtatatttcagtgttgcggtgcaaggacattgttgtggaatttttgttgctgattgccaaggggtgggtcggtcgatgtagcgtctatgcatggcttgtagttctcctgtaatgttgttgttaatttccgcttggcggcttgtaatctaggtgtatctctggaacttgaatcctgggtgattaatccggcaagcagctgcctgtttgtatgattgtatggttcgggttggtggaacatgatgcatgctaaggcgtggcctgtctggatcaaaaaaaaagaagatgtcttttgtacc

SEQ ID NO: 30820 - DNA, 2558 bp, Zea mays
  Clone ID: UC-ZMFLB73084C06_FLI
agaacatccccacgcaaggcccaagcgcccaactatcatttctccctctctcccacctttccctccccaccaccacctacctacctctttattcgccgtcgcctaccacctccccctcctctccgtgcagacctccgctccgcaccaccaatccgtcgtaaccctagcccagcctggtctcggctggccccgctccgttcatgtgcggcaccaccgcctccccgtgttcgtagtagccgccgcggggaatttccctcccatgggttccgcatacgcccctgagaggacgccgatcgagggagaatgaggtgctgcatctgccgcgtatcctccgccgggtgccgggccatgggcgttgcgggacgggcgaacccgacgtcgtcgctgcgcagccgacgctgcctccgcatgcggccgtcgtacgccccgttctccgagcccttcactgaacgcccggcacccgccgccccgtcctccccttcatcccccgctgctgcgcctagggcgtaggagccgcgggcggaccgccgatatctccgtcgatctcgctggctcctctctctctctgcttcctctctctctccctctcgctcgtagagtcagttgattgtcggggctgatccggaatggaggtgtttggttgtggggatggggtggtcgatgctgaattcgcggaagtagatccaactgggcgatacatgcgctataatttgattttggggaggggagctttcaagactgtttacaaggcatttgatgaggtcgaaggtattgaagttgcatggaatcaaatcaacgtagatgaggtgatgcagtgtccagataatctagacaggctctacagagaagttcatcttttgaagtctctcaagcatggaaatgttatgaagttttattattcgtggattgatgaccagaataagactattaatgtcatcacagagctgttcacgtctggaagtctcaggctttaccgtcagaaacatccacatgttaacttgaaggcaataaagaattgggcaaggcagattcttcatgggttggattacctgcatagccaccaacctccaattatccatagagacttgaagtgtgataatatttttgttaacggaaaccatggggaagttaagattggagatcttggactagctacggtaatgcaaacacctagggctaggagtgttattggtactccagaattcatggcacctgaactttatgatgaaagttatgatgaactagttgatatatactcatttggaatgtgcttgttggagatctttactcttgaatatccatacagtgaatgtacaaatccagctcagatttttaaaaaagtatccacaggtgttaaacctgctgcattggctaagatttctgatcctcaagtaaagcagttcattgagaaatgtttagttcctgcttctgagaggtcgtctgccaaagaactcttgcaagacccatttctttgtcctgacaatgcacatgattctgctggcactaagtttacatctccagcacctaataaaacagtagatatggtgtctttgcatatggaagttgacacttttggatccagccctactaattcaggcaaggaaaatggttgtgttgctccacatacacctgtcctggagttcacaagaaccaacaaaaatacagagctaaagctgaagggtgagaaacttgataacaactctgtctcactggttttgcgaatagctgatttgtctggtcatgcaagaaatattcatttcctcttctacttggactctgatacagctttgtctgtagctgctgaaatggttgaacaattggagttagcagactgcgatgttaccttcattgctgattttattgatcttttgatagtgaatcttattccgggttggagacctgtaaatgatgcggcaacaaactcgtatacgcaatctgaaagtgaacttgcaatcacttcccataacaatctatcgaagttggtgcctgattatgcattaattgatggtatgatgcatccaaaagatgtgaatgtatcaactggttttcttgattctgtatcaagtgcaactaatataggaggatcaccatgctctgaaggttcggtcatttctgtacagcgtgctgagagtttcaaaagtgtgagtgactatgagcctgaggattatggtactatggactgtggtgggtacaaagagggaatcagtaaagaaaattgcagccatgttgtagatgatggatcgaggttaattttccatacagatcaagatcacttctcttggagttggccaatggccagcagtgcttcgatcatctactcctgataatcaggatgtgctgaatggggagcttgtcttgattgaacctcagtttggttgagatgaattgacaagggtgcgagaagaggctatggaaggagctcgaaataagtgggttgccagataaatgatgtttttgttcaaatctggcatttcatctgaacaatcataagctatgttcgatttatgttagaagtgtaagaaactatactgatcttttttagttaaaacataatatat

SEQ ID NO: 30821 - DNA, 547 bp, Zea mays
  Clone ID: UC-ZMFLB73084C07_FLI
gcagattgtgaccctcctacgccagcatgccctggctttggggggatcaaccgctgcacagctgcatctgggaagctatctttgcctacctttgggctggcaccgtacaaattccgtgcctccatttggatacctgacggaacccaagaacaggaccgcgtcacctcactgatgcaggaggctgacagctggctccgcagaatacgagtagaccatccggacttccggttcttcgtctcccgttccagtacgatgtggagatgactcgcggctgtaaatggtttttcttttttagtatgattaccgcctcgccgtacaaactgaacccccttctggtgcaccaagtgccctctcgtaacgggggttgtatgaattataagcctgcatttttaacttttttcttttcttccgtgcctccaataagttgtaactgttgtaggtttgttttgtgggaaagtaaagatggatggtggaaaaaggcagatgtagaactggaatgaaagaggcaaaaataggacaaaattgaaaggtaactattagagttgag

SEQ ID NO: 30822 - DNA, 1316 bp, Zea mays
  Clone ID: UC-ZMFLB73084C09_FLI
tcaacttcattttcccctactgctgatgctatgtctgaaacaaaggttgcacctatcacccagggaaatctacatgggtgaatctgacatcccaagacacaaagcggcatgatcttgcaaatgcatgtgtagtagtcacaggaggcagaggtttaagaagtgctgaaaattttaagttgttggagcagcttgcggagaaatttggtgcagcagcgggcgcgactagggctgctgttgaagcaggttatgttccaaatgaccttcagagttgcaggagaaggctgcagcagcttgaatctcagctaatggaagcgaacagaatcaaagaggaaggcaacactggaagtatccgatggaaggagaacatattagaccaagagaatgaattacagaacataaaacaagagaacgacgacctgcagacaaaggaatcagcggcttctgagaagattaaggaactctcttcccagcttactaatgcaaaatatggcatgataaatagtaacaccaaggagataatgagaaggggggcactgaagaggacgatgaacctgttgtagtagttgccaaaatatgggagaacaacaagtttgttgactatgattcatctaaggagaaggagaatgatggtgactcacaggttgatttggaatcaaacaagggggatgcaggtcttgatagcaacgggttgcactcaactaaggagaacagtggcagggcatcaccaactaaacaacaccagcagtataagaagaagtctctgctgaagagattcggtggtctgctaaaaaagaaaagcgaaaattagcataaaactgtctgatgatattctttgttctatcatttgacatattttttgtaaaccctctcagagatgctgaaagccaacttactattgagagtactatgaaacctctcgcgcagtgtgaaataaatgacagaaatgaagtgtgtgttggtgttggtgctggtgctggagacactaacataaccggtggtattatccaattgtattggagttctattcttgaaaggtgcttggatacaaacgatcaaagcttgaaggaggcttgagtcaattgaatcatctgtaagtaatttagaagaaatattgtttttgttggtgaagcgagtttgttctttcctttgggctctatttatttatgaattgataacccaacaggattgtagtttgtagccatttagatttgaatccgagctatgactgagacgaatacaacatatgcattttgtagccatgtatatctgaatcagagctctgtgattgagatgaatatggttttatgtgccgtcgc

SEQ ID NO: 30823 - DNA, 1203 bp, Zea mays
  Clone ID: UC-ZMFLB73084E02_FLI
tgaaaatcacaaattgagagagggagaagggggtgggggttacgtaacacggcgattcaggaggggatagcatcgtcatcgcaaaatgcaggctctcctgctccccgcgcgggccgcgccgccgacgccggcgatgcttcggcagcgtgcggtttctgcctccgcgtgtgcgtcgcaggtctgccgccccctattcggtgccgccagttgcatctcctgtggggtccacggaagcgttcggcggcacctcacagtggcggtggcggcggccccgccctcgccttcgtcctcaccttcgtcgggaccgctctacccgacgcctccacccaccgagcaggaggtggagagggtcaagctcgagcaggttatgaggagactagagaaaacagcaaggtatttcaagaatttgggtaccctggggttctggtcccaattggtgtgcacaattatttctgctggaattttggcattctctacagttgtaacggggaaggtgacatcaccctttacattctatgcaactgctgctggtattgctgctgcttttatttcagtcttctggtcatttggttacatccgtctctctgaaaggcttagaaaaacatccaaagaacctgctaaggctcctccacgtgctgatgttgttaagagccttaaaaatggcatcgtggttaatattcttgggatgggcgctgctgttctcggcatgcaagctactgttggtgctttggtagcaaaagctctcacaacctctgcagtaccctattatcaggctgctggccaaagccctgtcttggctttagatgttttcctagttcaggcttcagcgaacaccatcctgtcgcatttccttggggtggcgagctccctggagctgctgcgctcggtgtcactgcctccagcagaagccgccgtcccggccccggcccctgcacgggcctgagccatggcccgttgggcaggtcaagaaaaaccttcaatccttggctttggctctagacagttgctatttcttgattgcatgtacaacttgcatcaagaatacatacacatcgatgccttccagttcacctggacgcaacatgttcgcgtaattcccgccgagtgtgagctcttgcatgagcactcgcgaaccacatgtggcgcttgtttgctgtgcaagtgcaagtgagtgcagtgaccggctctcgctcgttcttaatc

SEQ ID NO: 30824 - DNA, 971 bp, Zea mays
  Clone ID: UC-ZMFLB73084E07_FLI
gaaaagtgcggtggtttctcgtgaacgagcaacccagaaaaagtacacctgtcgcgtaagcgtcctcaggcagcagctccccggtcgcggtctctgtctctctgaagggaaagctctgtttccccttcccggtgccggagtcggggaaggtcaccgcgggcgcgagccgatggacagcaacaacctcctggcggcgtggccggtcctggggccgggcgtcgccggcgccgtattcggcgcaggctggtggttttgggtcgacgccgtcgtctgcagcgccgccgccgtgccattcctccactacctcccagggttcttcgcctcgttcgccgcgctcatgttcaactgcgtcaaccgggaggacatcggcgatggctactactcaccgtacgacgactccgagtggagggtgaagctctggctttttatttcgtacgtggtgtcgtttgtttcgctggccggggcagtgggtttcttggttcaagatgcgcttacggatacggggccatctgcgtggactggcagtgctggcatcctgcagtgcgtgtttgtgttagtgagtgggctgatctactggacgtgccactctgaagattgacttaagaagtataggtatatatggccaaggaggaggaggatggagactgcttttctcagaagcgattgcttttccgtagtacgtttctggaggcacctttggaccgtgctttccgaaacgggtggaataaagagccattttctagttgtttcaagagagatgtagataagctgtactactattttacacgtgtttatagtcgtgtatcatgttgcttaaaactactttgtgaggtgttgttttggagcaagaaacttataggggtgctaagtactcgctctgtttctttttagctgtcgccggatagttcaattttgcactatacagcgacaactaaaatgaaatgaatggagtagtcaggaaacatcgttac

SEQ ID NO: 30825 - DNA, 789 bp, Zea mays
  Clone ID: UC-ZMFLB73084F02_FLI
caaaatttagggtttctttgcatctctcccgtcggctcctcccctcccaagtcccacctcacctctcctcctcgcgaagtatcggcggcggccgggcccgccgatgcagcaccgtggtccgcccccgatggcgcgcctccgccccgaaccaatcgaccgcgagaagacctgtcctctgctgctcagggttttcacaagggttgctggtcaccaccaaaatgaagagtttgcagtgagagggaaggaaccaaaggatgaagttcagatttacacatggaaggatgcgaccctccgcgagctcactgatcttgtgaaagaggttgctcttccagcaagaaaaaggaatgcaaggctttcttttgcatttgtatacccagacaagaatggtcgttttgttgtcagacaggtgggttcgaccttcgcttacggtcatggaagaggcgacgatgccaaaactcttgcagagctcggattccagatcggtgattacttgagcgttgcaatcatgtagacggtgcccgcaccggatgtaattgctgtgatgtcaaaagggctctggttgcaacagtaaggcatgattctctgttagcactaggaactgcaaccagaattgtctgtaataccggtagtatcaaatttacctagacacttcgaacgagcaaggcgtctgtaataccggtacttacctgtggtgcctggagcttccaaatctggatagcgtgggtttttcattgagaatgttaagttggctcgggttcctatgaagtcaaacacaggaaagtttgcatc

SEQ ID NO: 30826 - DNA, 2657 bp, Zea mays
  Clone ID: UC-ZMFLB73084F05_FLI
ggcacagcctatggtaagggcgtcactgaagttgagagagctatggctatgaggaaaggtgacagtttagatgatgacattgaaaatggagactacaaagacaaaaaaaatcacaacagtcccaatgttaaagggttcaatttcaaggatccacgaataatggatgggaattggattcatgagcctaacaaagatatgataagagattttttccggctcctagccatctgccacacatgcattgctgaaatagacgaaaatgagaaggtttcatacgaagctgagtcccctgatgaagctgcatttgttattgcggcaagagaactagggtttgagttttacaagaggtcactggcaactataattattcgtgagcaggatccaagttggaatgttgttgagaaaaggtacagaaagtatgaactcttaaatatattggagttcagtagctcaaggagacggatgtccgtgatagtcaaagaaccagagggaaggatattacttctcagcaagggtgctgatagtgtgatgttcaaaaggcttgcaccaaatggaagaaaatatgaagaagaaacaagaagacacataaatgagtattctgactctggtctaagaaccttggttctagcataccgtgtcttagatgagaaagagtacaaggaattcaatgaaaaactgaacactgccaaagcatctgtaagtgctgatagagatgtaaaaattgagcaggctgctgatagcattgaacaggacttgattcttcttggtgctactgcagttgaagataagctccagcaaggggtgcctgaatgcatagacaagcttgcgcaagccggaattaagatatgggtcctgactggcgacaagatggagacagctatcaatattgggtttgcatgtagcctgcttaggcaagacatgacacagataattgtcacactggaacaacctgacatcatcgcgttggagaaagatggtgacaaatataaaatttttaaggcatcaaagaaaaaggttatgagtcagatagaggatggaatcaaacaaattccaccttcaactaaaattagcactgcatcatttgcactaatcattgatggtaaatcaataccttatgctttggaagatgatgtcaagtttaagttcttggatcttgctatcaactgtgcatcagtgatatgttgccgatcttcaccaaaacagaaggcactggtcacaagatttgttaagcaagtaacacataaagtgactttagcaataggtgatggggcaaatgatgttggcatgcttcaagaagctgacataggggttggcatcagtggtgctgaaggaatgcaggctgtcatggctagtgatgttgctgttgcccaattccgctttttggaacggctacttctggtgcatggacattggtgttaccggcgtatttcagtgatgatatgctatttcttctacaagaatgttacttttggtgtcactctctttctctacgaagcatttgcatctttctctgggaagccagcttataatgattggttcttgtcactctataatgtcttcttcacctcccttcctgtcattgctttgggagtctttgaccaggatgtgtctgccaggctatgcatacagtatccacagctataccaagaaggagtgcagaatatattattcagttggtgtcggatacttggctggatgcttaacggtgttatgaatgctgtcttaatatttttcttctgcatcacaacctttgaggaccaggtgttccgccgggatggtcaagttgcaggcttggatgctctaggcgtcgccatgtacacttgtattgtatgggttgtcaactgtcaaatggcgctctctgtgaactacttcaccataatccagcacatattcatatggggcagcattgcagtatggtacctcttcctcatagtttatggttccatgaacccgaggttctcaactacagcctacatggtcttcatcgaacagctggccccagccctctcattttggttggtgacactttttgttgtgctggcaacacttgtcccctacttcacgtatgccgcgatccagatccggtttttcccaatgttccacaacaagattcagtggaagcggtacttggggaaggctgaagacccagaagtggcaaggcagttgtcatcacgacaccggacgtcgtcgcagcagaggatggtcggtatctctgctcgtcgggacggcaaggctatgcaaataacaagggagacagagatagaagttcaggagtagcattgtcagtagattttgcgttttgtacagcttataggatattgtctccggcaggatgacagctgaactgattggaaaccggaatgtttctggattgctgcttctatgatggctgtcatggaagctgatggtagagcaagactacaaattgcttagataggtcacaactcacaaggaggccaagagatcctgttgtaaagttcaattttagcagttcaaggctgtgtttcccccccccccccccccctgcttctcttacatcatagatgcttgtaaccagattggtagaatttcgttgtttttattcctctttaccccccttgcctgccccctctcaactgtattttaaacaataatgtaaggcatcttgtttgagtggc

SEQ ID NO: 30827 - DNA, 692 bp, Zea mays
  Clone ID: UC-ZMFLB73084H05_FLI
gcgccacggcggctgacgacagcgggttcactaccttcaaggtatacttccacgacatcgtggcggggacgagcccgacggccatccgcatcgcgcagggggcggcgtccaacacctcgtccaccagcttcggcgcgatggtggccatcgacgacccgctgacgacgggccccacgcgcgccgcgggcaccgaggtgggccgcgcccagggcacctacacgttcgcggaccagcagacgttcggcctcctcatggtgatggacttcgtgttcacggccggggagcacaagggcagcacgctctccatcctcggccgcaacgaggtgctcagcgacgtccgcgagatgagcatcgtcggcggcagcggaaagttccgcatggcgcgtgggtacgtccaggcgcacaccatcgactccggcttcaaatccggcgagaccgtcgtccagtacaccgtcaacgtcagggcctagctacccgctcgatctaccttgcttgctcctccggcccatggccgactgcccgcccggcttcttgtgcgtcgatccatctccggatgctttgtacacaccttgtcgttcttcgatgttactacatgacatgtatttagtagactgcgatttcagacatcgagtctatcttcatttgctattgagcgggatctggatctgcagacccgaatctagttctacgcg

SEQ ID NO: 30828 - DNA, 2163 bp, Zea mays
  Clone ID: UC-ZMFLB73084H06_FLI
gcagagcggacgacaacgcacgcgcgcctcttcctcctcctccccgccgccgccgccgccgccgcgcgcgcctttgcgtgccccataccgtctcctccaacacgctcccctcgttggcatcaatttcccatcccacctgtccaccgtcgcccgccgctatctcgcacccgaacccagcgcctccctcgtcgccgccggcgcgccgccatggtgtcgcagcacggcatcctcctcgcagttaacatcatctccgaccatttcggtcctatcgtatccaaagtgtgtggctgccttctgcgccacggcgcgctgtcgttgcaggatatcgtccgccgcctcgaactctcgcccgggcaggtgaagaactccctcctcattctcattcagcacaactgcgttcaggcctacacaagccccagaggggctggcgataggacagtgacgctctacctggccatcttcgacaatgttctgcaccggctgcgcttctcaaagttcctttccgtcgtccgtgtggatattcctgagtcagaagttcttctcgaaggattacttcagaatggtaggctaacatttgagcaacttgtggagcgaacaatatttaaagtatcagaagacagccccttaccaacaagggaagaagtacgaatgaacttcaacaaacttgtctatgcgcattatgtggaacgttgcccaaaaccagaacctttttttgatcctcttgcggttgaacaacctacatccacaaggaaacgggctcctaaaactgttgaggcggttctttcacttgagcagaaagttgtctgtactgcagctctatctgacgctgaaagattttctgagataccatacttcatggacgggtcatcgagtgcaaaagatggccatcatgctgttgctggtaataagcgaaaacatgaaaccttagaagttgatgaagatgattcgataattgcagaaagtgaagtactttggcggataaattttgagagattcatattttgtttaaagaagaagttttgtgcagaacgaaagaaagcaaagatgaggctcggaacacttgctatatgggaagcattttttgaggccaatgtaacaaacaacgacaacaagactgtgacatcaccaatagatggaattttggaaagagtaggacaaaaggaaggaggcatgtcaatgactttggatcacataacaagtgtgttgaatgatttagagtgcacttctaccgctaataacccagaagaattcacattcgatttgaataaattggttgagacatgtcgaaacgatgagatagagtctcttgtgaaaaagaaacatgggcaagaagcttatacaatctttaggttattgctgaaacaaggctctccagttgagacggatgaaattactgacaggacaattctagacaagcaggttgttcatgaaactctatacaagctttggaaagatgaatacatagattcagagagagtcccttcaacatcagcaacaggaacaggaagcgctcagttctttgtttggagagtaaaaaatatttatagggaacacttcatggacaatctttaccatgctgctttaaacttgcgccagatggtcaattatatggctgaactactacttgagggttcaaaggatgaaatcaagcttcggaacagaaaaaacattttgatcctagctctcactagacatgatgaatcccttatgttgttccatgatttttgagaatactggaacaggatctggttataaatttctggtctttggagaaaccaaagcatggtgatttttctttggaattgtcaaagcttcgtacctatgatgttgttgagggagttgctcgtcaacttgaattggaccatgcatgaaaattcggcttacatcccacaattgctaatctcagcaacctaaaccacagcctgtcaagtatcgaacagtggagcatctgttggacatgctcatcctttacaatcagattaaccttttttgtttcttttggtcaatatgagcatgatttccgtgtaacaaaatgtgttggacttcctgaactttaacaaagattattacattcagttaaaacatcgtttcccccagtttatatgtaacatcagaatagatgttctttgtggttaaatgtcattgtgcgccaagtcatgcatc

SEQ ID NO: 30829 - DNA, 945 bp, Zea mays
  Clone ID: UC-ZMFLB73085C02_FLI
ccacggcaatcgatcgatcggtgctttgatctctgagcctgagcaagcggtcgagctcaccaaccgccacgctcaagacaggtcgagtagctagctagctgccggagtggaaaaggaggcggtgcagtggcatggggaggccgccgtgctgcgacaagatgggggtgaagaaaggcccgtggacccccgaggaggacctcatgctcgtctcctatgtccaggagcacggccccgggaactggcgcgccgtgccgaccaacaccgggctgatgcggtgcagcaagagctgccgattgcggtggacaaactacctccggccgggaatcaagcgcggcaactttaccgagcaggaggagaagctcatcgtccacctccaggctctccttggcaacaggtgatggtcactcgcctgtcgtcgtcttaaagcttttgttcccgttttgttttttccgctgtaacaaatggatcggacaaaccaaatcatccacggcacgaggtgatcgtgtgctgagcttgttgatctgcatgccgtgcacttgttgatgtgtcgtgcaggtgggcggccatagcatcctacttgccgaagaggacggacaacgatatcaagaactactggaacacgcatcttaagaagaagctgaagaacatgcagggcggcgaagggggcgcgggagggaagcgcccggccgttcccaaggggcagtgggagcggcggctgcagactgacatccacacggcgcggcaggctctgcgcgacgcgctctcgctggagccttcggcgacgccgctggccaaggtggagcctctgccgacggctccggggtgcgcgacgtacgcgtctagcgccgacaacatcgcgcggctgctggaggggtggctgcgcccgggcagcggcaaggggccggaggcgtcgggttcgacgtcgacgacggccacgacgcgcca

SEQ ID NO: 30830 - DNA, 796 bp, Zea mays
  Clone ID: UC-ZMFLB73085H04_FLI
tcttcatgttataactaatgtctcatttggtttcgatgctcacatctggttcagtgttggaatctgggaccttccccgatcctcattgcccctgaaatctgattagcatgacttattttttgctacaatttctttggatctttttctttacatcctactagaacttgatgcacctttaattgaggtgtcagcaaatcctggggatcatttgcttgcagtgccaagttagcggtatttgtataggtaaaccctctgtgaatgaatgcagaattcaggttataggctggatgcgatttgagctttaaaagagattgctttttaacaaactgaacacctgcactcacaggtgctacataaataatatgatttcatttagtcgagtcctgtatgttctaaaatatccttaagccctgtgctagcatcttgtgtttgttctatttcaaagatggtttttactgttctttgctgtattgcttctatgcatattctttagagccgtgtgttaacttgtgctattgtgcattgcagaagctagaaaaggcgaaaaccgaagattgaaaaagaccagcaagcagttttagagagcagatgaaaggcgggcatttttgttgatgtcttatctttcgtgtcaattgtgtttttgcttgtcccgtagacctttcaggatatctggagtgtatcttcaagtatgtgatatatatatatacgattcaagaacctgtctgggatgattattcatctttcgggacacgtcctgtttggatcattatataacaacatcgcaaatgtcttgtgt

SEQ ID NO: 30831 - DNA, 988 bp, Zea mays
  Clone ID: UC-ZMFLB73086A06_FLI
ggggctttagcgatggtcctgttcatggctggcgccgcgctgctcgccggggctgccggcgccggcgcgcagcagggcgtgtggagcatcatcacccggcccatgttccagagcatgctgagccaccgcggcgacagcgggtgccagggcgccttctacacctacgacgccttcatcgaggccgccagcaagttccccggcttcggcaccaccggcgacgagcagacgcgcaggcgggagctcgccgccttcttcggccagacgtcccacgaaaccaccggtggatgggcgactgctccggatggaccgtttgcctggggatactgccgggtgaaggaacagaaacagacggacccaccctactatggacgaggacccatacagctaactcataagtacaactacaggctcgccgggcaagcgctgaacctgaacctggtgggcgacccggacctggtggcgagagaccccgtggtagccttcaagacggccatctggttctggatgacgccgcagtcgcccaagccctcgtgccacgccgtgatgaccggcgactggaggccctccgccaccgaccgcgccgcggggaggctccccggatacggcctgaccacgaacatcatcaacggtggtctagagtgcggcgaggaccgctccaccgacggcgccaaagccgccaaggaccgggtcggctactacaagaggtactgcggtatgctcggagtggggtacggggacaacatggcatgcgggagccagaagccttacggaggatgatgacactagtagctgatctatggttgctgcaatgcaagccttcacgtgtgtttgcctctctacctaaagaataaatcaagctagcagcaaacctaccttcggcgtgtgtctacttgcttatcatagtgtgtgtccgtgtatgagagatgatgtactgtcacgaactcacgtgtgtatgagagaggatacatggtaagactatcactactag

SEQ ID NO: 30832 - DNA, 658 bp, Zea mays
  Clone ID: UC-ZMFLB73086E03_FLI
gttcaggtacgcgcttgtgctgatcgcgatgtacaacgtgtgggacctgatcgggaggtacgtgccgctgatcccgtgcttgaaactgacctcccggaagggcacgctggcggctgtcttggcgcggttcctgttcatcccggccttctacttcacggccaaatacggcgaccaggggtacatgatcttcctaacctccttcctggggctcaccaacgggtacctcaccgtgtgtgtgctcatggaggcgcccaaggggtacaagggccccgagcagaacgctctgggcaacgtgctcgtcgtctgcctcctcggcggcctcttctccggcgtcgtgctcgactggctctggctcattggcaagggctggtgagtacggtcttctgcgcgtgggtctttgagggggatcgattagattttagatctctgtttcgacctcttgtttttgcttaaaaaaacagaaaacttctgtctttaggtagctagtcagagaacacggatactgtaatctgtctaagtttgaaattttctttcgggtgcaatcactcccttttgtttccgacttttggatgttgtatagtattttggaatgaaatattattgaggtgtgagcttgagcacctgggtgtattttcttacaatataatttagctcttgc

SEQ ID NO: 30833 - DNA, 1666 bp, Zea mays
  Clone ID: UC-ZMFLB73086E11_FLI
cgttcgcctcttctcctccctcctgccgggtccttaataaagagcagcagcgcaaggtgagccgccagcttgccccaggttggtagagcgagcgagaagaaggcaatggcggcggagagcttcctgttcacctcggagtccgtgaacgaggggcacccagacaagctgtgcgaccaggtgtcggacgcggtgctggacgcctgcctggcgcaggaccccgacagcaaggtggcctgcgagacctgcaccaagacgaacatggtgatggtgttcggcgagatcaccaccaaggcgagcgtggactacgagaagatcgtgcgcgacacctgccgcgagatcgggttcacctccgacgacgtggggctcgacgccgaccgctgcaaggtgctggtgaacatcgagcagcagtcccccgacatcgcgcagggcgtgcacgggcacttcacgaagcggcccgaggagatcggcgccggcgaccagggccacatgttcgggtacgccaccgacgagacccccgagctgatgccgctgagccacgtgctggccaccaagctcggcgcgcgcctgacggaggtccgcaaggacggcacctgcgcctggctcaggcccgacggcaagacccaggtgacggtggagtacgtgaacgagggcggcgccatggtgcccgtccgcgtgcacaccgtgctcatctccacccagcacgacgagaccgtcaccaacgacgagatcgccgccgacctcaaggagcacgtcatcaagcccgtcatcccggagaggtacctggacgagaagaccatcttccacctcaacccgtcggggcgcttcgtcatcggcgggccccacggggacgccggcctcaccggccgcaagatcatcatcgacacctacggcggctggggagcccacggcgggggcgccttctccggcaaggaccccaccaaggtggaccgcagcggggcctacgtcgccaggcaggccgccaagagcatcgtggccagcggcctcgcccgccgctgcctcgtgcaggtgtcctacgccatcggcgtgccggagcccctgtccgtgttcgtcgactcctacggcaccgggaccatccccgacaaggagatcctaaagatcgtcaaggagaacttcgacttcaggccagggatgatcaccatcaacctcgacctcaagaagggcggcaacaggttcatcaagaccgccgcatacggccactttggccgtgacgacgccgacttcacctgggaggtggtcaagcccctaaagaaggcatccgcttaagaatgtattgggaagttcactggacatgaggttcatcttcgtctggctctgctgatacctgcaaggattgctgctgctgctgccgcccctggatgtgtgtttgatcagtgactggctgctctgctccatagaagatgaatgaagagagagatggtgaagaaggctttggcaaatggcaattgccgcagcaagccatgtcggcgccactgaccggcttagtgattggtataatttggtgtggcagcagccaggattaatgcgctggtcttttatctttactactagtttggtctcgtccggtatcttatttttctttccccttttcgagtctgtactgaaactgctgagagatttgcagttttgatctatcatatcctttggt

SEQ ID NO: 30834 - DNA, 1919 bp, Zea mays
  Clone ID: UC-ZMFLB73086F02_FLI
cgcaaaccctatcgcctatccctctcgcggtcttgcctcggtctctggcggcggcaccgccgttttacactcctcctccttcgacaacccgtcgcagtagcgtccgtctctggtgtccggctgtccggctctggactcccgacctcgacatcaggatctgcgcctcccgaccggtatgtgggggctctgaagaaggtgcagaaggatctgggcgcgtcggtgttcgagccgctggtgcaggcgtacgccgccgtcgggaagttccctgggatgtggcagcggctgaagatcgagaacgtggaggtcggggaggggacggcccagctgcttgactctatctgcgccgatcaatagcccaagcacgtcctagaggcggcgacagaaatgagttgctggcaagtttgacaaaacaagcagacatggtcttggtggctcagcaggaattaatcacccaaaaaaacagttacaagttgggttcatgcatgtcttacgtcaaggattgtactccccgttaaactgttggttcgggccagtggccggcccggtacgttcaggcccaccgggcgaacgggccggcccggcacgatttatccctgtgcgtgccgggtttgggcatgtcgctaggcacgtgggccagcacgacccggcccgaagcatcaacgggccgtgcctggcccggccctatccgtaccgggccgaaacgggttcggaccgggtccgtgccgggtggcccgtttggacatctataggtccctatttggacctgaagtgaagcattttaaagttgaaggacccagattctcacttcgagagtttatgaacctagatgagaatctaaggctctggaagttatggaacttgaccagaaaatagatctagttcatgagcttgatggtcatattatgcgatgtgtccgtgatcaaaatggaaatcacgttatacagaagtgcattgagtgtgtccccacagaacatattggttttgtagtgtctgcttttcagggacaagttactagcctttcaatgcatccatatggctgccgtgtaattcagagaatcttggagcactgcggtggtaactcacaaggccagtgcataatagacgagatattacagtgggtgtgcatccttgcgcaggatcagtatggcaactatgttacacagcatgttctagaaagaggaaaagctcatgagaggagccaaattattactaaattggccgggcaggttgttaccatgagccaaaataaatatgcatcaaatgtgatagagaagtgttttcaacatggtgatattgcggagcgggatcttctgatcagacggattgtggagcagacagagggcaacaacaatttattggcaatgatgaaggaccagtatgctaattacgtggtccagaagatacttgaaacttgcaacgaggatcagcgggagcttctgctcagccgcgtaaaggatcatatgcaagcattgaggaagtacacatacggcaagcacatcgtaagccgagtcgagcagctctgtggcgacggaactgccgagtcaggttcttgaaacgaaccgccgcctaattcttcataggctggagggtgtcctgctcttttgctcattccgtcagtgacgaagaaagcaaaacggatcaagtctaactctggcgcttcagaacagactaacaaagctgtcgtcgaagattgtataggtgtgactctgttcagggatagtcttcaggttctagaacagaagggtagtggtgtgcatcagtgtatctgtttactggataatagtggttggttaggtgtgtgcagaaaaagtttagtgctatgctttgtatgtgatacatattaactatgccttggaatgttcatatgttgtcctgattacgtgtgatatctctcgttcagttcaagttgcgttttctac

SEQ ID NO: 30835 - DNA, 1931 bp, Zea mays
  Clone ID: UC-ZMFLB73086G03_FLI
tgcagcgccagcgcagcgcctctctgctactgtgctggctgacgccggtggggtgtgagcgaactgcgagctgctgccacccctgctgccgcggtcgaccgccggccccggaccgagatggacgctcggtgggcggtgctgctcgcgctgctggtcgccagcggcggcgtccgtgtctgcgccgccgctggggccaagggcgccaactggctgggcgggctgagccgcgcgtcgttccccaaggggttcgtgttcgggacggcgacgtcggcgtaccaggtcgagggcgccgcgtccaccaacggccggggcccctccatctgggattcattcgcgcacgtcccaggaaatattgcagggaatcaaaatggagacgttgcagtggatcaataccatcgctacaaggaagacgtcgatctcatgaaaagtttgaactttgatgcctaccggttctcaatctcatggtccaggatcttcccggatggcgaagggaaagtcaatccagaaggtgtagcgtattacaataatttgataaactatctgcttcagcaaggcatgactccttacatcaacctttaccactatgatcttcctcttgcgcttgagaagaaatatggagggtggttaagcgcgaagatggcggacttgtttacagactatgctgacttctgttttaagacctacggcgatcgcgtaaagcactggtttacattcaatgagccaaggatagtagcgctacttggctatgacacagggtcaaatcctcctcaaaggtgcaccagatgcgctgctggtgggaattcagcaaccgaaccttacatagttgctcataattttctcttggcacatgctactgcagttgcaagataccgtacgaaatatcaggctgctcagaagggtaaggtcggaatagtcctggacttcaactggtacgaggctcttacaaactcacctgatgaccaagcagcagcccaaagagccagggacttccacattggctggtttgttgatccattgataaacggacactatccacagataatgcaagatctcgtgaaggagaggctgcccaggttcactcctgagcaggctaaactggtgaagggctcggcagactacatcggtatcaacgagtacacatccagctacatgaaggggcagaagctggtccagctggcgcccagtagctactctgccgattggcaggttcaatatgtttttgcacgcaatggcaaaccgattggaccacaggcgaattctaagtggctctacatcgccccgacggggatgtacgggtgcgtgaactacctcaaggagaagtatgggaatccaacgatctacataacggagaacggaatggaccagcctggaaacttgacccgagaccagtacctgcgcgacgccacgagggtgcggttctacaggagctacatcggccagctgaagaaggccatagaccagggagcgaacgtggctggctacttcgcctggtctctcctcgacaacttcgagtggctggcagggtactcgtccaagttcggcatcgtctacgtggacttcaacacgctcgaacgccacccgaaggcgtcggcctactggttcagggacatgcttcagaagcattgagatctccagagccgagcctgagcacggaaggtaccattttgttcagcttcgcctagtgtttgggatggcccaatggttcaaatccggctcagtgcctggctaccaaaatgggaacaaaggacagctaccccgatcaattgtgatgttgtgtgtttgtgggtatgttctctctggagtttgagctgtggttattttatcgtgttggttgatcgtgtttgaaatgcttaattcaggactgtgacatctcgagttgttttaactaaatcttataagaactaccctgatcgagcgctgggtaattggat

SEQ ID NO: 30836 - DNA, 907 bp, Zea mays
  Clone ID: UC-ZMFLB73086H09_FLI
cgaggctccccgacctccgggtgctgacgctcaccgggctcggcctctggggcccgctgccggggaaggtgtcgcggctggcgtcgctggagatcgtcaacgtcagcggcaactacctctacgggcagctcccggaggggctatcccggctgggcggcctccagacgttcatcgccgacgacaacatgctctccggcgagctgcccgggtggctcgggaggctggcgtcgctggccgtgctcagcctccggaacaactcgctgcagggcgcggtgccggagtccgtccgggacatggggtcgctgcggtcgctggcgctcgcgtgcaacaacctctccggccaggtgccggacctgagcgcgctgacgaacctgcaggcggtggacctctccaacaactcgcttggcccggcgttcccgcgcctggggcggaaggtggccagcgtcgtgctcagcggcaaccgcttcggcaacggggtccccgccgaggaggtcgcctcgctctacctcctggagcgcctggacgtgtcgaggaaccggttcgtcggcccgctcccgccggcgctgctcgcgctcccgtccatcgagtacctcagcgtcgccggaaaccgcttcacgggcctgctcgccgccaacatgtcctgcggcgagaacctccggttcgtggacgtgtcgtcgaacctcctgacggggacgctcccgtcgtgcctgaagacgctcccgtcgtcctccaactccaagcaggtgacggtcctggcggcgtccaactgcctgtccggcggcgccggcagcacgcagcacccggccctgttctgccagaaccaggcgctggccgtgggcatcgtgcccgtgcaggcgcggggcggcggcaaggccaagggcaaggccggagccgtggccggcgccgt

SEQ ID NO: 30837 - DNA, 1443 bp, Zea mays
  Clone ID: UC-ZMFLB73086H10_FLI
gttcgtccaggagttcaagaggaagaacaagaaggatatcactggcaaccccagggctctccggaggctgaggaccgcttgtgagagggcgaagaggactctgtcttccactgcccagaccacgattgagattgactcgctgtatgagggcatcgacttctactccaccatcacccgtgccaggtttgaggagctcaacatggacctgttcaggaagtgcatggagcctgttgagaagtgcctgagggatgccaagatggacaagagcaccgtccatgacgttgtacttgttggtggctccactaggatccccagggtgcagcaactgctccaggacttcttcaacggcaaggagctgtgcaagaacatcaaccccgatgaggctgtcgcctatggtgctgctgtccaggctgccatcctgagcggtgagggcaatgagaaggtgcaggacctgcttctgctggacgtcacccctctgtccctgggtctggagactgctggaggagttatgacagtgctgatcccgaggaacaccaccatccccaccaagaaggagcaggtattctccacctactcggacaaccagcccggtgtcctgatccaggtctacgagggtgagaggacccggacacgcgacaacaacctgctgggcaagttcgagctctccggcatcccccctgcaccccgtggtgtgccacagatcaccgtgtgctttgacatcgacgccaacggcatcctgaacgtgtctgccgaggacaagacaacggggcagaagaacaagatcacaatcaccaacgacaagggccgtctctccaaggaggagatcgagaagatggttcaggacgctgagaagtacaagtctgaggatgaggagcacaagaagaaggtggaggccaagaactcgctggagaactactcctacaacatgcgcaacacgatcaaggacgagaagattgcgtccaagctgccggccgatgacaagaagaagatcgaggacgccatcgacgcggccatcagctggctggacgccaaccagctcgccgaggcggacgagttcgaggacaagatgaaggagctggagagcctctgcaaccccatcatcgccaagatgtaccagggcgcgggtgaagacatgggcggcgctggcggcatggacgaggacgcccctgccggcagcggcggccctggccccaagatcgaggaggtggactaagcggtttgttgtcagtcttgagtgtgctgcagttgctggctggcccagttgctgccgagagttatcgtcagttggtgcggtgtgtccgcttaaactttatttgtggttggttggtacttttgtggtggttatttttttggacctcgtgatagtcggtcggttcaatgttatcgcggctactggcaaaccttaagtgatacggtattcttcttttcggtatttgtttctgc

SEQ ID NO: 30838 - DNA, 677 bp, Zea mays
  Clone ID: UC-ZMFLB73088B11_FLI
gaagacattgaggctctcaccaagaggacacaagatggtgggacagaggttgttgaagcaaaggctggaaagggctctgcaacattgtccatggcatatgctggtgctgtttttgcagatgcatgcttgaagggtctgaatggagttccggacattgtagagtgctcttttgtgcaatcaactgtgacagagttgccgttctttgcctccaaggttcggctcggcaagaatggagtggaggaagtgcttggtctgggtgagctcaacgacttcgagaagaaggggctggaaagcctcaaggtcgagctcaagtcttccattgacaagggtatcaagttcgcccacgggagctaggcaactcgcccggcttctaacagttgatatcccttgcaaaatttttttttttgactgccttttcccccccgccccgttatggttggcgcaacgaggctttgtggtccataataaaacacagcggagtgtagaaaatgtgcaccaggagcagtttacaaacagcggttcttttttgtgctgaaccaccagtagttgagccgtgaaggaatggaaaaactttccacttgctcatttccgagcgccttctcattcattgtatgcatgttttggactcgaggctggacgtcttgcacacaggaatccaatcactggagttgcaagat

SEQ ID NO: 30839 - DNA, 1415 bp, Zea mays
  Clone ID: UC-ZMFLB73088C08_FLI
gcgcactctagcaatggcttctgaggttgtccgccctagcgacgccgagctactaaaggcacaagccgacatatggcggctcagcctctcctacctcacgcccctgtcactgaggtgcgccgtggagcttggcatccctacggcgatctaccgccatggcggggctgcctcagccgctgagctggtcacggcgctgtctctcccctccactaagctgccgttcctccgccgcctgctgcggctcctcgccgcgtcgggcgtgttcaccgtcgacaagcagagctcggaggaggagcggtaccgcatcagccccgtgtcctacctcctggtggacggcatccctcacgaggaccacatgaaccacaccgctctggtgctcacctgcacctcgacgcgctacatcgaggcggggatagggctggcggagtggttcaagagggacgtggtcacgtcaccgttcgaggagctgcacggggcgactctgttccacgagagcatggggagcctcgacgcagatttccacgacatggcgagcgaggccttggacgcccacgacaacttcggcatcgagatagctatgcgggagttcagggacttgttcgaggggatccagtccatgacctactgctgcggtaacttcggtgatgacaagggtgccagggccattgtcaaagccttcccacacataaaatgcactgtgctggcccctcccaagatcattgccaccaaaccggccgatggagcgatgataaactatgtcgaaggtgacatgttcagtttcattccacctgctcaaactgtcgtgctaaagcttgtgctgcaccacctgaccgatgaggagtgcgtcaagctcctggctcaatgccggaaggcgattccttcacggaaggatggcgggaaagttataatcggtgatattatgattgaccactctgggcctatgctggaaactcacctcctgatggacatcggcatgatgaccatgacaacaaggacggcagagagatgaaaaagaatggagcgagctcttcaccaaagcagggttcagcgaatacaagatcctgaaggaatttggagctcgtgttgccttcgaagtctatccgtgagattgcacctggactatacatatatatttacatacatatatgtatgtgtgtgggtgccttgcgtggcttggcgtgatgatgtcataaataaagagggtgggtgtgcttgcggtattcatggatggccatggatctgagcacatgacgttggatgctttcttaaggctctcgtggatcttctatatttggaagaagctgtaaaataatatatcgccatctagtgttggcgttggcttgtatgtactttgtacctgctttgttattttgtgtaatatcgagtaacctaatgtatacttgcttactactatc

SEQ ID NO: 30840 - DNA, 1583 bp, Zea mays
  Clone ID: UC-ZMFLB73088F05_FLI
gctgaatgatcgcatggtacatgaaagcatacctttatctgaggagaagcgtctagtgaaagaaattaaggaccttgagaaaaccagatcgaaagtcatctctaatgctgctaacagggctaaattgcaaggtacagtggttgaaaaagaggctatacaggaccaggtcaaaatcatcggggagggcattgatggaataaagaaggaaagacaggcagtaagatctaagattaaggtcctggaggatgagctaaaacttgttgatgctgagattggattgcttcaagaagatttagatgcagcaactgccagaaaggataaggcatatgaatcgttgcaagaattgagagcagtgcgtgatgcaaaaaacgcatcctccatgcataaccgtacagttttaaccagagctagggattattcttcaaggaatatgctgacagaattgcaagagctccacaaaactgaggtcgacaagttcatgacccaatggtgtgaaagtaaggccttcagagaggactacgagaagagaatcctcacatccctaaatagccgacagctgactcgagatggtcggatgaggaatcctgatgagaagcccatatttatcgagtcacaggcgccagctccagctccagagcccatccctgtaaaattgcctgcaaaacaagccaaggaagtgcctgctccccaggcagatgatgctcccaagactgaagctccttcgaaaggacctgtcaagtcgcacaaggcaaaagctgctcttgatgctgatgatgattatgaggccgagcccctgaaggagaaggcaaagcctacggaggctgatgtggctaagttgaaagagatcaagaggcaggaggagattgagaagaacaagcttgcattggagaggaagaagaagcaggctgagaagcaagcagcaaaagccgcggcccgggcacagaaggaagctgagaagaagctgaagaaagaggagaagaaagccaagaagaaatctggcgcagctgacactgatgagccctcagaatcggacgccaagtctgatgaagccatggaagccccagtggagcaggaagtggccccagcttccaccatgataaagaaggaacagaaggagagtgcccggcacaggaacgtggtcagcaaggccccaccacccaaggcgatcctgaagaggaagaaggcgcagtcctactggtcatgggctggcccagctgccatggtggctgccgtgctggttgccctcctcgcggtgctgggatactaccagtactacctcccagcgaatgccagcaactgagtgggcgaggtcggtgcactcgcggccaggccattcatttatgacgtggagaccaattttgcaggtgagaagaaagagtgcaaggtctgcttgagacgtgaaggaccagaggagagtcttgttcgctttcgatgttgttagttggagccgaagatacagttgtttttggttgcgactttgctagatctctctctatatactgcgactgatatatcccgtgtacttttgaagtgatgcgtatattgacatctggaataacaatgcctttcagtttcattatctc

SEQ ID NO: 30841 - DNA, 1624 bp, Zea mays
  Clone ID: UC-ZMFLB73088H07_FLI
tcggcactcggcagcgcgccagctccataggaggagatggcgctcacaagaatcggtcttgctggccttgcggtcatggggcagaaccttgccctcaacattgcagagaaagggttccccatctctgtgtacaacaggacaacctccaaggtggacgagaccgtgcagcgtgccaaggcagaaggaaaccttcccgtctacggcttccatgaccccgcgtcctttgtgaagtccattcagaagccacgggtggtgatcatgctcgtcaaggccggcgcgccagttgaccagaccatcgcgacgctcgcagctcacttggagcagggcgactgcatcatcgatggggggaacgagtggtacgagaacacggagaggagggagaaggccatggaggagcgcggcctcctgtatcttggcatgggtgtctctggaggagaggagggtgcccgcaacggcccgtccttgatgcccggaggctcgttcgaggcttacaagtacgtcgaagacattgtcctcaaggtggctgctcaggtccctgacagtggcccgtgtgtcacgtacattggcaaaggtggatcgggcaactttgtcaagatggttcacaacggaatcgagtatggcgatatgcagctgatttccgaggcatacgacgttctcaagtcggtcggtaagctcaccaacagtgagctgcaccaggtgttctccgagtggaacaagggcgagctcctgagcttcttgatcgagatcacggccgacatctttggcatcaaggacgagcatggcgatggctacctggtggacaaggtccttgacaagaccgggatgaaagggacagggaagtggacggtgcagcaggccgccgagctgtcggtggccgctcctacgatcgaggcgtccttggactcgaggttcctgagcgggctgaaggacgagcgggtggaggcctccaagatcttccagggtgactactactccaccggctcgccggtggacaaggcgcagctggtggaggacgtgaggcaggccctgtacgcgtccaagatctgcagctacgcgcagggcatgaacatcatcaaggccaagagcgcggagaaaggctgggggctcaacctcggcgagctggccaggatctggaagggcgggtgcatcatccgcgccatcttcctggaccgcatcaagaaggcctacgacaggaacccgggcctcgccagcctgctcgtagaccccgagttcgcgcaggagatcatggacaggcaggcggcgtggcgcagggtggtgtgcctcgccatcaacaacggcgtcagcaccccgggaatgtccgctagcctggcctacttcgactcctaccgcagggacaggctgcctgccaacctggtgcaggcccagagggactacttcggggctcacacctacgagagggtcgacatgcctggctctttccacaccgagtggttcaagattgcgcgcaacatctccaacaactgatgagctgctcaacggatggcatgcccggtgttgactactccagtcggtaatgagatttcctgcaggaacttgtctattgatctttgtaagttaattatttatatgaataaaataagagcagacatgcttgtgtttgggc

SEQ ID NO: 30842 - DNA, 1516 bp, Zea mays
  Clone ID: UC-ZMFLB73089B03_FLI
cgcgctgccacgggtaggagcggcgtcaaattcgggattcccaagcggcttcagcccggaggttgagccaaagctattttctaagaaaaatggcggcaatgatggtggcgatgactgcgaggagcaagaacagcatattacccatggagaagaagcagggctggtctattcagctaccagagctccggttcccttgggattcacatgaagacaagggtttctctctgagtctgcaaggatctggaccttctcatggcggcctgtttgctagcgtgggtcttaaagtgtcgacaggtgccccagcagtggcgcccggaccgggtgacaaggatattaagattccattcactgatcattgtatgaagtacgtgtctgaggcagttgggtaccaggttattagcactgaagcggagtcagtggaggaggtggtggatgctaaggcaaagaaggcagccaagaaacgtgggctgcagctgaaaattaagattgggaacccacatttgaggaggctggttagtggagctattgcaggtgctgtttccaggacttgtgtggcaccactggagacgatcaggactcacttgatggttgggagcaacggtgactccatgacagaggtgttccagtcaatcatgaacactgaggggtggactgggcttttccgtgggaatcttgtcaatgttatccgagttgcgccaagcaaagcaattgagctttttgcttttgatactgccaagaaattcttgactccaaaggctgatgagtctccaaagaccttcctacctccatcacttattgctggagcacttgcaggagtcagctcaaccctgtgcacatatcctttggagttgattaagaccagattgacgatagagaaagatgtctataacaacttcctccatgctttcgtcaagattttacgagaagaaggtccatcagagctctaccgtggtctgacaccaagtctgataggagtggtgccatatgccgcgactaattactacgcctatgacaccctaaagaagctctataggaagacgttcaagcaggaggagatcagcaacatcgcaactctcctaattggttcagccgctggtgccatctccagcactgccaccttccctcttgaggtggcccgcaagcaaatgcaggtaggagcagtaggagggaggcaggtctacaagaatgtgttccatgcgctctactgcataatggagaaggaaggggttggcggcctgtacaaggggctcggaccgagctgcatcaagttgatgcctgcagcaggcatctcgttcatgtgctacgaggcctgtaagaagatcctggtcgaagacaatgaggatagtgagtgaagctgaagcatgtatgcccctgaggaggggtatgactgatgtgccaggctagaagaggtttgggttgggttggggagtataccctagtattatcaactgatgaaaatgtagatccaagatatttgaacgccctttagatcataatttggttcagttttgtgttg

SEQ ID NO: 30843 - DNA, 643 bp, Zea mays
  Clone ID: UC-ZMFLB73090E08_FLI
cagacatgtttcaatgtcaggtttatctgtggtgaaatcttattgtggccatggcataggggaactgtttcactgcgccccaaacattcctcattattcaagaaacaaggccgttggtatcatgaaagctgggcagacatttacaattgaaccaatggtcaatgcaggggtttggaatgatcgtctgtggcctgacgattggactgcagtgactgcagatggtaaacggagtgctcaatttgaacatacacttttggtgacagaaacaggatgtgaagttttgacggcacggttaccctcatcaccggacgtttttccatggttgaagaagccgtgatggggaacgccaccaacagcaagtgatactgttacactgggtcagcaaaaagttttgttctgctctatcagtcggccaaagctgaaattttcaaatattctagatcagagtgattagcatgctactgctgaacagtcgcagcaattgtctatcgtgcggaactatttctgggagtgtgtattgttaagtcggttttcttcgagttatacgagacgtatggcttcttgagatgtgtcaccaatatgattatgccatcagtttacttttgatttcacagaacacaatttccatcatttcgagtaggtt

SEQ ID NO: 30844 - DNA, 2297 bp, Zea mays
  Clone ID: UC-ZMFLB73090F05_FLI
gacatcctccccctccgctcaccgtccaggatctcatcgcgcacgcctagtctgtcccaccccgacatcctcccccaccacgccgtgcacgcctcacgtcgtgcgtctccaccacgcccgccgcacacgccgcgatgagatccaggaaagcagtctgcggatcccccgcgacatcctcctccaccgcgccatggccgcccccgacgtcctcccctccgcgccgcgcccgcccgatccaatgatgaaagcgggtcggatctcgggggcacttcccccaccactgctccaagctcatggagcaccaagaatccgccaagtcgagccctgagctccgacgtgaacctgcgaatccagcgcctctgtcaggcgggtgacctcgcatgcgctctgaggctgctgggctctgacggcggcgtagatgtgcggagctactgcacggtcgttcagctctgcggggaggagcggtcgttggaggctaccaagagagcacatgccttaattcgcgcgtccagtgtcgctgccacgggtggaaaaagggagcgtctttgggaagaggttaatgctggcgtacctgaaatgcggcgacctgggcgaggcaaggacggtgttcgatggaatgcctcctcaagctgctgatgtccgtgtccggacttcgctgatgagcgcgtacgccaaggcgggtgatttacagaaagttgttttgctgtttaggcagatgcaagtgctgcggggtcagtccagatgcacatgctgtttcctgtgtcctcaagtgcgttgccagtttgggcagccttacgaacgaggtgattcatggattactttgagaagttgggtctcggtcaagcatgcgcggttgcaaatgctctgatcgccgtgtactcgaggtgtggacggatggaggatgcgaagcgggtatttgacagtatgcatccctgggatgccatctcttggaattctatgattggtggatgcttttcaaacggatggcatggtacagctgttgattttttcagcaaaatgtggtctcaaggtacggagatcagttcagtgacagtgctcgtgttctgcctgcttgtgcgggattaggttatggccttattggaaaagcggtgcatggatactccgtgaaatccggattgctttgaggccttgattctgtacaaagtgggatagatgatgctgctcttggatccaaactggtattcatgtatgtgaaatgtggggacatgggctctgcaagaagggtgcttgatgcgatgtcatcaaaaggtaatgtgcacgtatggaatctgataatgggtgggtacgcaaagggatggcttggtggctcatggatatatagtaaaattgggtttcagggcagagtgtgcagtttgcaatgcactgatatcattctatgcaaagtccaacatgattggcgatgcagtcttggtgttcgatataatgcctcgtcaagataccatttcttggaattatgtgattagtggatgctcttccaatggactaaacagtgaagctattgagttgttcataagaatgtggacacaaggacatgagctggacttagttacattgctaagtgtttttgccagcttgtgcagtcacgctattggtttgcaggaagggtggttcatggttactcggttaaaactggattgattggggaaacatctcttgcaaactggattcattgttcatgttgctaatgctagcaatttttcctaccagatttcttggtatatcttttaggaagcctgctaaatctacattggaacttatctttaaaatttgtatgtcatcaagtccaattttatttgtgcaataaaagcagggaggcttttatctataacattttccttttatcttttctgtagagatttttctcacaactagctgttaggcaacttctatgttttcctgtagtgtatgtgcgcaaccatgggtcggttcctagggcggactggtccacctggaccgtggaggtggcggggctcgtgagacgcctcgccaagttgaccatggagcagctagtgacggagttcgagaccttggaactccccgtgacgctggtatgcgtggccaaccgacacaaggagcataacatggtgtgccaaaaggtgggcttcaactagccccgacgccatctccatgtccatgcggtgcggcacgcgcctctacgacgtgttgtgtcactgcggtgtcatgggcaccacggatgacgttgtcaacgtgtgcttcaatactgattctttagaaatactttgtgccatattataatattggttgcacattagtcc

SEQ ID NO: 30845 - DNA, 1321 bp, Zea mays
  Clone ID: UC-ZMFLB73090H01_FLI
ctctcacttccacactcctactcctccccgcccccgtcgccttccgccgccgtcttttgcgctaacgcttcgcctttcgatcccctttctgacttcttatagcatcatcccaagtcctcgcccggactccgcagattctctggttgctacgagttcttcgcctggtttttgggcaaggccaaaatttctgatttttttccaccgccgcaaacccctttgctgtgccataccgccattccattcctaagctgggcgtgggcgggtgaagaaaggaagcgaggccggctgtttcgctgaaaccccgccgcctttttttccttttcttttctggacctgattgaagaaccgtagcagattaggggagggaggagcggcggcggccggtcggtcggtcagtatgattcacctgctgttcctcgtgctgttcgcggagggcgcggtagcgctgctcctcatggtgaaggtcgggccgctgcgggagctggcgatgcgcgtcgtggaccaggtgaagacgggcaagggcccggcaaccgtcaagacgctggcatgcacgctctcggtcatcctcatgtccaacgtcgccagcatcctcaagatccagaatcgtgggctcaagctcggcaccgtcagccccatggaccaggtgctctggagaacgcacctcctcgaggcatccctcatcggatacacgctattccttgcatttgtaatcgaccggctgcaccactacctccagaagctgatgacgttgaggaaaacatccagcacgtccagggaggaggtcgagaaacttcagatggagaaccggtcgctccgcgaaaaggaggagaaatcctccggtgaaacgaagaggcttcagcgagaggttgtgaggctgaacgagagcatgaagaagctgaagtccgaggccaaggagcatgagcggaaggcatcggtagcggaggcccatgtcaatgcgctgcagaagcagtcggaggagctgctcctggagtacgaccggttgctggaagacaaccagatcctgcagacgcagcttcttagcagaggctaagctatgagctggtacatgctgcagcttcagttgtttgttagcaaggttcttaccagatggttctgagtgatgacatgcagagcggttcttggcgttcctgacttaattatgatcttgttgatgtctggatgcagcgtgtactttagactttcatgtttcttcctttctggatggatgtaggtaggtacatgatgtaagagccaatggatggattgtaggtacatgatgtaagagccaatgaattgtgatttaattatagaaggtcagact

SEQ ID NO: 30846 - DNA, 1574 bp, Zea mays
  Clone ID: UC-ZMFLB73091B02_FLI
ctttcccttccggcagtggcctcgattcgcatctccttttcccgtccatgcgcgcgccggcgggcggtgccagtgccaccgcgctcgcggcggccatgaacattaagcagccgctgcacggcgcatcgacgctgttcgcgctgctctccctctcgctgctcctcctccgcctgctcctccggctccgcctggccgccttccgcgacgcggcgctgtcgctccacctgctggcgcgcctccgcctccgccccgtcctcctctgcctcccgtcagcctgccacgacggcggcgccggcgccggcgccaccacgctgcgcgtctggtgccccgccgccccatcctccaagccgccgctgctcctcctccacggcttcggcggggacgccaagtggacgtgggcgcgcaacctcccgcgcctgtcccgccacttccacgtgtacgtgccggacctcgtgttcttcggcgcgcagtcccggtccgcgtcgccgctgcgctccgtggcgttccaggcccgctgcgccgccgaggccatgcgcctcctcggcgtgccccgctacgacgtcgcggggatcagctacggcggcttcgtcgcctaccggatggccgccgccgaggccagggacgccgtgggcaggctcgtcatcatgaccaccggcgtcgcggccacgcccggggagatgcgggcgatggcggcgcgcgaggaccgcaccgtcgaggatgcgctgctgccggacaccgccgaggggctgcgcttcctcgtaagacgctccatgcatcgccccccgccttggatgccggacttcgtgcttgacgacttcatccagctcatgtacgtggaccagaaaagggaaagggcagagttgctgcacgaactgctcaagaccggagctggcttcgaccccctcccggttcttacccaggaaacactgatcatctggggcgacaaagaccaggtgttccccgtcgacctcggccacaggctgcacaggcttctgggcgagaggtccaggctagagatcgtcagggacgcagggcacgcgctgcagctggagggcgccgaccacgtcaaccgctccatcaagtcgttcctcctggacgagcgggtcggcccgggagccggcgcgggccgcaagtaggacgaggccttctcccgtccaggcccacaaccaaacggaggcctgctcgcaggtgcctgcgtacttgcgttgcagagctgcaacagtgcgaacgccagctgtagttaagcagcggagcggcaatgacctgcacgcacgcagacgcccccaccgccccgcaatcatgcagcgctggggctactggttacaaaagtacagagaagcgtcgctccggactagtttgttttgtacaataatgtctgaaagaacgagcttgtgcggccgaaattcggagagctgtctttatctggtgcgcacagtctgtctctttgtttcttcatgctcagcctcatgagataacgatatatttatgacagctccaacaataatttgtaagctaaattcaagcattttattttatatttcaataaagaaagggagaaaagctacctcctgatc

SEQ ID NO: 30847 - DNA, 1821 bp, Zea mays
  Clone ID: UC-ZMFLB73091B09_FLI
cgaatattcacatgctatgggaaacagtaatgggaatattgatgcgtattggatggccatagacaacacttttggactccaaggaggttttatatgggactgggctgatcagggtttactgaaggaggactcagatgggtctaaattttgggcatatggcggcgactttggagatactccaaatgactccaatttttgcctcaatggcattgtgtggcctgatcggacgattcacccagctcttcatgaagtaaaataccttcaccagcctatcaaaatatcatcagcagataatatgcttaagattgaaaatggacacttttttgagacaacagaagctttggacttcagttgggttcttcatggagatggttgtgtcttgggctctggtccattgaatattccaactttggcaccacaaactagtcagctcatcaacatggaatcatcaccttggtttgccctttggagtgcctgtgcagcaaaagaagtatttttgtctgtgaatgtgaaacaaaggcatgaaacacgatgggctagctggtcatctcttggcttcagcacaactgtgtttgcctcagaaaaatggctttgtccccagcgtgatagcattgtccagtagccctttggtctgtgaacgcattggtgataatgtaaccatctgcaagaataatgcctggaaaattaaagtaaacagtcagttgggaacaatcgacagctggaaggtcaacgacgttgagcttatgagcaaggggatactcccatgcttttggcgcgcaccaactgacaacgacaaaggaggtttcttcaccaagccatatgactcgcgatggagagaagccttcctcgacaatgtctcgttccacagcagccagttctctgtcaaggagttgccggacaacaccgtggagttctccaccctctactacggtgttcccgggcacctacccaagcctgacgacgaagcctccgagtccattctcttccgggtgaagatggtatgccggatccacgggtcaggcgacgtggttctcgactacgaggtaaaccccaggagcgacctccctccccttccccgggtgggcgtcgtgttcagcgccgggaggtccctgagccacgtcacgtggtacgggcgcgggcccttcgagtgctacccggaccgcaaggcggcggcgcacgtcggcgtgtacgagagcagcgtggaggagctgcacgtgccgtacattgcccccgtggagtgcggcgggcgggcggacgtcaggtgggtggcactccgcgacgccggcgggctcggcctgtacgcgtcggcgcacggcggctccccgccgatgcagatgagcgcgagctactacggcgccgcggagctggacagggcaacgcacgtccacaggctggtgaagggggacgacatcgaggtgcatcttgaccacaggcacatggggctgggcggcgacgacagctggtcgccgtgcgtgcacgagcagtacctgctgccgccgacgcggtacgccttctccctgcggctctgccccctgctgccgtcgtcgtcgtgccatgacatctacaggtctcagctccccagctgatggtgccgtgtgccggagacccgtcgacgtcgagccttgggaaacaacaatgaacgcaatggcctggccagtgaatgaaagtatataatattgtaataaagcagagacgtattagctcctgcaacggcctcgcgatcgcctggatatgtctatgctgagggggtgtttagttaactaataacctaactacatatggcgccaagttactcttaataaataactattactaactaat

SEQ ID NO: 30848 - DNA, 1771 bp, Zea mays
  Clone ID: UC-ZMFLB73091C12_FLI
tgcccacagaaattgcgcccggccgccccccattcaccttcaaaaaaggagccaggcttcccatcaacgagggtgtcggccatctgagcagctcccctgcccctcgcagcggctactctacaggtctagcgactctttcgccatccatagagggaggaggcgcggcggagatggtgggcggtggcggcggcgggccgctgcggcgggtgggcaagtacgaggtgggacgcaccatcgaggaaggcaccttcgccaaggtcaagttcgcgcagaacaccgagaccggggaaagcgtcgccatgaaggtgctcgaccgctcctccatcctcaagaacaagatggccgaacagattaagagagaaatatccataatgaagcttgtcaggcatcccaatgtcgttaggctacacgaggttttggcaagccggaagaagatatttataattctggagttcatcactggcggcgagctattcgataaaattattcgtcatgggagactcagtgaagcagatgcacgcagatactttcagcaacttattgatggtgttgatttttgtcacaagaaaggagtctaccatcgagacttaaagcctgaaaatctcctccttgattcccaaggcaatcttaaaatttcagactttggactgagtgcatggcctgctcagggatctttccttctacgtacaacctgtgggactccgaactatgttgccccagaggttctcagtcataagggatataatggcgcacttgctgatacatggtcatgtggagtaattttatatgtattgttagcaggttatcttccatttgatgaagtggacctgactaccctttatggaaagattgagagtgcagaatattcattcccagcctggttttcaggtggtgcgaaatcactgattcgtagaattcttgacccaaatccagagacacgaatcaggatagaagagatcagaagtgatgaatggtttcagaaaaattatgaacctatcaaagaaatagaaaatgaggaagtcaatctcgatgatgtcaatgcagcttttgatgatcctgaggacgataatgaggatgcttttgaagatgaaacaggtcctctaacacttaatgcattcgacctaatcattctttcgcaaggattgaatcttgcagcgctctttgaccgcagacaggactgtgacaagcttcaaaatagattcttatcacgcaatccagcaaaggttatcttgtcaagcatggaggttgttgcgcaatcaatgggatttaagacacacattcgcaattataagatgagggtggaaggtctaaatgccgacaagactagccatctctcagttatggttgaagttttcgaagttgctccatcaatcttcatggtagaactacaaagagcagcaggagatacttcagagtataacacgttcgtaaataactactgcagcaaattagatgatatcatctggaaatttccaactgagaagggaaaatcgaggataccccggttatcaaagtctcattcataatctagtgctgtgtgttatcaattactatggacttaagtggatatatttgcagagtgtatcgcaattggattatgatattctaagtgtagctcttcgagtagtatatgtttgtatattcagagtccccatgtacaaagaggccgttttaattgaggtttccgtacctcgattccctgtgcaaagttttcatcgatgttttagactacacatctgtatattttgtcgagagcatcagtttcttagac

SEQ ID NO: 30849 - DNA, 1251 bp, Zea mays
  Clone ID: UC-ZMFLB73091E02_FLI
cgtcagtgcaactgaagcccaactccgccgctaagcctcaagcgaccgcgacgcagagccatggccgccacgaggagcacgacggcggtgccggagctggccctgccctccgggaacgcgaggccagtgccggtgattggcctggggacagcggtaatgttccagccgccggagactaccaaggacgcggtgcttgcggccatcgagctgggctaccgccacttcgacaccgcctccttgtacgggacggagaagccgctcggcgagggcgtcgcggaggcggtgcggcgcggcctcatcgagtctcgggaggaggtgttcgtcacgtccaagctgtggtgcacgcagtgccacccggacctcgtcgtcccctccctccggcagaccttggaaaacctgcagatggattacctggacctgtacctaatccacatgcccgtctgccagaagcccgggccgcctgtgttcccggccaggagagaggacgcccgcccgttcgacttcaagggcgtgtggcaggcgatggaggagtgccagcggctagggctcgctagggccatcggcgtcagcaacttcaggaccaagcacctcgacaagatgatgccttttgccaccatcacccctgcggtgaaccaggtggaggtgaacccggtttgccagcagctgaagctgagggggtactgcgccgagaagggcatccacgtccaggcgttctcgccgttgggaggccagagctgggcggcggaaagaaacgccgtgctcgagtccgaggtcctcgcggagatagccaaggcgagagggaagaccgtggcgcaggtgtcgttgagatgggtatttgagcaaggggtgagttttgtcgttaagacctacaaaaaggagaggcttaaggaaaacctcgagatcttcgactgggagttgactgacgaggacagggtcaagatcagccggatcccgcagaagaagctttctggcttctcattcatgttcaagccggaaggtgagttcacatcggttgatgtctcggagatcaatcctatagaggagtaggcgctaaagaaatgccttgattctcaataagccaatttcgcttgatgtagtacctgtatatatttgaataaggcagcattgactgtccgttgttgaactcaatcgtttttttacatccgaaatcctgtcatgtaaatcagtataaaaggacgaattttttgggaactccctctgtctctggttcataacttcatatacatattc

SEQ ID NO: 30850 - DNA, 1387 bp, Zea mays
  Clone ID: UC-ZMFLB73091F05_FLI
gtgctggctccacccggcgcgctaccgcacccagccctgcaaggacggcacggcctgccgccgccgggtctgcttcttcgcgcacaccgcggaccagctgcgcgtgctcccgcccacgcagcagcagcagtccagccccaggggcgccgcctgctcttccccgctcgccgagtcctacgacggctccccgctccggcgccaggcgttcgagagctacctcaccaagagcatcatgtgctcgtcgccgaccagcaccctcctgtcgccgcccaagtcgcccccgtcggagtccccgccattgtcgcccgacttccgccgtgggtgctggccgggcgccgggtcccccgtcaacgacgtcctcgcctcgctccgccagctccgcctcagcagggccaactcgtccccgtcgggcgggtggtgcggctaccctgcatccgcggtcgcgtacggatcgcctacggggggcgcgatctacggcctgtcctccaccccgagggccaccgccgcatccggctacatggccaacctggaccctctcgacgtcagcttcggcggcgacgaggagcccgtggagagggtggagtccggccgcgccctccgcgcgaaggtgttcgagcggcttagcagggagggcgctgtttccggcgacgccggtggccccgacgtcggttgggtctccgacatcatcaactgaggcggcggcgggaccctggcatggcagtggcaatggcaataacaatgggcacggagaaaggtgatggtgagccgtaacggagaaggatggtatccaaaaaaaatatttccctatatttaatttcgttcctcagttaaatccgataatccccgtgtacatatctatcaccctgtgaatattctcagttggtaagagggaggatgctaggtggtggaagtggaaggaggggtggatttgttttggggttcttgaggtagtagaaaatatccaagaaaaatagaaaaaaaaagtgtacagcagatgcagtaggcggtggcggtggttgtgtccctcttctgtgcatagggttagggtgttggtggcgaagcatggcggcggctgatgtgacgacgaaggcgggccggatttccaccacggcttggtatttctgtgattccggaacatggtagtttgatgttgtttttttttaagttagtggactagttggccattgcatcctgcttgtggattactctcccattttgttatgtaatctgttaagacatcagcattccctacagcatattttgtgtacctacatcttagtagttgccgaaatctcaatcaaaaatcacccgctattggaggtgaatttcccatgtaatcttctgctcatgtaaatggtttttttaatgaatcgatgtttatcgccct

SEQ ID NO: 30851 - DNA, 1416 bp, Zea mays
  Clone ID: UC-ZMFLB73091F09_FLI
gggcgcatgggagggaaatgacctcttatttgcttttcatctcagaaagaaaatcatccaacacttgctatgcaggctcttcttgcatcagctaagacctctctctctctaaccacttattatttgttacacttcccccaaaccaccggacgacattatgggttttcttcactgctcgtcaacctcccccagctttccgtccacaccaaaaataaaacgaatgtatcaccagatccgaaacgaacagacctaacaatgatgctaacgctgctactgccttcctaactctgcctgctaacacactacctaacaaaaggtacccaagctagtttcttcgattattaggatcaacaggactgccggcctccaaacgaaaggggggcgggggtgttgtcgacggaatcttggcggctccattcccgtccgcgtcccccctccaagtccagccggcgactggacgactcaggtacttctgtggcacactgccgcagcggcagccgcgcggcgcttctggctcgcgagcatggcgttgctccggctaatcaaggcgtcgtgatcgagaacgaagccgccagggtagtagcgaggctgggcgccgaggtcttcgagcctgaggttgagggcctggacgacgcgagcggggacaaggaccgtcgagcacgcccccgccgtcttcctcttgggctccgccgcgggcgcgccggccggcctcgggaggaacaccccggtgccgttacgctcgcgcttggcgccaggcggggtcaggaacacggcgcgcatgccggaggcaggatgcgccggcgcctggtgctgctgcggcggcggcggtggcggtggcttctggagcggaggccacgccgccgggttcaggccaagcggcgcgtcgcctccgccgcagccgacgggcttggcacaggcgctctggcgcgcgctccacgcggcgagatggcgctgcctctgcagcttcagcagctgatgctgcttcaggagatggaactgagcagcctgcatctgccgctgcgaaaccaagtgcgcgagcgggtggtagtgaccgccggcgccggcagggaccttggcggagggcggagcgatctgcggcggcggcggcggtaggcggcttccgctccccgtcgtcgccgaggaggcccgcgagcctgcgcgagagccccgccaggctgtcctcctcgtcgctctcgctcctggccgccacggccgccttctcctcctcggagaagaagtcgtcgtccaggaactcctccggcagccagaactcgtccccgaggtccgaacactccgtcgacatttttccgccggtggtggggagcagcgcccgggacctgcagcggcgggggtggacgggctggagaaggcggcgtgcttatcagcgaaaagaggtgggacgggcgagaaagagag

SEQ ID NO: 30852 - DNA, 788 bp, Zea mays
  Clone ID: UC-ZMFLB73091G01_FLI
ggctcgggaaactgaattgaaagcatgcaaatgtacacacacgagctgagctcgtaaaaggtgctacaccatcggcccagccacgggagcactctactactctctgctgccaagggcgaaccggagtatttacacgctacagcgacagcgcggaaacaacaagagcatgggggcagggcaaccgcaaaacacaaaacgagaaagggaaagcaacagcaactctactactaccgctcctatactccttttttccttttgctacgcgcacacggaaggccacacggagcttgcagcacacagccgaggcgcgcgacggccgccgaggcccggatcactcgagctccgggtagcggagcaccggcgtctcgtcggcggggaggggcacgtgggcaccagcaccccgtacagcgccggccggaaggccctcaggaaccgctccgccaggcccaggcccgggcccgacgccgcgagacggtcgtcgtccgcgcccgcgcccgcgcccccgggcagctgcgcggcctgcaggtccaggaacaccagcgccgcccgcaccagccccgccagcgccgcgatcgacaccaccgcgttgtacaccaggtaccccagcaggctgtcccgcggctccggcatgctcgagatccccatcgccgggcgagctcgggagggttcgtcggtttgggggatccgacccgtggaccgggttgcaatttccgattatttcggggtggccggcgcgaggactggcagcgggatggatggatggatggacagacagacacacacaggcg

SEQ ID NO: 30853 - DNA, 2629 bp, Zea mays
  Clone ID: UC-ZMFLB73091G06_FLI
gtccgttggaatgaggcacgaggggcccgggctgtcaattaggcatgatgctgcgggctccatggcaggagctatcttcatgtccaacagcgtcacaagggaccaatgcttccaagcaagcattttcggtctacccttggagtatcgatcctttgtcagccacatcagaaaagggatgcccttgtttctctttgactatacactgcgtaagctttacggagtctttgaggctgcctctgatggagggtttaatattaacagtgacgcacttagatcagttcggcgctcatatccttcgcaggttcgcatcaatattatttggaagtgcaagccactaagtgaggatgagttttttcctgctatagaagacaactactatcggccaaggaagttctactttgacctttcctatgagcaggttgttcggctttatgaactgtttggcaacaagagagtaggacgccctattcatgactatcaaaaaaatgagtgtttgcaaacaaaccgctcaagcaaagggatacctgacaaagaaagcttgactccagatcctcattccagtaatcaatcacgccttttggttcccaacatttccgaaatcataagatattctactcctacaagcatacacacagatttaccacttaatgttgaggcatacccaagcacgttgatgcccttgggaactgaagttaatggagccaaaattgctcccaccttcagctcccatagtgaccaaatagaacctttttctcaaagtgagtttttcccagctgcttcaatgacagatgctgtttcaactcaagtatctgccccttgctctgaaactaataaccagttggttgggcaatcacatccattaccgcacaactatccacagaatattttttctgctggatttacagcccaggacccaattgaaggatctaaatttgttgcaaaccaattgtattcattatgtcgtgattatatgcacgatggcttgttaacttctggatatggaactcaaaatcgaacttacaaagggatgaatcacttgaattcaacttgtcctccatatgacccattacatccttttttgccagtgtcaaataatttcgattatcaggctcaatgtgacatctattccaaccaaggctgccctgatacatgtaatgacatatgtgcatatgagtgtgagtgtttaagtgaagaagtggtagcagcggaggaactgaaccaacgaggtatttctacatgcccacaagttcttggatgggatgggaaagcagtatcagcaattcatcaacagaatatgtgttctactgattactttcagatttctgatcgtgatgaagactctgaaaatgatcagatgaaacatggtactcatagcaatgcttcagattcatcagatcgtgaaaatggtattgttgatccacgacatacacaacatgctgtaggaactgaaaacaacacaaaggatcagtgtagccagccaaaaaaaggtgtattttctcgcttatcagtgaggaaggaactgacttctcaagatgccactggttctacactcaaccaattggtttcttctcttgttcggaagacagaacagtggagccacaacaatagaccgattgaagatggtctcattattcctttgattggggagcaggctgactgttctcatgcagcgctgaacctgctgagtgaactagagctggataaagacgtgagcatagagccacaacttcccttcttgaacttcaagagacgcagtgaagcagggaaggtggatgcaaatttaggaaaggagatcagtgggaaaatgaagagaagaaagcttgtgcgtccttccttaggagaaaacaatgattctacaaattttggagagcagcttataggaaattgcacacaagacaagaatcaaaaccatcaggaaagtgaaaaccattttgacattgacctaaacatacctgcagcaccaatagacgacggcccagtggaggttaacagaattgcagtgtgtcctagtgttgttatcaaggtacaaacagagaaaccatatgaaatagatacaaacaaggtaaactcaaatgtgatggagacaactgaagaacatgatccatccagtgcacccacacaaaaggttatccctgattttaacatggcagacttgaacacaatggatgaatctaaacttcgcacaatcctcgagcatacatcatcattgttgcaagcacttgctgaagtaaaaaatggggagtccaacaactgtgaacaggctaagtcaagctttgaagataagaaagtaaacatggcatactctgacggggccaccaaatctgagtgcgattagcagtagctgcaaagatattgatgtttatacgctaaactggtgcccgtcagtgcatgcagtggctttatccttaatcatagtaatattttttttgggttttttttggggtgcgggtgggagtgggattggggttttatcttctggaagagggaagagtgactatccccactcgttggaacctgaaagactagccatggaaccatgatccgtctaatgcgaagatgttctttaaattttgttcatatactcttgttactgcaattttagcgacaagaaattattgaattttctgcc

SEQ ID NO: 30854 - DNA, 1595 bp, Zea mays
  Clone ID: UC-ZMFLB73091G09_FLI
gcaaaagcacttcgagtactccacaccacaccagtccagctgtccgcccccgccacttcgagttcggttggaggcttggaggcttgggcaaaaccctcctcgtcgtcgcgcgctccgcctgcaccacccgccgccgaagagctctctttcaaaaactagcaaagatggtacaatgtactcaacctcctccccagttaaagctcccagagagtaagatcacagaaccgacagatgatgagaaccaagatttgccaccaaaacctgagaaaaggactaggatgcaccacattgagaggcacagatcttgtgttgtgaccttatctgacatagaacttaatggtctgcaacctcgtcatctgcaccaacccattgagatcagcccaggaggatcacagtgttcgctccatgaagaaacacctacagatactaatgcatcacacaggcatgcaattgcagatgctgcttgggaagccctcaaaaggtcaatggtttacttcagaggccaaccaattggaactgttgccgcaatagacaagtctcagggggcagcactgaactatgaccaggttttcatgagggatttcattcctagcgcattggcttttcttatgaaaggagagcacttgattgtgaagaactttctggtagaaactgcacgccttcagtcaagggagaagatggttgaccttttcaagcttggtcagggtgtgatgcctgcaagctttaaggtgcatcatcgcaaccctactcagaagacagaaagcttactggctgattttggtgaaactgccattgggagggttgctcctgtagattctggcttatggtggattattctccttcgtgcttacaccaaatggacaggggacaattctctggctgaaagtactaactgccaaagggccatgcaccttattctcaggttgtgtctctcagaggggtgtgatacttctccagccttgctttgtgctgatggatgctccatgatagaccgaagaatgggcatatatggctacccaattgaaatccaggctctctttttcatggctatgagatgcgccctgagtctgttgaaacaagagtccgatgctgacttcgtgaaccacatcacaaaaagaatccaagctctgagctaccacttgcacagttactactggttggacttccagagacttaatgacatataccgctacaagaccgaagagtactcacagacagctctgaacaagttcaacgtgatgcccgaatcgatacctgactggatatttgacttcatgcctagccgtggtgggtacttcattggcaacgttagtcccgcgaggatggatttccgctggttctgcctaggcaacttcatcgcgattctgtcgtcgttggctaccggagagcaggctgaagcgatactggatcttgtggaggagcgctggcaagaactcatcggtgagatgccgctcaagatctgttaccctgcgatggaaaatcaggaatggcagatagtcactggatgcgacccgaagaacaccaggtggagctatcacaacggaggctcgtggccagtgctgctgtggctgctggtggcggtgagcgtgaagctg

SEQ ID NO: 30855 - DNA, 1414 bp, Zea mays
  Clone ID: UC-ZMFLB73091H02_FLI
aagaagcaaagcaagtgtctgctcactcagtcctgcgcaagagctcgctctcggagaaaaaaacgcgggaggcgataatggagggaggtgccggtgcgagcgagaaagggaaggtgctggtcacgggggcgtcgggcttcgtcggctcctggctcgtcatgaagctcctccaggccggctacaccgtccgggcgaccgtgcgcgatcccgcgaacgttgggaagacgaagccattgatggaccttcccggagcaacggagcgcctgtccatatggaaagccgacctggcggaggaaggcagcttccacgacgccatcaggggctgcaccggcgtcttccacgtcgccacgcccatggacttcctgtccaaagaccctgagaatgaggtaatcaagccgacggtggaagggatgataagcatcatgcgggcatgcaaggaggccggcaccgtgcggcgcatcgtcttcacttcctccgccgggacggtcaacctggaggagcggcagaggcccgtctacgacgaggaaagctggaccgacgtcgacttctgccgtcgcgtcaagatgaccggatggatgtacttcgtgtctaaaaccctggcggagaaggcggccctggcgtacgcggcggagcacggcctggacctggtcaccatcatcccgacgctcgtggtcggcccgttcatcagcgcgtccatgccgcccagcctcatcaccgcgctggcgctcatcacggggaacgcgccccactactcgatcctcaagcaggtgcagctcatccacctcgacgacctctgcgacgccgagatcttcctcttcgagaacccggccgcggccgggcgctacgtctgctcctcgcacgacgtcaccatccacggcctcgccgccatgctcagggataggtaccccgagtacgacgtcccgcagaggttccccgggatccaggacgacctccagccggtgcgcttctcgtccaagaagctccaggacctcgggttcaccttcaggtacaagacgctggaggacatgttcgacgccgccatccggacttgccaggagaagggcctcatccccctcgccactgccgccggaggggacggctttgcctcggtgcgcgcacccggcgagacggaggcgacgattggcgcttaagcaacaatcacccggctctccccgtcgatgatgctatcagctatctatctcttcgagctccgctgccaatacggaacttacttccatgttcaacgaattgttttatcccctggattacgtattgtttttatgttttatacccaaacaacgaatgtttctcagtattttactacagctagcccctatagtagagattctattatatgaataagctatctgtagaggctctggtgcaatatatatttcgagttatttggattact

SEQ ID NO: 30856 - DNA, 1045 bp, Zea mays
  Clone ID: UC-ZMFLB73092A04_FLI
ccgccgcagcctcgccttggctgcgcctgtcgtcgcgccgtgtcctggagtgtctcccgcgtcaccgctgttgtcctggatcctcgctggcttccgctccctccccgagtcgccctcggcacgcagtgacgacggcggcgcaatcccagactccacgtctgcctcgcgacaccccccactcccgcgtctctccaatcgcctcgcaacctcgcctcctgtcatctgcacatcggccactgactctgcagcttcgacgccgttggcagtggtagcggcagtgtctattgtgagtgaaggttacttgactatacaaatttccgtgcactacatcatttctatagtgctatgctacatgtgctaccaacacaggtcagtaaatccttttcatatattgtgtgtgctgattccatgaattctagttgctccttcagaacaggctatgttgagctcgttggcttctgctcacttcaaactgactgctcaagtgggcactcagactctccccaaagggtctgtatatggtcatgtccggtaagtttagcagatacagacgttcgctgtgcctccaggctccagcaatgaccgcgccgccgaaacgctcgtgacaagctttgtcggtgctagacgcgaagctaggcactaggctaccagagtcgggctggtccaagggagggctgcttgcatcggctggtttccatacgcgaagcagcaaccagccagcgacatcgccaggaagctggtgctggtagttgggctcgatttctactattctgatagacgtgactgtagatttggcgatcttcaatcagagatggcaaatatgaatacatttctggcgctttctgaagctatcaattggcccagtggttcctactctgcaactagcatgcactagcagcaaggacattgttgtttggactagaagaactatcctagcatgcactaccagcaaggacattgttgtttggaccggaagccccatcacatctttgtgtttcagctatacgtacacaccttttcaaatctgtgatgaatgtttcgtatt

SEQ ID NO: 30857 - DNA, 1957 bp, Zea mays
  Clone ID: UC-ZMFLB73092B08_FLI
ttcccaccaccgcgaacacctggcaatggcggcccccgccccgtcggccacctcccagatgtcctcaagcggcctcctttcttactgagctcacccaccacccgccacgcccccgactcccacgaactcctccgcctacccacccctaccctacttctctcgcccgccggacgcatctcggggctctgctccccggttctcggggccggtggatgcgaccgcgtccccgcccccgaaatcagctgcccggcgtcctcatagcgttcccgggatctaggccctgagcaatggcagcggcggtggcgccgccgctctgcacctggctcgtcgccgcctgtctctccgcggcctgcggcgatggcgagaaggagaatgaacgcaggcaccgcggtggcggcgtagggggtttcttcggctcgcgccgccgcctcggctcagggcgccgcggcgtggggcgctctggaatggccatgtctgttgccttgcatcctgaaaggacagctgtggaaaataagaaacctgatatgaaacagaggagagtggttgtcactggcatgggtgtagtgacgccactagggcatgatcctgatgaattctacaataaccttttaaggggtatcagtggaataagcgagatagaggcatttgattgttctcactatcccacgagaatcgcgggagaaatcaaatcattttcgacagatggttgggttgcaccaaagctagctaagcgaatggacaagtttatgcaatatttgataacagctggaaagaaagcattggagaatgctggaatcactgaagaagtcatgaatgagttggaaaaatcaagatgtggagtcctcattgggtctgctatgggtggcatgaaggttttcagtgatgcaattgaagctttgagggtttcatacaagaagatgaacccattctgtgtaccttttgcaactacaaacatgggttctgcgattcttgctatggatctgggttggatgggcccaaattactctatctctactgcttgtgctactagcaacttctgcattctgaatgcagctaatcatatcagaaaaggggaagctgatgttatgctttgtggtggttctgatgcaccaatcatccctattggattgggaggttttgtggcctgcagagctctttcacagagaaacagtgatccagcaaaagcttctcgaccttgggatgtggatcgtgatggatttgttatgggagaagggtctggtgtgcttgttttggaagaacttgagcatgcaaagcaaagaggtgcagaaatatatgctgaatttctaggaggaagtttcacatgcgatgcataccatatgacagaacctcatcctgaagggaaaggggttattctttgtattgaaaacgcattagcagattcaggagtaacaaaggaggacattaactatataaatgcccatgcaacatctacacagatgggtgatttgaaagaatttgaagctctcaaccgttgttttggccagaatcctcagctacgagtgaactcaacaaagtcgatgacaggccatctgctaggagctgctggtggaatagaggctgttgctgctatacaagctataaggacaggttgggtgcatccaaatctcaatttggacaatccagagaaaaccgtggatgtcaggatgctggtgggcccgcagaaggagagatgtgatgtgaaggtggcgctgtcgaactcgtttggatttggcgggcacaactcatcgattttgtttgcaccattcaagtgatagccgttgacaaatttcttgtggtgggctacacaccgtcgaactgagaccttgtataagaaagtatttaccggacgcagcaatatctcctgtactgcaagattaggaagagatccaaaaggcttagtaggatgtgtattgccccacaaccggacgaaagatggaaactggtccgaaattatgtc

SEQ ID NO: 30858 - DNA, 1523 bp, Zea mays
  Clone ID: UC-ZMFLB73092C09_FLI
ctgtagttaataggttaccacatggatacaccattgttttaaaagggaaaataatttttttgacatccttatcagctctataaaaataaaaaataaactacaataaaactgtacaatagatgtttaatttaattttatttattttatatgacgcatagcagtttttaaaaacaatgccctaaaattcttgactgacaatgactaatgcgctatagtgatggcctaatacggcacgtgcggacgtgccaagctgacacaacaagtgacaaccagcgaggcagcgaaccgcaagaacaactcccagttcgctacgcgctcaccgaacctgacgttcaggacccacaagctggtgacacattaacccaccaaatagcgtcacccaccactgttcgtcgtccgcaaaccaataatttggggagaaaattcccaattacggcgggcaaagagagtgatagagaggaaatattttttctctctctctccaatttttcacccccaattctgactcgccagcggcgccaccatctcgccggaatcctagtcgaggtgagtccccacgcaatccgcttcgtttcgccctcaattctttttaccgccgcccccaattcgagccgctccacgcggttcccccgcacggatttggtcggagactctgagctcgcccccgatcggagaatccgcgtccgggcttgctcggagcttgattctatcagcagcgccgctgaattgggccgtggagcggcctcccgagttcgtgtgcttccgtgctgaattgctgtttctggatctggtccggcaggtgttggtagcgtcgggccgtggtcgggagcccgcttgtcgcggcgagctcgaccgccgcggatcgctggagcccgtgggcggcggcggcggaggctagggtttgctgctctacccggagcagctagcgggccagatcgtccggccggcggggctgcatatattttgtgcctttcgccggcgagatatcgatgcagccgcggtcgaagaagttcggccgcgtggacacggtccagctcaaggcgcagatcgtgaggcggctggggccccagcgcgccgagctctacttccgcagcctcaccaagttcctgggctgccagctcggcagggacgagttccagaaggcctgcgctgctgcattggggaaggagaacgtcaggctgcacacatccctcgtccagtccattctccgcaacgcgtgcgtgtcggacgggccgccgccgagcgcgcaggccgccaccggaaactcgcagacgagcacggcggtgtccaatgggacgctcaccagtggcttaccgccgccggtgacgagagcgaggccgcccctgactaagtggtccggtgataagccgagcccgattgggaagtctcctctcggtcatcgtccggggactgcgcgggagttcgtgtcggctgggactgggagcaaagctttgcaggaggttgtctccgtggaggatggcgaggaggtcgaccaggcccgtggtggtagtggtagtccagtc

SEQ ID NO: 30859 - DNA, 1855 bp, Zea mays
  Clone ID: UC-ZMFLB73092D08_FLI
gacaacgcgccccaaccccaaccccaacccagcggtcccagtcccccctccgttctctctgcactctgcagctgccggtgccggccatggcgcgcgccccgagctcgtggacgccgtccctcgccatggtgctcctcgtcgtggccgccgcggccgtggtcgcgtcgtcggaggcggccagggtgcccgccgccgtcggcaactggacgggggaggagctgcgcggggccgcggcgaggcggggcggccggcgctcccggcgccgcgcgttcgagaacggcctcggccggacgccgcagatggggtggaatagctggaaccacttcggctgcgggatcaacgagaacctcatcaagcagacagctgatgcgctggtcaacaccggtctggcgaagctgggctacgagtatgtcaacatagatgattgctgggcggagtctgacagggactaccagggaagcttcgttgcaaacagacaaaccttcccctctggcatcaaggcgctcgcggactacgtgcacgccaaggggctcaagcttggcatctacagcgatgctgggacacggacgtgcagccagaaaatgccagggtcacttgaccacgaggagcaggacgtgaagacattctcgtcctggggtatcgattatctgaaatacgacaactgcaacgacgccggcaggagcgtcatggagaggtatacgaagatgagcaacgctatgaagacgtatgggaagggcatcttcttctcgctgtgcgaatgggggaggcaaaaccctgctacctgggcaggcggcatggggaacagctggagaacgaccgatgatatcgccgacaactggggcagcatgacgtctcgtgcagaccagaacgacaggtgggcttcctacgccggacctggcgggtggaacggtaagagcgctccggcacaggaagattctgagttcgtgcctaaacgctcgtgggagtttaccatttcatactagatttgtacgccattcagatcctgacatgcttgaggtgggcaacggcggcatgtccgaggcggagtaccgctctcacttcagcatctgggcgctcgccaaggtgtgctgtgctatataagaacgtttctgcgcgttgacagctagcgctacgtactactgcgacgtaaaacatgtcctgcggtttcggtttcctcactggatacgtacttggtctgccttgcccttgcgtttgtgctgttgtgcaggctccgcttctgatcgggtgcgacgtgcgggcgatgagccagcagacgatgggcatactcagcaactcggaagtcatcgccgtgaaccaagatagccaaggtgcgcagggaaagaaagtgcagtccagcaatggcttggaggtttgggctgggccgctcagcaacaacaggaaggccgtggttctctggaaccggcagggataccaggcaaccatcaccgcacagtggtcgagcatcgggctcgcttcttccactgctgtcactgctcgcgatctatgggcgcactcgtcgttctcggctcaaggccagctatcagcttcggtgccacctcacgactgcaagatgtatgtcttgacgccgaactagctcagaagacaagagcggattgttccatggcgcgtgggatgcaaccattcggtcaggattcagggaagaagagtatgcagtgcaggcaaggatttcaagagaaggaaattcgatatcatttggttatacaggatatgagtgcgaatggaggaataatttatactaatactatggaagtgtatctaaggcgccgtcaaaatgccggtgcctgtgttactggatgtttgtaacgagagttgcagcaataaaattggcttgccc

SEQ ID NO: 30860 - DNA, 1486 bp, Zea mays
  Clone ID: UC-ZMFLB73092E06_FLI
gctgcagctagtgctagccggaatgccaatggtcttatgcctatgcatgccaattttggttgcatgtcctctacagttcaatctgttgctaatgtttcaacgaccagcacatctcaagatcagtgtgatttgcaacttggatttggtgtacagaagcagcatatattttctaggcatggagagcttagaacggctacagctcgatcccctctgcctgggagcattgccaaaagaaattctgtacccactgaatcctcacagtttgagagcatggatgggcctaaatctttccccaatggaacatcgcagttcggaggctttgcaaggcctacctttgtgcctgctgcaccttctcagtttgggagcatggctcaacctaattatgtgcattcttctcaatcctctcaattcacaagcttggttcaaccgaattctgtacctcctgctgagtcctcgcagtttggaagcaaagcccaatctagttctgcaccccttgctaaaacctctcagttcaagggcatggctggaccaaattctgtacctcctgctgagccctctcagtttgggagcatgattagacctaatttggtacctcccgcatcttctcagtttttggggagcatggttcgaccaaattctgtaactccagaatcctcacagtttggaagcatgaccagaccaaactctgtacctcctgtatcgtcacagtttgttaacatgcccagtcaaaattttgtgagcgcatccgagccaactctagttttggggtacgcaccgcagattggaagtgaccctccacatcaagtccagttaggatgggatttgtccttgccaaggatggttactggcggcagcatggtcacttgtttatgtatatggtgcaacagtcagttccatcattttggccctgttgatggacagcaggctagttcttttggcttcatttgccccacctgtaaagataggatgtctggtcatcacagtatgcccagcaatggttcatggcagccttgaggtgcagtgctgtttgttaatcatctgcatttctgcatctgagggatctcgtggttttctgtacaccatgtctggcgactgttgaggacagaaaattgtccgcacaagcagaagtggtcccgcctccaagttcagtggactgtcaagggtagctgggagctggaatgtatttagttggtactagggtatgcaatgagagaagttgggtttctctactacttgtcaaagatagcaatgggagaccatgatgaattcaggccatctttttttttcttgaatccaccagttaagctggcatgtttgtcggagctatatctcaggttattttgagctctagcttcgatggggagttgacttcattattggtactgaacttaaaatgactccagtccagtgtcttgttggttgtgtaaattatttgttagctcaggtggattaggcgcctagctcttgctgtaatatttccctaaac

SEQ ID NO: 30861 - DNA, 730 bp, Zea mays
  Clone ID: UC-ZMFLB73092F04_FLI
ccggaatcgttccagctaatttatgtaagttttgataagttggaatgaattctggtctaatcctggacaaacgaacgggcccttagccgtacaataccagacgtagatagcataacgatagcacaatgcgcgattgtgccgaagtcatcagagaagagagaatcatagctgttagatgatatcaccaagtcttttgcacctacgtcttgtcagcgagaacattttgggtttcgaacaagacagacttcctctgtgtgtaaaaactttgggcatacccccctcttctcatctccattggtgagattggtgtgtacatgctattgtagttcagagttcagacagagtgacacggatatcagagcagatcataagaacgtacttgcagcgatggaactgagattattttctatattctttggccactgaatgtgcttcaaatgacagcagcagcaacattttgtatgtatcaggagaaggacgcactcctggtagctcatgtgtaccattttacaactcagctcaagatgtatgagcctgtttctttgcctgaactaagctgtcctacggcctggtagggttgagtagagccggaatattctcaaacaggtttggtgtgaaaaaaattgttgtaatctgcgagttgtgggaaaagctgttgtgggctgtgagctattaaaaaactaaaaattgtttggtcgaaaccactaaaaatcgttaaaagttcttcgat

SEQ ID NO: 30862 - DNA, 3207 bp, Zea mays
  Clone ID: UC-ZMFLB73092F09_FLI
gtaacacccctagatcaatataaggaaacataagatctccatttgctctgttttcctaaaagagaatgtacaagactacaaggtatgctgcatgtgaaattgtggaccgaagtatcatagcaaacaatataggtcacaaatgcacatgtcatgcagttgtacaaacaatagaatgttaaaaacaggctcgacagtgagacgctcgggtggagcgctacccgcccacattcgattcttgtcaagaatgaacgccagtgctgcatcgagatttatttctcagggagaatggagcatgtgtgttgcgcgtgttccaagattacttgaatagcctcatctatgtctgagtgtgtggtcagcgtaggtgtccacaggattcttaaaaatgaaaaccactgctcctggtaaagttaaaaaaacattatcccaagttcttgtgttgcatatatatttttagcctaagaagttactatggttggagtcaagtgatgagaatttggtaccaggaaaatactgtagtctggcatgctaaaatattgaattataagcaaagacactacctcagagtaattgtaaatcgatttcctgtgagctgaccaagaacaagtccctccttcacgtaactgaaaaggattagttagttgccaaaagtatcaacatttcaagactgctatatcatgattatatgtgcaactggataatactaatcacataccagaaatttccaactttaatcccaaacagccgcttgttaagagcaagcaacctacaacctactggcttgcaccttgaatacagttacctaataaaaaatacaaaagtatcaatatcactgtatgcacagttatagacagaaatgagaaactatttacacaaataagctatcaaatagtgaaaagaaggaaatgtattaaaatacatatctttgaaaactaattatgtcatctagaagacatttaagttagtaatattccatgcaatctcttgtccaaaagtgtttcattcccagacttcagtgttataggtcagtgcccgtgcgttgcaacggggccactacattacaaccttcaagtataagggatttgccacttgcaacgagctccaatgtctaggaacaatttagaagaggtaatatgactatgtgacaacgaacattacaacctggaataagtgttgactgctgtttaataagtcagcatagccctttttcattcctgtgatgagtcttgtatcatcttgtattttcaagattatactttaactgcactgatattatagttcgtttcaccgggtaacagaaggacaagcctccacgtcgatagaagcaaatcaatccatttcgtttgacaagtagaagattatctgtgttcaaccaaatggacataattagtgctgttttgcaaaagcattttggattttccagtctcaaagcattccaaaaggaagtcttggatgcttggtttgctcatgaggattgtgttctcctagcagccataggatcaggaggtaccaaaggaaatgagcaaaacatagcatacagtctcagatgctgcaggtgcacatcatgtccatttttttaatcattcaagtaatgccatttgccaattggttctaacttctttcattctgtaactgtttagtttgatgcaaataaattgcaatggtgttcgtcagagccaaacatagcagacaacactgctttagtttgatgcaaataaattgcaatggtgttcgtcatagccaacttccccaaaacaaatgtcacagaaaaatatctatacctagaacaatgatagatgtagtggtgtcactgacttcttcatcccgtgcatgacttagttcaatcatagactgcacattaacacacaaacacaattaattacatggaacttgcaacatgaatcatagacttcatatacgattaggcatatatatgtggggtctcgcaacacaaaaccatccactgtgaaggtatggatatgtggtggtcgactgataatttcataccctttctggataatttcttgtccaatttatgatttaattgaagaaatgctattcatacaggatcacatgaaaattattgaagacgacggtccaggtgcagccttctatgccagtgctaaggccatgactaatggaaatcacactttctatgtgagcaaactgatacagaggttggctagattaagtaaatatgatacaatgtatcacatgcacaggtaatggtgaaatccaaaatctgggagagccgacttctattttctgcatgctggatataccataccttttccacctatatatacttcaaaacttgttttttagtgtttcattttgtttttgtgattccaagggatctgtctcacaacaatctaaatggaccaataccagatttctatgtcaaatgccatcacttacatttctatataagctttcttgttgatcgacctacatactttaatattgctcaaaacccctctttttatgtttacttcctcttattttgtagggacctctcaagcaacaacctcaatggataaggcatattaaatacattacttcttcagcatcatgggagaaaatcttactgtcagggttcagaggatgttgtacggtacatatttaatattttctccattccttaattagtttttgtggtgtcatttgagtatgttgtgaatctctacaatattccttgtggcaatacttaggaatgaagttggttgatttgacgaagaagaaaacatttttagtcttgtggctgtgcgtctagctgttgatgcagctgatgagaagtcggctatagccgagagaatttcagtcatcctgcagaaatatgtcttcccatatgacttctttcgttgttggatttatcatcgagtggagagtggcaatacttagtctggccactacttgtgcttgccaactttgcttagcaacttttaatgaagggctttgttggtgttgcgacaaagatacatgccaagagcagtatggttgcaggtgaagcagtgagtaacatctgcgttatagtggcattcaacgttcaaagcaagaaatgtatttggtttaattattgcaagcagtgatctgaaatatgtaaattatctttatatggtctttgcaagggaacacattttctggctctataccatcagtgattagccctgtacaaattttattgaaagaaaaactaaaggaatgtttttt

SEQ ID NO: 30863 - DNA, 1716 bp, Zea mays
  Clone ID: UC-ZMFLB73092G05_FLI
cgagcggcagcggcgccgcgggactcttctcctcgccgctcgcctgctgggtgcgccatccctcgacggtgacaccgtgatattgctgtgaagttttgtggcacttcctgcatcccttatatggtattaacaaaaattttaattgtctgggtgatccatttgagcaaatggaaggcaacgatgtaccccttggaaacatgttgcaaggggttccctatgaaagtttagacttacgtggcagctctatgcaaaattatgctccaaactcaggaaaacatatcttcagcagctcccagatgccaggtactttcacaatgtctatgaccagggctacagagcctgatgactttcctgggtttcagttcaaagaacagggaaagagtgatgaccaccaccaccaacaccatagtcatcactcaaagaactgcaagagtgatggtgaggaacatgttgtggctgaagatgctactgataccccaagtggcaaaggcaagaagggctctgcatggcatcggatgaagtggacagattcaatggtaaaacttttgataacagcagtgtcttacactggagatgatcatggtgctgattccggcggtggcaggaggaacttcacaataatgcagaagaagggcaaatggaaggcgatatcgaaagttatgggagagagaggctgccatgtgtcaccgcaacagtgcgaggacaagttcaatgaccttaacaagagatacaaaaggctgacagacatccttggtaggggcactgcatgcaatgttgtggctaatccagcacttcttgatagcatgactcatctttcagataagatgaaagacgatgcaaaaaagatacttagctcaaagcacctattttatgaggagatgtgttcctaccacaacaacaaccgtgtaaatttgcctgaagatcatgcacttcagcattcactactgcttgcccttagatgtaaagaggagcatgatcctcagagggatccaagtggagatgctgatgaatacgatcaaagtgctgattctgattatgaggagaatgacgacgatcaacatcctgtgcatataaacatgagggagccctcaatgcacaaaaggaagcgccacagtgatgtggctttggtcacatcaagttctcatgaaggcagtgagaggtctgatccccatgctgtcacagtggacatcaacaaggctttcacagatgcaaccaacatggttttgttgcaacaagacttggcttcacaagccatagagattcagaaacgtcgcttgcagattgaagcaaaggaactggaactcacaaagcaacgtcttaagtgggagcggttcaggaagaagaaggacagagagatagaaaggattgcattggagaatgaacatatgatgattgagaacaaacgcttggagcttgagctgagacataaggagttagagctagagctgaagctgaaagacaaggggaaccatccgtaacttttgcttgaccaacactacagtatgtaagatggtaaacaagttgcggttgagcttctggaagagagctggtagattagagtagactctgacaaccattcctgtgcgtatgactttgttctgtcttgtcagatgtacttgctgggcctcctgcttgtagcaccgcctctgcagcagatctataagactgtgatttccaacttgccatttttttttattcagcatgtatgtcatggtg

SEQ ID NO: 30864 - DNA, 1496 bp, Zea mays
  Clone ID: UC-ZMFLB73092G10_FLI
tgatagccagatctgcgacgtcacggctgtcgccagtgatcgccattcgccaccctctccgttccattccaatccgttcagcggtcagcggaacatgatacggtctgcgcccttccaagcaatcacatcttcttccccgttataaatcgctcactcgctatcgtcggctacctgtatcctggcgacacccaacagcctgcttgccgcgcttgcattgaggggagttcggggagcggccggtgcggaaggaatcgacacagagttcagttcacatggctgctgaatcagagaacggcaactgcaaagcttgggcagcgagagatccttctggagttctctcaccacacagttttaaccgcagagcagtgcaaagcggcgatgtttcgctgaagatcatatactgtggagtctgttatgcagacgttgcttggacgcggaataagctcaatgattcaaaatatcctttggttcctgggcatgagatagctggagttgtaactcaggttggtgcagatgtcaaaggctttaaagtgggtgaccatgtaggtgttggaacatatgtgaactcttgccgtgattgtgagaactgcaatatctctctagacaaccattgcccaaaagcagtttatactttcaatggcattgatacagatggaactgtcacaaaggggggttactccactcacattgtagtccatgaaaggtattgcttcaaaatacccgatggctaccctttggcgaaggcagcacctcttctgtgtgctggaataaccgtgtatactccaatgatgcgacacaacatgaaccaacctggaaagtcacttggggtcattggtcttggtggtctgggtcacatggctgtgaaatttggtaaagcatttggtcttaaggtcacagttttcagtacaagtgaatcaaagagagatgaagccatcaacctccttggagcagataattttgttatatcatcagacacacagcaaatggagtccctgaagaactccctgcacttcataattgacactgcttccggtgaccatccatttgatccgtatttctctctccttaaggttggtggtgtgatgacattggtaggttttccaagtgagatcaaaatgcatcctgcaagccttatacttggtgcgcggaccttgtctggcagtgttgttggaggtataaaagacatccaagaaatggttaacttctgtgcagccaacaatatctatccggagattgagatcattaagatagattatatcaacgaggctctcgcgaggcttgttaatcgagatgtgaaataccgctttgtaatcgacatcgagaactccttcaagtagcgtgctagtgcacatgctctcgtctttctgttagtgttcaacagttcaagagctattacaaatgtgagtcatgccaaataaacttgatgtaaacaaccataattgaacagcaaggggaaacaggtatattgtgataatgaagtcgctctatgaatattc

SEQ ID NO: 30865 - DNA, 2178 bp, Zea mays
  Clone ID: UC-ZMFLB73092G12_FLI
ggttgccattctagaaatgcatgcagtgccattcgcattcccggtgacccaccgccgaagcagcgccgacgacgcgagggccgccggggaggtttaagtcgggcgcgtcttcttccgccgctgccccgacatctccctctctcgctggtgcgagaagcgcgcgtcaagcaagcaaggagcgtcgtgtctagctagctgagcacctggttttggagcatggaggacaacggtgccgccgccgccgccgccgctcccgcgacgagcatgcctgccgagaagcgtgtggcggtcatccagggggacgcgccgccggagccggcggcggggctactgccctgcgggccgaggaagacggggctccacctcttcgtcatgaacatcaggagcgtcttcaagctggacgggcttgggtcggaggtgctgcgcatcgcggtgcccgcgtcgcttgcgttggcggcggatccgctcgcctctttggtggacacggcgttcatcggccgtttaggttcggtggagatcgccgccgttggcgtttcgatcgccatatttaaccaagtctccaaggtctgcatctaccctctcgttagcgtcacaacgtcgttcgtcgcggaggaagacgcgatcatcagtaaggccgtccgaggaaacagcagccaggaggaggacgtggagaaagcctcccacgtgggctttgatccggagaccagcaatctgcatgcatctggccctgcaggtatggcagaatgcgtgaactcgtgtatccctacggagtgcgcagcagatccctctggcaggcaagggcggtgcgagaagaggtacgtgccgtcggtcacgtcggcgctaatagtcggttccattctcggcctgcttcaggccgtcttcctggtcctttcggccagattcgtgctcaacatcatgggtgttaagtccggatccccgatgcaagggcctgcggtgcgctacctaacgataaggtcccttggtgcccccgctgtgctgctgtctctggccatgcaaggggttttccgggggttcaaggacaccaagacaccgttatacgctactgtggttggcgacgcggcgaacatcatactggacccgattttgatgtttgtttgccatatgggcgtcactggtgcggctattgctcatgttgtttctcagtacatgataacgttgatactgctgtgccggctcgtccagcgagttcacgttatcccacccagcattaaatctctgaaatttgggaggtttcttggatgtggattcctgctgctcgcaagggttgtcgcggtgacgttctgcgtcacgctggcggcgtccctggccgctcgccatggacccaccgtcatggcaggcttccagatctgctgccagctctggctggccacgtctcttctcgccgatggattggccgtggcaggacaggcggtgcttgcaagcgcgttcgccaagaacgacagtaagaaggtcgctgccgcgacatcccgtgtgttgcagctgagcattgtcctgggcatgggtctcaccgtcgtgctgggacttgctatgaggttcggggctggcattttcacaagcgacgtgcccgtgatccaagtcattcacagaggcatcccgtttgtcgccgggacgcagaccatcaattccctggccttcgtgtttgatggcatcaactttggagcgtcagactacagatactctgcttactccatggttgctgttgcgtctgtgtcgataccatgcctgctgtacctttctgcgcataacggattcatcggtatatggatcgcattgacgatctacatgagtctgaggaccatagctagcacctggaggatgggggcagcgaggggaccatggacgtttctccggaactgatgatggattggcttggaactgatgatctgcggcacactgctgacagataaggctgcgccgcgctgcgcatgcgcctctcatgtagcatcagcgaagtatagtacgtgttctgctggtgtttaaagcttcggatatcggaggtagatgtagctatgggactatcccctcctgatcgtctgacttgtggccttgcgtggagagtttacgttgctccgttgatttatgttgtatcatgccaggatgtcagtttaataccatacatcggtaaagtgtctctctagtaactccattcttttctcc

SEQ ID NO: 30866 - DNA, 698 bp, Zea mays
  Clone ID: UC-ZMFLB73093A10_FLI
cctgttggtgcagccccgacagtgcaacaccatcaaagcagtcctataggtgcagtcccaccaaagcatcctcgacggtgcatcactacgagtttagcccacccagtcccaccaaggaatgagcccccctctcgcattcaacatgatgaacttgttggaaaggatgtaatattatatgccattattggacctgagcaacctgtggctaagggaacaattgtttcaactaatcctaacactttgctgggaggtgtgcctcttgggaaagaatattgtgaagttattgtgaacactgtattgaaaagggatgccattttgccttgtccttatggttatgtagagacgatggccgatgctcatcaaatgtcagttgcttggctttataagaggatgaagattagcaaggcatcaggatcaccccaaggtattggaggtggatggcactagaggcaagctgcagttggacaaacaagagactgacagagcattttgtagacaatgagtcctgatttgtagctaaacatgtcatgacatggcattgctatatgtaggattttttgtttgagactcagagatgaatcattttgtagattgagtcctgattttggttagctaaacatgtaacagctgctatcatgaatcctattttgttgtagctaaacatataatggctgctatcatgaatcctattttgttgt

SEQ ID NO: 30867 - DNA, 800 bp, Zea mays
  Clone ID: UC-ZMFLB73093C10_FLI
gtgccaagccgtcgctgtcgactttacttccccaccctcaactcttcttttcccctctccctcccctcgccgtcgctgtcgtcgccgtccgtgctagccatggatctaggcgctcccgcccgacggcgcctaccgatccgcctcttgctggtgtcgctcaccgtcctcgtggtcctcaccgcgcgctccagtgccgaagtcatcaccctcaccgaagagaccttctccgacaagataaaggagaaggacacggtgtggtttgtgcaattctgcgtcccctggtgtaaacactgcaagaaccttggaacactatgggaggacctgggaaaggttatggaaggtgcggatgaaattgagattgggcaagttgactgtggtgtcagcaaaccagtatgctcaaaggtcgatatacactcctacccaacattcaaggtgttttatgaaggcgaagaagtagtaaaatataaaggacctagggatgtggaatcgctgaagaacttcgtgttgaatgaagctgagaaagcaggcgaggcaaagcttgaagctgattgaggcaggggagtttcagcaagcatgtggcgagtggcgtagacaaggaacaatgctttgcaacattgtcttctatcctgtcatttacaaagccagtttacaggaaagaaatgaccttatgagctcgtatcagagtattcctcttccaaagtaactccgaatcagttcatagaagctgtactccattccatagtttttatcacattgacaaactctccgaatcagttaatagaagctgtactccattccac

SEQ ID NO: 30868 - DNA, 503 bp, Zea mays
  Clone ID: UC-ZMFLB73093D02_FLI
gtagagtgctcttttgtgcaatcaactgtgacagagttgccattctttgcctccaaggttcggctcggcaagaatggagtggaggaagtgcttggtctgggtgagctcaacgagttcgagaagaaggggctggaaaacctcaagggcgagctcaagtcttccatcgacaagggtatcaagtttgcccacgggaactaggcaccttgcccggcttctaacaattgatgccccttgcatttttgtttgactgcctatttttcctgccccccgtatggttggggcaatgaggcgtagtggtcgataataaaacccagcggaacaaagaaaacgtgtaccagaaactgtttgcaaacaccggtgcctttttttttgtgttgaaccaccattagttgagccgtgagggaatggtgaacaagctttccacttgctcatttccgagcgcttctctttgattgtatgcatggtttggactcatgactggacttcttggcagttggcttggc

SEQ ID NO: 30869 - DNA, 1212 bp, Zea mays
  Clone ID: UC-ZMFLB73093E06_FLI
gctaagttcaccatcttcaactttggtactcagaaggatgtctccaactggggcttgttcttctgtgttgcaattggtccatgggctggtctgattattggttttgtcacagaatactacactagcaatgcatacaagttcaaagcctacaagtctcttatgttttttcttctcatcgtttctttgtgatggtgttttaataatcctaacatgtttattctatggtagtcctgtgcaagacgttgcagattcctgcagaactggtgctgtcactaatgtcattttgggtcttgctcttggatacaagtcggttatcatcccgattttcgctatcgctgttatcatctatgttagtttctccattgctgcaatgtacgacatcgcagttgccgctcttggtatgctgagcacaatcgcaactggtcttgctattgatgcttatgctcccatcagtgacaatgctggtggtattgctgagaactgatgctgttgatgctgctggcaacaccactgccgctattggaaagggatttgccattggttcagctgctcttgtgtctctggcgctttttggtgcctttgtcagcagagctggagtcaaggttgtcgatgtcctctcccccaaggttttcattggtttgattgttggagccatgcttccctattggttctctgccatgaccgtgaagagtgttggaagtgctgccctaaagatggtggaggaggtccgcagacagttcaacaccattcctgggttgatggagggaactgccaagcctgactatgcaacctattggaagatctccactgatgcttccatcaaggagatgattcctcctggtgctctggtcatgctcactcccctcattgttggaaccctcttcggtgttgagactctctatggtgttcttgctggtgccctggtttctggagtgcaaccgtcgttttctcttaacagaaaagaactataaaaacgtcgccgctgtcaaaacccagaaattacgaggcgcgaaatggaaagcttccagcagattaacgatcggctagatttgattcattccgcccgcccactacctctcacggtcacggccaatccggccaacccagagatcacgtgtcagtgctattttgtgtacaagtactacttaatatatgtttgaaaacttttttaagtgatttccaaacttgaacgggaatcattcttattctttt

SEQ ID NO: 30870 - DNA, 2254 bp, Zea mays
  Clone ID: UC-ZMFLB73093E09_FLI
aaaaagtgcatggagagtgcattgttcctatggttttgaaatatccacttacctattcaggttactgatgcacgtctgaagcttgagaatattggttcagaaattaagaacatcaaagaattagtttggggtctggatgggaaaattgattcaatggaagctaaacaggacttctcatgtgctggtgtgatgtacctctgccaattcatagagcaaaatggtggaaagcttccggatcgcctggtttgagcatttccacttatggcctgtgtagtcctatactttttgcacatttgcactcagttaatattttgagatgttttctgggcagtagtcatgtagctaggtagtatttcctttctatgtctatggcacgattattaaggtgttgcttcagcatcagagagatacaaggttgctacatgccgagttggtcatgtcccacactgtcacgtgtctcactccacgagcgcagtcggcataggagatgctggctgtgctgtcaccctgacgaccacttccttgcctccttcggcccttccatctgccccacggatgtgctgttggtctcctggcaccgctcccggcttctcgaattggctgcggcttctcgaattggctgcggacacgtgggggagatgctggttgggatgcctccatctcttgatgtttctgcgctgccaccactttcatcagtctaaactgtgacttggctgcgccgccgcagatgccagctagagttttaccatgcaatcagcatgccacgtgcgagatgggagttgttagaaactgtatcctggctgtcgcctggcagatatgccggccgccctatatggaagtattgtctgatatagatagagaggattaggggaggatctcaatcactatgattgaggatctcaatcactatgattgaggatctgattgtactctagatctttccttaggtgtagaaggcttccttttacctctcaccttcctcccctatatatacctgtacatgtgctgtctatcttcatcaatataaaaacacacgcttccaactctctcacaggagtgtctgtttggtgatattcctgggccagctcctcggcctacaagcaaagatgaatggacagagagctagagaggactatggccaaattagattgggccagaagaacttagatgagtactgaggatattttcctcacgcctttggtctggccttgttggatcatcgcaacgactgcgcgtatcgtgtttctccttggaggcattgttgttggagagccttattgggacccaagtgttgcttggagccttggatagtggatggacttaaaaattaagttgtgtggtgtagttcactgtgacatgatagcttttgtcatgttttttcctttttctcttggctgtgtacacccagtggtggagtactcgttatggcgtagcgtggcgtgcgccatacctaaacttttaaaatcgttatgcttataacaactgagggattgtggtgtggtgttaaggattttggcctcgaatgtgcgggtcttgtgttcgactcgtggagccttcagcattgcctccttttttctacctatattcagccatacctaactttttttgtgtcctccgtcactgtgtacaccctagttgtgtagagtccggaagttatctcagtgtcttgtatcgccctgatgtaattcactaaggtcagtaaaagctttcttttccaaaaaaactcaggttttttcctcacgcctagcctttctgtttcttttttctttgtcatctattgctctaagcttctcttttgtggtctcataaacttggtaagccattgactcgccacaccccttggtcgctcaagcatagggcggtagtcaattatcacgtccaccttctttaataaccatgatctatggcactgcaaatttgtatgttgacagttgatttaactttatttttttaaactgcacaggaaggctccaaagtgactacaaagcgttttggaggtcaaaagttcttgcagggattgcaactggcaatagaatcagggaattgtggcaaggacaccattgatatgctgttgaaagatgctgattcctctgataaaataaacaggacgtcccccaaatcaggcagttagtcattctttggtcgatactaggtgtggaacatatatatctatcgagattcgttgctcaatcggaatattgtaaagggttttcattacaagtaaacatataaagagctgcagccttttgcttgc

SEQ ID NO: 30871 - DNA, 556 bp, Zea mays
  Clone ID: UC-ZMFLB73093E10_FLI
cgcaagtggaaccgacggtaatttgagcgacatgatgatggaaacacccgctagcttagccccattgcagcacgaggccaggagtgactaccaacccagtgctgtgacgtctatcatgaacctcaaccttacttcatcaccggagagtagcttggagtcacctgatctccaccccttccgtatctccatgtcaggagcagatgaactccgaagcttcatgtcacttgcagcctcagagtcaactgctcagaagactattgcactttcgaggtcgacaagcggtgggtatgaagcctcgggaggcgacgacagcgaccaaataccctctagaattgtgcacaggtcgtccaattggacaaatgtcattctcaattcaggtaggcaggcaactatgtccgatctgaacttgcctaggctacacctgtagggttcataactaacaccaggctgacatagctcaaaattgtgagttgctgacttcttaattagctatgtgttgttagcctgtgagcatgcattggtcagaaccagtgttgggaacctggtttttgggttt

SEQ ID NO: 30872 - DNA, 1846 bp, Zea mays
  Clone ID: UC-ZMFLB73093G12_FLI
cacacacacaaccagatctcccccaaatccacccgtcggcacctccgcttcaagatgcagatctttgtgaaaaccctgactggcaagactatcaccctcgaggtggagtcgtctgacaccattgacaacgttaaggccaagatccaggacaaggagggcatccccccagaccagcagcggctcatctttgctggcaaacagcttgaggacgggcgcacgcttgctgactacaacatccagaaggagagcaccctccaccttgtgctccgtctcaggggaggcatgcagatctttgtgaaaaccctgaccggcaagactatcaccctcgaggtggagtcctctgacaccattgacaacgtcaaggccaagatccaggacaaggagggcatccctccagaccagcagcggctcatctttgctgggaagcagcttgaggacgggcgcacgcttgccgactacaacatccagaaggagagcaccctccacttggtgctgcgcctcaggggaggcatgcagatcttcgtgaagaccctgaccggcaagactatcaccctcgaggtggagtcttcagacaccatcgacaacgtcaaggccaagatccaggacaaggagggcattcccccagaccagcagcggctcatctttgctggaaagcagcttgaggacgggcgcacgcttgccgactacaacatccagaaggagagcaccctccacttggtgctgcgcctcaggggaggcatgcagatcttcgtgaagaccctgaccggcaagactatcaccctcgaggtggagtcttcagacaccatcgacaatgtcaaggccaagatccaggacaaggagggcatcccaccggaccagcagcgtttgatcttcgctggcaagcagctggaggatggccgcacccttgcggattacaacatccagaaggagagcaccctccacctggtgctccgtctcaggggtggtatgcagatctttgtgaagacactcactggcaagacaatcacccttgaggtggagtcttcggataccattgacaatgtcaaggccaagatccaggacaaggagggcatcccacccgaccagcagcgcctcatcttcgccggcaagcagctggaggatggccgcaccctggcggattacaacatccagaaggagagcactctccacctggtgctccgcctcaggggtggcatgcagatttttgtgaagacattgactggcaagaccatcaccttggaggtggagagctctgacaccattgacaatgtgaaggccaagatccaggacaaggagggcattcccccagaccagcagcgtctgatctttgcgggcaagcagctggaggatggccgcactctcgcggactacaacatccagaaggagagcacccttcaccttgttctccgcctcagaggtggtatgcagatctttgtaaagaccctgactggaaaaaccataaccctggaggttgagagctcggacaccatcgacaatgtgaaggcgaagatccaggacaaggagggcatccccccggaccagcagcgtctgatcttcgccggcaaacagctggaggatggccgcaccctagcagactacaacatccaaaaggagagcaccctccaccttgtgctccgtctccgtggtggtcagtaagtcatgggtcgtttaagctgccgatgtgcctgcgtcgtctggtgccctctctccatatggaggttgtcaaagtatctgctgttcgtgtcatgagtcgtgtcagtgttggtttaataatggaccggttgtgttgtgtgtgcgtactacccagaactatgacaaatcatgaataagtttgatgtttgaaatt

SEQ ID NO: 30873 - DNA, 839 bp, Zea mays
  Clone ID: UC-ZMFLB73093H06_FLI
gtggtgatggactcattttgcatgcatcaaacttatttagaacttctgtaccacctgttgtctccttcaatctcggatctcttgggttcttaacttcacataatttcgaaggtttcagacaagatttgagagatttaatccatgggaacaacacacttggaatttatataactcttagaatgcgtctaagatgtgagatctttcgcaaaggaaaatcaatgcctggtaaagtgtttgatgtgctgaatgaagttgttgttgatcgaggttccaatccatacctatcaaaaattgagtgttatgagcataaccaccttatcactaaggtgcaagctgacggggtgatagttgcaacaccaactggcagcacagcatattctactgcagcagggggatcaatggttcatccaaacgtcccatgcatgctgtttactccaatctgccctcactcactgtcatttagacctgtcatccttccggattctgcccggcttgaattaaagataccagatgaggcaagaagcaatgcatgggtttcgtttgatggcaaaaggaggcagcaactgtcaagaggagattctgttcgtatatccatgagtcagcacccactcccaactgttaataaatctgaccaaacgggtgattggttccgcagcctgatcaggtgtctcaactggaacgagagattggaccagaaggcattataggcactagaaaattttttattgtttctgtacatatgtaaatttatacacatatagttttgtttttctgccaacatgtacaacgtgtaacatcaaagaatcttgcacgtaaggagctccgtagcttactttatc

SEQ ID NO: 30874 - DNA, 2016 bp, Zea mays
  Clone ID: UC-ZMFLB73093H08_FLI
tggtatggagctcgccggagcagcctcccctcacccgccgccggaatcccacgtggcgccgccccgcccacctccgcagccgccggaagaggatttatgtgaagatagaggggacatgagtgtcaccggcgaaaagccatgcacacatcgggaatcagatgttggtcagacaaatagttgtagccttaacaattccagtgagtgtgagaatcatacacccagcaacgacgaaatatcggaaccagagtccaatttggagatggccaagactgatcagggcggcgatgtgccgagcggagagaaggtcctgaagaagccagacaagatcctgccgtgccctcgctgcaacagcatggacacgaagttctgctactacaacaactacaacatcaagcagccaaggcatttctgcaagagctgtcagaggtactggaccgcaggcggaagcatgagaaacatccccgttggtgctgggaggcgcaagagcaagagctccagcgcgagttgccgcagcgtgttgattcccgttccaggcagcagtagtgtagctaatcctggcggagaggcttccctgtttccgttgtccgtaaaagcaaaccaagcagcagttagcttcgggcctgattcccccctctgcacctccatggcctccgtgctgaagatcggaggaggaggagagcaggttaagagctgcagccctgcctcagcagcagcacagcccaggaacggagaaacccagacccagacgtgcgcaccttcttctgctgctacaacaccatcagatggtccagggaatggattgcagaaaggagcagagagcgcacaccaaaaccaaaaccaaaaccaaaacggaatcattgggcacagcaacggagtcactccagtgcatcctataccgttcttccccggaccgcctttcgtgtacccctggagtccagcatggaacggcattcccgccatggcagcggcggtgtgcgcagccccagcgacagccgaagcagcgatttcatcagaacacggcaccgcgagcagcaccgtccagtggaacgtgccaccagcgatcgtgcccgtgctgccaccgggattctgcggcccgatcccagtcccggtaatcccgccgccttccgtctggccactgatcactccctggcccaacgcagcatggagcgcgccgtggctcgggcctagcgctagcgtgccgccggggtcatctcggagcagcggcagcagcacgtgctccgacagcggctgcggctccggctcccccgtcctgggaaagcactcgagggagtcgaggccgcagggcgacgagaaggcggaacgacggtgcctgtggatccccaagacgctccggatcgacgaccctgtcgaggccgccaagagctcgatctggacgacgctcgggatcgagcctggcgaccggggcatgttcaggccgttccagtcgaagcatggacggcagcaggagctgcaagcgtccggcgccgctcgcgccctgcaggccaacccggcggctctgtcgcgctcgcagtcttttcaggagacgacgtgattactacactacagagcagagcgttgctgaaacctgtgtggcattactattcagagacgattgtatttcaacttcaaggggggaaatgagagagagagcgcgagagagagattggcctgtttggttcactacctcagttgccacactttgcctaacttttctgactaaggttagttattcaattcgaacgactaacattaggcaaagtgtggcatatttagtcataaaccaaacatgccatatatgttctgtacaatatgattggcaacataggtgctgctgctgtacaaggcagcggacaccgttactgtaactgtaaccattggaagagtgcatcctcaaacagtgtgttgtttccatgtagagcgtgcccccaacatgttgggttggaggtgatcaggtttccagcgcgtgcgtgcttggttgtacaagaataactgtcaatagcttcccttcgcttccct

SEQ ID NO: 30875 - DNA, 1342 bp, Zea mays
  Clone ID: UC-ZMFLB73094B04_FLI
gggctggatctcattctggtgctgtcctggaactctcagatggatatctcagccagtcgccaacaaccgacatgaacgcagggaagcttgtcatgtttggaggaggaaatccggagttcagtgccagcacccatgctcttctgaacaaggattgcgagcttgggcgtggtggttttggcactgtctacaagaccactcttcgagatggacaacctgttgccatcaagaagctcactgtgtcaagcttggttaaatctcaagttgaatttgagagagaagtgaagatgctgggtaagctacgccatcgcaacctagttgcgctaaagggatattactggacgccgtcgcttcagcttctcatttatgagtttgtctccgggggcaacctgcacaaacaattgcatgagtcatccaccacaaactgcctgccatggaaggagaggtttgacatagtcctcggtatagcgagaagccttgctcatctccacaggcatgatattatccactacaatctgaaatcaagcaacatcctgctcgacggatcaggcgaggcaaaggtaggagattatgggctagcgaagctgcttccaatgctggaccgctacgtcttaagtagcaaggtgcagagcgcgcttggatacatggctccagagtttgcgtgcaggaccgtgaagatcacggagaaatgcgatgtgtacgggttcggcgtccttatcctcgagatcctgacagggaggacgcccgtggagtacatggaggacgacgtggtcgtgctctgcgatgtggtgagggcggctctggacgaaggcaaggtggaagagtgcgtcgacgagaggctctgcggcaagtttccgctggaggaggccgttccgatcatgaagctgggtctggtctgcacttcccaggttccgtctaacaggccagacatgggtgaggtggtgaacatactggagctgatcagatgcccccaggacagcccggagactgaactgggttaacctcctctactacctacactggatcccggactgtttgttggtttcacttttgagatccttctttgcttggtaactgaccggacgatgaaaggtgaagcaagcgagttctactctatccagtgtgccgtcgccgaagtgtctagctagtcttctgatggttagggagttattatggaacgcctacagtagtttggtcgcctcccggggtgttgatgtgtttgacttagatcctcaccagtaaggccaagatgtatggtgtggatcctctcacatcaatcctggtggcctgtaatttcaatttattttttttagctatgcaatgtggtgcaacttgccctttttct

SEQ ID NO: 30876 - DNA, 3304 bp, Zea mays
  Clone ID: UC-ZMFLB73094D07_FLI
ggaccagctgctgcgtgcccgcctcgtccccgacgtcaccaccagcgccaagctacaaccacgcgacgacgctctccatcggatccgagtcggagtcggagctaccaagcatgctttcaagcgtatattgacgagcctgattaagcctggcggtggtgaatacggcaagttcttcagccttcccgcactaaatgatccaaggatcgataagcttccctactctatacgtgttctcctggaatcagctatccgccattgtgataacttccaagttacagagagtgatgtcgagaaaatcattgattgggagaacacatctcccaagctggctgagatacctttcaagccagcgagatgcattctaatggacaacactggagtcccagctgttgtagaccttgcagctatgcgtgatatgatgccaaagttgggttgtgatccctacaagatcaatccattgattcccgtggatgctgttattgaccatgcagtgcgagtggatgtagcagggacctatgatgcattggatagaaacgaggagttggagttccaacgcaacaaagaaaggtttgcttttcttaaatgggcatccaatgctttccacaacatgcaggttttccctcctggttcaggcactgtacaccaggtaaaccttgagtatcttgcccgagttgtcttcaacgaagatggcattctttacttcgacagcgtggttggcacagactcacacaccactatgattaatagtcttggagttgctggttggggagtaggcggtattgaagcagtcgttgcaatgcttggccagccaatgggcatggttttgcctggtgtggttggattcaagttgagtgggaagttacaggatggtgtcactactactgacattgttcttactatgacccaaatgctaaggaagcacggtgctattggcaaattcgttgaattctatggtgttggtgtgggcgagctatctttgcctgctagggccacaattgccaacatgtctccagaatatggagctaccatgggcttcttccctgtagaccaagtagcattggactatctcaaattgacaggccgaagcgatgaaactgtacatttcactatgtgcagactactcttttaccatacccgttccatcattctgatatgtatatatttttattaataaagcaaagttgtatatattgcattaaatgtgattcaggtgtcgatgattgaagcatacctgcgagctaacaaaatgtttgtggacaagcatgagcctgagacggaacgagttttctcttcatatctggagctggaccttagtgaggtggagccttgcgtttcaggccccaaaaggcctcatgatcgtgtccctttgaaggaaatgaagtcagactggcatgcttgcctggacaacgaagttggtttcaagggctatgcggtgccaaaggaacagcaaggcaaagttgtgaaattcgacttccatggaaggccagctgaaatcaagcatggcagtgttgttcttgcagcaatatgtagctccacaaacacatcaaatcccagcgtcatgattggtgctggccttgtggcaaagaaagcctgcgaattgggccttgaggtgaagccatgggtaaagacaagccttacccctggatctgtggttgctaccgagtacttgaaacatagtggccttcaagattatctgaaccagcaagggttccatgtcgctgcgcatggctgcgccacttgtgtgggcaactctggtgacctggatggatctgtatccgctgctatcacagaaaatgatatcgttgctgctgcggtgctgtcggccaaccgaaacttcgaggggcgtgtgaaccctctcactcgggctaactaccttgcctcgccgcctctggttgttgcctatgctcttgccggcactgttgacattggttttgaggaagagcccattggagttggaaagggtggcaaggaaattttcttgagggacatatggccttcaaaccaagagatcgatgaggttgtggagtccagcgtgcagactcacttgttcaagaaagtgtacgactccatcatggaacgtaaccctaggtggaaccagctgccggttccaaaggaggcactgtacccatgggacgacaggtccacctacatccgcaagcccacttacctggagggcatgtccatgacgccgcctggcccgcccacggtgacggaggcctactgcctgctcaaccttggagacagcatcaccacggaccacatctcctactcggggaagatccccgagggcacacctgcggccaagtatctgctcgagtatggtgtggagcccaagaacttcagctcctatggtggccgccgcgggaacaatgaggtggtgatgaggggagcgtttgccaatatgaggatcgtgaataagcttcttaatggcgaggctggtccctggacgatccatgttcctaccggggagaagctctacgtttacgacgcggcaatgaaatacaagtcggaaggtcatgacatggtcatcatcgctggctccgagtacggcagtggcagctctcgtgactctgctgccaagggaccaatgctactgggtgtcaagtcggtgattgcaaagagcttcgagcggatccaccggagcaacttggtggggatggggatcattcctctctgctttcaagcaggagaggatgccgattcactcggcctcaccggacgtgagcgctacaccatccacctccctaccagcaccgccgagatcagtcctggtcaggacgtgaccgtcacgacccacgacggaagatcattcacttgcactcttcgcttggacacacagcttgaggtcacatacttcaaccatggaggcatccttccctacatggtccgcaacctggcggcacaaatgaaataagttgaagtttattggtgggaataaattaaaaggtactcaatgccacgtatttggcgtatgtatgtaaataagtggcacattctaatcttcaattgtattattcgctctggcattgaggtgggtcgtagctgcattatactttctccgcaagacatgagcatggattttgttttagcaacagattatttgtactcttgattctttggttccatgctctcttcggccatctccatgtcaatttgctttgcaaacaatataatatcagcgtgccgtgcccttgtagatttccaaatggttatatgcatatgtactattgaaattgtcattttagtttgcaaacaataccaacgtgcctttgtagatttcaaaatggatatatatgttgtattc

SEQ ID NO: 30877 - DNA, 2530 bp, Zea mays
  Clone ID: UC-ZMFLB73094F03_FLI
caaaccctaacaatcatttgcagcccccggcgtctcgagaacctccaaggaaccatccacaggcgaggcctcgctccgtgcccggatctcccatttccgcccggccggcgcggcgggatcctgatactggtgctgtctgctggggtttcgtgtaggagaaggcgcgagcgcgggtgtttggatcgggggaggcaacgctggcggctcgcggcggcagcaggtgatggcggatccgcctagcggtgggggatctagggcttgtgtctgcagggagagacaggtcgaggaggcagaggcgggtctggggctcgggagaagagaacaggggaggaaggagggaggatgctgagcgtggttcgggtacacctgccgtcggagatcccgatcgtgggctgcgagatcacgccgtacgtgctactgcggcggcccgacggtgcagtctccaccaacgatgtccccgaaaccgcgcccgctgatggccagttcatgcggtacagatggtatcgcatacagagcgaccggaaagtccctatctgcagtgtgcatccaatggaacaagcaactattcagtgcctcggttgtctcaagtcaaaaatacctgttgctaagagctaccactgttcagccaaatgcttctctgatgcatggcagcaccacaaagttttgcatgaacgagctagtagtgctctaaatgaaaatggggctgaagaagaggagttatttggcagatttggcagtggtggttctggggttctaagtactgctggatctggttctttgtcaaattttggacaaagccctggtgttaataatggacctgtgcctttctatccctcaggtaccgataaaaattctggagaaacttggtttgaagttggacgctcacgaacatatacaccaactgctgatgatattggacatgcactaaagtttgagtgcgtagctgtggattcagaaaaaaagtctccaattggaccctcaacctcaatcatgacatcacgtgtaattcccgcgccaactcctacccctcgccgccttatccaagtgaatggggatgttttaggtcacttggatttagacagccaaatttcgtccttagggacattcactgtgttatcctacaatattcttgctgatgcatatgctacaactgatgcatatagctactgcccaacatgggcacttacctggaattatagaagacaaaatttgctgcgtgaaattattggttatcatgctgatatcatctgtctacaggaggtacaagtaaaccatttcgaagattttttcacctgagcttgacaaacatggatatcaggcgctttacaagaaaaggacaacagaggtgtattctggaaatcctatggccatagatggatgtgctactttttttcgtagagacaagttttcacatgttaaaaaatacgaggttgagttcaataaggctgcacagtctttaacagatgctattattcctgctgcccagaaaagagtggctttaagtcgattgattaaagacaacattgcactaattgcggttttagaagccaaatttggtaatcatggagctgaaaatcctggtaaaagacagctcctttgtgtggcaaatacacatataaatgtccatcaagacctaaaagatgtgaagctatgggaggttcataccctcctaaaaggattggagaagatagctgtcagtgcagacattcctatgttggtctgtggagatttcaactcaacccctgggaggtgcatctgcatttgaaaatcatggcaatatttaacaggttttattttttcttgaacaatggttgtctaagcacacaattgtacatttcagttctccacatgcgcttctggcaatgggcaaagttgatcagcatcatccagatctggcaatagacccccttggaattttacgccctccaagcaagttgaatcaccagcttcctttggtcagtgcatactctgcatttgcaagaatggtaggtgttggctatgatttggagcatcagcggaggacagaccctgcaacaaatgaaccactcttcacaaattgcacaagagattttactggaactattgattacatattttacacagcggactcattgacagtggattcattattggaacttttggatgaagaaagcttaagaaaagacacagctctcccatcccctgaatggtcatcagatcacatagcactcttagctgagttccggtgcaagccaagaatcagacgttgacacattagctctccaggtcttgtagaaaaggtcattgtcatcatccttggtggtggaacaccgttccatgtgggaacttgaggcagggcgggaacgcgggctctcggggaagcaaacaaccaagcagcctcaggaaggggaagaggcttgtaacatttgatttttaccctcctacatttgagctcatgatacttaagatgcccctgtgtaccattactttctatagaagaaaaatacttgagagaaatatttgaagggttataaggcccgtttttcttttt

SEQ ID NO: 30878 - DNA, 589 bp, Zea mays
  Clone ID: UC-ZMFLB73094G05_FLI
ggcgccggtaccggccagcgcgaggcagcatcagaagcaccagcagtatgcgggcgctgatgtgcgcgccgtgaagcagcaggccgcggaccaggcccgcatggcgtctgccgagcgcgcctacgcggagcgcgtccgggagctggcgcggcgggagctggagctcgcggagcgggagttcgcgcgcgccagggccatctgggagcgcgcccgcgaggaggtggagcgcgtggagcgcatgaagcagatcgcggcgaggcgcctcgtcggctcggccgcttcgtccgccgcggtgctggagatcacctgccacgcctgcatgcagcgcttccacccctagctagctagctagcccctgctgctctactccgggccagatcctagctagtactagactactagctcctacacttcttgatgacgaagtgtaagggccgggtgcccgggtgccctctctctccgcgacgccggcagttcgaccgtggatatggccaccattgctgaaactctctttcttcgtcatagcttttgtgcacctcttgtgaattaatgccgtacgtacgtgttcagcttgagttccagcgtcttc

SEQ ID NO: 30879 - DNA, 842 bp, Zea mays
  Clone ID: UC-ZMFLB73094G07_FLI
gggatgaaggggaccgggaaatggaccgtgcagcaggcggcggagcttgcggtggcagcgcccacgattgccgcgtcgctggacgggaggtacctgtcagggttgaaggacgaacgggtcgcagccgctggggtgctggaggaagaggggatgccggcgggcctgttggagacggttaatgtcgacaagaaggtgctggtggatagggtcaggcaagcgctctacgcctccaagatttgcagctatgcgcagggcatgaatctgctgcgagccaagagcgtggagaagggatggaaccttaacctcgcagagcttgccaggatctggaagggcggctgcattatccgtgcgaggttccttgataggatcaagagcgcgtacgacaggaatcctgagctcgccaatttgattgttgacagagagtttgcaagggagatggtgcagcggcagaacgcgtggaggtgggttgtggcacgcgcggtggaggctggcattagcacgccaggaatgactgctagcctttcgtacttcgatacctacagatcaagtcgattgcctgcaaatctgatccaagcgcagagggatctgtttggtgcacacacctatgagcgcattgactgtccgggttcattccacaccgaatggaccaagctggcgaggaggagcaatggcgcagccatttgaggaattggttggtatgagaagggatgttttctgctttgtgtgatttctctctgtgggttatcttttgttttactattgttatctttatgcttctagatccaagtcgagtacttcaaataatgctgtactgtatggttggcaagtgaagaacattgtgt

SEQ ID NO: 30880 - DNA, 1288 bp, Zea mays
  Clone ID: UC-ZMFLB73094G09_FLI
aatgtttcagatcagccagaaattgatggttcaagggtattctggtaatgtcagatacaaaggtggaatagatgttgctcgcaaggtcataaaggctgatggcattagggggctctacagaggatttggactctctgttatgacctatgcaccatcgagtgctgtgtggtgggcgagttatggttctagccagcgcataatttggagtgcccttggccatttgcataacaaagaagaggctcctagccaattgaaaatagttggtgttcaagcatcaggggggatttttgctggtgctgtgacctcttttgttacgactcccatagatacaatcaagaccaggctgcaggttatggataatgaaaataagccaaaagctggggaagttgttaaaagattgattgctgaagatggatggaaaggtttgtacagagggttgggtccaagatttttcagctcatcagcttggggtacctcaatgatagtatgctacgagtacctgagtatgtttcgccttcccttgccaaatttatacttatgctcctggttcctaaatcactgtatcgaatctacttgcatgtgcatctgtagtggcatatgttactgcatcccctgcaggttaattttaagtattcaggcacttctcatttagaatttagtttatatggtgtcattcaggtcagttggcatctcttgtacactgcttttgtaagttgtatcataaatcctatgtgcaatgaaaattttgactacattaaaatttattgagggaacaaggtctatttatttttgttaatttcgtgacctgcgctcagacgattttggtgttcttactgtaacattcttttgttttcccacagagcgcttgtgtgctaaagttgaagaggtctgacttctgttcttactatcctggaagttttgtattagcagaagtgaaataatgctgtatgtcgacaacattgacaccaccggaagcttcagttcttgctgacgtaggtgaaagcattcaacatggatgtttgatggtgtacttcatttgatgctagacaatagtctttacaaactttgcttctctgggctatattctcaaaaaaatggaggggcctatatttttttgctcatatgatgaatatgggttaggcggattattttaggtgagtataaacgatatcagatgtacacacttctcattcttttatacatgaaggctgttttagcgaggctgtatgattatgaccagtctggatgattgagaccagttgtaatgacacggaacgatgtttccggg

SEQ ID NO: 30881 - DNA, 1260 bp, Zea mays
  Clone ID: UC-ZMFLB73094H03_FLI
gcgagcaccaggcgagcccgtggcgtttccgttacgcccgcggcggaggaggactcgggcgccttcccctccgccatcatcttcttcgctctcgttggcgctaccgccaccaccgccgccgtcggacaactgcgccggacggtcagctggttctacactcaacttagtaggtcggaaccatatgttttctgggaagacatacctcgtcgaccaaatcgtcatcggtgcggtgaagcctgggaacgatatcaccagaggatgcgtgacaggaccgaggatcaaagggaaagagtggtagcaatcgcgttggagtcgagccagtcgacaccgaccactgtattggacgaacttgtcaatatcgacccgaacacggaacgcatacggcacatgcaagatgtatttaaaaaggagagaagtaaatgtcgggattatcgaaattgggatagccataatcccaactattatcagcatcatcaaagagatgactggtactggaacgcagaagcattttatgccaatcaaaggacaaatttcagggcaatgaccagggaagccatgacttacactatgtcacaccactattctgttttgggccttgacaggtcaaggtcagagccattttcagatgctgaaatcaagaatgctttcaggagaaaagcaatggagtatcatccagaccaaaaccaaaataataaagaggttgctgaggcaaaattcaaagaggttatggattcttacgaagcaataaaacgagaacgacgagacagaagttgctgaatgtgaaatgtgctcatggttctcaggcggagtgaggaactgttgtatataaattgtttgatgtgggacaaactaaatctagggctagtttggcatccccatttttccatgggatttctaatttcccaagggaaaatgaactaatttcccttgggaaaatgaaaaacccttgggaaaatgaggtttccaaactagcccctaaggtataaaactaccgctctgatccaaaagagcgtgtagcttagtggttacaagggccacaatgccacattagtattttatgttctggcttcgactctctgtagaagggaaaaaaatacgggagataatgaattcagatgggggacgatggcaggtcaattcagccattcttgtttctatttttctcttggggctgggggccggggcagatatagatgtactcagacgaatgaaggctattgaaagaatgcacggatgagctggacgtgtgttttagagaac

SEQ ID NO: 30882 - DNA, 963 bp, Zea mays
  Clone ID: UC-ZMFLB73094H08_FLI
taccacccgggcgccctcaaggcggcgttcgctgagttcatctccaccctcatcttcgtcttcgccggccagggctccggcatggccttcagcaagctgaccggcggcggcccgacgaccccggcgggcctgatcgcggcggcggtggcgcacgcgttcgcgctgttcgtggcggtgtcggtgggcgcgaacatctccggcgggcacgtgaacccggccgtgaccttcggcgccttcgtgggcggcaacatcaccctgttccgagggctcctgtactgggtggcgcagctgctggggtccaccgtggcgtgcttcctgctccgcttctcgacgggcgggcaggccacgggcaccttcgggctgacgggcgtgtcggtgtgggaggcgctggtgctggagatcgtgatgaccttcgggctggtgtacacggtgtacgcgacggcggtggacccgaagaagggcagcctgggcaccatcgcccccattgccatcggcttcatcgtgggggccaacatcctggtgggcggcgccttcgacggcgcgtccatgaaccccgccgtgtccttcggccccgccctcgtcagctgggagtggggctaccagtgggtgtactgggtcggccccctcatcggcggcggcctcgccggcgtcatctacgagctgctcttcatctcccacacccacgagcagctcccctccaccgactactaaaagccgaagccgaccgacccaggggtgcgcagcgcagcgcagctagcatccagcgctctctccccgctcgccgccgtttagtttctctcgtgcacgtgcatgcatcgtagactgtctcaggccgccgctgcgccggcgccgctcgcatcgtttgcttccttggaccagcagtcgtcgccgtcaggctgaactgcttgtaaccgtgaattccggacccgtttgcttctgtaagatttgtgcatttgcctgagt

SEQ ID NO: 30883 - DNA, 1792 bp, Zea mays
  Clone ID: UC-ZMFLB73095A08_FLI
gatttgtcaaacaacaatctatatgggaaacttcctacatttgcttccaagagtgcagtggtgaaaactgctggtaaccctaacataggcaaggatgctcctgcaccaacagcaggatcaggtggtagcaacgacagtctatcggggggaggcagcagcggaagcattggtaacaatgggggttcctctccatcttctgttggagtcattgtaggctcagtggctggtacagtcgttggactaggccttgttgctgcattgggattctattgttacaagaggaaacagaagcctttcggaagggtgcagagtccacatgccatggttatccatccgcgacactcaggttcagatgacatggttaaaatcacagttgcagggggaaatgctaacgatggtgctcgcgcaagcgagacatatagccaagcgagcaatggtccacgcgacatccatgttgttgaaagtggaaatatggtcatttcaatccaagttctccgcaatgtgaccaacaacttcagtgaggagaacatccttggtcgaggagggtttggcactgtttacaagggcgagcttcatgacggcacgaaaattgctgtaaagcggatggaggctggtgttatgggtaacaaggggctaaatgagtttaaatcagagattgctgttttgaccaaggtccgacaccgcaatcttgtttcactgctgggctactgccttgatggcaatgagaggattctagtgtatgagtacatgccacagggggcactgagccaacacctgtttgagtggtctgagaaaaatttgcgaccattggaatggaaaaaacgacttagcattgcacttgatgttgcaagaggcgtcgagtaccttcacagccttgcccagcagacctttatccacagagacttgaagccatcaaacatacttcttggtgatgacatgaaggccaaggtggcggactttggattggtccggcttgcaccagctgatgggaagtgtgtctccgtagagacaagacttgctggcacttttgggtaccttgcaccagagtatgcagtcactggacgagtgaccacaaaagctgatgtcttcagctttggtgtcatcttgatggaactgattacaggacgcaaggcacttgatgagactcagcccgaggatagcatgcatttagttacatggttccggaggacgcagctcaacaaggaaacattccgcaaagcaatcgaccctgtcattgacctcgacgaggaaacctacgctagtgttagtaccgtctcagagcttgctggccactgctgcgctagggaagcgcaccagaggcctgacatgggccatgctgtcaatgtgctctctaccctttcggaagtttggaaaccagccgatccggactcggatgacagctacggtatcgaccttaacatgtccctgcctcaggctctgaagagatggcaggcgttcgaggacagcagccactttgacggtgcgacctcgtcgtttgttgcgagcctggataacactcagaccagcatccctacgaggcctcctgggttcgcggactcgttcacctctgccgacggaagataaagacatttagcgctgctagtaagggtgtgcaaaaaccttatgtttccgttgaaatggaagctcgggcgatccttgttcattcttttagtctcttcacccccgccaccaatctttccatgtctctttattcgtctctgtactgccgtgtagctgctctttggtcgtgtatgctgtgatcttgtcccgaaaattgcctggaagttcgaag

SEQ ID NO: 30884 - DNA, 739 bp, Zea mays
  Clone ID: UC-ZMFLB73095B03_FLI
ggctaaagccctcaaaacatactctgcgacaacccttcatgtagaaggaaacaaacacgaactgcatgagaagatacaggacgcggtagctgcatacttcaatgccatctctatggaggttgagcacgtcccatccaaggtctctatcggtgctctcctctctaaacaagggcccaagttcctaccagtggcgaggtgtttcctctccgatgccctgaggcttgaacccacgaaccgcatggcctggttctaccttggggaggttcacaagcaggacggcaggctagctgatgccgccgactgcttccaggcggcctcaatgctcgaggactcggatcctgtagaaagtttcagatcactctgatgggtcatctgcaacagcgtgaggttccctttttttgtcggccggttttctcttcgtcttcccccattttcgaggcacagctgggcagagaccaggtgcccagctatctgtaacttgttgtatctacagttgtcagtgtgtaccaacagatgctgtaattggttgttgagtggcctacatgattcttcaaccgatagctccatcaggatcagagtggcactggaacagctatgcaatcatatgagccattattattacgtgtattacacagtatgaatatatgattataatgagtcatcagctaacttaaaactaccgttgctgatattgtaatgttttgtaatttttattcctgttttgtttatcaattaccag

SEQ ID NO: 30885 - DNA, 1188 bp, Zea mays
  Clone ID: UC-ZMFLB73095C05_FLI
gtttgtaagcaaatacatggttcatgtactcaatgctacaggtgctctacttactaccatgccatttgtgcatcaagggcaggctatcgaatggagcttcactgcttggaaaaaaatggcagacagacaacaaagaagatttcttactgtgcccaacatcggagccctaaccctgataatgttttgataattcaaactcctgctgggactttctcatcaaaaaagcttgttcatagcaatggcaaggtagctgcatcgaggctgatcaggaaagatattcccttggatttgccatcagaagttaaaatttcagagaacttatcagcggcgagatgtcgggtttatgttaggaaagatctaaagagatctagagagggaacaattgtacatcatgttagaggaccttgtcaacaccgctgggaagaaattgataatctgaatccaccaagggaagagagggatccagaatctttttgtactttcaaggagcgtttgtgttacttacagaaaacagagcatggtagagtatgttttggtagatcaggaattcataggtggggactttttgctcggagggacattcaagaaggagaaatggtccttgagtatcgtggtgagcaggtcagacgaagtgtagctgatttacgtgaagaaaaatatcgtgtgcagggcaaagattgctatcttttcaaaatcagcgaggaagtggttgttgatgccacagacaaaggaaacgtggcacgactgatcaatcattcttgcacaccaaactgctatgcaaggattatgagtgttggacatgatgaaagtcgtattgttctaatagcgaagaaaaaagtttgcgctggtgatgagctaacgtatgactacctgttcgatccagacgaggccgatgaacgcaaagtgccatgcctttgtcagactgctaactgccggaaattcatgaattagttcgcttagatgtcagaggatcactgatataatttcccccccttcttatttacccccgggttttctccctctcgatgattcatttcctggtatatgttagagctcaatttttgcttacattcgtttttagaataagtatagttagagctctcaaaatgtggagcttccattcctgtaaataccacagctgtaatcactagggacagttcatttttcaaataaaacattttttgtgct

SEQ ID NO: 30886 - DNA, 778 bp, Zea mays
  Clone ID: UC-ZMFLB73095D02_FLI
tgtggtgtcaccatgtaactgcatcaaaggattttataccattcatgtactgccttatgttttctacatccaaactgcacttgaagcttgttttggtacctgtaatttgttgggcacttgaacatgtcgctcgatttctacgtcgccattttactagctcatctttgtacaggacatacttggagcaaccttgtacatgggttgagacaaacacaaatgcagtccagtttctacgttcaaatgcagagattttgacgggctttcttttgatcctatccctgttctcgcgacagcgaaatcttatgcaaacattcatgtattggcagttgctgaagctcatgtaccattctcccttcactgccgcttatcatagagctatctggctaaaaattgggcggacaattaacccttatatccaccgttacaccccttttcttcatgacccgataaatgctggcatgagatggtggtttaggtaggttgaatgcagcactgtcagtcatgtaaagagatgcaagtatgtttatggtattattttactccaaagagaatctttgagaaaactgctgcttgggagtggtgtgattagtcccttgtgtggctttgagctgatgacaatttagtagttagcatgatcagtaactcttaactcttgtaggcttgtagctagagctagtcgagatcttagcctgtttggcatgaactgaagttaggtggggaggttattattgtgaccgaattgttttgatttttctgactattggctattgctgaccac

SEQ ID NO: 30887 - DNA, 747 bp, Zea mays
  Clone ID: UC-ZMFLB73095E01_FLI
acatgaaacccaagatatcagattttggaatggcaaggatgtttggaggggaccaaaaccaattcaacacgaatcgggtcgtcggtacatttggctacatgtctcctgaatacgcaatggaaggcatttttttcagtcaagtctgacgtctatggcttcggagtcctgatcttggagatcatcacaggaaagagggctgtgagcttccactgtcacgaggactccttgaacatcgctggatatgcgtggcggcaatggaacgaagacaatgctgcggagctgatcgatccagtgataagagcatcgtgctcagttcggcaggtgctgagatgcatccatattgcgttgctgtgcgtgcaagatcacgcagatgagcgacctgacatccccactgtcatccttatgctgagcaacgacagctcgagccttcctaatccgaggccgcctacgctgatgcttcgaggccgtgagatcgaatccagcaagtcaagcgagaaggaccggagccactccattggcactgtgacaatgacacagttgcatggaagatgaagtataacacgaaaaatatactgaatttgtgatatatttggttttttttgttctcccttcctgatgttgataatttgccatttgtcgcggattagtttcctctttttctccttttcatgacggcgaccgcgaagttgtatgaaaatcacattagcgtcatacattaagtgacaattaattttgcaaaggtgagat

SEQ ID NO: 30888 - DNA, 2468 bp, Zea mays
  Clone ID: UC-ZMFLB73111H01_FLI
gcccactcctccggctcttcttctccaccggcaccagtccaccacctcccacctcctgccaccgcgcggccccaaccaaccacaccgcagcgcagcaatggcgggcaacggcgccatcgtggagagcgacccgctgaactggggcgcggcggcggcggagctggccgggagccacctggacgaggtgaagcgcatggtggcgcaggcccggcagcccgtggtcaagatcgagggttccaccctccgcgtcggccaggtggccgccgtcgcctccgccaaggacgcgtccggcgtcgccgtcgagctcgacgaggaggcccgcccccgcgtcaaggccagcagcgagtggatcctcgactgcatcgcccacggcggcgacatctacggcgtcaccaccggcttcggcggcacctcccaccgccgcaccaaggacgggcccgcgctccaggtcgagctgctcaggcatctcaacgccggaatcttcggcaccggcagcgacgggcacacgctgccgtcggaggtcacccgcgcggcgatgctggtgcgcatcaacaccctcctccagggctactccggcatccgcttcgagatcctcgaggccatcacgaagctgctcaacaccggtgtcagcccctgcctgccgctccggggcaccatcaccgcgtcgggcgacctggtcccgctctcctacatcgccggcctcatcacgggccgccccaacgcgcaggccgtcaccgtcgacgggaggaaggtggacgccgccgaggcgttcaagatcgccggcatcgagggcggcttcttcaagctcaaccccaaggagggcctcgccatcgtcaacggcacgtccgtgggctccgcgctcgcggccaccgtgatgtacgacgccaacgtcctggccgtcctgtcggaggtcctgtccgccgtcttccgcgaggtcatgaacggcaagcccgagtacacggaccacctgacccacaagctgaagcaccacccggggtccatcgaggccgcggccatcatggagcacatcctggatggcagctccttcatgaagcaggccaagaagttgaacgagctggacccgctgctgaagcccaagcaggacaggtacgcgctccgcacgtcgccgcagtggctgggcccccagatcgaggtcatccgcgccgccaccaagtccatcgagcgcgaggtcaactccgtgaacgacaacccggtcatcgacgtccaccgcggcaaggcgctgcacggcggcaacttccagggcacccccatcggcgtgtccatggacaacgcccgcctcgccatcgccaacatcggcaagctcatgttcgcgcagttctccgagctcgtcaacgagttctacaacaacgggctcacctccaacctggccggcagccgcaaccccagcctggactacggcttcaagggcaccgagatcgccatggcctcctactgctccgagctccagtacctgggcaaccccatcaccaaccacgtgcagagcgcggagcagcacaaccaggacgtgaactccctgggcctcgtctcggccaggaagaccgccgaggcgatcgacatcctgaagctcatgtcgtccacctacatcgtggcgctgtgccaggccgtggacctgcgccacctcgaggagaacatcaaggcgtcggtgaagaacaccgtgacccaggtggccaagaaggtgctgaccatgaacccctcgggcgagctctccagcgcccgcttcagcgagaaggagctgatcagcgccatcgaccgcgaggccgtgttcacgtacgcggaggacgcggccagcggcagcctgccgctgatgcagaagctgcgcgccgtgctggtggaccacgccctcagcagcggcgacgcggagcgggagccctccgtgttctccaagatcaccaggttcgaggaggagctccgcgcggtgctgccccaggaggtggaggccgcccgcgtggcggtcgccgagggcaccgcccccgtggcgaaccggatcgcggacagccggtcgttcccgctgtaccgcttcgtgcgcgaggagctcggctgcgtgttcctgaccggcgagaggctcaagtcccccggcgaggagtgcaacaaggtgttcgtcggcatcagccagggcaagctcgtggaccccatgctcgagtgcctcaaggagtgggacggcaagccgctgcccatcaacgtcaagtaaagaacgccaaggagaagaggagggaggggaggaaatacgtggaaaaaaaaataaaacctgtacacgtgtatgtccagatcgcgtgccgtcgatcgttcttcgttgttgatttttggttgtattgatcgatccgtatgtgtgcgtgcgtgtgtggcgttgctctttcttcttttgtgtagctgccctgccaccggccgacgtgcatgccatggtggcggacagcgttttctaaggtcatatactgttgttgtgtttaagt

SEQ ID NO: 30889 - DNA, 1699 bp, Zea mays
  Clone ID: UC-ZMFLB73118H03_FLI
gcccttcaaggtcattcctggacctgatgacaagcctatgatagttgttcaatacaggggtgtggagcagcagtttgcagctgaagaaatctcctcgatggtcctcgtcaaaatgcgggagattgctgaagcctatcttggcaccacagtcaaggatgctgttgtcactgttcctgcctgctctaccgacttgcagagacaggccacatggaatgcaggagtgcttgcaaatcttaatgttatacgcatcatccctgagcccactgctgctgccttggcttatggtcttaataggaaggctgcccagattatgggtgaatatgacgttctcgtgtttgatcttggaggtggtacctttgatgtctctgttctcgcaattgaacagggtatctttgaggtcagggccacagctggtgctgctcaccttggaggtgaggacttcgacaacaggatggtaaaccactttgtcgaggaattcaagagaaagaagaagaaggacattagcggcaaccctagggctctcaggaggctaaggacagcctgcgagagagcgaagaggaccctctcctcctatttagaggcgagcattgagattgattgcttgtatgaggacatcgacttctactcagccatcacccgtgccaggtttgaggagctcaacatggatctcttcagaaagtgtatggcgattgtggaggactgcctcagtgatgcgagttatgtacgttcaattcatgatgtcgtccttgttggtggttcctctagaattccaaagatccagcagcttcttcaggagctctttgatgggaaggagctttgcaacagcatcaaccccgatgaagctgttgcctacggagctactatgcaggctgctatcttgagccgagagggtggctatgagatccagaattatctcctgttggatgctacccctctttctcttggtttggagacggatgggggcctcatgaccttcttcagcttgttcgctgcggcttgctgcggctgcaatccggctgcggctgcggcttctacagtatttttctctctatggattgcagctgcagcagtccaaacagctgcaacagtgtcggcttgcagccaaccgaacacgccccttgatgattccaaggaataccaccattccaaccaaaaaggagagggtcttatcgactgactccgacaaccagccttgtatccgaatccgagtgtacgagggtgaggggtctattactcgtgacaaccacctgttgggtgagtttgagttttcccttcttcccgcacctagcggcgttcctcagatcactgtttgcttcgatgtcgacattaacggtatcctgaatgtctccgctgaggacaaaaccactggccagaagatgaaaaaagtcatcacaaagaggtttcgtttaaagcgttaattatctgatcaataactacacgaactagacagttttatgtcctttcataggattgatcgtctccaaggtcaaggcatatagtactggtgtttgtttagacagccgatgtcttattttacttgccaagcttggtggttgccttgtaaattgagcattttatttggaggttgtaaactgtttaatacatctatgtgtctatgatcaaagcataagtgtgtacgtcattggtgtctttataccatacatgtgaagtaaaaatatcattgcagttacaggcatct

SEQ ID NO: 30890 - DNA, 1460 bp, Zea mays
  Clone ID: UC-ZMFLB73130E04_FLI
cttccgcgcctcgcgccgccccttctcggccgtcgtgcagctctcgctctcggccgcctccgccgcgggcttcctctgcctctcctcctccttccgccgcgtcggcctccgccgcctgctccacctcgacaagctccgcagcaagagcgaccgcgtccgggccagctacacggcgcgcctcgccttctccttccgcctcctcgcctccctcgtcgcgccgtgcttcgccgccgaggccgcctacaaggcctggtggtacgccacctccgccgaccgcgtccccttcttcgccaacgacgtcctcagcgacgtcctcgtctgctccctcgagatggcctcctggatgtaccgcagcgccatctacctcctcacctgcgtcctcttccgcctcatctgccacctccaggggctcaggctcgaggacttcgccggctccctgctcgaggaagtcgaggagggccgggccggcgtcgatgccgtgctaagagagcacctcgacattcgcaagcagctcaaggtcatcagccatcgcttccgtaagttcatcgtcgctgcgctgctcatcgccacggccagccagttcgcctccgtgctcctcaccacgcgacgcgactctgtcgacgacctcctcaacaccggcgagctcgcgctgtgttcagttgtgctcatgtccgggctcatcataatcctgagcagcgccgccaagatcacccaccaggcgcaggccctcaccggtcacaccaccaagtggcatgcctgctgcaccatcgagcccgtgctggaggaaggggagcccgggtccaaccagaactccatgatcgaccaagaacccgagagtgacagtgacacagaggacagcgaggagaccggcgacgaagatctcctggagaacaccaagattcatatgccgcacgcgcatgtcatctccttccagaagagacaggcactagtgacatacttggaaaacaacagagccgggatcaccgtgttcggtttcacgctggaccgttcgtacctgcacacgatatttatgctcgagtggactctgttcctgtggctgctcggtaagaccatcggcttctcgtgaagaagacggcgatgaaaagaagagaggtggcctgtgtccaacgtccggatggtcgtttttgagaggtttcgcatgtcgcggttgccctttttggggatggatttggatgtgctttgtttttcggtcatcgtggaagggctttttttcgcgtgagcctggctgttggcacgggagcgttgcgcgtgtacacctcaacgcctgtgtatgatagcgattttgtatgatgtgtgtgtataaattgtgaaccgtaattgtccttgtaaatgagcgttgtacagtcgtacactggtaatgctgttttttacaatctcgttgtaagccaacatgttgtagcgagaatttagattgtaaagataaagattcttgttttttt

SEQ ID NO: 30891 - DNA, 978 bp, Zea mays
  Clone ID: UC-ZMFLB73136H02_FLI
cgcagcctcttgttggtctcctcagccaccttggaaagccatacgtgcaggaattagcaagaaggaaggaagcatgtggaagcttgttgcagcagcagtagcgctaatcgtgctgtgcgcgtgcacgacgccagcgcgcggcggcgacgactacacggcgttcgtgtacgccgggtgctcgcaggggcggtacgaccccgggtcgcagtacgccgcggacgtggacaccgcgctgtcgtccctcgtgaacagcgcaggcttcgtggcctacgcaaactacacctcgccggggcagctggtgggcgtgtaccagtgccggtccgacctccccgcggcggtgtgcggcggctgcgtgaggtcggccgtctccaagctgtcctcgctgtgcaacgcggcggcgggcgccgcggtgcagctgcgcgcctgcttcgtgcggtacgggaacgactcgttcctggggaggcaggacacgacggtgctgttcaagaagtgcggcggcggcgagagcgcggggggcgacacgggcgtggtggccatgcgcgacgcggcgctcggcgcgctcgtggccgccgcggcacccggcgccggcgagggctcgtaccgcgccggcgcggcggggtacgtgcaggccatgtcgcagtgcgtcggggacctcggcgccaaggcctgcaccgactgcgtctccgccgcggcctcgcagctcaaggccggctgcggctacgcctccgcgggggaggtgtacctcggcaagtgctacgcgcgcttctggtccaatgccgcccccggcggcggcggtggcgaaggcaccggcactggcggtggattaccggtggtcggaggtggcggcggcaatgtcatcggcggcggcggcgtgggaggagcaggcaacggatacggatacggcggattcgtgccaaacacgtacgggcagcacgatgaatctgggaaaacccttgccatcatcatcggcctggtggc

SEQ ID NO: 30892 - DNA, 1300 bp, Zea mays
  Clone ID: UC-ZMFLB73142G05_FLI
caacgccaacgccaacccaacccaaccctaacccgatctcaccgaggacacacagacaccagaccaccggagcggaccaagtacgagcatgggcggcgccgcggaggaggcgttgcggcgggagtacgtggtcggcgaggagatcgggcgcggccggttcgggacggtccgccgctgctacgccgccgccacgggggagccgttcgcgctcaagacgacgcccaaggcggcgctgcgggcggacccgctggacctggcgctggcggagcaggagcccaaggtgcaccacctggcgtctgccgccagccgccacgtggtcgcgctgcacgccgccttcgtggacgccgacgccgtgcacctggtgctggacctgtgcgcgggcggggacctgttcgcgctcgtctccgcgcggggcgcgctcccggagcccgaggcggcggagctgatggcgcagctcgccgacgcgctcgccggctgccaccgccgcggggtcgcgcaccgcgacgtcaagcccgacaacctcctcttcgacgccgccgccggcggcgcgctcaggctcggggacttcggctccgccgcctggttcggggacggcaggcccatgacggggctggtcgggacgccctactacgtcgcgcccgaggtggtggccggcagggagtacaccgagaaggtggacgtctggagcgccggggtcgtgctctacatgatgctctccgggaccgtgcccttctccggcgccaccgcgggggagatcttccaggccgtgctccgcgggaacctgcgcttccctccgcgcgccttcgccgccgtctcgcccgaggccaaggacctcctgcgccgcatgctctgcagggacgtctggcgcaggctctccgccgagcaagtcctgagtcacccatggattgtgactcgcggcggaagtgtgcctggcggtagactggtttagatgctccgcgccgcatccgatgaatctccatccgaagtgtacatagtggcgtcctccatccaatccaagaggagtagagaaggaccttttgctgttgatctcttcgctatggttctggcaaatgatcgtgaatttggacactagtgctgtagttggttaccagtagcacgcagaaagaagtaatcgttaggctaagcagggatttaggagggctgcctcttcctgggtttgctctgttctgcagtaatcctgtgctcgtcttagcttgtttgcattgcaacccaaacccatgtatgtgtatagcacagccttcttatggctgaggaagagacgactagctctgttcaggag

SEQ ID NO: 30893 - DNA, 1903 bp, Zea mays
  Clone ID: UC-ZMFLB73143D12_FLI
cacggtctcgtctcgtctcgtctcgtctccctctctctcgtccggtcctccctccccttcctgaggcgttccctctctctcctcccctttcctctgctggtctctactctcttgtcatcgcacccgtctccccgctctgactccgtcccgagcggccgactccgcccgcgccgccgccgccgccgcctcgtcccgatcgacccccgaatcgccggaaaccgtggacttcgcgaggttgtgtctttacctccgagcggtgtagggaatataacagggtgacagctgaattgcagaaaaaaggaggacatttggttgttgcatgatggtggaaggccccaatttcgctggcctgattggtggtcatgacaatggtgggaatttttgcgacatggcatactaccggaaactcggtgagggctcaaacatgtcgatagatagccttaacagcatgcagaccagcacgcatggcggctccattgcaatgtctgtggacaatagcagtgtagggtcctgcagctcccatactaggatgctcaatcatcctggcctcaagggacctgttgttggcaattactccgtcggtgggcacagtattttccgtcatggacgggtgtctcatgccttgagcgatgatgcgctagcacaggcgttgatggacccaaggtacccgactgagacactcaaagattatgaggagtggacaattgatttagccaagctccacatgggaatgccctttgcacagggcgcctttggaaagctctacaggggtacctacaatggggaagatgttgccattaagcttttggagaggccagaggctgatccagagagagctgggttaatggagcagcagtttgttcaagaagttatgatgcttgcaaccttgaggcaccagaatattgttaaatttattggagcatgcaggaagccagtggtttggtgcattgtgacggagtatgccaagggtggatcagttagacagtttctagcgaagaggcagaataggtcggttccactaaaactggcggttaagcaagcattggatgttgcaagggggatggcctatgttcatggtcttgggttcatccatagggatcttaagtcagataacctcttgatatctggtgataaatctatcaagatagctgactttggagtagctcgcattgaagtaaaaactgaggggatgacacctgaaacgggaacctaccgttggatggcaccagagatgattcagcataggccatatgaccagaaagttgatgtctacagctttggcattgtgctgtgggagctcataactggcatgctcccttttgctaacatgacagcagtgcaagctgcttttgctgtggtgaacaagggtgtccgcccagctataccccaggactgcctgcccaccctcggtgagatcatgaccaggtgctgggatccaaatcctgatgtccgtccgccgttcactgaagttgtgaggatgctggagcatgctgaggtggagatcctgagcactgtccgcaaggcccgatttcggtgttgcatctcccaaccgatgaccaccgactgaatcaaacagaagagagtcgaaaagaactccatgcaagcataattgagtaaatttatcttgtgtccagacttcgctcagctgaagtagaaagcacacctgagtggctgagtgtatggccgtgtgtgtgtatactcaggtgtaagcatattgtctttgaaatattcctgccattagaaatatacctagttcgcggtttcagactcttgagatgttttagggctagcctatgccctgacgaaacatcatgcaggcttcctattcttgtaatgtcgttgtggccctgctgctttgttcatgttataaccctcctactggattatgcaaacactttgtttt

SEQ ID NO: 30894 - DNA, 1606 bp, Zea mays
  Clone ID: UC-ZMFLB73145C05_FLI
tcttgatttaatcacgggttgtgtggtcatgccggccgggtcaccccgttcttcttctcttccacgagttcaggaggtagagtgagagagaacatggaacgacaggggatggagggcaacaatcttctgcattttcttgataccccgagcgcccattacagaaggacatgcgacggatttgaggcccaacacggcggcgatgaacactctgagacatcagatactgatccggcgaatgcaagggaaatgctggaatatttgttgaaccaaccagcaaacaaaatctgtgcagactgtggctctccagatccaaaatgggtggccctgccttttggcacattcatctgcattaagtgctctggaactcatagaagtcttggtgtgcacatatcaaaggtgatttcagtgaatctggatgagtggacagatgatgaagtcaactgtttagctgaatcaggcggaaattctgttgtgaactcaagatatgaagcctttttacccgaaaacaaaaagctaaaacaagattgctcaacggaggagcgtaatgattttatcaggaaaaaataccagtttcaacagtttgtgtgtgatccacaattttcatgccctttaccacttaacagaaagcatgcaccaccagataaaaatcaccagcagcataatagcagcaagtatggttttggccatacttttaggaatagctggagaaaaaaggattcagatagcaaaagcctaaagaaaatgtcggatgtgggaatgatagaatttgttggattagtaaaggtcaatatcgtaaaaggcacagatttagctgttcgtgatgtgatgtcgagcgatccgtatgtcttgattcatctagggcaccagtccatgaaaacaaaggtgataaagaacacactgaatcctatctggaatgaaagactaatgctttcgatccctgacccaattccgcctcttaagctgcaagtatttgacaaggacacattcagctccgatgaccggatgggggaggccgaggtggacatccggccgctgattgcagcaacgaaggagcacgagaactcgaccatcaccgaatcgacagaactctacagatggtcagccagcgaagacagcaacggtgtgctcgccaaggacagcgtcatctctgttgcgagtggaaaggtcaagcaggagatcacactcaggctccagaatgtcgagcgcggtgaggtcgagatcgagatcgagtgtgtgccgctcagccagtagcagtcccatcgtgagcaggactggaagcagaaagagggaaggaatacatcatgctccattgttgtgacaaggacactgctttgcaatgcagaaagacctcagcttcacttgtttgattgctccatgcctgtaattcgcgtgcatgtgtgagatgtgtaatgtgttgtacggtagataggcaaagggaaattatctacttatattactttgatgataggcatacggttgaactgtttccagtagatttcctgacctcagttgctagctggtactaccaggatggtgaaaagatctgtatgcattttgcccatagacttggcttgctgcactggggaagacgacaatggtgaccgac

SEQ ID NO: 30895 - DNA, 1686 bp, Zea mays
  Clone ID: UC-ZMFLB73145C07_FLI
cctcacggcgctggcgccggcgccggcggcctgctgagggtcgggctcagcaggcgcggcggcgggctcgaccagcgcgcgctggcggcggccaaggccgcgaggcagcaggaggcaagccgtctcggggcctccggcggcggcgacgtccctctcgtcgactacctcaacacccagtactacggggtcgtcggcatcggcacgccgccgcagaacttcaccgtcatcttcgacaccggcagctccaacctctgggtcccctcctccagatgctacttctcgattgcctgctacctgcaccacagatacaagtcggccaagtctagcacgtacaaggcggacggcgagacctgcaagatcacctacggctccggctcgatcgccgggttcttcagcgacgacgacgtgctggtcggggacctgaccgtcaaaaaccagaagttcatcgagacaacgcgcgaaagcagcataacgttcataatcggcaagttcgacggcatcctcggtctcggataccccgagatctccgtcggcaaggctcctccgatctggcagagcatgcaggagcaggagctgctggcggaggacgtcttctccttctggctgaaccggagcccggacgcggcggcggccggcggcgagctcgtcttcggcggcgtcgaccctgcgcacttcagcgggaaccacacctacgtccccgtctcccgcaagggatactggcagttcgacatgggggaccttctcatcgacggccactccaccggtttctgcgccaaggggtgcgctgccatcgtcgactccgggacttccttgctcgctggcccaacggccataattgcccaggtgaacgaagcgatcggggcagacgggatcatcagcacggagtgcaaggaagttgtgagccagtacggagagatgatcctcgacatgctcatcgcacagacggatccacagagggtgtgcagccaggttggtctgtgcgtgttcgatggcgctcgatctgtcagcgaggggattgaatctgtcgtcgggaaagaaaacctgggctcagatgtcatgtgctcggcctgtcagatggctgtcgtgtggatagagaaccagctccgcgaaaacaagaccaaggagctcatactgcagtacgctaaccagctgtgtgagcgtctgccgagccccaacggagagtcaacagtcagctgccaggagatctccaagatgcccagccttgcgttcaccatcgcaaacaagaccttcaccctaacaccccagcagtacattgtgaagctggagcaaggaggccaaaccgtctgcatcagtgggttcatggcgtatgacgtgccaccgccgcgtggtcctctctggattcttggggacgtcttcatgggagcttaccacacggtgttcgacttcggcaacgacaggattggcttcgcggaatctgcatgagtgtggagagcactctcatctttataaagacgataccctatgtattagggatgtgtagtttactgtctatccactacatgccaacagtacgctgcaaataaatcggtggccaaaattgctgaaaccagaaacgtgaacagtactgctttctttgtttctggagaagagcaaatggatgcttcaagacatgcatgtccgatgtgtattgagaaatagagcgacgagtgctgctcgatcgtcttg

SEQ ID NO: 30896 - DNA, 1519 bp, Zea mays
  Clone ID: UC-ZMFLB73095E05_FLI
aattaagatgcttgctggggaggtcgcatttggtaccagttcactgaaaagactaatcgaacagtccatagatgatcctgaagcaacaaaggaccaagtattcccccttacactttagtttttctatatacctcctgctcagtttcaatcttgttcggtttgaagactaaccagtgattaacagtgctactgttatacgtgttccttcgggaaacaaatagaagtctgaaacatgtaataaagtccgaagcatagaagcagcaagctgacatgcgtgagaataagccttttgtgttcatttgcatggcaagccaaatataacatcccacataactgggttctgcactctattttaacatgtgctaaactgttgctcataatattgaatattcacatatgttcttataacagatcgagaatttagagcgtgaaatccagcaaaagaggagacatatgcgagccctggaaaaacaaatcatggaaagtggcgaggcatcagttgctaatgcatccatgatggatatgcagcagactatcacgaaactaacagcgcagtgcagtgagaaggctttcgacttagagttaaagtcagctgataatcgtgtactccaggagcagctacatcagaagaatttggaaatctacgatttacaagaaaaagttcttcgcgttgagcaacaactctcagcaaaagtggatatatcccctgagaaggaaactgattgtgcacagcaggagactattgatttgaaatctaaacttcagtccaaggttcttttactgataatgttctttcactttgtgtatttgagccccttgtgcagtatacctgtacaatttgacatactcgtcagcatagaatatttatggtttggctacatcctttctgtaattctactcgatagaaatagtatgcatgttcattagatggctatatgcaaactactagtgttttatgctttccatattgacatttaagtcaaccaactttgctgatgtactttggcaggaagctgaaatcgaaaagctgaaatatgagcatctgaaaatttctgaggaacattgcgatttaatcaaccagaaccataaattaagtgaggaagctgcatatgcaaaagaattggcttcttcggctgccgtcgaactcaagaatttggctgaagaagttacaaagctatctgtgctaaatgcaaagcaggcgaaggagttattagttgctcaggagatggcacattcaagggttcatggtagaaagggtcgtacagctagtaggggtagggatgaggttgggacatggagcctcgatttggaggacatgaaaatggagctacaggccagaagacagagggaggctgctttggaagctgctttggcagagaaggagcttctcgaagaagagtacaagaaaaagtttgacgaggcatgccatccatttttagtggtttgctgttcgtcactgagatgctgttgtaaggaaaatagaccttgacttatttgattaatggactttgctccatgc

SEQ ID NO: 30897 - DNA, 1846 bp, Zea mays
  Clone ID: UC-ZMFLB73095E07_FLI
cacacacacaaccagatctcccccaaatccacccgtcggcacctccgcttcaagatgcagatctttgtgaaaaccctgactggcaagactatcaccctcgaggtggagtcgtctgacaccattgacaacgttaaggccaagatccaggacaaggagggcatccccccagaccagcagcggctcatctttgctggcaaacagcttgaggacgggcgcacgcttgctgactacaacatccagaaggagagcaccctccaccttgtgctccgtctcaggggaggcatgcagatctttgtgaaaaccctgaccggcaagactatcaccctcgaggtggagtcctctgacaccattgacaacgtcaaggccaagatccaggacaaggagggcatccctccagaccagcagcggctcatctttgctgggaagcagcttgaggacgggcgcacgcttgccgactacaacatccagaaggagagcaccctccacttggtgctgcgcctcaggggaggcatgcagatcttcgtgaagaccctgaccggcaagactatcaccctcgaggtggagtcttcagacaccatcgacaacgtcaaggccaagatccaggacaaggagggcattcccccagaccagcagcggctcatctttgctggaaagcagcttgaggacgggcgcacgcttgccgactacaacatccagaaggagagcaccctccacttggtgctgcgcctcaggggaggcatgcagatcttcgtgaagaccctgaccggcaagactatcaccctcgaggtggagtcttcagacaccatcgacaatgtcaaggccaagatccaggacaaggagggcatcccaccggaccagcagcgtttgatcttcgctggcaagcagctggaggatggccgcacccttgcggattacaacatccagaaggagagcaccctccacctggtgctccgtctcaggggtggtatgcagatctttgtgaagacactcactggcaagacaatcacccttgaggtggagtcttcggataccattgacaatgtcaaggccaagatccaggacaaggagggcatcccacccgaccagcagcgcctcatcttcgccggcaagcagctggaggatggccgcaccctggcggattacaacatccagaaggagagcactctccacctggtgctccgcctcaggggtggcatgcagatttttgtgaagacattgactggcaagaccatcaccttggaggtggagagctctgacaccattgacaatgtgaaggccaagatccaggacaaggagggcattcccccagaccagcagcgtctgatctttgcgggcaagcagctggaggatggccgcactctcgcggactacaacatccagaaggagagcacccttcaccttgttctccgcctcagaggtggtatgcagatctttgtaaagaccctgactggaaaaaccataaccctggaggttgagagctcggacaccatcgacaatgtgaaggcgaagatccaggacaaggagggcatccccccggaccagcagcgtctgatcttcgccggcaaacagctggaggatggccgcaccctagcagactacaacatccaaaaggagagcaccctccaccttgtgctccgtctccgtggtggtcagtaagtcatgggtcgtttaagctgccgatgtgcctgcgtcgtctggtgccctctctccatatggaggttgccaaagtatctgctgttcgtgtcatgagtcgtgtcagtgttggtttaataatggaccggttgtgttgtgtgtgcgtactacccagaactatgacaaatcatgaataagtttgatgtttgaaatt

SEQ ID NO: 30898 - DNA, 916 bp, Zea mays
  Clone ID: UC-ZMFLB73095F04_FLI
gcttctgcaggcgctctgcactggaaggtcgtatcggtgtacatcaaccggatgggcctggtaaaacgaatcccttccgcttccgcatgctagctcaacttgggttatagaactttagcgtgacggtcgtgacggtgtttcgcaggtgatgctgaagatgaagagccggcatgtggcggggacgatcacgaagaagaagaaaagcgtggtgatcgacgtgtgcagggacgtgccggcgtgggccgggcggcacctgctggaggacggcgagcaccggcggtacttcggcctgcggaccgcggagcaccgggtgatcgagttcgagtgcggcagccagcgggagcacgagatgtggatcaagggcgtggcgcggctgctgagcatcgccggcgagcggaggcgcctggtggcgtgacctggccctggtcctggactggacattggcggcctgcgtgctcgttgttcggtcgcctcgtgccgtcaccgttcgttcgtcggcgaccgctgggccctggggcctccatccaccgtaccgtccgtcgctgtgctaggctggagcacatgcgagaggtggtggaaggcaacagagcagagcggcatgggcatttggcgggaggagaggggtatgtagctataggaggtagggttggcaggatcctggtgctgctagggcacgaggtttgaatccgtgtcggtgtgttttctttttttttatgggaggatgcgacgccggttcatggggcgccatgccttgcggtagagaagagctctctgccctattgttctctcttctctttcactctcttgtaagttttgcttctactctttttccctttttcttccatctcgttcggggtgtggccatactgggactgtagctggtgaaagataaatgctttgttctggtagtagcagt

SEQ ID NO: 30899 - DNA, 967 bp, Zea mays
  Clone ID: UC-ZMFLB73095F07_FLI
tgataatttacaaattcgtttttgaattaatgtcaataggaagaaaaggagttcaaggtgctcaacctggcctggcgcttgattggatgcagcgagtgcaaattgctgttgatgcggcaaaaggacttgaatatcttcatgagaaagttcagccttccattgtccatagggatattagatcaagtaatatcctcttgtttgaagatttcaaggcaaagatagcagactttaatctctcaaatcaggctccagatatggctgcccggttgcattcaactcgtgtcttgggaacctttggatatcatgctccagagtatgcaatgaccggtcaactaacccagaaaagtgatgtatatagcttcggagtagttcttttggagcttttgacaggtagaaagccagtagaccatacaatgcctagagggcagcagagcctagtaacttgggctaccccaaggttaactgaagacaaggtgaagcagtgtgtagatccacggttgatgggggaatatccggcgaaaggactcgctaagcttgctgctgtagcagctttgtgtgtgcaatatgaagctgaattccgcccaaatatgagcattgtggttaaggctctgtctccactactcgtaacaaagcagactccatcacctgttgttgacagttgacgtacaaaattaacctaagttgcaaatatgagcggcaacagttgggacactacggacatttgatcggttcacctcagtcacagatttcaaacactaactgcatggagatggagggcatctttagtactgcattaacaactttgcatctgcggttctacagcatgtgcaaggcaacaatattccttttcatctctcagtaaatgccagtatcaaggagactactgaaatattcagtgatcaacattgagactttttttttttttttgcaaagatgcggaatggtaaaagacccttcttttggtgtc

SEQ ID NO: 30900 - DNA, 901 bp, Zea mays
  Clone ID: UC-ZMFLB73095G07_FLI
ctccagcctgagaagcaaggacgtgagggggaagtacgtgctgtgcaccggcggcccgagcaccgagatcgagcagcagatggacgaggtgcagagcaacggcggcctcggcgccatcatcgcgagcgacatgaaggagttcctccagccgacggagtacaccatgccgctggtgctggtcacccagccggacggcgcggccatcgccaagtacgcgacgacggcggcagggtcagccagagccggaggaggggcgcccagggcgagcatccggttcggcggcacggcgctcggcgtcaagccggcgccgaccgtgtcctacttctccgcccgcgggccgggcctgatcagcccgacgatcctgaagccggacatcgtcgcgccgggggtggacatcctcgcggcgtgggtgcccaacaaggagatcatggagctcggaaggcagaagctctacaccaagtacgcgctcgtgtccgggacgtccatgtcgtcgccgcacgccgccggcgtggccgccctcctgcggtcggtgcaccctgactggagcccggcggccatcaggtccgccatgatgacgacggcgtacgtgaaggacagcgccagcaacgtcatcgtcagcatgccgagcgggtcaccgggaacgccgctggacttcggcagcggccacgtcagccccaacgaggccgtggaccctggcctcgtgtacgacgcggcggccgacgactacgtcgacttgctgtgcgccctacgctacagcggcagccagatatccaccatcaccgggcggccgaaccccagctgcgccggagcaaacctggacctgaactacccgtccttcacgatcatcctcaacaggaccaactcggccacgcacacgttcaagagggtactcacaaacgtc

SEQ ID NO: 30901 - DNA, 3324 bp, Zea mays
  Clone ID: UC-ZMFLB73096A07_FLI
ccacccctgaacccgtcagcgacaccgtcaaagatctgaaagcaagttgcagtttggcactccggcgacgccatgaaggggggtttaaagaaatgcgggcccctctgttctgaggtcaggcgacgggtgcggtcgccatcgccggggggcgatgccgcgtccgcgtgcgcgccggcggcagaatccgcccttgcgcctggacaggagctattgggcctacggctgctgcaaagattggcgagacacaggcagccagggatgtatctggacggactgacgacggagatctcggttgattgtcctggtcaaacactctttgtttctgtaaatggaagttggataggaaacacaaaggtcagtgtcagtgaaaaccatatgcaaattcgtgtgaatccatcaccatgccccttcttcaggccctttttggtggttgatccctgatcggaggggattggattcattggggaaaaaacaaggtttgtttggtgatcagagaattgaagtgggaaaattctcttgctattcaattatctggtaagaagatttcttcacatggatcccctccaattttctggtcattcagttggtttagagaaaaggtagagaaggtacagtttttgccgtgttaactagccagtaaattcgtgtttgactgctgcagctagaggagcatgacgaaacacaacctttttttccagatgttttgttttttgattggatgggaaaaaaattcgtttgtgagatttgcagtttcgcaagaaattcgaaaaggaaccgttgtcaggatcagcagaagcttccaaagcaacactttttttcctgtaaaaactatgtcaacaattaaacatgacgagaggagccagtttaccttaccagtaatacagagacatgatttggcgagaggtccatgttagggaagggaggctccaaaccggcgcttttcagccttgcgtcagtgttttatatatatgattcaaatatgtcgctgtaatgccgagtaaatctatgggcacttattagactggccatccacttcctccaattgctgcatcatgttagatgctgtcagtgtcaaaacacctaggaccaagctgctgcaaattaatccttggactaggaattctgagacgtgttgttgaattcaagcagtgtactgcttttctgttcatacatacacctaatataggccgcttgtgcgtgttcattggcgcgaaagtggccaaattcttcactggccgatttttccactgatgagacaaaatgaggagaacggaatctttgcctccgatgaagggaaagatacctgccatcactttgtttagtcccagctagctagtgccacactcaactagtacatgtcttctgtgcttgaactcttctgccaggcactatttttgtaaggttatttggtgctttaggtgggattctattttatattatctcatatgtttcattgcttctgttgcttgaatttcaagcgattgtccttagtagccctgctactgcaacactactaaagacagcttcttgtgactcccgttatcaatctggtcaatcgttgcaccaggagaggggagggtgagctgagaggggtttcatggagatggagggcagaggcctgtctgatttgttcaggaacaccagcgaggagatcttcctcaaggcagtgatggagaactcgatgggagtagcagcagcgccaagcatggagatgctggggttcaagaacacgtcgcgaagtctcagagaagacagcgaggagctgttcaacaactggcttatgaatggagagatccctggatttgggtcagtgaacaatcaccctcgacaaccatctaggttgtcatcagaagccgcaggccttccgaatcaacagcatgacattgctcaacaaagttttctcactgacaacttggttccacagaatttaacaattccttctgtcgaatatccaaataaccacaaccagcaatcactcaaaaatgcagcagagaagggaatgcaagccagtgacctacttctagcaaaagcctggttccacagcactcaaccaatgactagaagtcgttcgtcagagttaaggaggaggtatgctgcgatgcaaactaatatggcaccaataacaataggaagcattgaaacacctaaccaattaaaacaagattttacaaacacaacaaacatcacaccaatgagcaacacacttgttcatacaccaaagtttgtatctccttcaagttcatcaacatcccctctggataatccacatgtggcagcacaagatactgttacctcagtggtgagcatgctcaaggacacacttgagcgcaagaagcttggtagccatgctaacaaagacacctcagcaggcaattcttttggattctatgacactcagcagtttcaacaaaacattcttggaggaacagatttctttcccatagtgacaactgcccaagttcaggattccctgatgcttcccaaggttgacaggcccatggaaccaaacaatggtaacttcgttgctcctgcaaaccaggtttggttcagtgcagcttctcgagagccttcacacagtggatcgtctactgctatgactactcattcagctggatttgaaatgtgtgatgagctacctcctgcagcgcaagcgatgagtgtttgtgagagcaccagaaaaaatgctgcaaatggaacaaccgactgcaaatcaaaaggcaaagagtatagagagagggtacaaaaggataatttgaaagatgggaggaagaaagcagccctaactcgaataggatccatttcatctgaacaagcagctgataatggagatcctacaaagaagcgcagggttgagcgctcacgcaaaatggcagaagcaaaggaaagaagttccacaccagtaataccatctgatatgcaagccgtacttaaacgctgtgaaaccctagagaaggaggtccgatcactaaaacttaacctgtctttcatgaacaggaaagattcagaacagaccaagcagatcgaggagcttcagaagcaaaacgaggatttggccgaagagaaggagcggctggtggaagagatcgaaaggattgtctctgaccccaacacatgaccgcccaatcatttctgacatttttttatatactaatagaattagacttgaaatggtcctagatacaaatacacatacacaatccagcagggggcagcaagaattaagtgctggcctaaatgtaccattctttccttgttttcacaagtgtaacgtatacgaatatcaacaagcaaagggatcagggattacagtttatttcctgcagc

SEQ ID NO: 30902 - DNA, 930 bp, Zea mays
  Clone ID: UC-ZMFLB73096B12_FLI
ggcacacagtgtgccaacatcgtggagcactttggattcacccatcttagtgctggagatcttctgcgtgcagagattaaatctggctctgagaacggaaccatgattgagaacatgataaaggagggaaagattgttccatcggaggtgactataaagcttttgcaggaggcaatgataaaaagtgaaaatgacaaattcctgatcgatggatttccaaggaatgaggagaatcgtgcagcctttgagaatgttaccaaaatttctcctgcatttgtgctattctttgactgttctgaagaagatatggagaaacgactcctggggcgcaatcaggtttccttcatctttttgtgttttttagtcacaaaattcttgtttccaatatttcttactgtctatgcagggaagggttgatgataacattgaaactatcaaaaaaaggttcaaaacctttgttgactcaactctgcctgtcattgagcattacaactcaaaggacaaggttaaaaagattgatgctgcaaaaccaatccccgaggtgtttgaagacgtcaaagccatttttgccccatattctctaaaggctgaatagagcaatctaagggacatgataaaggtgatacatggtgtctaggcaccacataaacatatctgtgattatgatggaccctttaatatagaacaaaagttttggctcatttgagctaccagcgtaccagtaggcaattcgatttgttaccagcaacaagtgatctgattcccagtggtcctgctagagtaacattttttaccactgtctgttgtctatgtatcctttgatattgtgttgtaccaatgtgcaatttactctatggactgatggaacattgtgccatcccatccaccagatttattgtggcgttatggaaagcatagaaccgctgccat

SEQ ID NO: 30903 - DNA, 1210 bp, Zea mays
  Clone ID: UC-ZMFLB73096D11_FLI
aaattattctatttccacagcctgtgctaccagtaacttctgtttccttaacgcagcaaaccacatcagaagaggcgaagctgacgttatgctctgcggtggttctgatgcacctcttatcccaatcggattgggaggttttgtggcctgcagagcactttcacagaggaacagtgacccaacgaaagcttctcgaccttgggacatgggccgtgatggttttgttatgggggaaggggctggtgtcctcgtattggaagaacttgagcacgccaaggaaagaggtgcaacaatatatgctgaatttcttggtggaagcttcacatgtgatgcttaccacatgactgagccacatcctgaaggaagagggattactctctgcatagaaaaggcactagctgatgcaggggtagcaagggaagaaatcaactacgtgaatgcccatgcaacttctacacaagcaggtgacctgaaggagtatgaggctattgtgcgctgttttcgccagaaccctcaactgagggtgaactcgaccaaatcaatgactgggcatcttataggagcagctggtggaatagaagcagttgcttctatacaagctataagaactggttgggtccatccaaatttgaatttagaaaatcctgaggacactgtggatgtgggcatcttggtaggatcacagaaggagagatgtgaggtgaaggtggcgttatccaactcattcggcttcggtgggcacaactcatcaattctctttgccccctttaaggaactgccatcttcctcatcgtccaaatagattcatatatctggatctccacatagaagacaagtggactctgcaacttcctcggtgccatagatattacagggaggtccaaactgagcgtatctgagcgaacaaaacatcagcccccctacatgtttcatctatatcacgaagttgcagatatgtggtaactatcaaaaggatttaccgtacctgggccagtgttttcgccttcaccatacctgcccattgtcagtactatttcctagatttggagtagtcccgtagctaatcctcttccctgcggaggtgatgggattttatgttgtattgatgttgtcaacaatgtcgttcttagccatgaattgctggttccactgtaagcaccgctggatgtttatcgctttggctgtttttctgctgttcataactgagttg

SEQ ID NO: 30904 - DNA, 1726 bp, Zea mays
  Clone ID: UC-ZMFLB73096E07_FLI
gcatatagcaatctgggggtgttggctgttgttacatggcaagttctgttcgtctctgtgccgatgatggttttggcactcaggttgcagaagtactatttagcctcagctaaggaactgatgaggatcaatggcactaccaaatcagctctggctaatcacttgggagagtcggttgcagggtctataacaataagggctttcgaggaagaagatcgtttctttgagaaaaattcggaacttgttgacaagaatgctgcttcatatttctataattttgcagcgactgaatggctgattcaacgcctggaaacaatgagtgctgcagttctttctttttctgccttcatcatggctctcctccctgcaggaacttttagctctggctttataggaatggcgttgtcttatggtctgtccctgaacaattcctttgttttctctatccaaaaccagtgccagctatcaaaccagataatctctgtggaaagggtgaaccagtacatggacataccaagtgaagcagcagaggtcattgaagaaaatcgaccatcaccaaactggccccaagttggtagggtggagcttagagatctgaagatcagatacagggaagatgctccccttgtactgcatggaatcacatgcacttttgaaggcggagataagattggtatagtcggccggacaggaagtggaaagacgactttaatcggtgcattgtttcgtcttgttgagccaactggggggaaaataattattgactctgtagatatcaccacaattggcttacatgaccttcgttcacgtttgggtatcattccacaagatccgacactctttcagggaaccataagatataatctagatcctcttgagcaattttcggatcaacagatatgggaggttcttgacaaatgtcagcttcttgaagctgtccaggagaaggaacagggattggactcacttgttgtggaggatggctcgaactggagcatgggtcagaggcagctcttctgtttgggacgtgcactgctaagaagatgccgtgtcttagtcctcgacgaggccactgcatctatagacaatgctaccgatgcgatccttcagaaaacaatcaggacagagttcagagactgcactgtcatcactgtcgctcaccgtatacccactgtcatggactgcagtatggtacttgcactgagcgacgggaaactggtggagtatgacaagcctacgaagctcatggaaaccgaagggtctctcttccgtgacctcgtcaaagagtactggtcgtacgcatcgaatgggaatatctagaagccacctccaaactacgaccgtttgcatgtttccactcgctgcatcctcttgaaaggagatacaagaatctgggcttgcacatccgaagaactattgtatctgaaatcttgagaaaaggcgtcaggcattgtcatgaaatgcttgttgtcaagttttcaccactcgtttttcagcaactttttggtagtttctgttttgggtcattgcttcccttccaggcgctgaataaaagaaaacatgtctccatccccccccccccttcttctcccctccaaaaaaaagtagaggaaatcctcaacatttctttgctcacagtgatactttatgctcataacaaaaattcttaggcttggtgctcaacactattccattcagaatttgtggtgtatgcttacattcgtac

SEQ ID NO: 30905 - DNA, 1048 bp, Zea mays
  Clone ID: UC-ZMFLB73096G06_FLI
tataaatcgaattattcaccttaaagctggaggagttgagagcaatttgaaaaggtggacttctatgtctcagtctcaagatacagtggatatgccaacgttgccaggagagaggcatgttgtcatgcaagagcctggcggatattatgataacgtgggctatgtccatgaaagggtgaatgccaatccttgcagtacttcagacgtggacatggccaaagtgcaggttgacgtggatatggccaaagtgcagggagattgccttgatgcaatagcccttcagctactgctgaaattgaagagacatttgaaagttgtctatagtttagatgatgcccgctgtcagtcattttctctaaaggagcctccgaaatctggagaaacattctccaggcagaatattccttttaatgttagcagcactaacatcagtctgccgagctgcctgcaggacgtagcttctgtttaccaggatttcaagacagtgctccacgaagattccatggactttgctgtgttcatcccttcagtccagattaggaagcgcccaaccccgagaaatacggcaaacccaaccccaagaagtacgacgagggtcaggagaacggctgcctcgagtgttacaaaagcccggggtggcgcacgtggcgacgactccgacgactccgatgatgacgactggaccgggggcccaagagtgcttgacttcagtgggggtggccgtgtgacaaggcagagggtccaagtatgatgactggtcttggtgcttttgtacattctagggaaacctatagcgggtagcagctgacacgaggagagttagggttggagttttaggtttaaagtcgtttagggtacatagaagcagaaaggaaaggaagatagcctttttacttagatgccattgatttggagcactccttttcttgctctgcccctgtcctgtttgtaattccggtcgggctttggcaaaactgacaaacagggttgtgctccggcttctgatctgattcaatgggaatgaaattattccttttgctttgcctgt

SEQ ID NO: 30906 - DNA, 1155 bp, Zea mays
  Clone ID: UC-ZMFLB73096H08_FLI
ttacagcaatatgaaccagaggatgccactcatttatgtcaaattatatacctaccagatatttcgaggcttagcctatattcacacagtacctggagtttgccacagggatgtgaaaccacaaaatcttttggttgatccactgactcaccaagtgaagatatgtgattttgggagtgccaaaatgttggtcaaaggtgaagcaaacatatcatatatatgttcacgttattaccgtgctccagagctcatatttggggcaactgagtacacaacatcaattgatatttggtcagctggatgtgttcttgctgagctgcttcttggccagcctctcttccctggtgaaagtgctgtggatcagcttgttgagataataaaggttcttggtaccccaacgcgcgaggaaatccgatgtatgaatccaaactacaccgagtttagatttcctcagatcaaagctcacccatggcacaagattttccacaagcggatgcctccagaagctatagatctcgcttcacgcttgctccagtattcaccaaatctaagatgcactgctcttgaagcgtgtgcacatccattctttgacgatttgcgagaaccacatgcgaggttgccaaatggacggccatttcctccactgttcaactttaaacaggaactagcaaatgcctccccagagctcatcaacaggttgatcccagaccatgctaggcggcatcttgggctcacattattgcccgctactggaccataggcgaaggctctatggtggtgcttcgttgtgcggaaggcaacctgcattcaaggtgtagaatctgacaattattggaaggtcaaacatgagctggcgcgtaaggagaggtggtatgttctcgtgcagccagccttaatttgtcgcatgtcttaatgcaaaaatctgatttttgcccaagtagtgagaggagggaagggggtggtcggtgtattgttaagctattgaaggaattcgatccctgctattgtgttactttctccaacgtttaaacgttgtagtgcgcctgtaagtgttccatatatcccctgttgtcagtcagtgtaattctgtaaatgttattaatgggaaattatttcgtgcttttccaaccacataactaatccctaccttgttgg

SEQ ID NO: 30907 - DNA, 917 bp, Zea mays
  Clone ID: UC-ZMFLB73097G08_FLI
atcatttggatgcccttgcatcacaccaaagtgttggaaacaagaatctttgccagagtgagacattgcaagatatgggcatggatcaatctggtcaacccactttattctgcgaagcatcaatggcaacactactgagaggacttgcaatagctcccattcagcttagcccgtgtaccaacttctttatttttctggccattgatacagcctgaaggggcagccagcgatgacattgcattgggtattgctgttggtagcacaggaagaggcaaccttcctggttctacatcagatattcgagcagcgcttcttttacttttgattggtaaatgcacagctgatcaggaggcactaaaggaggtagaaggcaatggggttcttcaggggccttctggatgacacagattcaagggtagcatatactattctgctgcttttcttttgaagagaatgatgacagaggaactagagatctaccaacggatgcttgaaagcctcatctcaaaagctcaacagatgctatgcgtgtgtttggttgcaggtcctgtggtagcctggcttactacatgccttcccgcatggagatggttgagcatacatgcatcgatgcaagttacgtatttgtgaaagtcttttacctgcatgcagggatacgcgtgaaatggccgtacgtgatgggccatgctcacatgagcccggctacacggacaggcatccaatcaccacctatgtgaatgatgtaaattatcgatgggggcatgtacatgcctctgaatttgtttgtttattctttgttagactagtcactgtccaagagagtcactgtggataatcctgtgttatggacagagacacaattctacaattttgtattgctgaaccattcattgagatcttgcatttgcatgtatggt

SEQ ID NO: 30908 - DNA, 1670 bp, Zea mays
  Clone ID: UC-ZMFLB73097G09_FLI
ggcggcgccgaggcggcacgcgtacgcgtcgatgatgtacatgggcacgccacgggactacgagttctacgtggccacgcgcgtcatgatgctgtccctgcgccggctcagccccaacgccgaccgcgtcgtcatcgcgtccctcgacgtcccgccgctctgggttcaggcactgaaaaatgacggggtaaaggtggtctctgtgaagaatttgaaaaatccttacgagaaacaagaaaatttcaacagacgattcaaattgactttaaacaagctgtatgcatggagcttggtttcatatgagcgagttgttatgcttgactctgacaacattttcctccaaaatactgatgagttatttcagtgtggtcagttctgtgctgtcttcatcaatccctgtatcttccatacaggtctttttgtgcttcagccctcaatggatgtttttaagaacatgctacatgagctagcggttggacgtgaaaacccagatggggcagaccaaggcttcctagctagttatttcccggacttgcttgatcagccaatgttccatccaccagctaatggtacaaaactttggggtacttatcgcctccccctaggctaccagatggatgcatcttactattatctgaagcttcgctggagtattccatgtggaccgaacagtgtgattacattcccaagcgctccatggtttaagccatggtactggtggtcttggcctgttttacctttggggctctcttggcatgaacaacgtcgtgaaaacctagggtattcatcggagataccactagtattaattcaggctgtactgtacattggagtcatagcagtgacccgacttgcgcggcctagcttgtcgaagatgtgctacaacagaagaatggagaaaaacactatgttcttgctctcccttctcagaatagtggcagcttggtccatacttgctgcctacaccatacccttcttcatcatcccaaggaccgtgcatccgctgcttggctggcccctctacttgctcggttctttctcactttcctccattgtgatcaacattttcttcctccacccgatcaccgtcctcacaacatggtttggattcatcggcgcactcgtggtgatggccttcccttggtatctaaatggcgtcgtcagggccttggcagtgtttgcgtatgcgttctgctgcgcgcccttgatctgggcttctctggtcaagacaatgagctccttgcaggtcctgatcgagagggatgcattcaggctcggagaacctaaccagaatgccgagttcacaaagctatactgaggtgggcacggcagatacgtatggttggccacttctgttgctcggtttggacagctatctccattcacgttggcaaattctgatgggcaatttcaattgtacaagtaaatctgcagcctgggagcaagaggagttgtatcttgtggaacccatcaggaaaacctcaagaacccatggttgttgttgtcttgcacatgtaggtgacaatgacatacaggggaaattggtgcgggaactgaagaggaacggtctggggccagttcttagctattttgatttattgttcctcggaaaggccaagccatttttggctttgttttgtactgtaaatgatatgatcggtttcgtcacc

SEQ ID NO: 30909 - DNA, 2581 bp, Zea mays
  Clone ID: UC-ZMFLB73098B08_FLI
gtttgattgggtttttgctgatgggccacctgggaatgcaaggaattatgataacaatggaagacaggatttccatgctatcgttccgaataacatatcggatgatatcttttgggtggaagaagaacataggatctttacaaggcttcaacaagagagaagagaaagggagggcgctgaaagaataaaggctgagagatctgcaaaaatgaaggctgagatgaaggaaaagactatgagagcgtttctgctttcacaaaaacatattgtgtatactgagccgctcgaagtacatgcaggaaccactgtggacattctttataacccttctaacacagtgctgaatggaaagacggaggtttggttcagaggttcctttaaccgttggactcatccaagtggtcccttaccaccacagaagatggtaaaggctgagaatggttcacacttacgaacaacagggttcccttggatgcatatatgatggactttgtcttctctgagtcagaaggtggaatatatgacaataggaatgggatggactatcatattcctgtgtctgattctgttgcaagggaacctccaatgcatattgtacacattgcagtggaaatggctcctatcgcgaaggtcggaggccttggtgatgttgttacaagcctttcacgagctgttcaagatttaggccataaagttgaggttattctgccgaaatatgattgtttaaaccttaacagtgtaagtttgtctactggtgtaaaatgtcctgcgtcttcttttctttcccttttttatctgtctcctcacctttctttcatttccaatttccaatttcagcgtctttttcacttcaatgaagttgagttcatttagttttaaaagcacatgaatttatggagggagaatattcttaatgtgtgctctttcatatttaatctgcagtacctttttatgttatttgtggagagtttcatgtgtatggatggatgaccaatggtagttggtggataccaattttcttcattatgttggcgtccttcggttgcaggtgaaggatttacgctaccaacaaagttttacttggggtggcacagagataaaagtatggtttggaaaggttgaagatctccctgtttatttcttggaaccacaaaatgggatgttttgggttggatgtgtctacgggaagaatgatgagagtagatttggcttcttctgtcattctgctctggagtttttgctccaaaaaggatcttctcctgatatcatacattgtcatgattggtcaagtgctcccgttgcttggctgtacaaggaacattatgctcttaatgggatcggaaatggtcggattgtatttaccatccacaatcttgagtttggagcgcatcacattggcaaggcaatggcacattgtgacaaagctacaactgtatccgatacatactcgaaggaagtggccggacatggagctattgcacctcactactataaattccatggaattcgaaatggaattgatcctgatatttgggatccatatactgacaaatttattccggtccattatacatcagagaatgttgttgagggcaagagtgctgcaaaaaaggcattgcagcagatgcttggattacagcaaactgatacccctgttgttggaatcatcactcgtctaacagttcagaagggaatccaccttatcaaacatgcaatgcatcgagctcttgaacgcaatggacaggtggttttactgggttctgcaccagatcctcgcatacaaagtgactttacaaatttggccagtaagctgcatggtgaataccatggccgagtgaagctatgtctaacctatgacgagccactgtcacatttgatatatgctggcgcagacttcattctcgttccttccatcttcgaaccttgtggtctaacacagcttattgctatgcgctatggatccatcccagttgttcggaaaactggaggcctgtacgacaccgtttttgatgtcgacaatgataaggatcgggctcaagcacaaggtctcgagccaaatggattcagtttcgaaggagctgatagcagtggtgtggattatgctctcgacagagccataaccacattttatgatgcacgcgactggttcaattccctttgcaagagggtaatggagcaagattggtcatggaacagacctgccctagactacatggagttgtaccattctgctcgcaaaagctgatagcttttaccactagggaaatcaggctcgttttgcccaggttagaagcatctcagcctcaggccttgtgcaaattcatttgtgcactgggaagaaaagagtaccgactggccttgagcatgcccgccgtctaaggatgcaacacacaccgtgtatagttagagaatgctactcgtcgtacgtttcatgcatgtgttttgtgtatacacctcatgtagcttgcaaaacaacagtacgacgtatcccggccgtctaccatgcctgagggcgtatataggctataggcttatgcaaagcatgtaccattaattaattattacatagtctttttatgtc

SEQ ID NO: 30910 - DNA, 1120 bp, Zea mays
  Clone ID: UC-ZMFLB73098B10_FLI
gcgagccatcgacacgatcgcgagcgcaagcacgtacgttgtcggaagctcaagttagaagaagcaccagtgcctgatcgatggcggcccaggctctcctctccggccggcagctgctgggccgccccgtgcagtcggccgtctctaggtcgtcggcgaggaaggcgcccttcgtcgtcagggccagctccagccctccagccaagcaaggtgccgacaggcagctgtggttcgcgtccaagcagtccctctcctacctcgatggcacgctgcccggcgactatggcttcgacccgctgggcctctcggacccggagggcaccgggggcttcatcgagcccaagtggctggcctatggcgaggtgatcaacggccgctacgccatgctgggcgcggtgggcgccatcgccccggagatcttcggcaagatgggcatcatccccccggagaccgcgctgccgtggttcaagacgggcgtcatcccgcccgcgggcacctacaactactgggccgactcctacacgctcttcgtcttcaacatggcgctcatgggcttcgccgagcaccgccgcctccaggactggtacaacccgggctccatgggcaagcagtacttcctcggcctcgagaagttcctcgccggctccggcgacccgtcctaccccggcgggcccctcttcaacccgctcggcttcggcaagaccgagaaggagatgaatgagctcaagctcaaggagatcaagaacggcaggctcgccatgctcgccatcctcggttacttcatccaggggctcgtcaccggcgtcggcccgttccagaacctgctcgaccacctcgccgaccccgtcaacaacaacgtgctcaccagcctcaagttccactagaacgtggtgcatcagcatacctgctgctgccgccgccgccgccagttgtttgctgtggaaagctagatgcatgcgtgttgtaaaggaacctgaagcgttgcatcggtcatgattcatgcatggccagcctgctgcctgtaacaacaaactagtattgatcttattgagaccggaaactgtattgcacatggtaaatcaatgtacaattcctccctagatgcggacaaatttctcct

SEQ ID NO: 30911 - DNA, 2338 bp, Zea mays
  Clone ID: UC-ZMFLB73098C08_FLI
gcggtgataactggcctcactggtgctggggatctcgacaccgcgagtgagttgctagatgagatgcccgtgaaggacgccgtggcttgcaacgctgtgttgcataggtacgtacgctgtggccgagtggatgaggcctttgctctgctcaagagaattggttcgcagtgcgattcggatgggatcttaccatggaatgaccccttcgtgcttaccacagtggttggcgcctgtgctgatcggacgcagtatgagattgggaggcaagctcacacccggttggtggttgccaacaccgggattgattcgatattgggctgcgcgttgattgacatgtattgcaagtgtggggatttggactccgctcaccaagttcttgacaggttagaacatgtcgatgagatttcgctgtccgcattggtctatggctacgcatcttgcggacagttgcacaaggcgttatgtcttttcgacaagatggagagccccagcattgctctatggacgtctcttatcagtggttgtaaccctgcctatcatggagatggtgcttttgttctttttgtaaggatgttgcggtcagaaatgttgcctaattctactatttatgccattgttctgaacatgtgtggctttttaggcatgctgaagcctggtcagcagacgcaagcttgtgctttaaagagtggggctgtcaatgacttgatagcagcaagtgctctcattgacttctactcgaaatgcggcctctgggcagatgcctgccaagctttcagtgagcttaggcatcatgacaccattgtgctcaactcaatgatcactgtatactcaaactgtggccaaatagatgaggctagaagagtttttcgtttgatccctagcaagagtgtcatctcatggaattctatgattgttgggttcagtcaaaacgggcatgctcttgatgcattggagctgttctgtgagatgcaccggcttggtttgcagcttgacaatgtagctatatccagtgtccttagtgcatcaggcagcatctgctctgtaagttccggggagcagatttttggtcttgctattgcgcttggtctgcagtctgaccatattgtagcctcctcgctcattgacctatactgcaaatgtggtaacttggccaatggacgcaggatcttcagtggtattgctaatccagacgaagtcctgtggaactcaatgcttataggttatgcttctaacgggtatggactcgaggcactgaaacttctagatttaatgcaaagtaggggtctgaagccaagcgaacggacatttgttggtgtcctttctgcatgctgtcattctgggcttgtggaagagggattgagatggttttaccggatgaaggaagattttggcgtgagtccatcagctgagcattatgcatgtgtgactgacctgttggtccgagcaggtcgactggatgaagcagttgagttcatagagaacatgcctttcaaagctgatgcaattagttggacttctattattggaggatgcaaagcccagggcaatgaggttctgttggacaaggttgcaaacaaattgatggaaacaggattgtcaacacattcaagtttgtatgtgcagctgtcaagcacactcgcagctcatggggattgggacaaatcagctgagattaggagtatgatgcatgacagaagaatctcaaagaatgctgggcgcagttgggttgacagggcatagaggaaatgaccagtgtcacctcccacaggcgtctcggtccattttctcttgggccttccctattggctttggtttcttcgatgtgttcttccgctagttaggaagtggtaacaaacaacgatcctgctaaaatatgtgcttttgatcatttgcttagttgaaccatatgaggtgatttcttggatgtggattcctgaagcatgcacaggctaatgattcagtccatgatatcttcgacatcaaaattgaccataatgaaaatgtgtcaaccaccaaaaagaaaatctttagctctaaagaagagaaaggaagggctctgaagttgaataatgaacacggtctagcccaggtaagctgtaagagcaccctttgcattttggttgacccagcaaatgctagttacacatgcgcaaaggaggctcttttgtttactcaaccacagttctacaattctattcggttcatggatgctccagaagagttgcttttgtggaatatgttgtttgtgaataacatagaggtcgatcaactctccagaagagctgttttgtgaacaatacagacatttatgtgaacatggatccaagttttctctctc

SEQ ID NO: 30912 - DNA, 528 bp, Zea mays
  Clone ID: UC-ZMFLB73098E05_FLI
ggaccggactacatggtccgcaacgcaaggaggtccatgctggaggagctggaggggatgctggagatcgtggagcctcagccgccggggaagccgaggacgcttagccgcaggaggttcgatctcccagaaggcggagccatcgaaaaggagacgagggaggagggcaagtgaagtgcatcggtgggtggtggcatgcttgggcagtttggtatgcgcgatgcggactatagagtttgagtttgtgctgctaccgaaccgtggaccaccttaccccgttgagatgtttgatagctggactttttgtgctgttgtatttgtagaccagaacgttgttctttgtaataaattggcgtgtgctgctttttgctaatattcgcttggctttaatctgtaccgtgttctactacctgaacaatgtttttttctcggtggactgaagtatcagtttgaatagctagctttaatttgaagcgaacaggctttgtacttttgaattctggcatcttgaatgaattttcttgaagt

SEQ ID NO: 30913 - DNA, 818 bp, Zea mays
  Clone ID: UC-ZMFLB73098E07_FLI
gtgtgagcctgctgccgtcttcttccgccgccgccgccgtcgtcttcgtccgtagcagatcagagagcggggaggaagaaaaagcgatcgatggcgtccaactacgtggacacgacgggcgaggagggacggttccacggccctcacagccacagcaccagcacgaccccgacgggcggcgcggcggcggcggcggcatcgccgcgcaacttccggcgcagcttctcctccgcgtcctccgcgggccacagccacggcggcggcggcggcggggccaagtgcgtgtgcgcgcccgcgacccacgccgggtcgttcaagtgccggctccaccgcaccaactcccagggccacggccacggccacccgcacccgtccccgccggcctcccccgccgcgccggcgcagggcgtctcgtcttccgcttcctcccgcaccgtcgaggccctgtgagtgtccgaggccaaagacgggcgaggcgtggggaaagtgagaagatgatgggatatacttgtcgtgtcagtctgtcagaaggaaaggagtgaagctattattccctcttgttgtgatccgcgctgttttgcctcttcccccctacccgtttcctcccttcgtgctggttgtggttctaaattcctgattgccggccgtcccgccttcttccttgccaagacgagactctcctcctcctgccactgctaccgctgctcctctcaactggtgaactggatcctgatttggggagaaggttaaactggatgcctttccatgtaattaattgcctctctttaccattctacgtgctactagtattgaagtat

SEQ ID NO: 30914 - DNA, 952 bp, Zea mays
  Clone ID: UC-ZMFLB73099A09_FLI
cgtcgaccttggaaaggagttcttatgtttggtccaccaggcacgggaaagactcttttggcaaaggcagtggccaccgaatgtggaacaacattctttaatgtttcctctgcaacactggcctctaaatggcgtggcgagagtgagcgcatggtccgttgcttatttgatcttgcgagggcctatgctccaagtacaattttcattgatgaaattgactccttatgcacgtcgcgcggtgcctccggcgaacatgagtcgtcaagaagggtgaagtctgaacttctagtgcaaattgatggtgtaaacaatagctccaccactgatgatggccagccaaaaattgttatggttctggctgctacaaattttccatgggatattgatgaggcactgaggcggaggctggagaagcgtatttatattccacttccagattttgaaagtagaaaggcacttatcaacattaatcttagaacagttcagatagccgcagatgttaacatcgacgaggttgctcggaggacagaaggctatagtggagatgatctgacaaacgtttgccgcgatgcctcaatgaatggcatgaggcgcaagatagcaggcaagacccgcgacgagatcaagaacatgtcaaaggacgagatagccaaggacccggtggccatgtgcgactttgtggaggctctggtgaaggttcagaagagtgtctcgccttcagacatagagaagcatgagaagtggatggctgagtttgggtctgcctgagacctcggccatctgcttgggtcctgttcaaacattcgttttgtgtgggttgacacggcattccgtagcaatgatacggtgttacccgccggtggtcttgcttcatatagaccagaggcacgagctatcttgtctgtttccagtgatgctaggaattgagttcacgatcgtttcagttcttggt

SEQ ID NO: 30915 - DNA, 400 bp, Zea mays
  Clone ID: UC-ZMFLB73099B04_FLI
agaaaataaacaaggtccaacgttgtttgctttccatttcccttctactttgatattatgtgatttggtttattcatattactgtccatagcatatttgttgtggacacagttataaattcattttctagacactgcacaggcaagggggaaatcttcttatagatatgtttcgtcactgtgacaatcatttgggagagaaacaagtaaacaacccttttttccataaaactccatctggaagtgcacgacagccactacagttgactaacgatgtaaccaagatgatgcaaaagcatcagctggaaacgccacagttccatcagacccgattttccgttttactgaatgtaccgaggagcacagagaagtgtgtgacataactaatacatgccttcctt

SEQ ID NO: 30916 - DNA, 1140 bp, Zea mays
  Clone ID: UC-ZMFLB73099C04_FLI
ccatttcagccaaagcggtgggccgcgcttccttcctcagtcctcactactcactcgtccccttccagttccgcttccgatctgcgcttcgatctccctcttcgcagaggtgcttgtgagcatgtatctgctaggcaacaaaagtggaaagaagaaagtgtatgtcgattatatgaatgtccctctaccgtatgccatcgaagagaattacggtgggcgcttctttgacgacgacgacgatcttgcccaagttcttcaagatcaggaaatattgtatcatttaattcaaggaagtaatggtggtggttcatctagaactcattcgattccaagttctagctatggccatgatcggacatcaaatgcacaaaaattgtcaggagatgtaaactgtgagtgtgagttgcaactagcagttgatgaagctttagctagagagttgcatgaaatggagagcaaactagccaacacttcacttaatgacaataatggaagaaagacaacatcatcttcagcatttgatagaggcaataattctgcaagtagacctcctcaggtattggaggaggatgtgattgatccagataatatgacgtatgaggaactgcaacagctaggggaagccattggtacccaaagcaaagggctgcctgaaagtgtcatagcactcttgccaacttcaacttacaaaactgggatattctccagaaaggaaaaacatgatgaatgtgtgatctgttgtatggcatacaagaaccgagataggctgactaaattgccatgtggacatcactaccatcaagcttgtgttgctaaatggttacagatcaataaggtatgccctgtttgcaataaggaggttttcagctagcagtatcaaacagtgcagattcgtctgatggccaactccagcaaccgtctgtagtactgcatagatgtgcattatttgtataagcatgctgccctgttgctggcaggtaatgcgccgcattgctcaaggaccatatcacggccaaattagtgatatctccagcgaaagcaataagatctctgcttttgaactttttgacattcagagtttcagacttggtgccacactacagtcctttttatcatcgcctgtatactattcatttcggt

SEQ ID NO: 30917 - DNA, 1713 bp, Zea mays
  Clone ID: UC-ZMFLB73099C12_FLI
gcccggcgctgaataagattcccctgtattctgttccagagatgagctgatcgagcagcccgtcgccaagccaaccggacatggtgagcgacggcgcgcgcgggctgctgggcgcgtacgagctcgggcggacgctcggggagggcaacttcgggaaggtgaagcaggcgcggcaccgcggcagcggcgggcagtttgccgtgaagatcatggagcgcgccagggtgctgtcgcagcgcgcggacgagcagatatgccgcgagatcgccacgctcaagctgctcgcgcaccccaacgtcgtccgcctccacgaggtggctgccagcaagacgaagatctacatggtgcttgagctcgtcaacggcggcgagctgctggacaggattgcggccagtgagggaaagctcccggagcaggaggcaaggaggctcttccagcagctggttgatggtgtaagctactgccatgaaaagggcgtctgtcacagagacctcaagctggagaacgttcttgtcgaccggaagggaaacatcaagatctctgatttcgggctcagcgctttaccgcaacatctcgggaacgatgggttgctgcacacgacctgcggtagccccaactacattgcccctgaggttctgcagaacagagggtacgacgggtcgctatcggacatctggtcatgcggggtgattctctacgtgatgctcgtagggcacctcccgttcgacgaccggaacatcgtcgttctctaccagaagattttcaagggcgatgctcagatcccggagtggctctctcccggcgcacggaaccttctccggaggatccttgagcccgacccggcggagcggatcgccatggcagagatcaaggcgcacccatggttccaggagcactacgtccctgtccttcctccgtacgacgacgacgacgaccacgattcagtgaagcaaatcggtgcgggtagtaaaaccactcatcacatcaacgcgtttcagttgatcggaatggcgtcgtccctagacctctcagggttttttgaggaagaggacgtgtcccaaaggaagatcaggttcacgtccgcacaaccgcctgaggatttgttcgccgagatcgaacgctctgcgactgacatgggcttccatgttcacagagggcatagtaagcttaggctgacgcgaaactgcgaccggtcgaagaatcagaagaaccctatgtcgtcgtcgtcgtcgtcgtttctagtctgcaccgaggtttttgagcttagcccctctttgtatgtcgtggagctcaacaagtcccatggcgaccctgcactgtacaggcagctctgtcagaggatctgcggtgacctaggtgtgctcgagatggaccagatctttgggacgaggccgccggtcgccgacgatctcgcgggcttggccttggcgttggagagacgatctgcgacgcctttggttgcgttgtgacgaaaggctgcccccgccggcccccctgaccgtgatgtttgtagcgtcagattatttagtgacgacgaagcagttcagctgcaacgcagctcggaacggttgtgtgatccctcccagaaatagaggacaaggtaaaagagtgtagccgtacacgtgtaggatcatgctccaatgtaaataaagtggtagtagccaccgatgtaaaactgaatgtaaaatctaagaaataaatcgtttatccagt

SEQ ID NO: 30918 - DNA, 2156 bp, Zea mays
  Clone ID: UC-ZMFLB73099E05_FLI
cgaacaatagagtagttagagaactgatacaatctttgctagttcgaattggaaaggggcatccacaggctttgatgtatcctctcttggttgcctgcaaatcaataagtatattgagacaacgtgcagcgcaggaggtcgttgataagatccgccagcacagtggaggtcttgttgaccaggcacaacttgtgtcgaaggaactgatacgggtagcaattttgtggcatgaaatgtggcatgaggcactcgaggaagctagcaggatgtattttggtgagcacaatatcgaaggaatgcttgctgtacttgagccattgcatgcaatgcttgagaggggggatgagacaattaaagaaaatgccttcattcaggcttatgggcatgaattactggaagctcatgaatgctgtttgaaatatcgggctacaggagaggatgctgagctaactaaggcctgggatttgtattaccatgttttcagaagaatcgacaaacagcttccaagtcttacgaccctcgatctgcactctgtttcgcctgagctactcaaatgtcgaaagttggaacttgctgtgccaggaacttatgctgcagattcaccacttgtgacgattgagtattttgttccccaattgattgttataacgtccaaacaaaggccaagaaagctgacaattcatggaagtgatggcaatgattatgcattcttgcttaaaggccacgaagatttgcggcaagatgaacgagtaatgcagctttttggtttggtgaatactctcctagagaactcaaggaaaacatcagagaaggatttatcaatccaaagatatgctgttatacctttgtcacctaacagtggtttaattggatgggttccaaactgtgacacacttcatgctctgatccgtgaatacagagatgccaggaagattttcttgaatcaggagcacagacttatgttggcttttgcacccgattatgatcacttacccctcattgcaaaggtggaagtgtttcagcatgctttgcaaaatactgagggaaatgaccttgcgaaggttctgtggctgaagagtcgaacttcggaagtatggcttgagcgccgcacaaactacgctagaagcctggctgttatgagcatggttgggtatttgcttggtttaggagatcggcatccaagcaaccttatgttagatcgctatagtggaaaaatattacacatcgacttcggagattgctttgaggcttcaatgaatcgagaaaagttccctgaaaaagtaccattccgtttgactcgaatgcttgtgaaagctatggaagttagcggtattgagggtacattccgaacaacttgtgaaaatgtgatgcaagtccttcgcacaaacagagacagcgttatggccatgatggaggcatttgtacatgacccgttaatcaattggcgtctgttcaatttcaatgaggttcctcaagtgtcgaactatggtaatgttcatgctcacacggttgtcagtagtgaagaagcagtggctaaccgagagctcatgcaacctcagcgaggagcacgtgagagggaactgctacaggctgtcaatcaactcggtgatgccaatgaggttttgaatgagcgtgctgtagctgtgatggcacggatgagtgacaaactaacagggcgtgacttctcttctgggtcagctttggctggagcaggtagctctatccaacatggcagtgagcatttggcttcaggagatgcccgggatgcccaacctggtctctcagtgaaggttcaggttcagaagctcatactccaagcgacttcacacgaaaatttgtgccaaaactatgtcgggtggtgtccgttctggtgagctctcttggaaacagtagcagtttataacatgtaaatattgtgaataccgtgtgcatagaagtttcgtggtgacagtttgtatgtgcagctttgtaattagcagaacttcaagatgccttggaccatccttttgtcagtttcttagaccgtgtttagcagttcacccttatggccatccaaaacactgtttttgtactgtagattgtattgtttgtagattgtactgttcgcagggtggatttttgaatatgagtataagaatgtgtaagctgttgaagat

SEQ ID NO: 30919 - DNA, 2441 bp, Zea mays
  Clone ID: UC-ZMFLB73099E10_FLI
ttcctcctcgcccaccaccaccgcacgccggacaaaaccgctctcctcgccacattcgcagcccccctcgctcgcgcacacgccacaccacaccaccagtacactgctctacgccacagtacagcagcatccagcgggcggctggctgcctaatctttccagctctttcgtcccctcgccacgccgcccaccgctgccgcatcatccgcccgttgcccgccgtcgtcgcctggcccgcggattccgcccccattcgccgtcgcagcgcgccgagccccgtcccagatcgccgcggcgcttcctgccgccgtcggcgcggcgcagggttgaaatctatttgaccactcagttataaccatttctggtctgaagatgcttcgtcaatgacatctggaaactgtaatagtatgcgctgatcttctatgcttcaccacctgactatcaatgggctctttcctgtggaaacagcccagctacctcttcattttgataattctccaccttgttgctcatgaggcaagaacgctgagttcagatggtgaagcacttcttgccttcaagaaggcagttacaaattcagatggagtctttctaaattggcgtgagcaagatgcagacccctgcaattggaagggtgttagatgtgatagtcatagcaagagagtgattgatctgattcttgcataccacagattagttgggcccataccacccgaaattggaaagttaaatcagttgcaaaccttgtcactgcaggggaacagtttgtatggttcactccctcctgaactggggaattgtaccaagctgcaacaattgtatctacaaggaaactatttaagtggatacatcccttcagaatttggcgatctggtggaactcgaggcattggacttgtccagtaatacattgagtggatctgttccacattctcttgataagttgtccaaacttacattattcaatgtttccatgaacttcctgacaggagccataccatcttctggttcacttgtcaatttcaatgagacatcctttgttggcaaccttggtttatgtgggaagcagataaacttggtgtgcaaagatgcacttcaatcatcatcaaatggtctgcagtcaccttcaccagatgacatgattaataaaaggaatgggaagaattcgaccagacttgttataagtgcagtggcaacagtgggagctctcctattggtggctttaatgtgtttctggggttgctttctttacaaaaattttggaaaaaaagatatgcgtggtttcagagtggagctctgtggaggctcttctgtcgtgatgttccatggggacctcccttactcctcaaaagacatcctcaagaagctagagactatagatgaagaaaatatcattggagcaggaggcttcggaactgtttataaacttgcaatggatgatggcaatgtctttgctttgaaaaggatagtgaaaacaaatgaagggctagatcggttctttgatagagaacttgagatattgggaagtgttaaacatcgctatttggtcaatctccgtggttattgcaactccccttcatcaaaacttttgatatatgattatcttcaaggtggaagcctggatgaagtgcttcatgaaaaatctgaacagttggattgggatgcacgtattaacattatacttggagctgcaaaaggcttgtcttacttgcatcatgactgttcgcctcgaataatacatcgtgatattaagtctagcaacatcttgcttgatggcagtttcgaggcccgtgtatcagactttggacttgcaaagcttttagaggatgaagaatcacatattactacaatagttgcaggaacatttggctaccttgcaccagagtatatgcaatttggcagagccaccgagaagactgatgtctacagttttggggttttggtactcgaaatactcagtggaaagcggcctactgatgcatccttcattgagaagggactaaacattgttggatggttaaattttcttgctagtgagaaccgggagagggaaattgtcgacctgaactgtgaaggagtgcagactgagaccttagatgccctgctctctcttgccaagcaatgtgttagctcctcgccagaggagaggccgacaatgcacagggtggtacatatgctggagtcggatgtaattacaccgtgccctagcgacttctatgattcagagtagtctcctggacaagccacgctgctgctagtttcccgtgggggcgcattcctttattctttgcgtatattgtgtaaatgcattgccgcggtgtttggtctccaatcggctggctcaacgggtgacttttttttgcgtctgtatacctatgtatgtatctgtcatggtacaagttggctatatgctgatttaataataagagagaacttactagt

SEQ ID NO: 30920 - DNA, 1182 bp, Zea mays
  Clone ID: UC-ZMFLB73099F04_FLI
ctccagtgttctcggccttcacaactgaaccatcaactgcccctttcactcctcctccggagtctgtccatctgacaaccccttcctctccagaggtcccatatgcaaagcttctgacatcgatcaacaatagcaagaatggtgaagcagggggtgatctccagtcgtatccaaactacccagacagcccaattgggcgcctgatatctccaagctcgggctgttctggcacatcctccccattccctgaccctgagatgcaggcttcttcacgcagcgctttacgcttgttcccagttcgtgagccccctaagatattggatggcgagggcgttgcgacacagaagttgatacctcgccatatgcgcaacggtgggtccctcttggatggccagatctcagcagctgtaccagttgtggacttctctgcccgacttcaacccaacgagcacgcaatggatcaccgggtgtcattcgagttgaccgtcgaagatgtcgcgcgctgccttgagaagaagactgcaatctccggggattctggcacggcatcattccaccttgcaccgaccggcagcggcgaccaccacagagaatccaacgaggcaagggcagggctctacgtcgacgaatcataccatgacttgcccgagaaagcgaggcggtccctgtccctgcgcctggccaaagagttcaatttcaacaacgtcgacgtcggtagcgtggagccgagcgtgggatccgactggtgggcgaacgagaaagtcgccgggatgacaactgagccaaaaaagaactggtctttccacccggtggtgcagcctggggtcagctaacctttgcactgaccataatgatcttatacagggatgaaggaattagcttcttctgcttctgcttctgcttcagtggtcgattccttagggatgacttgccagcttgttctaaacatgcagctagtggtaagttctggatttagatagtaataagtaatggggtgtccaccgtctaatatcgtcatgggatactaaaggtttttattctgggagatgtgacaaaccgcaaactctttggttaggggtcggtcggaactgtcctgttcgtctgttttatcctgataccggtgctgtgttgtgtatgtacataatgaagtagttttttttaaaaaaagtcaattaaaagggt

SEQ ID NO: 30921 - DNA, 2778 bp, Zea mays
  Clone ID: UC-ZMFLB73099F06_FLI
atctttgagatggccgtggacgaggctgacaaaagggagaagtatgtgaagccactcttcgagctcactgagcaaagagaaggcatcaaggacctgcagatggagactgctgtggttggaaattccacaagatactatgtgatggccgtcactccgacacgactttactcttttactggcattggttcactagaaactgtttttgctagttattctgatcgggccatacactttatggagctcccaggagagatacctaatagtgaactacatttctttatcaaacaaagaagggctaaacactttggatggctttctggatctggaatctatcatggtgaactgaattttggagcacaacacagctctaccagtggagatgagaactttgtggagaacaagggtttttttgactattcaaaattgggggattccggaattaaaccaaggtcatttgcattgtctgaattccattttctgcttctgattggggacaagattaaggtagtgaacagaataagtcagcagatggtggaggaacttgtagttgatgatacacctgaaacttcaagaggaataattggcctctgtagtgatccatctacaggacttttctatgcatatgatgaaagttctatattccaggtttccacttcagacgagggttgtgacatgtggcaagtttacttggatatgaatcattatgctgctgctttatcccattgccgtaatcctttccagcgtgatcaagtctacctagttcaggctgatgctgcatttgctgcaaaagagtattacatagcagcatccttctatgcaaagataaattacatcctgtcgtttgaggagatcagcctgaaatttatatcaataggtgagcaggatgctctcagaactttcttattgagaaggctcgataacctcaccaaagaggacaagatgcagattacgatgatctcaacttgggctactgagctgtacttagacaagattaatcgcctcctattggaggataccactgtcaccattataaattcagtagcagagcctaatagctctgaatatcgttcgatagtaaatgaattccgtgcttttcttagtgacagcaaagatgtattagatgaagcaacaacaatgaaactactggaaagttacggaagagtggatgagcttgtgtactttgccggtttgaaggagcagtatgaaattgtagttcatcattacattcagcaaggagaagcaagaaaagcattggaagtgcttcaacggcgcaatgttcctgtagaccttgtgtataaatttgctccagatttgatcatgttagatgcttatgagactgttgaatcatggatgatggcgagaaacaggttgaatccagggaaactcataccagcaatgatgcgttatgtgagcgaaccacatgcaaagaatgaaacacatgaagttatcaaatacttggaattttgtgtgaaagatttgaacaatgtggaccctggagtgcataatctgttgctatctctatatgccaagaaggaggatgaatcccagcttttgcaatttctcgacacaaaatttggtaaaggacaaacaaatggccctgacttcttttacgatccaaagtatgctctccgcctatgtcttcaagagaagagaatgcgtgcttgtgttcgtatttatagcatgatgtccatgcatgcggaagctgtggcacttgctttgaaggtggatttggaacttgcaaaggcagaagctgacaaagtagaagacgatgaagagcttaggaagaagctgtggcttaaggttgctaaacatgtcatcgagcaagagaaaggtgtcaagagagagaatataaagaaagcaatagaattcctttcggagaccaataacttgttaaagattgaggatatcttaccattcttcccagacttcgtattgattgacgatttcaaagaggaaatatgcaaatctctgaaggactacaacagccagattgagcagctcaagcaggagatggatgatgccacacgtggggcagataatatcagaagtgatattggtgccctcgctcagagatatacagtaattgaccgtgagcaggattgtggggtttgccggcgcaaaatattgactgttggagggttgcaccaggtagggagaagctatacatctgttggacacatggcccccttttatgtgtttccctgtggacatgccttccatgcaaattgcttgattggacatgtgactcgttgcagtaaccaggtgcaagctgagagaatattggaccttcagaaacggcttagcttgatggacaggaaagcagcaaaagacaatggggcaagtgttaatggcgaacctattacgagcacaaccccagttgataagctgagatcacagttggatgatgctgtagcaagcgagtgccccttctgcggtgatttgatgatcaaggagatttcacagccgttcattctcccccaagagtcggatgaaaaggcatcatgggaaatcaaacctcaaccaacgcctcaaaagattctcccgatgaccatgtctatttgatgctacggacagtacagcctaagatggatttggttttaaatttttatattgtttttgacttttgacactccttttgaccatgttttaatcctttttatgttgtggtatatggtattcaatatcctactgctgttgggttatcttgttttatatttacccaacttgtaaccctagaacaatgtagtcatcaatcgcttaccttgtggttgtggttct

SEQ ID NO: 30922 - DNA, 2464 bp, Zea mays
  Clone ID: UC-ZMFLB73099H11_FLI
cggtgaaaccctcaaaccctaatcctttggcccctcaccatggcggacgctgacgacgcgccgccaacgccgcctcctgaggtagtagcccccgaggagcatcccgcggtcgccgaatccgccgttgccgcgcagcaggagggggcagcgacggcccaagtcgataacaagcggaagctcgaggaggctggcgccgacgcggaggcgaacggcaccggcgaggacgccaagcgcccgcgcgtggatggtgagcccgacgctgccacaggcattgagcagcagaacgatgggtcctccgtgaatgtctccgtgaatgtggaggaacccgcagctgcagaggaggataaggttgctcccaccgatggggcagcgacggatggtgataatgacacggccgctcctgctacggattcgcaggcgggttctgatgacaaaccgcttgaagcagcagctgaagctccacaaccggaaagtgatgcagcagctgttgcccaggagatctctcgtatgatcgaagtacccaacagcagggtcggtgtccttattggaaaagctggtgagacaatcaggaacttgcaaatgagctcgggtgcaaagatccaaatcaccaaggacgccgatgcggactcaaatgccctgactcgtccggttgaactagttggaacccttggaagcgttgataaagcagagctgcttattaagagtgtcatagctgaggctgaggctggcggttcccctgccttaatagctagaggatttggaagtggacagcctgggtcagagcaatttgagatgacagttcctgataacaaggttggtctcattatcggaaaaggtggtgatgcaattaaaggcatgcaaaccaaatctggtgctcgtattcagttaataccccaacatcctccagagggcgttacattgactgaaagaattgtacgtgttactgggaataagaagcagattgaacttgcgaaggatttgatcaagcaagctatgaatcagacattttcaaggcatacaaaccagtctggcggatatggtccacaaggttaccgccctcagggtcaaggtgccgcttctcagtggggaccacgttctcagaatcatggctatggatacccacctagaggtatgcctccacctcaaaactacaacacaccctacggcagctacccgccgcagcagggaccaccaagaggtggcatgggctgggaccagaggcagggccctccaccccatccttcgtaccagggtggtgcttctgattactacaagcagggatctcagccatatgatagccagccaccgagctaccctcctgggccagggaattacaacagttatggtcaatcacagggtcctaactatggccaacctcaatacccgcaacatgcgcctcagcagaactacagccatgggtatggtgatcctagatacaatgctccccctccgaaccagcagtactatggtcagccgccaatgggcccgcagcaaggctatcctcaacagccagatccctatgctaggcctccatacagtggacctggtcaatggcctcccaggggtgctccggctgcagatggctcttaccaggcgccagctgcatcttatgggccgccttctcagcacccttctgcttatgggcaaacgtacagtgcagcaactggatctgatggatatgctcaacagggttacccacagcagggtgggcaggcaccagctccatatggtcagagtgcaccagcagctccaggctatcctcagcagcaaggtggctatgcacagtacccacagacccaaccagcatatggtgagcaagcagctcaaaccaatgcgagctatgggtaccagggagctccagcagatcctaactatggaagtgcctacccacagccaggatatggtcctcctggtcaggctactggtcaggctggttatgcctcctcagcagccagccagcctgcgtatggccaggcaggatacacccagccgcctacaaatcctccaggttatgagcagtctgcggcaccagcaacaacccagagcggctatgctgcgcccccagcaaatccacagcagcctgctgcagcaaaaggggtctcgccacagcctggtggtggtgctgctgcatatggtgctggtgggcagtggacagcatgaccctcctcgaacctcaaacatggctcgctggtagcaatatcgtgctcaatatttgcaccttccggatgcatccttggttatcggaagagattgtgtaactccttgattagtgatacttggcatctctgtagtagcacctactagtagttcgttggttaactgtgactataaacatcctaattcctattcacttcgaatcaaacttcgcagcttgccaagtaatttttttggatttgtgtttattcatgtaaaatagttactggtttggctcacagaatgatgattctgtttctgcagttcattc

SEQ ID NO: 30923 - DNA, 462 bp, Zea mays
  Clone ID: UC-ZMFLB73100A03_FLI
gaacagagttgggatggctcccgatgggccgcaactggggccaggtgtggcacatcaactgtgacatgaggggacaacctctatcgtttgagctcagctcgagcgatggcaaggcgctgaccagtttcaacgtcgtccctaaggattgggagtatggcaagacatacacggggaagcaatttcttctgtagagaatgagcgccacaagatcagcttacagtttctcattttttgttctgatcctacgagttgggctgtggtgtacattctctgcacttctgcagaacaagtaatatcattattaggagaaaattacttagtgcaaggcctcagatagttgctcttggtcataaatggttttccatgtccccttcatagttgtactaaagaggcttgatgtatcattcaaaatagaagcctccgttgtattacaatattttacctagcaagcaatgataatgt

SEQ ID NO: 30924 - DNA, 729 bp, Zea mays
  Clone ID: UC-ZMFLB73100B02_FLI
ggacttggtttcgtgaaagctgaaggtgtggttaactccatgactaggcatggagaccgcagagaacttctcaagggcccgctgtattatgcctgtgctataactctgacaacaatagttttctggaggacatctcccatctcaatcgcggtgatctgcaatttgtgtgccggagacggtgttgctgacatagctgggagacgattcgggcatgttaagctccctcacaaccctgaaaaatcatatgccgggagcatcgcaatgttcttggcaggtttcatcgcatcagtactgttcatgtgctacttcaacattttcgggtttgttgagaagagctggaccatggttgctgcctttggtgtgatatccctggctgcagcagttgtggagtcactcccgatcagcacacgccttgacgacaatctgacggtttctgtcgcatcagtgctagttggcgcccttgttttctattccattggagccagaaacctgtgctgcatgagcagcgaagtcaggagaagtatcccagcaaccgttggaatggtgtttgcaggcagcagctgaaacatgtagccacagtccaggagcagagttgagcagaaagtgcagagaaaggagttcttcaatcctgatgtgtgtgtatcttgtactgtaaccattttcctgtctaagcagacattcttgtaactttattaagaaagaggtaaagcgagaataagtttattaggg

SEQ ID NO: 30925 - DNA, 1009 bp, Zea mays
  Clone ID: UC-ZMFLB73100B11_FLI
caatgtatggagatttgccaccagcaattatacttgttgggcatagcatgggcggttcagtggctatacatgtggctgcaagaaaagaaattagaaatcttcatgggcttgttgtcgttgatgttgtcgagggaacagcaatggcttcattagttcatatgcagaagatcttagcaaaccgggcacagcattttcctagcattgaaaaagcaattgaatggagtgtcaaaggtgggccattaaggaacatcgagtctgctcgtgtgtccattccatctaccctgaaatacgatgaatcacgagaatgctatacatatcgcactcctcttgagcaaacagaaaagtactggaaaggatggtatgaaggtctttcagacaagttcctatcttgcccagtgcaaaagatcctgttgttagctggtaccgacagactggacagagctttaacaatcggtcaaatgcaaggaaaatttcaaatggtggtgattcggcacactggacatgctatacaggaagatgtacctgaagaatttgcatcgcacatactgaagttcatatcccgcaacaaaatagggcctaatggtgtcgagatacctgggctcattaaaaaatggcagcagtagacataatgtacaagttaccgttctggaaaatgttcaggaaaatgatgagtaggtctgcctatccgagttctcttcatatcgaattaaaaaaaggttcaagatgatcatgcgatcgttaacaatcagtcattggtttcgtcatctgttggcaactctcccatgtcgcttgagttgctttgtttctgacatcactctgcgacctgccggcgtcttttgtacgagggttcttgtatgtttttaggtagagctgagtgcagtgcgttgtaatgctttccgtgaggttactatactgctatcaagcaggatcagctcgttatgacagctctgtttcgaatttctgctggcctcggcaagcttgatgggagtaaatcgaagaagcctttgat

SEQ ID NO: 30926 - DNA, 310 bp, Zea mays
  Clone ID: UC-ZMFLB73100C03_FLI
ggctcagctgtaatactacaaatttgagcaagttgcagagcagaactgaggttggttaactaggaacgcagccatggcaagcagtgccgtcatcgtccctgcctctccaagaaagttggagggaaaggtggccgtgatcactggcggggcgagcgggataggggagcgcacggcccggctgttcgtggagcacggcgcccacgtcgtggtggccgacatccaggacgaggccggcgcgcgcgtctgcgccgatctcggcgcgggtgccgccagctacgtccactgcgacgtcaccagcgaggacgacgtc

SEQ ID NO: 30927 - DNA, 1463 bp, Zea mays
  Clone ID: UC-ZMFLB73100F03_FLI
ccgccgcagagattgcagatgatcgggtcgcccagagcaaaacggaggacggaaagtttagtaggaaggagacgatgaagggaagagaggagcagaagggagaaggggccagtgatggggtcacccagaccaagactgaggatatgaatgtgactaggaaggaaacgatgaaggggggagagaggaagggggacgggagtaggaaggagatgatgaaggggagggaagagcgtgtgaaaacggaagagaagacagggaaggaaaaggaggaggaaaagagtggctcaggattcatattcatgtgcagtgcaaggacgaagccagaatgctaccagaacggcgtgtttggccttcccagggggaagatggatgtggtggagaagatccagcgagggacgaagctgttcttgtatgattttgacctcaagctactgtatggggtgtacaaggcagatacaaggggaggattggatcttgtgcgtcacgcctttgatggcaaattccctgcacaggttaaatttagcgttttcaaggattgtcttcctattcctgagagtagtttcaagcatgccattaaggagaactacagctcaaagggcaggttcacccaagagctcaacactaaacaagttcaaagactattggcactgttcaagcctatcagcctttctaaaccagctccacaacatattgaggatattcgaaaaccaagtgattatgaagaaagaagacagttgcaacatattgaagaaagggctgcacctattaatgtccacgcacatcctcttgaagatcggtacaagatgacacggtcattacatccgccactttttgatgagcctcgacgtggtttggtgctaaatccttatcatatgcaagagcctcaacatgttcctcttaattactatcaccaagtggctactaggtctccataccatcaacctcatatggatattatgcacgaaagaactgcagctgaggtaactgtaagagatcaccaagcactgccaggagagcttgctgcacggtctgaacgcgtggatgagctgtaccgttcttacaaactctctacacgcgcaatggacctcagtccgggagcatcctacctgacaacttatgagcacccgactagtgtttatggtgagggcattcagaggccagctttgacaagggttagtggcccaagtgtgcctgtgtccacccgttattcctttgctggcccaccagcatattgatcatccagatgcaagcactcaaatcggccccagccgctgtacaagttactgtaggcaatggcttcttgtacaccgttggaagccaggatagaacctgatggtagtagctttgcagtttaattattgcctttggtttcttttgcaagataaatctatgagatgtaatgtggaccttgtttgacccaagttgttttaactaaaatgcaaaacgatggatgtctttgtgtt

SEQ ID NO: 30928 - DNA, 1707 bp, Zea mays
  Clone ID: UC-ZMFLB73100G10_FLI
tctgaaatgtgtacaataatcctgatgaactactaaaacacttgccttaatctgaaatgagtacaataaaacatatataaggaaactcaaataagtaaagtcttgcttgtccctcacaccataacatgactgatgaactactaaaacacctgcgaggtctgtcagcgtagcctcctcgacaccttctgcttctgctaactccggtgcaaggtagatccttgctatacttgacaaactaaaggaggaaagggagcaacaagaaggaaaatatggggaggaagatgtggatggttcatgtatatcagaagaagaagatggtgactgggatgtagatgagccagatgaggaggacatcatttacgtaaaatagcccattgtcttctaggaacttggtcatcattcatccagaacacagcaggttgcgttctgcatacataatattgcctatcaaggtagatttgccagagcagacttcgatcttcttaatctacctgacagtttcttaccatcatttgattttattgatggacatgttaagcctgttctagggagaaagattaactggatgaagacagggatcgttgagagtgatctggttctaacagttagtccacattatgttaaggaactcacttatggcccagataaaggtgttgagttggatggtgtccttcgcacaaagcctcttgaaattggaattgtaaatggcatggatgtttatgaatgggatccttcaacagataagtacaccagcgtgaaatatgatgcaacaacggtaactgaagcaaaggctctcaataaagagaggttgcaagctgaagttggattgcctgtggactcgagcatccctgttatagtttttgtcgggcgtcttgaagaacagaaagggtctgacatactcattgcagccattccagagttcgtgggcgagaatgttcagataatcgttcttggcacgggaaagaagaaaatggaggaggaattaatgcagctggaagtgaaatatccaaacattgctagaggcatagcgaaattcaatgttccattggcacatatgatgtttgctgggtctgacttcattattgtcccaaattcccatctgttcatcacctggaggacttgttgacacggttgaggaggggtgtcaccggattccacatgggttctttcaatgtcgagtgtgaaactgtagacctagctgacgtgacggcagtagcgtcaaccatcacacgggcctagaacagtacggcaccccggcgttccaagaaatggttcagaactgcatggcgcaaaacctatcctggaaggggcctgcgaagaagtgggaggaggtgcttctgggccttggagtcgaggggagtcaagctggcatcgacgacgcagaggagatcgctccacttgccaaggaaaacgtagctactccatgacgcttggtgcctcggaaacacgcgttggtgataggaagcatcttctaggatcctcctggccttgtggctggagtgagttgttcagtcagacacagtttcgcctctacaacatcttcctcctcctggtggtggtccgaactccgaagcaaattccagtgataaaggatgaactaagaggtccatgtttctattgctagaccttttgcctcctaaatagacgatgtactgcgcttgtaacaagaacctcactttcgtgtcaagtaatatcaacaggtttcat

SEQ ID NO: 30929 - DNA, 719 bp, Zea mays
  Clone ID: UC-ZMFLB73100H06_FLI
gcaagctggcgcaccagagcatctcggcggcaaggtcctgtttgaccatctctacgcgccgcgcctctccggcgcgggcctgcacaggctgctggccgacgacgtggtgttcgcggcgctcaaggacagcgcggccatggggtacctggctcccgagtacgcgacgacggggcggtccacggacaagcagggcgacgtgtacgcgttcggcgtggtggtgctgcaggtgctggcggggcggcgcgccgtgtcgccgccccacctccagcagggcggcggcggcggcgggcggctggacgacctcgtggacccgcgcctgcgcgggcggttctcgcgcgccgaggccgccaagctcgccggcgtcgcgctgctctgcaccgccgaggcgcccgcgcagcggcccaccatgaccgccgtgctgcagcagctcggcaccagcagccagtgatcgtcgtcggcggccggtacggtggtgggccggagtcggagctcgctggctacctggccggcgtggtgactgatttgtgttgagttagttaaccgctactgatctcggctactcgcatggtagctgcatttgctccttgtttgagctgagccccggctccttcctcgggagctcggttgatgtagttgtagtaaagtaagccggtgtgattgcattgtgacggagagtttttattagttaactaccgtctcatggcactgatgttgtatcg

SEQ ID NO: 30930 - DNA, 1220 bp, Zea mays
  Clone ID: UC-ZMFLB73100H08_FLI
ggacttggtcagctgcacggtgtcagagctacagccgctgagggcagaggcggaggacatcccgctggacatcgtttatgaggatgaccatgttcttgttgtcaacaagccggctcatatggttgttcacccggcgccaggaaatgccaaaggcacattagtcaatgctatacttcatcactgcaagatctccacatttacctgtttagcacgcagctcagctggtgatgaatgcccggattctacggatgaagacactgatgtatttcatgtggatcagtttgctgctgaagatgtaagttcagaagtccggaatgctcttgtgcgccctggtattgtgcacaggctggataaggggacaagtgggcttcttgttgttgctaaggatgagcattctcatgctcgattagcagaacagttcaagctgcatacaatccgtagggtatacatcagtcttacttgtggcgcacctaatccaaattctggcaggattgaggcttctattgcacgtgatcctaacaatcggattcgtatgactgctattgctggatcaggccacagatatgcacggaatgctgctagtaggtacaaagtaagagaggtctttgctggtggcggatccgcactagttgagtggagactagagacaggacgcactcatcagatccgggcgcatgcaaagtacatagggatccctcttctcggcgacgaaacatatggaggtacccagagcatggcgttatcgctcctgagaccaaggagtccttcgaaatatcacagcggcctttcgaatctgttgtctaaagtggacaggccttgccttcatgctgcatcgcttggattcaagcacccacgttcaggaaaggtccttgagttctcgtgccccccgccagatgatttcttggaggtgcttggtgaattgcgacgtgttacgtctaggtccagtgatgccccaaatggtgatggtgttttccggtgagggagatggatagaaccaaggctgaggatgtggaacaagacatgggaacccttggagatttgttccaggctcctagaaagagaaaagtgtttcgtacgagttttcctgatggctggtggaagtgagagggaaatgagtaggagaatctgtatgctttcggctgggctcatcagtacacacgcatttgttttgggctccgattcatgggcttccagcaggaagaacttcacgggattcgatt

SEQ ID NO: 30931 - DNA, 1408 bp, Zea mays
  Clone ID: UC-ZMFLB73101H09_FLI
cccggctgtcgacgaggcggtggaagagcgtgctgctgccagacggtgtctccggtgccggcggcagcgatttcctgtgccacctggacgcccttgagtccatcctcaacaccggcatgctcgagagcttcgtgccccgtggggtcgggcccgacaccttcacctgcgcactgcgccgcgtcgggctcctcggcttcgaggtcgccctggtgctgatctccacgtcgccctgaccaagtgaccagtacggattgcctcctcgctactggtcgccaccggggaagccgcggctcccccgtcatccacgacttcgggaccatggccacctcgcactggcgctggcagatgggtctgctgtcccgtcactctgacctgctcaagacggccgacgacgacagggcgctcctctagtgtgccggcgccgagtttgcgctcacggctaacttgctcatgccgttggacgcgcccggcacacggtgcctcatggagttatccttgtatcggaggcagggcatcattaagttccacaacccttccccctcctcgtagaattgcttgtccctgttgatcgaagtgagactgaatcagggggcccgcactcgcacctcccacgacctctttccgccatggggctccggattccaccgtttgtcaggcatgagtagcgagcgatggactggcggatcccggtagagacctgaaccccgcgccaccaccatcgccacagcaggctacatgtttgttctcttgttctagacgcaagcagcagatgcgaaataggcatccgtctcatggtggggaaattgttcacagttgaggatgtcgtaattggtggcctattcgtgatatctcttcttctagagagtatgcaagacaaggatttgctttgggtcttgttgttgtgctcaaatcgattcgggcaatcaaggaagctaaggacaatattttggggcgccagtttggatttggagcaattgtgaggtctgaccgtgtttcacaacagtggacatgtgacaaaagctcacccatcgttaaggaatttgtgagtgtggatgtagaactcggtggcaagaaacgatacttgacagagcctgcagttgccgtgattttggaattagttaggaagtggtggaagatttgtgcaggcatgatgctatcatatcagaagaatttttgctcaacttttggtgagcactggaagaggatagagtggtgatgcccatgacatatactttgttaagtctgtagtttactgttatgatatgttagacaatgcagtaagtgtcatcactcatggtctttgtattgcatttaattcgtgttccagagttctatagtcttgttacaggtgatcgtgaaagctctgtacataatcttccatatatgtttatgctatctgatgtttcgt

SEQ ID NO: 30932 - DNA, 1403 bp, Zea mays
  Clone ID: UC-ZMFLB73105C12_FLI
cggtcctctcccatccgctccgctcgcagcccctccccttgccccccgcgatgtcgtcgtcgtcaccgccgccgcggcccgacgacgacgacggtgcgcaggaggtgggcgccagcgatgggaggtcgctgggctacggcgaggcggagtactgggacgcgcggtacgtggaggagggcggcgcgccgtacgactggtatcaacgctacgacgcgctccgccccttcgtccgctgcttcgcgccgccggcgtcccggatcctcatggttggctgcggctccgcactcatgtcggaggatatggtcactgacggctatgtggagatagtgaacattgacatttcgtcggttgtgattgagatgatgagaaagaaatacttcgatgttcctcagctgcaatacttgcgcatggatgttagagatatgagtatgtttccggacgaatcgttcgattgtgcaatcgataaagggactctggactcattgatggtaagtaggagtaggtaacattaagtcaccatgtctttttccttatttctggacttcttcagcaatgccgtcttgctgctttcatagtgtggtgtggatgctcccctcagtgcagctcagatgattttggaagtggacaggttttttagtgtcttgctgcctttctgaagtatcactctgcagtgtcatctgggccaagatatcttgtaaatttcaacagccctgcagccttatcagttatacttttttattgcaggcttcttaaaccaggaggaacctttattttggtacgcacttttgtacatttgctctgaaagtagtgctgttgaggacaattttgggtctgagttctagattatttctccattcctcttcttagtcatgggcctatgggccttagtcacatacacagcccagcatcaacaatgttgaaaccctgcaagacctgtgttcactggaaagataacgaggcgtgtactggatcctgttccactgaccgagaggggtagactccctgatggatttgtcccagaggatcctgactcccattatgtctatgtctgcaagaagatgcagggattaacaggcacaggttccccaactgtaaaccacatagagaggcaaggggaagaataaacaaataggctgatttcacctcccacaagattagtggattgttatgatttatatacaagatcagatacgtttccaccattgttgtggccatccaaatgtagaagcgtgccattgcatatctaactgatcttgtaaaagttgcaagaatccgggagtcaatgctttgcgcaagagctgtcctttttctttctttcttttctgtatcatcttgggaagcacaacggaattgtttggtacattcgaggaagagatttatttttattacgccccgtttggatc

SEQ ID NO: 30933 - DNA, 1547 bp, Zea mays
  Clone ID: UC-ZMFLB73105D03_FLI
ggaagatcagtttgtatcagcaaatagccatctaatggatgcctactccagaccgaaattctacaacgctggagcgatggaatggctttgctttcgcctggatgtgctgtcatcccttacatttgcgttctctttgatattcttgatcaatctacccccgggtttcatcgatccagggattgctggtcttgcagtcacatatgggcttaacctgaacatgctgcaagcatgggttgtctggagcatgtgcaatttggagaacaagattatatcagtagagagaatcctgcaatacataagcattcctgcagagccccctctttccattccagaagataggctggctctggctcagaactggccatccgaaggagagattcagctccttgacctccatgtaaaatatgccccgcagctgccatttgttctgaagggacttacagtcaccttcccaggaggcctcaagaccggtattgtcggaagaacaggaagcggcaaatcaaccctcatacaggccctcttccgtatcgtggacccgactatcggccagatactaatagacggcgtcgacatctgcaccatcggtctgcacgatctgagatctaggctgagcatcattccacaagagccaaccatgttcgagggtaccgtgaggagcaacctcgaccctcttggggagtacactgacagtcaaatctgggaggccttggattgctgtcagttgggtgaggaggtgaggaggaaggagcacaagcttgactcaccagtgatagagaacggcgagaactggagcgtgggtcagcgtcagctcgtatgcctcggcagggtgatcctgaagcggagcaagatcctcgtcctggacgaagccaccgcttcggtggacacggccacggacaacctgatccagaagacgcttcggcagcagttctcggaggcgacggtcatcaccatcgcgcacaggatcacgtccgtcctcgacagcgacatggtcctgctcctcgacaacggtgtggccgtggagcgcgacgcgccggccaggctgctggaggacaagtcgtcgctgttctccaagctcgtcgcggaatacacgatgaggtcgacgcacacgtagccacactactaggcagcccgcaactgagaaaggttgttttgctccacgccgtttgggggccgcggcaggctgactcgtcgaccacgccggcagatttttatgggtcgccggtgaggcaggcagcaggcttacttgtcgatgatgccgaaaagtgaaatattagaaagctagcgctattctgaacgtttgaggagttgagggggtacagggaatgagtcaagggcattaaggagttggtggaagtggttttgtgttagcatactatactagtgtagttctctgagcatgcatagcatgcatcaagaatatcttgagcttttagccacgtaccaggaatgtctcaaagtttttttttgggtaataatacctgtattcgatgggtggtaacactcctatactacgtctgaagaaatagtgaagcgtttgcacgttagct

SEQ ID NO: 30934 - DNA, 834 bp, Zea mays
  Clone ID: UC-ZMFLB73105D11_FLI
gcgagctagctagctactgacacccggcgccggcgccgagtacaatacaaggaaagcagcatggtgttcgagcagcatgaggaggaggcggtggcgccgggcgcggtgcacgggcaccggctctccacggtggtgccgagctcggtgacgggggaggtggactacgcgctggcggacgcggacctggccttcaagctgcactacctgcgcggggtgtactactaccggtccggggacggcctcgccaccaaggtgctcaaggaccccatgttcccgtggctggacgaccacttccccgtggccggccgcgtccgccgcgccgaggcggagggggacggcgcgccgcgccggccctacatcaagtgcaacgactgcggcgtgcgcatcgtggaggccaggtgcgaccgcgacatggccgagtggatccgcgacgccgcgcccggcaggatcaggcagctctgctacgacaaggtgctcggccccgagctcttcttctcgccgctgctctacgtccagatcacaaacttcaaatgcggtgggctggcgctggggttcagctgggcgcacctcatcggcgacatcccgtcggccgccacctgcttcaacaagtgggcgcagatcctcagcggcaagaagccggaagccaccgtcctcaccccgccgaaccagccgctgcagggccagtcccccgcggcgccgcgctccgtcaagcaggtcgggcccatggaggacctctggctggtccccgcgggccgcgacatggcgtgctactccttccacgtcagcgacgcggtgctcaagaagctccaccagcagcagaatgggcgccaggac

SEQ ID NO: 30935 - DNA, 910 bp, Zea mays
  Clone ID: UC-ZMFLB73105E02_FLI
cgaggcacatccttccacatcccagtgcagggcaatggctgcatcgtcggtttctttgggcgctccggacggtacctcaacgcgatcggtgtctacacggcgccgaaacccgaaccaaaagcaggtggtgatgaggccgtcgtcgccaggattgggccttggggcggggttggaaatgctctccatgacatcgcagagaggccgcatcgcctgcacagagtgacgatcttcagcgggacgatcgtaaactcgctggagtatctgtacagcgatggcgacgggcagcagcacaccaccggtccgtggggcggctgcggaggaactggtcgaaagattcatcttgcccctgaagagttcatagtggaagttactgggacattccatccatgcgcgtgggacagaacaatacccagtgtcgtgtcctctctgacgctcgtgaccagcacgggcaaaacacacgggcctttcggaacgcagctgggagccgcgttccaggttccggtgcagagcgacagcaggatcgttggcttcttcgcccacggagacaattacatcgaagcaattggcgcctacgtgaagaaattgacagaatccagcaaccgttaactcttggaacaacttgcagctgttcacactgtttcttgggccattgctccttaaatttagtccagatggccaaggagcaaccaaacagaaatcgctatggcagggaagatggactaaactggactgtggcacctccagcatagcctgctcttagattagtgaccagacatcatcgagatatttcgatattataataaatgaggaacccatctcagatgtttatgttagctcctcagtttttgcttctgaatgattaatttagatcttccttatttttgcaataaatgaggattcttttctgtct

SEQ ID NO: 30936 - DNA, 908 bp, Zea mays
  Clone ID: UC-ZMFLB73106A02_FLI
tggaccccggccgccccaagtcgcggtcgtcctcgcgccgcgccagcgccccgctgctggacgcccgcagcagcggcagcggcggcggcgaggagtggtgcgccaacaaccccgcgtcctcgccgctgccgtgctacctgccctccgggccgcggcgcatcgccgtgccgacctcgcgccagttcccggactacgactggtgcgtgctggagaaggcacggccggccacggcgcagagcacgccgcggtacctgcaagcgcacgcgccggccaccccgaccaagtccgtcgcgggctactcgccgtcgctcaacgcctgcccgaactacatgtcgagcacgcaggcgtccgaggccaaggtgcggtctcagagcgcgcccaagcagcgccccgagctcgcctgctgcggcggcggaccgcggaagcgggtgccgctcagcgaagtagttgtcgtggagtcgtcccgcgccagcctgagcgccgtcatgggcatgcagcgcgggtgcggcccccgggcgcaggaggccttcagcttcaggacggccgtcgttggccgcatggaccgctcgttggaggttgcaggcagtgagaacgacaggctggcgttcttgcagaggaggtggtgactggtcaggtccgtccgatcagcaagctccattggaaatgccaacaagatgacgagaggctctttcagggagtaattgagaataagaacgttttcatgtgttcctgcgagtgttctcgtcgtttttctttctctttttcttgtttttgcaatgtgatcaatcatgcgactagtgtttcttttctttttatcagtggccaacaagtgtatgacggaaatttgattcatactgcacttggcatgtaaatccttgctcttattaatgctgttcttggattgtgtc

SEQ ID NO: 30937 - DNA, 1695 bp, Zea mays
  Clone ID: UC-ZMFLB73106B10_FLI
gcatgatctagaagaacaatacaaagaagcaaagtctactattaaagaaaaggaatatgtcatatttaatcttctgaaatcagaaaaatcattagtggactgtgcatataaccttcgtgcggagctagaaaatgcagcagcagatgtttctgggctattctccaaaatagagcgcaaagacaggatagaagatgggaacaggtcgatggtgcagagatttaggtctcaactgacccatcagctggatgcattgcataaaactgtatccagttctgtcatgcaacaggaggaccaccttaatgaaatggaacatgatatgcaatcctttgtttcttcaaaagatgaggctgcacaagggctaagagagggtgtgcaaaagctcaaagtcttgcatggttccggtatcactgctctggatgaattagcaggtgaaatcgacatgaactcgcggacaacatttgagagattaaattcacagatacagtcacacacatcagcccttgagaactgtttcggaggaatcgcttcggaagcagataacttgttagatgagcttcagcgcagcctatcgaaacaagaagagaggctagcccatttcgcagtgaagcagagggagggacacctgagagctgtggaagcgtcacgttccatctcaaagatcactgctgggttcttccactcgctagatgtccatgcatctaggctcaccagtattctggaagacacacacagcgtgcaagaccaacaacttcttgaccttgaaaagaaattcgaggagtgcgcagctaatgaagaaaaacagcttctagagaaggtggcggagatgctggcaagttccaacgcacggaagaagaagctggtccaaacagcagtgggcagcctccgggagagcgccgtgaacagaacgagccacctgcagaaagaaatctcgacggcccaggacttgacctcgtccgtgcgcgagaagtggggcttttacatggaagagaccgagaagaattacgctgaggataccaaagcagtcgacagcggaaggtcttgcctggccgaagtgcttgtagaatgcaaggcgaaggccaccgtgggtgcacagcaatggaagaacgcggaggattctctgttcagcctcggcaaaggaaacgtggagtcagtggattctatagtcaggaccgggacagaggccaacgaattgctgcgttccaaactgtcgtctgcggcatcggcaactcttgaagatatcgacgttgcaaacgaggctctcctttcttcaattgacagctcgctgaagcttgaccgcgacgcgtgcgcgaacatcggggcggtcctcacgccgtgccacggggagatgagggagctgaagggggagcatcaccacaaggtcgtggagatcagcgaaagcgccgggaagtgcctggaggaagagtatctggtggacgagccgtcgtgttcgacgcccaggagaaggcggatcgacctgccgggcgtggagtcgatagaggagctgcggaccccgggctacgccgagcttctcaagtcgttccgggaggcgagggggagctggaagctggcgaatggagacgtcacagggcatttgccagaggcggctcaggatccggcatcatcgccgccgccggccgtgggttcaagaacccctctcgtaggaagaaactagatttaccgaaaccatgtagaaag

SEQ ID NO: 30938 - DNA, 1033 bp, Zea mays
  Clone ID: UC-ZMFLB73106B11_FLI
ccgggctccgagttcatcacgcacgcatggaaggctcggcggcacaggcgccggggaagaccgtcctgagggtggtggcgatctccggctcgctgcgcagggcgtcggccaacaccggcctcatccgcgccgccgcggagatctgcagggagtcgatcccggggctggaggtggagcacgtggacatctcggagctgccgctgctgaacaccgacctggagggcccgggccccggcgcgttcccggcggccgtcgaggcgttccgcggcaaggtgcgcgccgccgactgcttcctgttcgcgtcgcccgagtacaactactccatctcgggcccgctcaagaacgcgctggactgggggtcgcgcccgcccaactgctggggcgacagggccgccgccatcctcagcgcgtcgggcgggtcggggggcagccgctcgcagtaccacgtccgccaggtcggcgtcttcctcgacctccacttcgtcaacaagcccgaggtgttcaccagggcgcaccagccgcccagcaagttcgacgacgacggcaacctcgtcgacccggacaccaaggaccaggtcaccaaggtgctcctggcgctgcaggctctcgcgctcaggctgcacctggggaagctcgctgttgctgcacactcttcttgaacgtcgtcgtcgtcgggggtgcactaaactacactacacatcgtcgccgagctccaaatgccgtgccgtgtccgtgtgtgcgcgcttcaataaattctcggcgtccaacttttaatgagtgatgcacaatcgtgttcatttgtgagatgccctgatcgaatcgatccgtttgcgttttgccacgatcatcaaagaccaaaaggttagctggttgaaaacaaattggctttgtcatttgctaggagatactgcgacttgagtaccctgcgtgcattcttggtctcatcgaagtcgccttgtaatttgactcagagaaagaagaagaggaggaggaagcttccgtgctgacagtaccaacatcagcaagcaacctc

SEQ ID NO: 30939 - DNA, 1781 bp, Zea mays
  Clone ID: UC-ZMFLB73106C01_FLI
gccagcgcagcgcctctctgctactgtgctggctgacgccggtggggtgtgagcgaactgcgagctgctgccacccctgctgccgcggtcgaccgccggccccggaccgagatggacgctcggtgggcggtgctgctcgcgctgctggtcgccagcggcggcgtccgtgtctgcgccgccgctggggccaagggcgccaactggctgggcgggctgagccgcgcgtcgttccccaaggggttcgtgttcgggacggcgacgtcggcgtaccaggtcgagggcgccgcgtccaccaacggccggggcccctccatctgggattcattcgcgcacgtcccaggaaatattgcagggaatcaaaatggagacgttgcagtggatcaataccatcgctacaaggaagacgtcgatctcatgaaaagtttgaactttgatgcctaccggttctcaatctcatggtccaggatcttcccggatggcgaagggaaagtcaatccagaaggtgtagcgtattacaataatttgataaactatctgcttcagcaaggcatgactccttacatcaacctttaccactatgatcttcctcttgcgcttgagaagaaatatggagggtggttaagcgcgaagatggcggacttgtttacagactatgctgacttctgttttaagacctacggcgatcgcgtaaagcactggtttacattcaatgagccaaggatagtagcgctacttggctatgacacagggtcaaatcctcctcaaaggtgcaccagatgcgctgctggtgggaattcagcaaccgaaccttacatagttgctcataattttctcttggcacatgctactgcagttgcaagataccgtacgaaatatcaggctgctcagaagggtaaggtcggaatagtcctggacttcaactggtacgaggctcttacaaactcacctgatgaccaagcagcagcccaaagagccagggacttccacattggctggtttgttgatccattgataaacggacactatccacagataatgcaagatctcgtgaaggagaggctgcccaggttcactcctgagcaggctaaactggtgaagggctcggcagactacatcggtatcaacgagtacacatccagctacatgaaggggcagaagctggtccagctggcgcccagtagctactctgccgattggcaggttcaatatgtttttgcacgcaatggcaaaccgattggaccacaggcgaattctaagtggctctacatcgccccgacggggatgtacgggtgcgtgaactacctcaaggagaagtatgggaatccaacgatctacataacggagaacggaatggaccagcctggaaacttgacccgagaccagtacctgcgcgacgccacgagggtgcggttctacaggagctacatcggccagctgaagaaggccatagaccagggagcgaacgtggctggctacttcgcctggtctctcctcgacaacttcgagtggctggcagggtactcgtccaagttcggcatcgtctacgtggacttcaacacgctcgaacgccacccgaaggcgtcggcctactggttcagggacatgcttcagaagcattgagatctccagagccgagcctgagcacggaaggtaccattttgttcagcttcgcctagtgtttgggatggcccaatggttcaaatccggctcagtgcctggctaccaaaatgggaacaaaggacagctaccccgatcaattgtgatgttgtgtgtttgtgggt

SEQ ID NO: 30940 - DNA, 960 bp, Zea mays
  Clone ID: UC-ZMFLB73106C06_FLI
tgcttgtccaaaccaaacagcgtggatgcatgatactgggctggggtaaactgacaaaatcggtatgggctgggctccatgctagctgagctagtatcaggaggcccccatgcataataattaataggacggaatcttgacccccggcccaaacatatttgaactccatcgtttctgcaggcgacgttggcgccaccggcagcggggaagatgatgaaggcgctggtgctgtgctactccgtcatcgtcttcaccttcttcctctcgtcgatcacgggctactgggccttcggcagcaacgtgcagtccaacgtcctcaagagcctgatgccggactcgggccccgccctcgccccgacgtggctgctgggcgtcgcggtcctcttcgtcctcctccagctgctcgccatcggcctcgtctactcccaggtggcgtacgagatcatggagaagggatccgccgacgccgcccggggccgcttctcgcgccggaacctcgtcccgcgcctgctgctgcgcacgctctacctggccttctgcgcgctcatggccgccatgctccccttcttcggcgacatcgtgggcgtggtcggcgccgtcggcttcgtcccgctcgacttcgtgctccccgtcctcatgtacaacatggcgctcgcgccgccgcgccgctccccggtcttcatcgccaacgcggccgtcatggtcgtgttcgccggcgtaggggccatcggcgccttcgccaccatccgcaagctcgtgctggacgccgacaagtttaagctcttcagcaacaatgttgtcgactaaaattccaacgcatcttgctcttatattactcctcagggtgttgtatatcatcgagttgttgtagcggtaatgtgagtaatcagggcatactagctgtatgtgtacatacattccactattcgagagtataggcaaatcatcatctaagttatt

SEQ ID NO: 30941 - DNA, 986 bp, Zea mays
  Clone ID: UC-ZMFLB73106C09_FLI
cgcgtacgtgtcgtcgcagggagaaggtgaccgtctcggcgatgcgcgcgttcatcaccctggagggcgccggcgcggacaagacggtcgtgcagtggggcgacaccgcggactcgccgaccgggcccaagggccggcccctcggcacgttcaactcggcgtccttcgccgtgaacgcgcagtacttcctggcaaggaacatcactttcaaggtacgtacgtagccggcaccacgcacccgtgtcgtgtgttccctagtactatatatatgtgctccttagttctggcgttggcgcgcgggacagaacacgtcgccggtgccgaagcctggggcggcggggaagcaggcggtggcgctgcgggtgtcggcggacaacgcggcgttcgtggggtgcaggttcctgggcgcgcaggacacgctgtacgaccactcgggccgccactactacaaggactgctacatccaagggtccgtggacttcatcttcggcaacgcgctgtcgctgtacgaggactgccacgtgcacgcgatcgcgcgggactacggggcgctgacggcgcagaaccggcagagcatgctggaggacacggggttctcgttcgtcaactgccgggtgacggggtccggcgcgctctacctgggccgcgcctggggcaccttctcccgcgtcgtcttcgcctacacccacatggacgacatcatcgtccccaacgggtggttcaactggggcgaccccaaccgcgagctgacggtgttctacgggcagtacaagtgcacgggcccgggcgcgacctatgccggccgggtggcgtggtcgcacgagctcaccgacgacgaggccaagcccttcatctcgctcagcttcatcgatggcaccgagtgggtcaggctgtagctgtaaatctcgcagccgctcacgccaccacgccgcacactgtaaagaaacagagcaagacagtatatacagattttatactttccgttc

SEQ ID NO: 30942 - DNA, 2331 bp, Zea mays
  Clone ID: UC-ZMFLB73106C12_FLI
gttttcgatttccttcctacgcgtctcgcgttggcagcgcgatccttcggagccgacgaatcccaccactgcccgcgccgcctccgcagacgacgcaactgacagtcaccgacgcgacgcggctcgcctcctccgcccttctgttcagcctcctcgcccgcgatggctccgggcaccgacgccggctacggccagtgggcggcggcgtgccccccgctgcggcggaacctgcagctgctttcgcccgacgaggttgagctagcaaaaatgctgttgaatgaaggccagattcacctgttcgaacactggcctgaaccaggtgtcgatgatgacaataaaagaggcttctttgatcaggttcgccgacttaattcaagctatcctggaggtctggtatcttacatccagaatgccaaaaaacttcttgcggattcaaaggaaggcaaaaacccatatgatggtttcaccccttctgtgccttcaggggaggttttgacttttggcaatgacaattttgtttcactggaaacagctgggataaaagaagcctgcaatgctgcatttgttcttgtagccggagggcttggcgaaaggcttggctacaaaggaattaaggtagcacttccccgggaaacaactactggaaaatgtttccttcaacactatatagagtctatcctggcttttcaagaggccagctgcaaaatggttgatgaggggtgccaaacaaagattccatttgttattatgacttctgatgatacaaatgcgctaactatcaagcttttagagtcaaactcctacttcggaatggaaccatctcaagtgaaaatactaaagcaggaaaaagtagcgtgtctagctgacaatgatgcaaggcttgcattagacccaagtgacaagtacaaaattcagacaaagccacatgggcatggagatgttcattctcttctttattcaagtggcttgcttgaacaatggaagactgaaggacggaagtgggttctctttttccaggatacaaatggattgcttttcaatgcaataccatcagcattaggtgtcagtgccaccaagggttacaatgtaaattctctcgctgttcctaggaaagccaaggaagcaattggaggaattaccaaacttactcatgtcgatggtagaacaatggtcatcaacgtagagtacaatcagcttgatccactccttcgtgcaactggacatcctgatggagattcaaattgcgagacaggctattctccatatcctggaaatataaaccagttgatactggagcttggaccatatattgaggagctcaagaaaacacatggcgccatttctgaatttgtaaatcccaagtatactgattcgaccaagacagcatttaaatcatccactcgtctagaatgcatgatgcaagactatccaaagacgttgcctccctcagcaaaagttggattcacagtgatggatacatggcttgcttacgctcctgtgaagaataatcccgaagacgcagctaaagttccaaagggcaacccttatcatagtgcaacatccggagagatggcaatttacagggcgaacagccttattctgagaaaggctggtgctcagatagctgatcctgttgttcacaccttcaacggacaagaggtagaggtttggccacgcgtaacctggagcccacggtggggtctcaccttcaagagtgtcaaggagaaagtgcacgggaactcttcagtttctcagaggtcagctttggtcatcaatggtcagaacgtcttccttgaaggcctctcgttggacggcactcttgttgtcaacgccgcggatgaagcagaggttaaacttaccggtcatatacagaataaaggctggactatccagcatgtcgactacaaggacgcctcggagaaggaagagatcaggatccgcggatttaagttggagaagattgagcagctagaggtgaactacacggagccaggaaaccatagcttgagtgcatgaaacaaaacattcttggttgacccgactagcttcctaccgattgggaatagttcgcattgcctcccagattctgggaggccattgccagcataagttgaagctgttgtattttagttcaaaattaaactagtggatgacaaatatttaagaatggaggtagtaataaggagccaagtgcttcaccaatcattccaaattcaatattctttatgtatatacgtactatttcatagccaaacgttttctcctcacctgtgtaatcggagttgattatttatctgggatctgatgttcatgttacaattttgaattttt

SEQ ID NO: 30943 - DNA, 1227 bp, Zea mays
  Clone ID: UC-ZMFLB73106D02_FLI
ccacacgtccggctaagtcgtctacatcaccgcaaccttgtcaagctgattggtatatgcattgagcggagcacaaggtgcttggtttttgagctcgttccaaacggaagtgttgaatctcatctacatggctcagataaaatatatggcccgactgattttgacactagaatgaaaatagccctcggcgcagcaaggggactagcctatctgcatgaggacgccaaccctcatgtcattcaccgggatttcaaggctagcaatgttctactggaaaacgatttcacccccaaggttgctgattttgggctggcaaaggaagcatcagatgggatggatcatatttctactcaggtcatggggactttcgggtacgttgccccagagtatgcgatgacagggcatctgcttgtcaagagcgacgtctacagctacggagtggtgctcctggagctgctgtcaggccgaaaacccgtggacatgacccagccgccggggtccgagaacctggtcacctgggcgcgcccgctcctcaccacgcgggaaggactgcagcggctggtggacccgtcgctcccggccggttacgacttcgagaagctggccaaggcggcggccatcgcgtccatgtgcgtgcacgtcgaggcgtcgcaccggccgttcatgggcgaggtcgtgcaggcgctgaagctgatccacagcggcggaggcggcgacgagacctgcagcggctccttcgtgggcggcgcaacagaggagtccccgtggaacgacgtcagcaggagctcgtggaacgacgacccgccggccactccgggcccggcgctccccctgggatacggctcggaccctgccggcgccgacgagcgcaggccacggtcggcgtcgagcgcggtgctggacaagatcgagtccctggcgatgtacgactggtccggcccgctgcgcaccaaggggaggggcagcttctacaggctgagggggagcatgagcgagcacggtcgcccctcggacgacggtagcgtcgaaggttacttgatgtagccggcggcccgacgaccgtgcgcagcagattgccgcggcaggcatacctcgcgtttcttttgtctgtctagaattgtatagctgctgcttgacgagattttggtgcctgttgcgaagaatacatcgttctggacatcggacgtatccgatgcagtttggtcaagagatgttcagaatttgcgt

SEQ ID NO: 30944 - DNA, 704 bp, Zea mays
  Clone ID: UC-ZMFLB73106D06_FLI
gcatggctacatgtttgagcttatccagagggctgacacacctgagcctctttgccaggtcatgcttcgtgttggtgaccttgagcgttctatcaagttttatgagaaggccctagggatgaagctcctaaggaagaaggatgtacctgattacaagtataccattgccatgttgggctatgctgatgaggacaagacaactgttctggagctgacgtacaactatggagtcacagaatacagcaagggcaatgcatatgctcaggttgccattggcaccaatgatgtgtacaagagcgccgaggcggttgatctggcgaccaaagaactaggtggcaagattttgcggcagccagggcctctacctgggatcaacactaagatcgcctcttttgttgatccagatggctggaaagtggttctggttgacaacaccgacttcctcaaggaactccactgaaggctcgggatacccaggtgctgtgctaggatgtagtaatgcttgtctgtggtgtaataagatgtgggtggtttgtttctgccctgatgaacttataatactgaatgttgctacagaggttgtgcttctgccagtgaggtttgggatttgctatgtaactgtgcctgcgggctccgattctggcgctgttcgtacactgtagaagccagtgaatcccaataaacccagcttcacaggctcctct

SEQ ID NO: 30945 - DNA, 669 bp, Zea mays
  Clone ID: UC-ZMFLB73106D07_FLI
gcaacccgaacgagcgcgtcggggtctactacgaccgcctcgacgtgtacgcgtcgtacaagtaccagcagctcacggtggcggcgtcgctgccgcccgcgtaccagggccacggcgacgtcggcgtctggtcgccggtgctggccggtcccaacgtgcccctcgcgccctacctcgccgacgcgctccgccaggactgccaggcggggtacctcgtcctccaggtcaaggtcgacggccgcgtccgctggaaggtcggcagctgggtctcgaaccactaccacctcttcgtcacctgcccggccttcctcgtcaccgccggtggcaacggcgcgcccggggccgccgggttcaggttccagaccaccacctactgccacgtcgaggtctaggtctagccggcctcttgcctgtctgtgctgctgtgtcgtccgtactccgtatacaaacagaggccgccgcctgcgaaggaaacagagagacaaaggcctgccttgcgccatgtatcatgggatggctgcctgtctccctcgctctctctaagctagctgcactgcctgcatgctgctggtgtgcatgttagtgctgcagtgatgcggatgtaaaggatggtaaaaaatttctgcttttcttcttcttttcagtaaggttctcctttaacgtacgatc

SEQ ID NO: 30946 - DNA, 473 bp, Zea mays
  Clone ID: UC-ZMFLB73106D10_FLI
ccgagggacagggcgtactacgaggccctcgcggcaagcgggtggggcggcacggtggagtggttcgagtccaagggccaggaccacgtcttcttcctcttcaaacccgactgcggtgagtccgtggcgctcatcgatcgactcgtcgcgttcttcgctgcgaactgaaattcgtcatgtgtgctccctattttatacatagtagtgacatataaaactgccctataattttaaaataagtatattttatataatttaagtcaccaataaaatatcttgctctaacagtaaaacgtcaaatctaaattatagagcagcttattatggtgtagtatatttgagtcatttgaaaatgtgtactataacttttttactaaattttatgaaacacgttattgttggagtagctttttctatgtagaactatatatttcaatttgagacatcagttatattattggagatgctcttac

SEQ ID NO: 30947 - DNA, 1887 bp, Zea mays
  Clone ID: UC-ZMFLB73106D11_FLI
ctcacctgctggcggaggcggcccccaaaagccaaattccccaacccacaccacctccacactccagtaagcaccccgcctcccccctcgatctccctcctccaattccttctgctgctgcgactgaatcgaattgctccactgctactaatctctatactactactgcttgctcctgtttcaatcgatcaatcatgccgcgcgtaggttttttccggcgcaaagggttagggtttgctgtcggcgatgtcggatcggcagccgtcggaggagccggaggagcaggtggacctggagggggacgacgacggcatggacgacgacgacgccgggtaccgtcgccgcggaagccgggacgactcggaggagcccgaggaggatgacgacaatgacgagcgccacggcgacgccgacgacgacgccgggatggagccggagccggccggaagtaaaggcggggatgacacgggcaaggggcccgacgtcgccggtggcgggcccgaggacgaggaggagaggagcaagtgggatgacatgctcgccctgccgccccatggctctgaggtcttcattggtggcctgccccgcgacatcacggaggaggacctccgtgagctgtgcgagccgttgggagaaatatatgaggtgaggttgaccaaggataaggacacaaaggagaacaaggggttcgcctttgtcaccttcatggacaaggaggctgcgcagcgcgccatcgaggatgtgcaagacagggagttcaaggggaggactttgcggtgctctctgtcgcaggcaaagcacaggctgtttgttgggaatgtgcccaaggggctgagcgaggaggagcttaccaacactatcaaggggaagggtccaggtgttatcaacattgagatgtttaaggatcagcatgacccaaaccgtaaccgtggcttcctctttgttgagtattacaaccatgcctgcgcagactatgccaggcagaaactttcatctccaaacttcaaggttgatgggagccagttgactgttagttgggctgaacctaagggttcaacagatgcttcatctgcagctgctcaggtgaagactatatatgtgaagaacctacctgaaaatgtttctaaagagaagataaaggacctgtttgacaaacatggagaggtcacaaaaatcgttctgcctcctgccaaggctggtcataagagagactttggctttgttcactttgcagaaagatcaagtgcattgaaggcagttaaaggaagtgaaaaatatgaaatcgatggtcaagtactggaagtgtccatggccaaaccattggcagataagaaacctgatcattcacacaggcctggaggaggccctaattatccccttcctccctatggtggtggtggctacatgggagatccatatggtgcttatggtggcggcggtcctgcatacaaccagccaatgatatatggcagaggaccagcaccggcaggaatgaggatggtgccgatggtgcttcctgatggccgccttggctatgtcctgcaacaacctggtggaatgccgcctccgcccccaccgcggaggggtagtgaccgaagagacagtggcagaggtggcgaagggcacagccggcgatatcgcccttactagcttttcccttatgggctctactcccatcatgtggtatgaagcgtttaacttatgagacgagataggagcctgtgttcttgtcccagtataagatctgcgatggcacgatgcttgtaccatctgtttacttatttttatcatgcagtgcatgtgacttgaaactgtgatggacttgtattgctttctgccttatggcacctgtagtagtgaactgatgaaggaagttcatgcggactc

SEQ ID NO: 30948 - DNA, 2198 bp, Zea mays
  Clone ID: UC-ZMFLB73106D12_FLI
ggctgatgtcttccggaagcaagggcaggagtggtactgcacatctggtcttcccagtgatatatctgtggtagttggggaacagtctttccatcttcacaagtttcctctactatcgaaaagtggcctgttggagaagcgaatcagagagaaaatcgataacagggacgatagctgtgcaattgatctatctgatattcctggtggggcgaaggcttttgaactggctgccaaattttgctatggtgtaaagtttgaaatgactgcctccaacgttgtacaccttcgttgtgctgctgattaccttgagatgacggaagagatatccgaggggaatttgatcgcagagacagagagcttccttacccaaacagtcctcaagagctggaaggattcagtcaaggcgcttcaaacttgcgacaacgtccttgatgttgctgaaagattgcagattgtaaagaggtgtgtagactctattgcgactagatcatgcagtgaccctgatttatttggctggccagtagcccattatggaggccccatgcagagtcctggagggagtctcttgtggaatggtattagcacgggagcaaggcccagaaatagcagcccggattggtggtatgatgatgtctcatgtttaagcctcccgttatacaaaaagctcatctcagccatggagtatcggggcatcagtcagggggttattgttggatcccttaaccattatgcaaaaaggcgtttgcctggtttgaatcggcgtaaaagcatcggtgatgctagcaactgtctttctatgactagtttaacatccatcccttctgaagatgaccagaagtatcttctcgaggagatcgatagactactccctttccaaaggggtgttacatcatgcaagctgctgtttggcctcctgcgcacggcaatcttcctgaaagccagcccctcctgtgtgtcgaacttggagagacggataggtatgcagcttgacaaggccagcttggaagaccttttgataccgaatgtctctgattctgtggaaaccctgtatgatgtggagtgtgtgcagaggattgtagaccatttcttgtcaatggaccaagaaactggtggggcctcccctggcattggtgaagatgggcaaatgttagcatcaccatccttaatgccaataactatggttgctaagttgattgatggctatctggctgaagttgcaccagacatgaacttgaagttgccaaagtttcggtctttggctgctgctataccggattatgctcgtccaatagatgatgggctttatcgtgctattgacatatatctcaaggcgcacccatatctgccagaatcggacaaggaagagctctgccgggtgatggactgccagaagctgtccctggaggcctgcacacacgcggcgcagaacgagcgcctcccgctccgtgtcatcctgcaggtcctcttcttcgagcagctccagctgcggagctccatcgcggaatgcctcatgatctcagagcccctagacggcggcggcggcttctcgcggcagctcggcggcctgcctgtctcgggcgagcacctccgcggcgctggctggcccctggccgccagggagaaccagacgctgcgggaaggtatggacagcatgaagcagcgcgtgtcggagctggagaaggagtgctttgccatgaaggaggacatcgagcggctcggccgcagcaggagcgcgggcaagagcaggttcccgttcgcgctcgccgcaaagccccacgtctgcggcaccaaggacaaggaggctgctccggaatcgtcaaagtcggagacgtcaaagtcgaaggcagcggcggcgaccaggagcgatgacaagttggctgtggtcaagggcggtgccgctgccgccggtgatggcgggccgcagctgaagcacaggaagcacaagacgagcctgtctgcctgttagtttttagatatctacaagcacacagtataggccctgaatgaacaacgactgtgagtgagagacgctatcgatgtgatgctcatttttttttcttggacatttgctcagtgaaaaatgcatagcgttaccagcgtgtcttggacttccagctgtaccatgcttccccgttgtggttgtacatgtccatgaatcggaaaagaatttactagtagaatcctaccgagttcctgtg

SEQ ID NO: 30949 - DNA, 448 bp, Zea mays
  Clone ID: UC-ZMFLB73106E10_FLI
ggtgcgatgaagcgaaatttgagcaatacaagctggttgcaggtgattgtatcacggcagagatcacccagtctgtagagaagtgctttgagaagatcagaggactagagagctaagcagaagaattgacatcatgtccacccacactcggatcctaaaacctgctgaccctgcaccacatccgtgatcacgtcacaccacaagttgtgtgtccagcgcccaccacagcaacggcctcttgctgccagcagcctccgtgcctccagcagctctcctctccaaggaaaagtctgaagtccgcaaccaaacaagtgttctgcagctgctctttgccgttggttgaagtctgcaaccaaacaagtgttatgcagctgctctttgccgttggttggagttcttggctccacactttcagaaagaattcatgtatacataaaatttattatat

SEQ ID NO: 30950 - DNA, 1185 bp, Zea mays
  Clone ID: UC-ZMFLB73106F07_FLI
cttcgtcctcaacaccggcgcgaagatcccgtcggtcgggctcggcacctggcaggccgacaacgggctcgtcggcgacgccgtctatgccgccgtgaaggcaggttacaggcacattgactgtgctcaagcatacaacaacgagaaagaggtcgggtttggtctcaggagagtgctggacgagggcatagtcaagcgtgaagatctcttcatcacctccaagctttgggacattaaccatgcggcggaggacgtcccggttgcactgaacggcacactgaaggacttgcaaactgactacgtggatctctacctcatgcattggccggtgaggatgaagaaaggcgccggcttcggcccgcacgccgtcgtcccgtcagacatccccgcgacgtgggccgcgatggaggagctgtacgacgccgggaaggcgcgcgccatcggcgtcagcaacttctcgagcaagaagctggcggacctgctggccgtggcgcgcgtgcgccccgccgtcgaccaggtggagtgccacccggtgtggcggcagggcaggctccgcgcgttctgcgcctcccaagggatacacctctccgcctactcgccgctgggctcgccgggcacggcgacggtgaaggcgggcgcggtgctggagcacccggccgtcgtctcggcggcggagacgctggggaagacgccggcgcaggtggcgctgcgctggggcgtccagatggggcacagcgtgctcccgaagagcaccgacgaggggaggatcagggcgaatctcgacgtcttcggctggtccttgccggaggacctgctcgccaagttctctgagatcgagcaggaacggctgattcgtgcgggcttctttgttgatcccgacggcgtgttcaaatccatcgaggagttttgggatggcgagatctgaacaactgtcctgactgggaggagctgagtgacggaatttggccactggcaaggcgtactgtgcctgtggaagaataaatttatgcgtatgaactctgaaaggcagcgtagttttcaggtagtttgtgctcggcactccaataattcctcgatgctcaagtggtctatctatcctctaaactctaaaggccatgccgctcaagcggtcttttaagccagcatatgcacaatgggaaaataggtgctaagactctctccagc

SEQ ID NO: 30951 - DNA, 1335 bp, Zea mays
  Clone ID: UC-ZMFLB73106F11_FLI
accagttccaggaattcattgtcggcctcatgtccctccccatcaagctgccggggactaggctctacaggtccctccaggccaagaagaggatggccacgctgatacaggggatcatacaggagaagaggcggcggcggagggccgcccttgaggatggcggagagggcgagggcgaggccggtcccccgcgcgacgtcatcgacgtgctcataagcggcggcgacgagctcaccgacgagctcatatccgacaacatgatcgacctgatgatccccgccgaggactctgtgcccgtgctcatcacgctcgccgtcaagtatctcagcgagtgcccgcttgctctgcaacaacttgaggaggagaacatgcagctgaagaggcggaaaaccgacgtgggagagaccttgcagtggacggactacatgtcactgtcgttcacacaacatgtgataacggagacactgcggatggggaatatcatcaacgggatcatgcgcaaagcggtgcgggacgtggaggtgaaggggcacctcatccccaagggctggtgcgtgttcgtgtacttccggtcggtccacctcgacgacaagcgctacgacgagccctacaggttcaacccgtggaggtggaaggagaaggacacgagcaccatgggcttcaccccttttggcggtgggcagaggctgtgcccaggcctggatctggccaggctggaagcttccatctttctccatcacctggtgaccagcttcaggtgggtggcggaggaggaccacatcgtcaacttcccaaccgtgcggctcaagcgaggcatgcccgtcaggctcaccagcaaagactagctagctagtcactacgacctgcttgtgcatgccatgcatgcagatttcagtcacgtcatatgcaatatatattggaccctggaggttgcacgtgtacagaagagaggatgcaggagctagcagatgatcggaggtatttaggcagactgaaattgaatcgaccgcgaagagtagcacactactataccacgagtatgatctgtagtagtagtaataagaggaatatcattagtgtggtagtatttacttattatactactctctcttttcgtttttatttatcgtgttttagtttaaaaatgaactagcgaggttagtcaataggcgtgcatgcatggcccatcatggtcatggatatataggccttgatggttatactagtataagcagtagtgttatgtcacaagggattactgggatctgggatgatgatccacaatcccatctaaaacgaaaagagttaataaagattgttaagtttactgctggg

SEQ ID NO: 30952 - DNA, 2427 bp, Zea mays
  Clone ID: UC-ZMFLB73106G07_FLI
tcttctcaaagtctgccagccctcaccatggatttgcagcatactacacctttgtcgagaagatcttccaggccgatgctgttctgcactttggaacacacgggtccctcgagttcatgcctggcaagcaggttgggatgagtgacgcctgcttccctgacagcctcattggcaacatccccaacatctactactatgctgcaaacaacccatcagaggccacggtggccaagcgccggagctacgcgaacaccatcagctacctgaccccaccggccgagaacgccggcctctacaaggggctcaagcagctgtcagagctcatctcttcctaccagtctctcaaggacaccgggcgtggtcctcagattgtgagctccatcgtcagcactgcaaagcagtgcaacctcgacaaggatgtcccgctgcccgaggaaggggaggagctcccaccaaaggagcgtgaccttgtcgttgggaaggtgtacgccaagatcatggagatagagtcacggctccttccctgcggtctgcatgtcatcggcgagccgccgagtgccatcgaggcggtggccacgctggtgaacatagctgccctcgaccgccccgaggacggcataacctcgctgcccggcatacttgccgccacagtgggcagggacattgaagatgtgtacaggggaagtgacaagggcatactggctgacgtcgagcttctgaggcagatcactgaggcttcgcgcggcgccatcaccgccttcgttgagaagaccacaaacagcaaagggcaagtcgtcaatgttgccaacaacctcagcaagatacttggtttcggcctgtcggaaccatgggtgcagtacctgtccgcgaccaagttcgtcagagcggacagagagaagatgagggttctgtttgggttcttgggggagtgcctgaggctcgtcgtgcaagacaacgagctgggaagcttgaagcttgccctcgagggaagctacgtcgagcctggacctggcggcgacccgatccgtaacccgaaggtgctcccgacagggaagaacatccacgctctcgatccgcaggccatcccaaccacggctgccttgaagagcgccaagatcgtcgtggaccgtctcctggagaggcagaaggctgacaatggcggcaagtaccctgagacggtcgcacttgtcctgtggggcaccgataacatcaagacctatggtgagtcactagcccaggtgctgtggatgattggagttcggccagttgccgacaccttcggccgtgtcaaccgtgtggagcctgtcagccttgaggagcttggacgcccgaggatcgatgtcgtcgtcaattgctcgggtgttttcagagatcttttcatcaaccagatgaacctgctggacagggcagtgaagatggtggccgaactggacgagccagcagagatgaactacgtgcgcaagcacgcccaggagcaggcggaggagctcggcgtgtcgctaagggaggcggcgacaagggtgttctcgaacgcatcaggctcctactcgtccaacgtgaacctggcggtggagaacgcgtcatggaccgacgagaagcagctccaggacatgtacctgagccgcaagtccttcgcgttcgacagcgacgcccctggggcaggcatgaaggagaagcgcaaggcgttcgagctcgccctggcgacggcggacgccacgttccagaacctcgactcgtcggagatctcgctgacggacgtgagccactacttcgactcggacccgaccaagctcgtgcaggggctgcgcaaggacgggcgggcgccgtcctcgtacatagccgacaccaccacggcgaacgcccaggtgaggacgctgtcggagacggtgcgcctcgacgcgaggaccaagctgctgaaccccaagtggtacgaggggatgatgaagagcgggtacgagggggtcagggagatcgagaagcggctcaccaacaccgtcgggtggagcgccacgtctgggcaggtcgacaactgggtctacgaggaggccaactccacgttcatcgaggacgaggcgatgaggaagaggctcatggacaccaaccccaattcgttcaggaagttggtgcagaccttcctggaagccagtggcagaggctactgggagacaacggaggagaacctggacaggctcagggagctctattcggaggttgaagacaagattgaggggattgacaggtaaattgatttgccagatcggtcggccgatcggttccagcattcaacccataacgagcttggaactcttctgcctcattgggactcttgtacaatgtctgggtgtgtgatttatatatataaaaagttgtaacatgtaatactggaggatacaatctttaacaaagagggtggcggttgttccattc

SEQ ID NO: 30953 - DNA, 1695 bp, Zea mays
  Clone ID: UC-ZMFLB73106H01_FLI
cccacacactgcccaccggtctttctcacacaacacagccacacagggatataagctcagtccacgagatctcccgtagaccagtggcgagggaaggaacgaaacagagcccgatcctagcgacaggccagggaagatcgccatgatgatgatgggcgaaggcgtgagcgtgccgccgtggtcccaccacgtccccgtgagcggcgtcgacgccggcgtcggcggcgacgagatgacgccgtacctgctggcggcgctgcggcagtacctgccgtgcaacgacgccggcgccgccgaggcggacgacgaggaggcggcggccatggccgcgggcgtggacggctacggctgcgacgagttccgcatgtacgagttcaaggtccggcggtgcgcccgcgcgcgcagccacgactggaccgagtgcttcttcgcgcacaccccggaccagctgcgggtgctcccgcccacgccgcagcagtctagcgccagccccaggggcgccggcgcgctgcccgagtcctacgacggctccccgctgcgtcgccaggcgttcgagacctacctcaccaagagcatcgtgtcctcgtcgccgaccagcacgctcctgtcgccgcccaagacgcccccgtccgagtcgccgccgctgtcgccggacggggccgccgccgccttccgccgcgggtcctggcccggcgccgggtcccccgtcaacgacgtcctggcctcgctccgccagctccgcctcggcacggccagctcgtccccgtccggcgggtggggcggctacccggcgtccgcggctgcctacgggtcgcccacagcgggcgggctctacagcctgccctccaccccgacagccctcgccaccgcctccggctacatgcccaacctggagccgcttgacgtcagcttcggcggcgacgaggagcccgtggagagggtggagtccgggcgggccctccgcgccaaggtgttcgagcggctcagcagggagggcgctgtttcctgctacccagctgccggaaccggtggccccgacgtcgggtgggtctccgacctcatcaactgaggcggcttcggcggcgggtcggtgctgcatagcagtggagaaaaggtggtggtaactggtaagccgtaacagagaaggatggcataaaaaaatgttcccctttggttccagataattccgctaattaccctgtacatagatatctatcgccctgtgaatattctcggctggttgggtggagggctgatgctagggggtggatttgttttggggttcttgaggtagcggaaaatttccaaggaaaagaaaatatgtaaggaagtgtagatgtcgtaggcggcggcggcggcggcggttgtgccctcttgtgtgctgcgaagcatggcgagggccgacggtgacgacgaagactggccggatttccagctttggtgttcctgtgattccgcaacaagttcagtttgatgttgtttcaagttcttccgtcgcctgtgcactatgcatccggctagttggcgattgcaacctgcttgtggattactacccccattttgttgttgatgttgatgtaatctgtttattaagacccagcattcccctacagcttattttgttgtacttactatatatctttagtaggtgccgaaatctcagttcacccgctattggaggtgaatttgccgtgt

SEQ ID NO: 30954 - DNA, 1236 bp, Zea mays
  Clone ID: UC-ZMFLB73107D03_FLI
gcctcttcgccctctcgccatcggcaggctacggtggctgcttccccgagcctgcaggtagaccaccttgtgttgattcctcgagtcttcacctggtgcttccgtttgcagcttcatttttaactaagatgtcacaagccaaggaagtgaggtacactgcacggtctattacacctcctgctgatagaaatggcacttcaaggtcgcctcctccaaagagacgcagcccttcaaggtcacctccaccaaagagtgcttcacggtccccacgtccaaggagtccaaagagacgcagcacttcaaggtctcctcctaggagacgtggtagatcaaggtcaagggataggagtcggtccaggagcccagatgatagaaatccagggaataacctttatgtaactggattgtctactcgtgtaacggaagatgatcttgagaagttctttagtaaagaaggaaaggttaagaactgtcatgttgttcttgatcctaggacaaaagaatcccgtggctttgccttcgtgactatggatactcttgaaggtgcaagacgctccatcaagtatctgcaccgcactgtacttgaaggtcgcctggtcactgtagagaaggctaaaagaactcgtgaaaggacccctactcctggaaaatactgtggtcgaagaggaggatctcaaaggagcccatcaccttaccgccctcgcagaagggagcgttcgcgctcaagggaacgcagaagggagcgttcgcgttcaagggatcgaagggagcggtctcgctcaagggatcgaagggagcggtctcgctcaagggaacgccgaagggagcggtctcgttcaagggaccgcagggagaggtctcgctcaagggaccgccggagggagcgctcacgctcaagggaccgcagaagggagcgctcacgctcaagggaccggaggggcagttcaccccatggcagaaggcatagagatcggtccaggtcacccaccagcaatgggaaccataaggcagactaggaagcgcttttatggacttgtcgttgattgcgtgaacaaaggaacttgtaacactacctataaactggtcagactgagacggttagcatggatttttagtagtgttgctgtattttgttgtttcatacaagtactctattctgttagctttcggatcgaaatgtcggatgatgatggttgttattgttctggaaatcgtagacatgtcctccagaatacc

SEQ ID NO: 30955 - DNA, 1236 bp, Zea mays
  Clone ID: UC-ZMFLB73107F06_FLI
tttcggaaggatcggcaggctcgtggccagggtcgccctgcagagcgaggatgtcgagctcgtcgccgtcaacgaccccttcatcaccacggattacatgacgtacatgttcaagtacgacaccgtgcacggccaatggaagcacagcgacatcgccctcaaggactccaagacgcttctcttcggcgagaagccggtcaccgtctttggcatcaggaaccccgaggagatcccgtggggtgaggctggtgctgagtatgtcgtggagtccaccggtgtcttcactgacaaggacaaggctgctgcacatctgaagggtggtgccaagaaggttgttatctctgccccaagcaaagatgcgcccatgtttgttgttggtgtcaatgaggacaagtacacctccgatgttaacattgtttccaatgctagctgcaccacaaactgccttgctccccttgctaaggtcattcatgacaactttggcattattgagggcttgatgacaactgttcatgccatcactgccacccagaagactgttgatggaccctcagccaaggactggagaggtggcagggctgccagctttaacatcattcccagcagcaccggtgctgccaaggctgtcggtaaggttcttcctgaattgaatggcaagctcactggcatgtccttccgggttcccaccgtggatgtgtcagttgttgacctcactgtcagaatcgagaagggggcctcttacgaggaaatcaagaaagctattaaggctgcttctgagggcccactcaagggtattatgggctacgtggaggaggatctggtttccaccgacttcaccggtgacagcaggtcgagcatcttcgacgccaaggccgggattgccctgaacgaccacttcatcaagctcgtctcttggtacgacaacgagtggggctacagcaaccgcgtcgtcgacctgatccgccacatgttcaagacccagtagagagagatatttctgcctccctatcgtgggtcgtccccaatggcctttggtcgcagaccatctttgctgcttgtctatgctgagaataaatgtgaacggtgcccctggacgctggatccatgctggttttggacacgttgtctttttgtgtttaacttatctgctaccgtcctgtaacgaattcactaagttctagttcttttgtgctttgttaagaatataaacaatgaggtttcaattttggtggcgcc

SEQ ID NO: 30956 - DNA, 1348 bp, Zea mays
  Clone ID: UC-ZMFLB73107G10_FLI
cagacagctcttcttgcgttgcctactaagatctctctctctctctctcttgtgttcttgccttctgcctactacgagtgatggccagcctcactgacctcgtcaacctcgacctgagtgactgcaccgacaggatcatcgccgagtacatctgggttggaggatccggcatagacctcaggagcaaagcaaggccctcaagccattttcaaggacccgttcaggaagggtaacaacatccttgtgatgtgtgactgctacacgccacaaggcgagccaatccccagtaacaagaggtacaaagctgccacggttttcagccaccccgatgttgcagctgaggtgccatggtacggtattgagcaggagtacactctccttcagaaggatgtgagctggccccttggctggcctgttggtggataccctggtccccaggcaagagatcgatcctttccttcttcaacttttatcgattgcatgcgagttatatgttggcggaagaggcagggctttgcaaagttatcaactgttcggtgtattttttatttaatttttttggcagggaccatactactgtgctgccggtgccgataaggcctttgggcgcgacgtggttgacgcccactacaaagcctgcctctacgccggcatcaacatcagcggcatcaacggcgaagtcatgcctggacagtgggagttccaagtcgggccgtccgttgggatctctgccggcgacgagatatgggtcgcccgctacattctcgagaggatcactgagatggccggaatcgttctctccctcgacccgaagccgatcaagggtgactggaacggcgccggcgctcacaccaactacagcaccaagtcgatgagggaggccggtggctacgaggtgatcaaggaggcgatcgagaagctggggaagaggcacagggagcacatcgccgcgtacggcgagggcaacgagcgccgcctcacgggccgccacgagaccgccgacatcaacaccttcaaatggggcgtggcgaaccgcggcgcgtccatccgcgtcggccgcgacaccgagaaggagggcaagggatatttcgaggaccgcaggccggcttccaacatggacccctacgtcgtcaccggcatgatcgccgacaccaccatcctgtggaagggaaactgataaaaccactgttcttctcctgcacgcatgcatccgccccgtgctgtcactttttgtttttcaaatttcgattcccgtcctaaagtttgttagcacttattatttcgctctccagtgtactgctcggaaagtccgaataaaaacggctctaatgattttgttttttttttt

SEQ ID NO: 30957 - DNA, 960 bp, Zea mays
  Clone ID: UC-ZMFLB73107H03_FLI
tttaaattcaagtcgtgcagtggatcattttttaactgaaaatcatatatccactgttaactatcatggagaggttccagctgaagagagagttgagaacctgaacaagttccgcaatgaagagggggattgtccaacattagtatgcactgatctggcagctagaggcctggacctggatgttgaccatgtcatcatgtttgacttcccatcgaattctattgattaccttcacagaaccgggagaactgcacgcatgggagccaaagggaaagttacaagcattgtggctaagaaggacgtagctttagctacacggattgaagaggccatgaagaaaaatgagagcttggaagctctcacgactaacaatgtcagaaggccaaccagctcgcagagtgtgaacacgaaagggaggccctcaaggttggttaagacttcaaatgctcttaaagttgtcagtcagaagggtagaaggggagtatcgctatctagcaggtcatcccgggctcccaaggatacaacttcaacccgaaggcgctcgccaccgaagagccaggcaaaggcaacaaaatcgtcagcccctcggaaagccaagccggtgaaacccactcagagcagcgcaaaggtctcgaagagcaaagcaaaacctgaggggcgaagatcaaagagtgacactctgaacaagctgggaactaagctcagtgtggttggatttagagggcgcagctcaggcaaatcagcacaatcttcataaggctttggtatttttttttattattgttatgctaaaaaggttcttggaggatttgcagcctgtaaatatctgagactaagtttcatcatttctttttctccttgcgggtttataagtgaagaccacaatctgagatatgaacgcagcactgctatgtaatattgtactgcactcagcagaatgttggaagaatacttttcatt

SEQ ID NO: 30958 - DNA, 1273 bp, Zea mays
  Clone ID: UC-ZMFLB73107H04_FLI
cccactactccggtagaaaatggctgacgctgaggatatccagcccctcgtctgcgacaacggaactggcatggtcaaggctgggttcgccggcgacgacgccccgagggccgtcttccccagcatcgttgggcgcccgcgccacaccggtgtgatggtggggatggggcagaaggatgcctacgtcggcgacgaggcgcagtccaagaggggtatcctgaccctcaagtaccccatcgagcacggaatcgtcagcaactgggacgacatggagaagatctggcatcacaccttctacaacgagctccgtgtggctcccgaggaacaccccgtcctcctcactgaggcgcccctgaacccaaaggctaaccgtgagaagatgacccagatcatgttcgagaccttcaacacccccgctatgtacgtcgccatccaggccgtcctgtctctgtatgccagtggtcgtaccacaggtatcgtgctcgactcgggagatggtgtcagccacactgtccccatctacgagggatacgccctcccccacgccatccttcgtctcgacctggctggccgcgacctcaccgactacctcatgaagatcctgactgaacgcggctactccttcaccaccactgctgagcgggaaattgtcagggacatgaaggagaagctcgcctacattgccctggactacgaccaggagatggagactgccaagaccagctcttctgttgagaagagctacgagctgcctgacggacaggtcatcaccattggtgctgagcgcttccgctgccctgaggtcctcttccagccatccttcattgggatggaagctgctggtatccacgagaccacctacaactccatcatgaagtgcgacgtggatattaggaaggatctgtatggcaacatcgtcctctccggtggtaccactatgttccctggcattgctgacaggatgagcaaggaaatcaccgccctggctcctagcagcatgaagatcaaggtggttgctcctccagaaaggaagtacagtgtctggattggaggatccatcctggcatcgctcagcaccttccagcagatgtggattgccaaggctgagtacgacgagtctggcccgtccatcgtgcacaggaaatgcttctaattctttgggcccaagagatgcaaagccgagaggagccattatcgccagcctcccgccccgtttctttctccttttgttgctgtttcttcattagcatgaacaaagttttctgccggtcta

SEQ ID NO: 30959 - DNA, 1396 bp, Zea mays
  Clone ID: UC-ZMFLB73108A01_FLI
cctcccaacaccacctcgcctgcgatcttcgtagcctccgtcgcgtcgagcatcgatcatgtcggcctactgcggaaagtacaaggatgagctcatcaagaatgctgcctacattggcacccccggcaagggtatccttgctgctgatgagtccactggcaccattggcaagcgcctttccagcatcaatgtcgagaacgttgaggagaaccgccgtgccctccgtgagctcctattctgctgccctggtgctctccagtacatcagcggtgtgatcctcttcgaggagaccctgtaccagaagaccaaggatggcaagccttttgttgatgtcctcaaggagggaggcgtcctccctggcatcaaggttgacaagggcaccattgaggttgttggcactgataaggagaccaccacccaaggccatgacgaccttggcaagcgttgcgccaagtactacgaggcaggtgcccgctttgccaagtggcgcgctgttctcaagattggccctaatgagccatcacagcttgccatcgacctgaacgctcagggtctggctcgctatgccatcatctgccaggagaatggtctggtgccaattgttgagcctgagatccttgttgatggccctcatgacattgatcgctgcgcttacgtcactgagaccgtccttgctgcctgctacaaggcgctcaacgagcaccatgtcctcctggagggtaccctcctgaagcccaacatggtgactccaggctccgactccaagaaggtgacccctgaggtgattgctgagtacaccgtccgtaccctccagaggaccgtccctgctgctgtgcctgctgttgtcttcctctctggtggacagagcgaggaggaggccacccgcaacctcaatgccatgaacaagctcagcaccaagaagccgtggtccctgtctttctccttcggccgtgccctccaggcgagcaccctcaaggcctgggctggcaaggtggagaacctggagaaggctagagctgccttcctcgccaggtgcaaggccaactctgaggctaccctcggcacctacaagggtgatgctgccgccgacaccgagagcctccacgtcaaggactacaagtactgagttgcttctctttgcgtgcccgttttggaactcctgcctacgagctaggttgcggagtgtggtttgctcgttagagcttattttcggacatccaaaaaacatgcttcctatgtgggatgatggttatctttatatttgtatgttaattagtctctttgctgttaaatttcgtgtaagttggtcctgccgatggagaatcgagcagctccctttttttgttctatcaactatgctgtaattctggctatgtatcggcaaaaacaattctat

SEQ ID NO: 30960 - DNA, 2570 bp, Zea mays
  Clone ID: UC-ZMFLB73108A08_FLI
gggaaacattaagattggctttcattgacaataataaaggcagtagaataatctcaactacccgtaaatctgaagtcactagtggtaacaaggtttacaagccaaaaccactttcagatgataactccaaacgattattttatacgaggatatttggtggagaagacaaatgccctgacaatgaagtggatgaggtatctaataaaattctaaggaaatgtggaggaataccactagctatcatcacaatggctagtttattggtgggtaagtcatggggacaatggtttgaggtctgcaactctattggttttggcgataaagatattgagcaagtagacaaaactatgtcaatattgtctcttagctactatgatcttccctgtcatctaaggacttgcttattatatctaagttcattcccagaggattacattattgataagaattctttgatatggaagtggatagctgaaaattttgtccataagaaaccaggagtttggttatttgaggttggagagggatacttcaatgatcttgtcaacagaagcatgatccaggcagtggcatcaaaagacagcagtataatagatggttgccgcgtgcatgatatggtgcttgatctcctccgttctttggcacgcgaagaaaacttcgtgactgtcttatataatgatgaggacatgttgtcagaaataagcagcacgcgtaggttagcccaccaaaagagtacaatggatgctcatctgcacaattataagcagggcatgcaacatttgaggtcattaacagtctacaggtgtggtgctgataaggagctctcgtttcttctgagctttaagctcttgcgagtcctagatttagagaatgtatatactacgagctggcacaatgctaggcatattgggaatctaattcatctgaggtaccttgggttaaaacgcacatatatgcctgagctaccagaagaaataggagctctgaagtttctgcagacactggacctggtggagaatttcttcatggaggaactgccatcgagcatagggcagctaacacagttggtgtgcctacgtgcttcagggttgataacaagcatgccccgtggggtaatcaaaacgctcacggccctggaggagttggcagtacaatgtcaattcaacgagcgtttctgcaggtaccaagggcaattcaaggaactaggcagcctgagtgaacttagggtgctaaagattaaggtcattagcacgatggaacagagcatactgccagatcttatgcaatctctaggaaatctccataagatccagagtctaaaactggagagtcatcctggttgcggtcgtgccgacaatgcaatgtttgatgcaatggcgctaccgggacatctcagacatttgcttgtgtcagagtactttgtccatttgtacaggctaccgtcgtgcattaatcccctatgccttgttaaactctcccacctggaattatatgtgatcgatatggacgagcatagtatgcaaatcctcggggagttggccgagctccgccatcttgtgctgtcaacgagatccacagtaagagttaataacgttgccgctgatggtttcttccacaagttgagatcctgcaagttttatacctcgatggtcctgtttgtgctcaacgaggactcgagtgtctcgtttaccctgtggaacgggacagatgatctagtgctgagctatggaaagaaggatggtgagtgtccaagtgcgccggccgtcatgccaaacctagaagagcttctgtttagcgcccagccgaagtggtccctgatgaaatgccaaggtagccatggcaacctcggcctggagcacctccgttcgcttcagaaagtcacagcggtgatcagctgcgaactgtatatgtttgaggcggagaagatggaagcagagctcggcatcagctgcgaccggtatttcgttgaggcgtgggtgatggacgcggaggatgggctgagagatgcgatcggtgttcatcccaaccaccctactcttgttctcggtcgcaagaatgaaggtgtcctcgcaagtgatgtgtcggacgatactgatgctgattcagccacaagaagaacatgagggtgagggctcttctgttcacctaaacgcgtgtaaacagccgactacacgcgttcaaacactaaacgggagtggctcctggataaagaccttctctaatagcgaaagtgtacgcggcgtaaaagagcaacccgaaggtgataggagtaagcgctgaagctattgccagagaggttcggcttgatatggtaacaaagaccaaggacaataccaacttaaagggtgaaaaagaccacttattccgtgataatttatattacaattacgagtaaatatcaagggcatgaatgtaattttgtttgggctgtgtcccgtgcctataaatatatgaacagtagtaccgtattgttcaggctggattgtaatcactcccacgtcattctcgctcttacaccttttggcaagccgaaagtacaattataatacaactattggcaatgtttattc

SEQ ID NO: 30961 - DNA, 1081 bp, Zea mays
  Clone ID: UC-ZMFLB73108B10_FLI
gatgccacttgttttttgatgaatttcaggcagaccgtgataacaaaagacacacacggcgaagaatctcgtgattgttaagaagtcaaaaggtttctgcagaggaagcggcagcgagcaaatgcagcctcagaatatgctgtttgctgagcattttcacatcgatgcatcgaaacaatcgtgttagacgacgactggcagagcagtaacgagcaacagacggtacttcgtctatgcaggtctccagtaatttcacctcgcagccagaaaagtctaccaaatgccatgaatatccggtcccgattcacgaagataccaaagtgatttcttccgacagcgggtttttttaaatgatgctacaacctcgccttcgtttgtaacgttcgggtctttcgcattttaattccgggtcctggagggcagcattacaatccatgctgcgcgccgcgtgactgcaatctttcgttctttccttaagaacggcggtgagcaacaccagggaggccgcggagagcccgcctttggctgtcgacgacaagattttcgttgctgtccccgaagaactcaagcacggcaagagcaacttgctgtgggcgctgcacaacttggccagggacgcctccagctcccggattgccattgctcatgtccacgttccttgctctctatatgaaaatgctggtgatacactgcttcaatcatttgaagatgttgagtccactttcaaaggcaagccaaggagactacggagtttagaggacttcactgttgactcaggcagatcgcagacgcagaactctgattccagttgtccaccaaatgatggggcagccagtatctgttgcagcggatggattcacttatgagggtgaagctattaggggctggcttgacagcgggcatagcacatcacccatgacgaatctcgacctcgagcgcagccttctcgtgccgaacagggcccttcgttcggcaatactcgagtggaaccagcaggagaggcagtgacgacgacgaacgacccatgcatggatgcagatgatgctgttttgccatcgtgtgactgtaagttacaaagttg

SEQ ID NO: 30962 - DNA, 773 bp, Zea mays
  Clone ID: UC-ZMFLB73108C04_FLI
gctgaccaccagcctcggcggcgacctccacagcgcgcgcttcagcgagaaggccctgctcaccgccatcgaccgcgaggcggtgtacgggtactacgacgacccctgcagcgccaactcgcccctgatgaagaagatccgggccgtgctggtggaccacgccctcgccagcggcgaggccgagaaggacgccagcgcgtccgtgttctccaagatcaacaggttcgaggaggagctgcgcgaggcgctgcccagggagatggaggccgcccgcgtggccttcgagaccggcgccgcgccgatcgccaacaggatcaaggagagccggtcgtacccgctgtaccgcttcatccgccaggacctcggcgccgtgtacctgaccggcgagaagctcaagtcccccggcgaggagtgcaacaaggtgttcctggccctcagcgagggcaagctcatcgaccccatgctcgactgcctcaaggagtgggacggcaagcccctgcccatctgctgaggagtgaggaggaggacgccaccggtgccaagaggcaagacccgcaagaggaggagatgacaccgtacgcgcgcgaggaagaaataaagaagggagtatttcggtattctcaagcaggcttcatatcgtttgcgatctgaagatcattatatgttgttcctctgtactcatcttttttgtttggagcttgtagcagtgatcgtgtaaacgtgtattctgtctgttgttcttggctttctcatctgcaatatgttttggaatt

SEQ ID NO: 30963 - DNA, 798 bp, Zea mays
  Clone ID: UC-ZMFLB73108C09_FLI
gtgaaccagcatgaagccactggtggcgcgcctgctcctctgctactccctgctctgcctggcgcccgcggcagccccgttacgcctgcagcacgatcatgtccggggccacggccacggccatgcccacccgcctccgtacgcgcgtaacgcgacggcgtacggcgtctcggcggcgctgtgcccgggctgcggcgcgtgggcggacgcgctggagttcctctactaccacaacctggtgcggctggcgtcgctggagccgccgctggcgtggtccccgcgcctggcgtcgtacgcgggctggtgggcggcgcagcgccgcggggactgcgcgctgcgccactccttccccgacggccagttcgcgctcggggagaacgtcttctggggcgggcccggcggcgcgtggcggccccgggacgccgtcgcggactgggccgccgagggcgccgactactcgtacgccgacaacgcgtgcgcgccaggccgggagtgcgcgcactacacccagatcgtgtggcgacgcaccaccgccgtcggctgcgcccgggtggcgtgcgacggcggcggggtgttcatcacctgcaactactacccgcccggcaacgtcgtcggcgagaggccgtactaactagctagcttagcaactcagtaccctcggcctcggggatttattacgtgacgtggcgaacggcctcgtgtagccgtgtcgtgtgtaaataatattcagcggtcgttccggtgaacatgatggtaattcactcgagtttttcactgttggcttccgtaaatcgtgtt

SEQ ID NO: 30964 - DNA, 488 bp, Zea mays
  Clone ID: UC-ZMFLB73108D12_FLI
caaaatttgatactgttaaaattagaaagcaataatattactggagatgtctcttcacttatttactgcttgagtctcaatatcttaaatgtatcatacaaccatctttatggtactgtacctacagacaacaacttctcacgattttcacccgacagcttcttgggtaaccctggactttgtggctattggcttcactctgcttcatgcacacaattatccaatgcagagcaaatgaagagatcctctagcgcaaaggcctcaatgtttgcagctattggtgttggtgccgtattgcttgttattatgctcgttatcctagtagttatttgctggccacataactctccagtgctcaaagatgtctctgtaaacaaaccaggtgatacatctttttggtttcccgtctgttgctctaacaagaaaaaattcaatactcttttgaaacctccattatgactaacactaacagttactaaagaggtttc

SEQ ID NO: 30965 - DNA, 1214 bp, Zea mays
  Clone ID: UC-ZMFLB73108G04_FLI
aggccgccgacgtctggagcgcgggggtcatactctacatcctcctcagcggcatcccgccgttttggggcaagaccaagtccaagatcttcgactgcatcaggtccatggagctgcggttcccttctgacccatgggacagggtttctgattccgccaaggagctcgtcaccgggatgctgcggcgcgaccctaggctgcggctcacggccaagcaggttctagagcatccgtggatgcaggaacacgcggacccacaagactcgtgcgggcagtgccacgagaccggcctccaacgggagggcgccggctcgtgctccttctccacgccgttggcgtcgcggagcagggacgtgagctttgacacgcgtggccccatcgcgtggaggggtgggggcgaggacgaggcgacctgctgctcgcccacgttcgccgccgtctgcaggtcgtcgttctcggcgttcatcaccgacccggccccgccgccctgctcggcctcctccgccttgggtggctctggcttctcgttcggtgagccctgcgaaccacttgacggaggaggaggaggagggttcccgatgcccatggcttccatgccgagcttctcgttcttctgcgcgcgggacagcagcgagccagctgagccacagccggtcgctgcctcctcgactccgaggacggcgaggggatccacgccacggggcgtcaacggcaggcggaaccacacgatcggcggcggcgggcgggagcacctggacgtggcggtggagtctgtcatccgctgggcgtcgtgcaccaacttctccacggcgccctcacttcgggcctccctcgtatgctagcactagcaacgtcgttccgcgcgccggcgccgccaacgccgggctgagggtgaggaggagaattccgacgagacgagcggtagagagtgtgcagtagcctcgaattgtataatatatatacagacacagtgctgttatagtggtgatgatagattagagagtgaaggtgaagttgctacggagggatggatgcatggagatggagagcgagtggcagagctggaactgatgtgttttattcttcgctgtcacgctgctggtcagataagatttgggaacgctgctggtcagataagatttgggaacacacctggcgacggagagagaaggcgtctgataatttgatatgaacaagaagcaacaatgttcagg

SEQ ID NO: 30966 - DNA, 395 bp, Zea mays
  Clone ID: UC-ZMFLB73108G11_FLI
tgctcgtgaagcatcatgccgaccttcagatcaaggatgaggatgggaacacggcacaggacctgtgccctccgagctggtcttttatgaaccgggcgaactgacaaccaacatgctaccttacattagctgtactctaagctggtaccgcacttggtcatgtgctttttctttatgggggacatatggtgtacctggtgtgccctgtgtgaagtgccgtgcgtggcgcccgctatgacgattgggaaatcagatgagctgttttattttatccacctcatctaactagttgtcaaaactcaaaagtcgagtggttgaagtgttagtgctgggagatacatgtgttgccttacaccaatggtctgttactgttagtgaaaaggaactacaatcat

SEQ ID NO: 30967 - DNA, 1118 bp, Zea mays
  Clone ID: UC-ZMFLB73108G12_FLI
ggatctctgggtattcaagttgaggacaaggatgtcagctcttcacaagtacttggtggcacacaagatttatcttctaagaagccccaggaagacaatgttaatattgtgcccatcgtacctgtctatgtaaatgatggtttaatgatgcccaattctgttgatgatgaagcaagtttgccgttagaggaaaccaatcctgccgaagtgttacagcacattggagcaggggaggagaatccctgtcctgctcaagagttcgagtccattggagcaggtggggaggaagagttgaacctcctaagatctatgggctgggatgagaacgaagatgttcagcctcttcagcaggaggagattgctgattgtctaaagcagaacgtcaggctgcagcagaagcttcaagaatgcaagggctgatcgcagaatcaatggagcaacgtcactgtgcctcaccacactgagggggtgtttgatacctgggctaaagtttagtccaggttttggatgccaaatgggaggactaaacatgagctgattataaaactaattacataaacagtggctaattcgcgaaacaaatctatttggcctaattagtctactattagcacttgtttactgtagcaaaacatgagctaattatagattaattatgcttgataaattgtctcgtgaattagcaaaaacctgtacaattagctctataattagatcatgttcagttctcctaattggcatccaaaacccagaccaaaccttagtcccggggatgatccaaacacatgtggagctgggttttgggaccttccggtcaaccgatcagagaatgattgtctagcttagcaaatggagagttttgtttttgttaatgcttgttcagcattgtggggggaggttccatggtagagctgataattttcccccattgataagaggttttagggtttttcttcctcattttcccagaaggaatacaccaaatagaagccttgtctggtgtcggaggcacgtaggtgtgtgttgctctgaaagaagaataggttgcctttcttttggtcgccatctttttttcttttgaaaaggaagggaaaaaataacgatcgagcttaacatgg

SEQ ID NO: 30968 - DNA, 2367 bp, Zea mays
  Clone ID: UC-ZMFLB73108H05_FLI
acctctctcctccacccgccgcccccgcgggaccgaaaccctagctagggttctgcccgccgccgccgccgccttcgatccagacgcggccaggcttcccgcaacaccgccatggacacgggccgcaagcggaccgcaccggagggcgccaacggcgcgggcggccccaagcgcgcgagagaatcggagacaactggtgtaggaagcaaatccaagccgtgcaccaaatttttcaggttctaatctagcttaaaatgaacagtcatccggtaacatctactatcgttattatgctcttcttttttttaaattaaaatttgttatgttactaaatgctgtgcttgatgctaacaaatgggtcggtctagattctgctacaggatggttttatctaatcattgcttaagaacactcaacggagtaaaaaattggaatctactgctgtttatcactgtgaaaattggtgcaacaagggaacgtactgctgtttatcactgtgaaaaccgatgcaacaagggaacctactgctgtatatcactgaaaatctgaaccatgcaacaatgttttcaaggaagcaaaacttcctctcaaaaggaacaatcagtcaataacaccatggaacaggttcacttgaagaaatcaagaagattagattgaacatggggactgtaattcaattccttgtgaattgtaccagttatttgttcaattgcatttccttatcaatatgttgcagtagtagttctgaacaccttgaagcttgattatgaatggcatttctatataaagcatgatttctaaaagattagtttgtatcatttacttcagcttttattctttgcatatatatttttagcagtcatctagtgaggttgcattatccagctgcatgtaacttaatctcttccatcaacattgtttgcatttgtgtatcaactaaaatcatctgtaggttgtcagatatattagcatgttctgttgcttatattatgttttcaatgtgcagcactgcgggttgcccctttggtgcaagttgccattttctccataacttcccgggtggctaccaggccgtttcaaagatgaccaacttgggtggaccgcctgttccggctccaccaggaagaatgcctatgggacctggtggtcctgatgggccaccttcacctgctgtgaagactcgcatgtgtaacaagtacaacactgccgaaggatgtaaatgggggagcaagtgccactttgctcatggagagagggagcttggaaagcccctgcagatggacaacccgatgggacctcctccaatggggccagggcccaacgggcacttcatgccaccgccaatgcctttcccagacatggttcctccctccacattcggtgcttccgccacagccaagatcagcgtcgatgcatcccttgctggtgccatcattgggaagggtggtaccaacacaaagcatatatcccgagtgactggggccaagttagccatccgggacaacgaggctgatcccaaccataaaaacatcgagctcgagggaacatttgaccagatcaagcacgctagcgcaatggtcacagagttgattgtccgcatcagtggtaagccgcctccacaagccaagaacaacccaggtagggggcctggttctcatgccgggggtcctggaagcaacttcaaaaccaaattgtgcgagaacttcaacaaaggctcctgcacctttggagacaggtgccacttcgcccatggcgaaggtgagctgcgcaaacctgctgctgcttgacaggcatgcttattgtggcctgtggtgattaatctgcctgtatggctgaataacaccatgaccaaggacagtggcgccagcgccatggtgaagtgtgctgagccacatgctgcctgagagagagcatttccctgtggctcgtatttgatcttaatgctgtaacaaactctcctcgatggagattaagcaatggccgtttatttaggatttgtaggattgccgtattggtcacccttttatctatcctgtttttggcctgtggtgattaatctgcctgtatggctgaataacaccatgaccaaggacagtggcgccagcgccatggtgaagtgtgctgagccacatgctgcctgagagagagcatttccctgtggctcgtatttgatcttaatgctgtaacaaactctcctcgatggagattaagcaatggccgtttatttaggatttgtaggaaaaaaaaaaaaaaaggggcggaaaatttcttgtgtcgagatacggatttattttgctatatatttttcgtctatctggttgttgtcgtagtattgttgacacagcatgattgtgttaaagaattatt

SEQ ID NO: 30969 - DNA, 1907 bp, Zea mays
  Clone ID: UC-ZMFLB73109H11_FLI
ccgacccgcgcgcaagccctcatgcggttagggctgtaacgatctcgtctcgctaccggcggccggctgcggaacgggccaccccacgcgctcctctgagttcgttcgactaatctaccgctgactgtactttgggctgtcgccaccagaaagccctcacgagtcctttgcctcctcactccgtcaggctcgtcgccacagggttttgttcctaactttttagcttcaatttttgtcttgaatggcaacacctctggatgttccactggatgatttgattaagagcagagctgggaggggaacaggaagaggcaggggacaaggagggggtcgaggcagaggtgatggccaaaggttggctcgtggttcgtggcgtgggcgtggtactggcaacttccgtgaaaggggacttggggtgtcttcgcggaggccacttggtgttaatacttggtcctcatcatttgctattgccaaggcaagcacacaactataactgtttttctgttaccttcgagaatccaaattgcagtaggtacctgatgagaagtggctataaacttattaaaatggcacagcccaactgttccattcagaccatatctgtgaccatttaactgtggagcttcaaagaggatccaatggctttttcattgagacctgtctcttctctgccgagtatgtagggtggtgaggcatatgttggtttgtgctggctattgcttcaaagttcaaactgataactttgtctctactcgtgagcaagctgatggactacttaataatctgtggataaggccttttcatgtatacagaaatagcaccattatgtggaatggtatagggttttatgattttgctgatgctagttgcttcatcaagtactgtggattgatgagttttgagattttatgctaatacttgctcgtcacaacatcgacatgcatgatatggaatattacagtcattcaataaagcaaaggattttgtgtggagacatgatctctttgaggatagcatggtagcagctgggctttctgggatagaatctggaacaaagctttacatttcaaatttgcactatggagtgacaagtgaagatctacaggagcttttttcagaaatgggtcatttgaagcactgtgctgttcattatgacagttatagacacccaactggttcggctgaggtgatattcaccaggagaagtgaagctctcgcagcactgaagcgatataataatatgcgccttgatgggaaggccatgaagattgaagtaataggagcagaattgggtctatcagctgctgccgtaccccagattagtgttgttcctggtgcaagcagaagagggcagagagaagttgttatgatgcctggtggaagtgggtttggacaaggtgcatctggcccatctagttcgcttcctgggtggaagcgtggaggctttgttcgaagaggacaagggcgtgttagttttcctcaaagagggcgagggcaagtgcgcagccgtggccgtggccgtggccgcagtagctttgttcagagccgtggacgtggctatgtgcgcaggggtaatgcagagaaatcagccaaacaattggacaatgaacttgacaactacaactctggtgcgatgaatgtcgactaagttaatccatcgtgacatcattcaatccaacctggaagttggaactatgttgaagctaagcttgttttctgtcggtattctgtcaaatgtgcacacttctgtcatgctctagtggcatcagttgaagattagatattccattattcctactgcaatagtcttgtgatatcagaatttgctgtaattgaatgatgaattatgttttcaaccgttgaaaggtttgctgtcaaaatttcaatattatcctagttattgtcag

SEQ ID NO: 30970 - DNA, 456 bp, Zea mays
  Clone ID: UC-ZMFLB73110D06_FLI
gtgaaccatgagcttgccatctttgagatgagaccaagggagtagagttagccatgctctctggaagatgctctgatgcatgtactttgcagtttgcacataggagaagatcaaatagctatggtgatcatgaacatcattaatggtctatgtcacccctacagactacagtagtacgaagccactccaccaaaaacgcttttttggggaaatttggaacacagcctttactcaccccctataaataccatttttttcacactgattttgctgtttttgcttaataatcctttgtaaaccattacaggatttagaggtgtatcaatttttgttcttgtattactttgtttgttttgctctgttcaaacttaagagctatatgttttagaatttgtggatattactaacaatttgttcacatgttcaatatgtaatccaagagggacacatttaggc

SEQ ID NO: 30971 - DNA, 804 bp, Zea mays
  Clone ID: UC-ZMFLB73110F09_FLI
aagggaaggtggctaagatgcactcagaattgttagtgacactttccaccgagttgtctgaggttttgcacaggattaggaagtttaatttggagggtaatgtctaccaacatgagacattgatggtaggcaatgaagaagtcaggggatgggggtcagcggatgtatctcaccagttagaccagcatgatcgagcattctgcaaggatgatgagatgcttgatgatgatactgactttggctcaagccttggacctattgtctcgtgggataggatggaagcagagtgcgaggatagaaagatgctcatgggtgatagcccaaagtgcgacaagtggatgcttaaggatgatgtgggtgaatttgatgcgaagagtattcttaactgtggggatgatgatggcgtgggagattccaaggtcatcaaaccattgatgcatgatgacaccatggtaactggcccaagtttggtaggtattcatgtagaaggattttatgccggaacaaaatggtatgattcacaaggtttggattccagtgttgatggaggggatagcagttttaggcatggcggaatcgtgtgaattgtgataacctgatacctggaaggtcctgtaaattatgtatactagatgtatttagctcacaccagtttaattaagtgtctgtaggtggagcttcagtcaaagtaacatgtctgccctgatatatacaggctgcattatcaaagcaacttttgttttaacttgcatatagtccctgtattggttatctgcttgcttcaatacattaaagctatgtttc

SEQ ID NO: 30972 - DNA, 3134 bp, Zea mays
  Clone ID: UC-ZMFLB73110G04_FLI
aggaaagactacaaaaggaagttgtgcccctttaaatggaggggacaggcatgaagaaataaaacacctcaatgagggatgtcataatgcaggtgtacctgaaacaagcaacatggagaaagatggcaaaagtacagatgtctctgacaagaggcaaacaagtcaaaatacctcgcaagtgaagaagcgcaagaaatcaaaggttggttctgttgacatgccttccgtggatgcttctggtgaaaaagatcatcggtatagtgaaaatgcgaccaaacaagatacagcttctactaaaagggagattgtccacgaaccttctatgcaacagatgtcaaacattgtgcatcagggggattcaaatgtaatagaaaatccaagtggtgatggaaagaaaaagaaaaaaagaagacaccattcagaatccttaaagggtatgaatcctagtcaagatctgaccaaatcttctggatttgtaacaaacgaaagctcgatacaatgcacaggtgctgctccaataaatgcaaagcaaacaaacttagtcattatagaaggagaaacagttactgggcacaggaagcttagtgaaaatctagatgtagcggcaacacatgttgttgatgaggtattggcagatctaagatctaaagacggcttaagtaaggatctggatgaaaatctattaccaggacaaactcacctaggcagcaatcagaatggaatagaagttcctgaatccattgctgttaaagttggtagtactactgcagcattacctccgaaatatcctgcaacagttcactctgcttctcctgttaactcacctagacaaaggaagtctaaggggaaaaaattgaaagtgctatccaccatggctgactcttctcatcaatcaagtggtgtacccgaagaagatgctaatagaaaattaaaagagtctgattctttgaggtttgctgataaaacaagtgatcatgaggatatagtaactgcaaatgtggttgctcaagctgatgaaaaacgcaaagccactaagcgtcaaagaaagaaaggttctgtaaagcaggtacttgatacattggacttgaaggaagtgaatgacacagaagaaaatttggttcagggaggttctgtagttgacactcccttgagcactgctgggaacgtagagcagaaagactggtcttctgagactttgagtcctaaagaacaagaaactaattgttctactcatgggctggatagtcacacagctaaggacagccaggatgagtatgtaactgacaccattgggacccatgataatgaaaatgctgcaggaaccccagccttgcatgtagttcagaaagatgccatggccctcaaatccgccagccctaattctcaaaaggagcaggaaacatctttgaactctgaactacaaagtcaggattgtcctctggaacatggttttagtgcagatttggtgaactccaggactgaaaagggagtcaggactacaagttctgctagtgctgttaaatctgattacaacaccatgtttcatcctgctaatggtagaatcaatgtccttgatcattttagccgcagcaatttgaatgatggttcatcaattgtcgcagaaagtaagcaaaacaatgaagatggaagtttaagggaagtgaagaataaaaagaagaaacgaaagcaaggtactggtagcgttgaaccaaatgatgttatagaatctcttccctcagagatagctagcttaactggtcattttggtaccagcaaagctgttgtgtcatctgttgcaacagaaaacatgaatggaggaaatgagaatgtgaataaaggcaaggagaagaagagaaagggcaaatctaatatggaagtacctactgctggaaaggaccatcctaattgtgatactcaattcattgatattggtacccaagaatcacttatttctattgtacaaaaagaaaggacaggtcaagacaatggaaaagagagcaacagtaaagctactcagaatgccagtataatgcaacatgaaccagaagatgccacttggaatcgtagccctgagaagaatcaccaccagagtgttgatgatgatcagaacaagttgctcactgaaaaggatcatgcacatataaataaagaagtgagaaaattcactcctcaaacaaaggcccatgctaagattagaaagcctgatgggtctactatcaaggaaaaggtggctccaaatcctaaacctgtaaccaaccttgtgaaggatttttccatgagcccacgagcatcaagtgacagcacagagggcatgccacaaagtgctaaccgatatagagttgcagtccggaaagtaccaagtaaaaggtatgaagagaccagtggaaactccaataaggcgagtaggaaagtaggctctggtgcaatattcaatgactctatcagcgaaggttctggtgatgaattggacaccaagactgtcatggaaagatcacctaataagtcatctacatctgctgattcaggtatttcatctgcagcctctggtgaaagcgaggttcctgatgatgatggcaccgtatcactatctcagaagagtttcaaaggtctgcacattagctccatcctccgtggctcccgtagctacaagaaggcactaaagaggcaaatggagctgctagacgacgacaccattgtgcctgatagccagcccgcggatggcctttggggctgaacatggttatcgtcaagagaagcgccgaccctgcttcatccttttttgccattgtccacctgatacgctggtgggctttataagttgtctaaaacacatgcccgaatgcgtgatgtcgctgatggcattgccatacgccacacgcagttcccttattttgtcgggcttaagctgtgatctgcctgaggatgaatcgatgatgttcatgatacagcttaccagctatatatatgtgttaatgtatgtaagaatgatacgcacgcttagtctctcacccatgagccatgggtccgttgagtcctgactgaccatcgccagaagttgtggtttgtgacaggaaattccatccttctggcttatctgttgtgtattttgcgtagctgcagttttattttttttc

SEQ ID NO: 30973 - DNA, 1588 bp, Zea mays
  Clone ID: UC-ZMFLB73110G06_FLI
ctttctcacccccctttgcttcctgcgcaattcctgcggcagcgcctttctctctttcaatggacagcgactacgttgccagcctgctcatgggcatgggctcatccgcccctgcgctcgacttcgccgcgctggacgccgggttcctcgaaacgctctgcggcggcggcggcggcctcttcggggtgtccggggtcgccgcgggggccgggtgtggcggcgtgtccccggaggggtcgtcggtgtccgacccggcgtgggcgcgcgccaggggcgatgacaatgtcaggaagcgcaaggcgccgcccacggggtccgccggcggcaaggaagcctgcccgggcaaggctgcggaggccaagggtccggacgggaagaggtgcagagtgggcggcagcgacagcccggtgaagccgaaggtagaggaggtggcggcgagcgacgcctcggttgaactcaaagcgcagaagaagggcaaggggaagaccgccaagccggcagtcgaaccgcccaaggactacgtccatgtccgggcgcggcgagggcaggcgactgacagccacagcctcgcagagagggttagaagagagaagatcagccagaggatgaagtttctgcaggacctagtgccaggatgcaacaaggtagttggcaaggcactcatgctcgatgagatcataaactacgtccagtctctgcagcagcaagtcgagttcctgtccatgaagctcgccactgtgaacccacagcttgacttcagcaacctgtcgacactcctacacaaagacatgtaccaaccatgtggcccttcggcaaattcggtctttccactggaaagtgacggtgcagctttcccattctgtgaccaagcggatcttttccacagctttggttcgggttcggctgctatggaggatcagtgctctctaagcctgctagacacggctctgccccacgcggccaacccacagttcgcttttcaaaagcagcagagggacttctgggaggatggcctacagaacgccttgcctaccggtagtgagcaaagacaggaggaggatgggcttttagtacccaactttgatggccagttacatgctgaccagacaaaggttgagttctagtccctggtgatcctcccaaggttgatatttttgtatataggtgggtaccaagacctgtggcaagcaaagcgctctctctctctgtgtgtccgaagctgaccatcattagagtctaggcctgcgaactgatttcgttccgtgataatgctgcatgtatggcatctcggttcttcccacagagatcatgtgatgtgatcgacctcgagaaattaaaagtagattgtgtactagatatggcgcaaatattacatgcgccatcttctaaagttgtactgattggtatgtaagggcgctgggtggtgttggaacggataccgtgtactgttttgttgcttttttttctctagtattaatgattatgatgacgaaagtccaagtatcctctcagcttgttgcaattgtgtctgtgtcctggtaccttttttttctgcaggtgttgtaataaaatgtaaaaagctgatctg

SEQ ID NO: 30974 - DNA, 1006 bp, Zea mays
  Clone ID: UC-ZMFLB73110G12_FLI
gatacccttcaccctcctcgacgtcgcatctccctttccttttctcccactgcactgctgctccgctgccgctaccctttccctctcccttctcgtcctcggtcctccccaacccatggccacggccaccaccacccactgccccttctcccaccacgctatttatcgcggctgcacgactcctgcccatcaggcgccatagagacgcgtgggaccgaagccgccgatcaagcgctgctcggggcggagcagcggccggcggtggtgagtgctggcagacaggccggcaggtcaggcagagtgaccagctggtgagtcgaagcttgagcggggagctggactttggcgggttccggcgggctccggagcggagatggtgctggatctcaatgtagcgtcgccggcggactcgggcacgtcgagctcgtccgtcctcaactccgcggacggcggcttccggttcggcctgctcgggagccccgtcgacgacgacgactgctccggtgagatggcgcctggcgcgtccacggggttcatgacgcggcagctcttcccgtccccgaccccgccggccgagccggagccggagccggtggcggcgccggtgccggtgtggcagccgcagcgcgccgaggatctcggcatggcccagaggccggtggcgccagcgaagaagaccaggcgcgggcctaggtcgcggagctcgcagtacaggggcgtcaccttctacaggaggacgggccgctgggaatcgcacatctgggattgcgggaagcaagtctacctaggtggttttgacactgcgcacgcagccgcgagggcatacgatcgagctgcgatcaagttccgcggcctcgacgctgacatcaacttcagtctgagcgactacgaggatgatttgaagcagatgaggaattggaccaaggaggagttcgtgcacatactccggcgccagagcacggggttcgcgaggggaagctccaagtaccgtggcgtgacgctgcac

SEQ ID NO: 30975 - DNA, 858 bp, Zea mays
  Clone ID: UC-ZMFLB73111B04_FLI
caagccaagcgtttgatatgattcattgctcacgctgccgaataaattggactcgtgatgatggtatcctgctcctggaggttaatagattacttagagctggaggctactttgcttgggcagcacaacctgtttataagcatgaacaggcccaacaagaggcatggaaagagatggaggacctcactacccgactttgttgggagcttgtgaagaaagagggatatattgctatgtggaggaaacccttaaataactcttgctacatgaaccgtggtcctgcagtcaaaccttcactttgtgatgctgatgataacccagatgttgtctggtatgttagtctcaaagcttgtattagtcggcttccagagaatggcgaagcaccacctcctgttcaatggcctgcacgcttaatggagccaccaaagaggcttcagggtgttgaaatggatgcctacccatcaaagaatgagattatcaaagcagaaacgaaattttgggaggacataattgatggttatatccatgtctttaagtggaggaagttcaaactccgaaatgtaatggacatgagggctggatttggagggtttgcagctgcattaattagtcggaaactagccattgaagtttcgaattgccaagcaggagtaaattttcaggaacttttggaactgtcaagagctgctgtcgagacttttgactaacatttgttctgtagatagggtaggtcaaggtctcatttgtaactatttatgtgatcattcgtacaatgatgatcagtgtaattcctgacagtcatttttttgttgtagtcgttattgaaatcttacaaaagtgtaggagataatttatcgg

SEQ ID NO: 30976 - DNA, 1722 bp, Zea mays
  Clone ID: UC-ZMFLB73111B07_FLI
aaacatggacctaggtacagggagcattctcctggcaaaaggcagaaggttttcacttctgacatttcttttgaaggcaatataatgaataaactttccattccggagattcgtgacacaagactagagtccagagaatctggtggtgataaactacgaattcttgacgagtccactaagaagacttcaaggaaagatatgtgtggggaaagcccagctactaccatggaaaatgtgggaagacagagtaataaagtgtcttcaacaaagaatttcttggagtccactctttcttgttggagtgccttagagcgagatctatacttgaagggcatagagatatttggaaagaacagctgtctcatcgccagaaacttactatctggtcttaagacctgcatagaagtggcaaactacatgtataacaatggtgcagcgatggcgaagagacctctcttgaataaatccatctcaggcgactttgcagaaaatgaacaagactacatggagcaagacatggctgccagaacaagaatctatcgtcggaggggccgcaatcgaaagctgaaatatacttggaaatctgcagggcatccaactgttagaaaaagaactgatgacgggaagcaatgttacacacaatatagcccatgtgcgtgccagcaaatgtgtggtaaagattgcccctgtgcggacaagggaacttgctgtgagaagtactgtgggtgttcgaagagctgcaaaaacaagtttagaggctgtcattgtgcaaaaagccaatgcagaagcagacagtgcccctgttttgcagccagtcgtgaatgtgatccagatgtttgtaggaattgctgggtgagctgtggagatggttcactaggtgagccacttgcaagaggtgatggttatcagtgtggaaatatgaagctccttttgaaacaacagcaaaggattttgttaggaagatctgatgttgcaggttggggtgcattcattaagaatcctgtaaataaaaatgattatcttggagaatatactggtgaattgatctctcacaaggaagcagacaaacgcggcaaaatttatgaccgggcaaactcatcttttctgttcgatttaaatgaccagtatgtgttggatgcttatcgcaagggggacaaattgaagttcgcaaatcactcatctaaccccaactgctatgcaaaggtgatgctggtggctggcgaccatcgggttggtatatatgcgaaggagcatattgaggctagcgaggaactcttttatgattatcgttatggacctgaccaggctccagcttgggctaggagacccgaaggatcaaagaaggacgaggcatccgtctctcaccgtcgagcacacaaagtggctcgatagctgaagagtcgctccggatgatacaatatgcagtaaacttaatacttaatacatgattcagtcctagttcattggtagataaacatgctatatactatccattagtaaataaactctcattcatcgagttggagaataaatgcgtataaacatatgtggacctcaggtcgggaaggtggcaaccttgttagtttgagcaccaacaggttctcaaacttgagtggctattgctagagtatcaaataatggctgcgactatagccttgtttgtatattttcttggtgagatgaaataatttgtcaaacactcaaatgtacactttattcctg

SEQ ID NO: 30977 - DNA, 2452 bp, Zea mays
  Clone ID: UC-ZMFLB73111D09_FLI
gtccgtatgcttgattatttgtcatttcaaaatcatttgtgcatagcttttgagatgcttggtcaaaacctgtatgaactgctcaaaaggaatcacttaagaggtctgaaattgaaatatgttcaagccttctcaaaacagatattggatgccatggttgtgatgagagaagctggaataattcattgtgatctgaagccagaaaatatcctgttagctcccaggcgagttacccttttgatcattggaattttccatcatagtttttgggttactactttaaagaataccgtagcttgacagcgtaaaaagatgaattttacagcgtcgcaacagctgcagcagtgaaagttattgattttggatcagcgtgcctggagggtaaaacagtttactcgtacattcagagccgctattacaggtctccagaggttctccttggctatccatatactactgcgatcgacatgtggtcattcggctgcatagttgctgaactgtttctaggcttgccattgtttcctggagcaacagaatatgatgtgcttcagagaatggtgaaaattctcggaggccaaccaccagatgaactgctaagggaagctaaaaacactgtaaggttttttaaacatgttggaagtatatatgctggcaatgcggcacctattggtctttctagtgcatacagaattttaagtgaagaagaggttgaagcgcagagagattccaagaggcaaaagatgggaaagtggtacttcccacacctgaagcttgacagactcatatgtacctatccttggaacaattctgaactggcagagacagagaaaacagatcgtttgggattagttgatttcttgaagggactccttgaatttgatccaaataagcgatggtcaccattgcaggctctacaccatccattcataacaggagaatcgtttactggtccatatgagccaatacccgagactgcaagaattcctgttgctcgtgcagcagcaattgatcacaatcctggaggggggcactggctacattcaggtctttccccgcaggttggaagtgtaaacagatacctacctttgaataatgtctaccctccaaaggttcctttttcttatgggagtagttatggaagctttggtagccatggcagctatactggtaatgctggttttggtaacagctatggaagcattggtgatgctaatgctatcaatatgtattactcacccttaggttcttctggattaacgcaaattggccctagtccagatgttagactaaggatgcgtctctcacatgatagaggaattcgattgagccctggtagtcttgggcctatgtctgttggagccagtccatcacagtttaccccaccgaactaccatatgcaaatcccagctaattctactgggacacatggttctggttctcctgcaagtggagtcattcatggttctccgttaggaaaagctgcagcagtgggcccatacaacatgaggagaaacttgccaatgccaccacatgattatgtatctcagcatggacaagggcgttttagagatggtgtcagctttagtcattctgatgcctgtgctcaaggacatacaggccactctcataatgcagcggtacctagttcttatcattctggttggagaccaaaaataggttcaaggagtggtatttccttggaggcctcgtctagtcatgtgccttcgaaggctccgtcacaatcatttgacttttcagcttcatcgacacttgatcctgctaattgggaccctaattatagtgatgagtcactattgcaagaagacaattcactgtcagctgatctaagcagcaacctccactttggagatgcaactggccaagaccacatctttgctacatctaaccctgtaccgacaaaccaaagaggagatcaattatttcatgtgtcctctcaaggagtgagtgcccattccagtgttctcatcaactacggtggttacaaccctcaaaattatcctcagcaaaatgcccgtcctcgtcatggacagccaattctccatcagcgatataatcaggcaacttccagtccaatgcggccaatgggaagccatcacaatgggcagcctgcgtggcctagtagttttggcatgggcgatggagtgccctggggaggaacaagagggcactcatttacgacaaggaaggattatgggagcatcttttagggtggagttgtggaccggaggaacgtcattgattcattgcaggcgtaaattatttgtatcagcgaaattggagtgcgatgattctggttgattgttttcgatgttgttactccatccctccacttggtcctttgtgaacacactggatatatacactatatgatcggtgacattagcactcctttgtaaccttttttaggaatcagaagtttgggtgttcccct

SEQ ID NO: 30978 - DNA, 554 bp, Zea mays
  Clone ID: UC-ZMFLB73111E01_FLI
gagagaagaaactactgaagaaccaaattgacttcatcgggaacgaaatgggatacccattggaaaaccgacacctgttgcaaacacctatgtcgttccaagctccatggagaagttggtcatgtatttaaagcagagatataaaagcatacctttgtacatcacagagaacggttatgcccaaatagccaatattagcactacagcagaagaaataattaatgatattgaaagatcaacttacattcgtgactacctcacttacttgagctttgcaataaggaaaggagcagatgtgagaggttattttgtgtggtctttgatggataacttcgaatggatctctggttacaccgtaaagtatggtctttgtcatgtgaatttcaagtcactaaagcgaacaccaaaattgtctgctaaatggtatagcaagtttatcaagggctatgaacagatagagatggcctctgaagaattgcctaagcatatggtttcctagtacagaaatacagaattctcaaagtccttgtttctacattactcaatgatttgtt

SEQ ID NO: 30979 - DNA, 1472 bp, Zea mays
  Clone ID: UC-ZMFLB73111F11_FLI
caggcacccgacggacggatgggctggggcggctataaaacgcgtcgctccccttaatgacactgtcatcaccaaacgccggtggagtcactcgagcccgcccgggtctcttcctcttccattgattccattcaagatcactactgttaccagccagccagtcgttcgttaagaagagagcgagcgagcaagagagagagagagggagaagggggaagatcagaacgaagagagggagatgagggggcaaacgcagacagcttccgcggggggccggtggcgaggcgacggcgctgcggcgtggtgttggtggtgggtggccgtggtcctcctgcttggccatttaccgagctgcgcgcgcgcggggctgctggagtccaacccgggcctggcctacaacttctacaagaacagctgccccagcgtggactccatcgtccgcagcgtcacctgggcgcaggtcgccgccaaccctgccctcccggctcgcctcctccgcctccacttccatgactgcttcgtcaagggctgcgacgcgtcgatcctgctggacaccgcgcagagcgagaagacggcggcgccgaacctgtcggtgggcgggtacgaggtgatcgacgcgatcaaggcgcagctggagagggcgtgcccgggcgtggtgtcgtgcgccgacatcgtggcgctggcggcgcgcgacgccgtgtcgtaccagttcaaggcgtcgctgtggcaggtggagacggggcggcgcgacggcacggtgtcgctggcgtccaacacgggggcgctgccgtcgcccttcgcgggcttcgcgggcctgctgcagagcttctcggaccgggggctgaacctgacggacctcgtggcgctgtcgggggcgcacaccatcggcgtggcaagctgctccagcgtcaccccgcgcctgtaccaggggaacgccagcagcgtggacccgctgctggactcggcctacgcgcggacgctcatgtcgtcgtgccccaacccgtcgccggcgtcggccaccgtggcgctggacggcggcacgccgttccggttcgacagcgggtactacaccagggtgcagcagaggcagggcacgctggcctccgacgccgcgctggcgcagaacgccgccgccgcgcagatggtggccgacctcaccaaccccatcaagttctacgccgccttctccatgtccatgaagaagatgggccgcgtcgacgtgctcaccggcgcaaacggccagatcaggaagcagtgccgccaggtcaacacctcctgatcaacaaggcgtcacagggaggggccatggtttttccctcttcgttcttctctttttctgcaccgcctggtattattgttccatgcatccggtttcggctcggcttcggctcggcgcgcatcaaatatatttcgcccccgcgccgtgattgagggccctcctccgacgaaagaaatccattgctttctttgtt

SEQ ID NO: 30980 - DNA, 160 bp, Zea mays
  Clone ID: UC-ZMFLB73111G08_FLI
cggatatcggaggtagatgtagctatgggactatcccctcctgatcgtctgacttgtggccttgcgtggagagtttacgttgctccgttgatttatgttgtatcatgccaggatgtcagtttaataccatacatcggtaaagtgtctctctagtaactcc

SEQ ID NO: 30981 - DNA, 1309 bp, Zea mays
  Clone ID: UC-ZMFLB73112C06_FLI
gcatgcatatgcagctgtgtttaagcacttcgagcaggacggggcgttctactgctacccagggcagtcgaacaaatccgtgactgctatgtacaacctctaccgcgcttctcaggtggcctttccaggcgaggatgagctccgacgcgctgaggcatacagccgtgagttcctctgccgcagacgagcctccggggagctcaaagacaagtgggtcatccccaaggacttgcctggcgaggtcgcttacgcactggacgtgccgtggaaagctagcctgccgcgcatcgagacgaggatgtatctggagcagtacggtggtgccgatgacgtgtggattgggaaggtcctgtacaggatgtctctcgtcaacaacgagctcctcctccggacagctcaagccgacttcagaagtttccagagacaatgcaagctcgagtggcatggcctcagaaaatgggccagcaggagaaacctccaagcatacggcgtgacgtcgaacagcacgctgcgatcctacttcttagccgcagccagcatctttgagccagacagagcgacagagcgtctgggatgggctcgcacggcggtgctcgccgaggccgtctcctcctgcctccgagacggtcgttgtagccgtgccgacggcatgctgagggaactgaccagcggcatccacctacgcaacgacgataatccggcagccagcttggtgcatgctctccatgagctcattggcctccttgcattcgacaatgcttcctacaacagccttcttgatgcctggaagcaatggctcgccatgtggaccgcccagggacacgaagggagcgtagcgctgctgctggttcgcacagtggagatatgctccggccggaggcgtagcgcctctgccaccgacgatggccaagcacacagcctctccgagtactcccagctcgagcagctcacgtcctcggtatgcagcaagcttgctgcagcaggcaccggagatggagacgacctttccccggcaagtgtggaggacgcagcagatcgccaccgtgtggatctggagatgcagacgttggctcggtgcgttctccggagccgcagcagtatcgacgcagtgaccaggcagacgtttctccatgtcgcgaggagcttctattacgtcgctcattgctcagctcgaacggttgatgcccacatctccaaggtcttgttcgaggatgtcgtgtagccaccgtttgggcctcgttttgtatctttaaagcagtgtttggttccagccagatttagtctcggccaaatcaaatgtttgaatggt

SEQ ID NO: 30982 - DNA, 1108 bp, Zea mays
  Clone ID: UC-ZMFLB73112E10_FLI
ggcacactcgcgcgaccatgtaccgggcggcggctgtcatctcgaggtcctcatcagcactgcggaggcagctcgcgcggggcgtggccggggagctgccgcgtctgttggcgcgagggtatgcggccacggcgaaggaggtgtccttcggcgttggcgcccgcgccgccatgctgcagggcgtcaacgacctcgccgacgccgtcaaggtcaccatgggccccaaggggcgcactgtgatcatcgaggggtcccataaaggtcccaaggtcacgaaggacggggtcactgttgcaaaaagcgtggagttcgaggatagcgcgaagaatgttggggcgaatctggtgaagcaagttgctgatgctacgaacaaagctgcaggggatggtaccacctgtgcaactgtgcttacacaggcaattcttactgaaggatgcaaggccgtggcagccggtgtcaacgttatggacttgcggaatggtataaacaaggcaataaatgctatcactgctcacctcaaaagtaaagcgtggaagattaattctccagaagaaattaaccaggtagcaaccatttctgcaaacggtgaaaaggaaattggagatctaatatcaaaagccatggaaaaagttggaaaggatggagtcattactattgttgatggcaaaacattggacaatgagcttgaagcagtacagggaatgaagctgtccagaggatacatatctccttactttgtgactgatcaaaagactcagaaatgtgagatggagaaccctcttattcttatccatgacaagaaaatctcaaacatggattctctccttccagcattagaaatttctatcaagaatcgcaagcctcttctcattgttgctgaggatgttgaaggagatgctctgtcaatgcttgtactgaacaagcatcgtgctggactcaaggtatgtgctgtcaaagctcctggatttggtgaaaatagaaggcacaatctagatgacatggctgtgatgactggaggagaggttattagcgaggaacgcggtcttgatcttggcaaagttcaattacaaatgcttggcactgctaaaaaggtaactgtaagatcgcg

SEQ ID NO: 30983 - DNA, 622 bp, Zea mays
  Clone ID: UC-ZMFLB73112F08_FLI
gatgcagcaaatgcagcagcagcagcagcaccaccaccaccaccaccaccagttccagcctcagcagcaacagatgcagcaaatgcagcagcagcagcagcaacagatgcagcctcaacagcaacagatgcagcaaatgcagcagcagcagcaacagatgcagcctcaacagcaacagatgcagcaaatgcagcagcagcagcaacagatgcagcctcaacagcagcagcaaccccagatggtgggtacaggaatggggcagcagttcatgcaggggcacaatcgggcagtgcagatgatgcaagggaagattacgccacaggggccgggcagcatgcctgggggaggcttcctaccttaagcaccttttatcagcaggcatcagatgaattgagggtttacactgacccaagtgttgagatgtcaacttcatttgacagggttagggaatagtcactcggggagtgttgctaaaacttaatctgaaaacttaagcatccctgtcaccgataggtaaatgccagatgtccatgcataggtgcatactttatgatatggtggtgtactcgtaatcttgagtgactttatggcattgttgtactagccgtaaactattaggtat

SEQ ID NO: 30984 - DNA, 1149 bp, Zea mays
  Clone ID: UC-ZMFLB73112F11_FLI
catgtgctcaagtatgacagggacttgatcctgcacaatgcgctcctagacatgtactgcaagtgcgggagcttggaggatgcggatgccttgttccacaggatgccacagagggatgtgatctcatggagcaccatggtatctggtttggcgcagaatgggaaaagcgtggaggcattgagggtttttgacctgatgaaatctcaaggtgtggcaccgaaccacgtaacgatggttggagtactctttgcctgcagccatgctggtctggtggaagatggctggcactactttaggtccatgaagaggctctttggcattcaacctgagagagagcaccacaactgcatggtcgatctccttggccgagctgggaagctcgatgaagccgtggaattcatccatggtatgagcctcgagccagattcagtcatctggagaacgctcctaggagcttgcaggatgcataaaaacgccagtcttgcagcatacgcagccagagaaatacttaaactggagcctgacgaccaaggcgctcgtgtgctgttgtcgaatacatatgcagatctgcggcagtggacagatgctgagaagccatggaaagcgatgagggaccgaggcatgaggaaagagccagggcgaagctggatcgagctggagaaacgtgtccatgtgttcatcgctggggacctatcacacccgtgctccgacaccataattcaggagctgaaccggttgatcggaaggatcaagtctcttggttatgttccccagacagaatttgtgctgcaggacctcccgaccgagcagaaagaagacctgctgaagtatcacagcgagaagatggcgatagtgtttgggacgatgcatgcggtggatgggaagcctatcaggatcatgaagaacctgaggatctgtggcgactgccacgcgttcgcgaagcttgtctccaagagcgaaggcagggtgatcgtcatcagggaccctgttcggttccaccatttccaggatggagcttgctcatgtggtgactactggtagccaggtactgatgttgttctgtttccagattggtttcacttatgggtgacaatgggatctaatttttacactataaagtttaaatataggatcgtactatattttatt

SEQ ID NO: 30985 - DNA, 1389 bp, Zea mays
  Clone ID: UC-ZMFLB73112H12_FLI
ctcgccgtctgccttctgcgcctccatttcggcctctgtcccttgcaagttcaatctcacctccaaccatgggtaaagagaagtcccacatcaacattgtggttattggccacgttgactctggcaagtcgaccaccacaggacacctgatctacaagcttggaggcattgacaagcgtgtgatcgagaggtttgagaaggaggctgctgaaatgaacaagcggtccttcaagtacgcgtgggtgctcgacaagctcaaggctgagcgtgagagaggtatcaccattgatatcgctctgtggaagtttgagaccaccaagtactactgcacggtcattgatgcccctggacaccgtgacttcatcaagaacatgatcactggtacctcccaggctgactgtgctgtccttatcattgactccaccactggtggttttgaggctggtatctccaaggatggccagacccgtgaacatgctctccttgcgttcacccttggagtgaagcagatgatttgctgctgcaacaagatggatgcaaccactccgaaatactccaaggcacgttatgatgagattgtgaaggaagtctcatcctacctcaagaaagttgggtacaaccctgataagattgcctttgttcccatttctggttttgagggcgacaacatgattgagaggtccaccaaccttgactggtacaaaggcccaaccctgcttgaggctcttgaccagatcaccgagcccaagaggccttcggacaagcccctgcgtctgcccctccaggatgtgtacaagattggtggtattggaactgtaccggttggtcgtgtggagactggtgtcatcaagcctggtatggtagtcacctttggtccaactggcctgactactgaggtgaagtctgttgagatgcaccacgaggcgcttcaggaggctcttccgggcgacaatgttggcttcaacgtgaagaacgttgctgtcaaggatctcaagcgtgggttcgtggcctccaactccaaggatgaccctgccaaggaggctgccagcttcacctcccaggtcatcatcatgaaccaccctgggcagattggcaacggctatgccccagtgctggactgccacacctcccacatcgccgtcaagtttgctgagctcattaccaagatcgacaggcgatctggcaaggagctcgagaaggagcccaagttcctgaagaacggtgatgctggtatggtgaagatgattcccaccaagcctatggtggtggagacattctccgcgtatcctcccctgggtaggtttgccgtccgcgacatgaggcagacggttgctgttggagtcatcaagagtgtggagaagaaggacccaaccggcgccaaggtgacca

SEQ ID NO: 30986 - DNA, 1732 bp, Zea mays
  Clone ID: UC-ZMFLB73113C03_FLI
gatataagtcacatctttcttggcctcctatcttcgcctccagctgggatgagtctgtctcattacgatggggtgatcttgggctttctgtttcacatatcttcaggcctgtgcctggatgctgtaccatgcttggtcctatgaatattgaagtaaagcaacggaaagttgtagctgttggtaggaaacggactgcacggccaacagaaaatacctgtcctgaagagcttgctgagtcttcagaggaagtaaagacagacactgacaggaatgtcttagttatgtttgatatcctcaggcgaaagaagagcgcaaaattggaaaaccttgtgttgaataggctttcatttgcccaaacagttgaaaatgtttttgcactatctttcttagtgaaagatggtagggtggaaataactgtagatgatagcgggcatatagtacggccaaggaatgcacctgctgctagcgctatagcctcaggagaagtctcatacagtcattttgtttttagatttgacttgaaggactggaagcttatgaaagaagttgttacagagggagaagagctgttgccacataggacttcccagagcaatctttgcaacgaagaaaacgaccaaccaaatctggaggtacgtgcacaaataatgcctatcaggaagaagagctcgtgcttatctgaacttccagttgtgccagcggagtagggctgtaattataaattgtttgaagttctggtcacatcttgcaactacagaatggtgtttgtagggctgagtgtaactagctagcttggctcgtgttgggtcattaagggtgtgtttggttggatgtatatggagggatggaaagggacgaccacatattctatagtgtttggattagagtcgcgtggggcgagataaacatcggagtaattttttggtggcggtgtgattcaaaaatttgactactttgatctcaaactaaacatattctaactcatttatcatggcaagatatgtctcgggtaaacttgttaggctgtcataacttatccatcctatctcttattttaaattttatttttttgtaaatattataatttacagtgcaaaataatgttttacacgtctatatagacgatctactacaaacaaccttaagaaatgagttaaaagtttagcttaacatcttgagcaaatcaatgctaaagagaagttgctcaaatcaatgcgtgattgtgatccttcgtctgtgcacccactggatttgtataagttgttttcttgtttttatttttttgttattcctaccattaaattgggcattcaatacatgttcattatctttatgcttatgcaatcaaataatgatggaaaataactgacttggctgctctcttgagttgtggcaacggaagttccaggccccgttgcagctgggagtggttttatactcgctgatgacatcaagtcttaggtgcttccattgatcaatgactcagggaaatatggagggatcatgatgtggttcaagtactatgatgatcaagatggctacaattcttgagtgaagagtgatgtttaggttgttgtctgtggtgtgtgacaatatctgtgtgttacttgtgtgtatgtgagaaattatgtgactctggagtctggatagtgcaataagtattactcaagtatatgattgaatcttatgtcatactattcaaattatgtcatatgtatcttttaaggtatgt

SEQ ID NO: 30987 - DNA, 349 bp, Zea mays
  Clone ID: UC-ZMFLB73113C05_FLI
tcgcgaaattgattccagaacatgcaaagaagcaatgctcctatgttggattgtgaaatgaccgcgccttgagactggaacctgtggttgcaattgtgaatttcccctgggatgtttgacgatctgaggcatgcgagcctgttgttgaagatgcaaggttacgtacttgtacgacaatgtgacctgtgtagctgagtagtctatgtcgcagtgacatgtaacggcaccccccttcctactaactgacgcttactcgagattgccatagttgatcttgtaatttgttatagagcagtatgaatgtatttatggtagcttgaatctatgtatggattcacttcgtttttcc

SEQ ID NO: 30988 - DNA, 923 bp, Zea mays
  Clone ID: UC-ZMFLB73113C09_FLI
gctaattcatctggtggtactcttacttctaactcagagctagggcatggttcatccaagagctctatttcagcgtccattgattcaccctctggagtagggaacagcttagagttcaacttcgccgctgttgagaggcatgttaagaacacgggcacgaacggcagagtcgatgactcggggaattctccatcgtcaatgatagctttcaaccaaggagagccattaatcagcctgaaacttgggaagagggcttacttcgaaaacgcctgcggaggacaggatgccaaggtttctgcagcttcagacgttacttctgcagccagcgtggtcaagaagactaaggtgtctcagcagaatgcaaagaactggtactgtcaggttgaagggtgcaaagttgacctgtcttctgctaaagattacaatcgcaagcacaaggtctgtgtagtccattctaaagctaccaaggtggttgttgctggtctagagcgtcggttttgtcaacagtgtagccgttttcatggtttagcggagtttgatcagaacaaacgaagctgtcgtaggcgtctgatgcatcataatgcacggaggaggaaacctcaggcagacacaatttcattcaattcatcgacaatgttttatgatacaaggcagcggacaaatcttttctttagtcaaccactttatggccaagtgaggagcaatgcagggtcttcatgggataacttgggaggcttaaaattcatggagacgaaacatccgccagtgcatccaacaaaaacagcatcccctgatgaactgcatttctcagccctccagataactagtgctgcggctcacaccggacatcatcatgatctcgatgggttcatggcgttcaagggaaccagcacaaaggtccttaaccaaggcgtggaggcttg

SEQ ID NO: 30989 - DNA, 1178 bp, Zea mays
  Clone ID: UC-ZMFLB73113D01_FLI
gccatcgagctcgtctctgcgcccgaagagctcgttggcgacatcggcaccctagtcacgtccggcggcgccgctcagatacacgagctgtcgtctcaggtgtttgagactctctacaggatcaacgtcgcggggcgcaaggtcacgccattcaacgacacactgtggcggacatgggttaacgatgagaaattcctcatcgacaccgactcctccaactacatggtgtggtcgtccagtggccggattgcttatcccaagggtagcaagcagatgacaagagaagtggctcctgacaatgtctacaactctgcaagatccgtgaggccaggggtgaatgtgacttggggtttccctgtgcctgctagcagccggtaccttgtgcgtatgcacttctgtgacattgctagcaaggctctgtatgagctctacttcaatatctacgtcaatggtgatcttgcagtcaaggatttcgatctctccagtgcaactggattcttggcctatccttattacattgactttatcgtcgatgtgaaggatgaggggatactgaaattggcgattggtggcttaaagaagagtcgatctgatgaagtaagtggtatccttaatgcactggagataatgaggatgaacaagaccagtggaggtatggatggagacttcccaattgatctacacatggaatatgtggtgagtaaggggattggagaatttgcccgctccctgctctgtggtttcatctttgttgggttgtttgtggctttggtcacgctgatggtgaggttgaggaccgagttgaggaataacggcacagcttggtcctggagacagatgaactccgatgaagggaaactggccagaacatatcagcttgtgcccagtaagacggactattgaatattgcaggctgggcatcttgaggagtgacaacctgcggctgttgtgtgcatctaatcacatcatactttttattaagttgtaagtactgtagttttatcacctctctaaaagtattgtagttttgtatcatcactcctttcatgcttggactttgcattctccatgctttgtcaatggtcaatggaggacatgctcatgatgctgtaaaagtactctaccctagatgtggctgtattgctattgcctcatttattcagtttgacttctgaaac

SEQ ID NO: 30990 - DNA, 2162 bp, Zea mays
  Clone ID: UC-ZMFLB73113E12_FLI
atttgatgaatcatttggcttgagagtgttcaaaattggctacgaagtgtatgccgatggtttaacaagagttttacgaatttgtgaacatgcagataatcccaaaattgagaaaattcaatggccaatagcaaatatacagttcagaatttcttatgtgtgtattcatcttcttgacaaggaccagaatggggaaaatgtccaattgccatctacaattttagcagcaagacttcagcatgtttcttctgattcagttgtcacaaatagattcaagcaagtatctgttgcaattcattcattgaatgtggatgaaaaatgggaaggggcttcaattgggacaattcttaggaggaacaagcttcaggatgctactctcgatgaaaatattcttcgtatgatctttgtactgaattcaactgactccagtgtcaaacaaatacagtattgtgccatcatcctacagcctgttgatcttaagattgatgaggaaacgttaatgaagctagtaccattttggagagcatctcttgcaccttcaggcacgacaagcacacaattttatttcagacgttttgaagtacatccaattaagatcatagcaagctttcggcctggtggccgacgcacaacatatagttctgctcaagaggctctgagggcactacttcatagtgttataaaggtgcctgaaattagcaactcagctgtggagctcaatggggttctcctaaatcatgctttagttacatttcgtgagctacttctaaaatgcgctcagcactactcatggtatgtattaagggcaatttatgtaacaaagggaagcaaattgcttcctccatcttttgcctcaatttttgatgactctgcttcatctgttcttgatgtcttcttcgacccttctgatggatcgctcaacgtccctggccttaccataggcatgtttaaatttataagcaagaacatgaagtcgggtggtttttctggaacaaaacggtaccttggtgatctcgggaaaactgttaaaactgcaagttcgaacgctctctttgctgctgtcacagaaatttcagatagtgttgttagaggagcggaaacaaatggtttgaatggcatggttactggtttccaccagggcatgttgaggttggcgatggagccatctgtcttagggcaggctataatggagggaggtcctgacagaaagatcaaacttgatcatagccctggacttgatgagctatacattgaagggtacctgcaggctatgttggatgtcatgtataagcaagaatacctccgtgtcagggtgattgatgaccaggttatactgaagaatctaccaccaaatagcgccctgataaacgaaatcgtggacaacgtcaaaagctttcttgtgagcaaggcactgttgaaaggcgattcttccacagttcgaccgatgcgccatctgcgaaatgaacctgaatggaggattgccccaacggtgctcaccctctgcgagcacctttttgtgagcttcgctgtgcgtgtgctgcaccgggaagccagcaaggccatcgctggagtcatgtcgagagtgaagaaaccgaccggagaggaggtcgaaggcgactcgcccgcatctggtggcgtcctgtgtaagcggaataggctgtggactgtcgggaggtttgccgtctcgggcatggtcgcctatgtagatggccggctgtgccggcacatacccaaccccatagcccggaggatcgtcagcgggtttctactgagcttcatcgaaaacaggggcaacgaataagcgggcagccggacaggtgataaaagggctcgccttctgccacctgctaataaggcgtaccatggaccatggtaaataggcgtgcacgttgtacaaagaaccgaggtgtggtagtgctcttgagccgtaaccgatctctgcatagagctgtgcatcaattttgaccgccttcaggcccacgtttggtgtacagaaacactgggacagtaattccgcagatgctacttcctgcctacatttcgttgacatggactcgtgcttagagtaagtttaatagtccacaacgagccttttcacataacaaactcggttagaggccctttcacatagtctatctatatcatcttattatacttgttct

SEQ ID NO: 30991 - DNA, 1943 bp, Zea mays
  Clone ID: UC-ZMFLB73113F05_FLI
ctcttcactagcctctgctcctctgaaatggcggcggcgacttcctcttccacctacctcgccatcggccgcaaaaccctaaaccccgccccctccgtagccacagccgccacctccgtctccttccccgccacgcagcacccatgcctcgtcgccgcctccgcggaccgccgccgcgccgtggctgcgaaggtctcgtcgccgtcggtcatcggcaccgccatgccgtcgctcgacttcgagacctccgtcttcaagaaggaaaaggtgtccctggccggccatgaggagtatattgtgaggggtgggagggatctgttcccgctgttaccggaggccttcaagggaatcaaacagatcggtgtaatcggctggggctcgcagggtcctgcgcaagctcagaacttgagagactcacttgttgaggcaaagtcagatattgttgttaagattggtctccggaaaggttctaaatcttttgaagaagcccgagcagcaggattcaccgaagagagtgggacgctgggtgatatatgggagactgtatcaaacagtgatcttgttttgctactgatatctgattctgctcaggctgataactacgagaaaattttctcgcacatgaaaccaaacagtattcttggtttgtcacatggatttctccttggacatttgcaatctctgggttttgatttccctaaaagcatcagtgtgattgctgtatgccccaagggaatgggcccatcagtcagaagactttatgttcagggcaaagagatcaatggtgctggtatcaatgctagctttgctgttcaccaggatgttgatggaagggcaacagatgtagctctagggtggtcagtagctttaggttctcctttcacatttgctactactctagagcaggagtaccggagtgacatttttggcgagcgaggtattttgcttggtgctgtccatggcatggtggaggctcttttcaggagatacacagaacaaggaatggacgaggactcagcatataagaatactgtagagagcatcactggaattatatcgaaaactatttcaaagaagggtatgcttgaagtgtataactccttgactgaagaaggaaagaagcagtttattgaggcctatagtgcagcatattacccatgcatggacatattgtatgagtgctatgaagacgtctcttctggaagtgagattagaagtgtggtgttggctgggaggagattttatgagaaggaagggctccctgctttccctatgggaaaaattgatcaaacacgtatgtggaaggtgggtgaaagggtccgttcaaccaggccacaaggtgatcttggcccactgcatcccttcactgctggagtgtatgttgcactaatgatggctcagattgaggtccttaggaagaagggccactcttactcagagataattaatgagagcctgatcgagtccgtggactcgttgaacccgttcatgcatgctcgcggtgtggccttcatggtcgataactgctccacaactgctcgtttgggatctaggaagtgggcaccacgcttcgattacatcttgacccaacaggcgtttgtgactgttgacaagaaagcaccgatcaaccaagacctcatcagcaacttcatgtctgaccctgtccacggtgccatcgaagtctgcgctcagctgaggcccactgttgacatctcagtgaccgctgatgctgatttcgtgcgtccagagcttcgacagtcttcataagcttgtatggatccgcagtgtgactgcaatggctagtttgtaagaacttaatatgcctgggcttttgaactcttagattgtgcctgtattgctcgtgcttgaggaccagaaaagtaaactcttggcggtgtggtactgttgtgatttgcaagaataaaaataaatttctgttgatc

SEQ ID NO: 30992 - DNA, 360 bp, Zea mays
  Clone ID: UC-ZMFLB73113F09_FLI
gctgagtacgatgagtcaggaccagcgattgttcaccggaagtgcttctaagctcaagggcccccttcgtccccattctatgtattcctttccttgagtgcttttcttataagctactatgtttgagattgccggcctttgagcaggcaatgttgttggatctgtatcttgtggatcactacaatgcatgcgttgctccatcttcttttcatgccaagtttgctgtcatacttgctagtggggaaaacaacaatgacaacagtggtgagaacagcaaccacaaaaaaagagaggatggaaattattgaagttcctaggatcgtattgtaactgtacttgtgcgagtaacattattggttc

SEQ ID NO: 30993 - DNA, 263 bp, Zea mays
  Clone ID: UC-ZMFLB73113H05_FLI
ggaagaggatggggatgttttcttgtggagctatactagctcgctgctgccttttgttacaatgtttgtacggtcgcaataaatgtatggtcgtgtttgctcgagagctactcaggtgattttgtcgtgggagcaccaaaagcagaaaagaactgtttttttcttctctctctctagattctgacgagtggtggtctgcactcgtcgtaatgtcgtttgcctaaactgattttgatggaacaggaaatcttgctggtcttgcc

SEQ ID NO: 30994 - DNA, 775 bp, Zea mays
  Clone ID: UC-ZMFLB73114A07_FLI
ctcaagtcctatgattgggctaaaagtctgccggcgggtagcaacgataatgcacttgagaactctgatggagcaggagctcgtctggccaaggtgaacacagatgccgtttttgacgcttcatctgagaccgtagttctgtaccctgaaaatggagggaacttgcactgctttacggcgctgaccccttgtgccgtgctggatgtgatgggccctccctacaaccgtgctcaaggaagggattgcgcgtattacagcgaatcgccctactcgtgtgctggagatgcacaatattcttggctcaaagaggttcacagcacatttgagatggaaggcataaagatggagcccaacttcatcgtctaataattaagcaggcatggcatggcatgtcatcgtaatgctgctagtttcatgtagataatctctagctgcgggggtgtagtacaactggaagacggccagatgctcttttgacattcgtttgccttaatttcatatgcctccctttatgtatgttaacaattcgaatcttgggtcatggtcactttttttctgttttccctgtagacagcaggtgctactttttgaagtgatcatggaccaaattctgtgggtcgtttggttggtttttgttgagcagcagaacagtcttcaactttctgcctgccatcgtgtttcagtttcagggcccatgccttgtgttttctctttgaatgaacaaagaactgtctctagcatagttataaatggatatggtccaggcttccaaatc

SEQ ID NO: 30995 - DNA, 632 bp, Zea mays
  Clone ID: UC-ZMFLB73114A12_FLI
aggtgacctacacttttgggagaagctgggcggtttcgttctccttcctaccgctggccggccggctggtggcaagctcgatcgagctaggagtcagatggaaggcacgatgaagcacagcaacgttgtgacggagaggagctctgtgaccaagccccgtgaacaggaggtgtccgcttggcatgatgaggctggagagcgtctggtttggacgccgagagcagcagttcagctgatgcttcatgcctagcatcagcacggcgttatcctaattgagcttttcagccaccatctttatccttcctcatattctccatatcgtgatgcttgtggtttcgcaagatcaggtcttcttgaccttgcaagaccttttcttgaccttgtaagacccaactctacgatacatcttttctttgacctaatcttctctacctcacacctttctatctgttcttacttctgttctatgtctatcccttctgagctgtgttgagctactttgataaagctaggtactatagattaagtgttttaggaggtgtttctcacatgtgtaatgttgtgagcttgccgtgtgggaaaaaaaaaatccattttgatggtagctatatagagtgaggcatgagacaaac

SEQ ID NO: 30996 - DNA, 345 bp, Zea mays
  Clone ID: UC-ZMFLB73114B03_FLI
atctccttcaagaagtggatgctcaagcagcagctcaaccaggacgacgaccctttccagctgcctggcgtcgccatggacaactgatacaccgtaccgtcgtctctgtttgcgtttctgtcaagtgtgcatggaataatactgtaactgtgtttcctgccgggcaatgcactgtgatatgatgcccaacgaataaatgtcgcttttatttttattcgacttcccccctgtaccgtgtggaaataaacctattataagcatcgtgttgaaactcatgatatgcatgagcagctagtgaaaagtttgaatcctagatgaattgaaacacactattatatgattgct

SEQ ID NO: 30997 - DNA, 1998 bp, Zea mays
  Clone ID: UC-ZMFLB73114B07_FLI
gggagctcgaacacaaacagcaagaaccaccaagcgaccaagcctgcaagtcaccaagggagcccgatctgagtcaagcgagtcttcccgtttcatcgcctggaaaaaggcgagaaaccccaaagcgaaggaacagcagcgcgagtgctagcagcagcagcgattccttcgccataccgttcgctgcgctcgctcactcggatcgaaaccccctagggttcgcatcgtcctcccgccaactcctatccctcccctctccctccgccgcgcgcgcgcgtggagctaccaaaccctaggacggcaaatccggtgcgatcgcccacggtggaggcctctcggccgccgagaggagccgctcggggctcggatcagggttccggtacttcgccggtgccgcctctgggtggtgggaccggtggatggtcatgggagccagcggctccaagcttgagaaggccctcggagaccagttcccggaaggccagcgctacttcggcctcgagaacttcggcaacacctgctactgcaacagtgtccttcagaaatctggccaaacagcaatatcgtgcatagggagcagcactgctagaccacaacactatcgggatgagaagttgcactgtcaggctgagaagtggcaccgtcgtgctgctccgagagatttcagatttggcttccttcagatatttgggtatctttttggtctgattgcttcctctagagactcttttagagaattcaatcaagagttgattgaggtgttcttaattttggatcattttttaggttttgatgtcttagaggtttacgtgaagttttggaagataagccaagattgtccaaagcaatatttttattggctctcattcatcccctttggtaacctaatctaatgattccaatatagttagaaaatcagcttatggctatatatattctacatattactattgtattgatcattattgtcattcactctactcccatttacctacaaaaaaggaaattttaatctagctgtagcttggacgaacaaaattgttggtgataagatctccactcaaaggtccgaattgatgaaatccatgtttaggtagttttgtaggatatggttgtcagccaaagccaaaggaaaaacactttgaagagcttagaagcatacaaacaagccaaaaataaatgaagacgaagatacgaaaagcctaagttttgttatataatgtagatatttatgaactttaacagtgttttgttaaaatatttataaattttatcagggtcaactaacctcgataaatacccctaaattagctcctggtgatgggtccttagcggaatcaaaggttgagatatctccaccataacgaatctttgtcaacgccctagtgtacaagctttacacctagtcagcgggcgacactgaatgaccctcatcttttttctttactttggtcaacttgattttctacgcctctttgtgtttcttagccaactcatccaccttcgacaaggaaaatataaggactcaatactagaagaataatgcaaaaataaatgaaaggtgaataaccaacttgttggggccttggtcttttaaaggtccttaaaaacacgtttaaccattggttgccaagtattataggagcttcggcactagaacaccttcgatgcaggacattagaggggcgacgaagctaactttgtcatagcgacacagggagacgatgcaaggaagagtcatcctgaatgctaaaagcaaaagacaatgttgcccttgcattatttgtaaatcatgtgtgtagtccttgtgggtgtaaatgtaatttcgtacgaagttgtacgattctctataaatagatgaatagtgtcctgcataaattaccttttggagggcaggacaattgttgtgtaatcttttctctaaagcaccttcgctcttcgctctaattcattctgtggaaccttcgaaagaggagaaatacgatattatatttatgc

SEQ ID NO: 30998 - DNA, 627 bp, Zea mays
  Clone ID: UC-ZMFLB73114B09_FLI
ctgagttcgtcgtggctacatgataccatcctaaaggaatccttggatagcaaggggagagtaatggtggaaaaggatttaagagtgaaaggttttaataacatttttgcgattggtgacatcacagatattcctgaaatcaaacaagggtacctcgcccagaagcacgcgctgctagtggcgaagaacctgaagctactgaccaagggtctccctaacagcaaactggcgacttacagcaccggctatccgctggcgctcgtctctcttggaaggaaggaagggctggctcagtttccattgctgacgctcagcgggtgcttgccaggcatgatcaaatccggggatctattcgtcagcaagacgaggaagcagatgggcctgaatggttgactccagtccgaggaagcttgaaaaaatagctcgggtcctgggttatatacagacgatggattcctttacacacagcttgtgttttgctcgtatggccatatgtgttcgttctgtatctgtacgtgtgatggtgtcgtcgtgtggatgcttggaatggtgactagcagagtgtatgctacgtacatgtatacatggacctttttggtccaacaaaatgttgcttctgtagtatgt

SEQ ID NO: 30999 - DNA, 1417 bp, Zea mays
  Clone ID: UC-ZMFLB73114B10_FLI
caagcgcactctagcaatggcttctgaggttgtccgccctagcgacgccgagctactaaaggcacaagccgacatatggcggctcagcctctcctacctcacgcccctgtcactgaggtgcgccgtggagcttggcatccctacggcgatctaccgccatggcggggctgcctcagccgctgagctggtcacggcgctgtctctcccctccactaagctgccgttcctccgccgcctgctgcggctcctcgccgcgtcgggcgtgttcaccgtcgacaagcagagctcggaggaggagcggtaccgcatcagccccgtgtcctacctcctggtggacggcatccctcacgaggaccacatgaaccacaccgctctggtgctcacctgcacctcgacgcgctacatcgaggcggggatagggctggcggagtggttcaagagggacgtggtcacgtcaccgttcgaggagctgcacggggcgactctgttccacgagagcatggggagcctcgacgcagatttccacgacatggcgagcgaggccttggacgcccacgacaacttcggcatcgagatagctatgcgggagttcagggacttgttcgaggggatccagtccatgacctactgctgcggtaacttcggtgatgacaagggtgccagggccattgtcaaagccttcccacacataaaatgcactgtgctggcccctcccaagatcattgccaccaaaccggccgatggagcgatgataaactatgtcgaaggtgacatgttcagtttcattccacctgctcaaactgtcgtgctaaagcttgtgctgcaccacctgaccgatgaggagtgcgtcaagctcctggctcaatgccggaaggcgattccttcacggaaggatggcgggaaagttataatcggtgatattatgattgaccactctgggcctatgctggaaactcacctcctgatggacatcggcatgatgaccatgacaaaaggacggcagagagatgaaaaagaatggagcgagctcttcaccaaagcagggttcagcgaatacaagatcctgaaggaatttggagctcgtgttgccttcgaagtctatccgtgagattgcacctggactatacatatatatttacatacatatatgtatgtgtgtgggtgccttgcgtggcttggcgtgatgatgtcataaataaagagggtgggtgtgcttgcggtattcatggatggccatggatctgagcacatgacgttggatgctttcttaaggctctcgtggatcttctatatttggaagaagctgtaaaataatatatcgccatctagtgttggcgttggcttgtatgtactttgtacctgctttgttattttgtgtaatatcgagtaacctaatgtatacttgcttactactatc

SEQ ID NO: 31000 - DNA, 1298 bp, Zea mays
  Clone ID: UC-ZMFLB73114B11_FLI
ccacgggacactggaaagaaggaagtagattcagaactaagagagattattatccacctgctagcatttataagcaaaggaagtgtaaagactggcaatgcctctaaatggaactcatcgtttttctgccctgctgttatcaaagaggaagtagcgcttaatgagaaaccaccactcatttgtagcaagtatgggtggttcagatttgcagcaagttgtactttgtcaactgcaggtgtttcagtttctcccagtgcagctttatcagtggtgagacgggacaagacttcaggagattctgattctataaggcagactcgttttactgagatattagctgttcagatatacaggattgcttttcttatcatgaagtttctctgtagtcaagcaaaagaagcagtaaaaagggcagaagaactggagtttcttgacctcgcccattttcctgagcttcccatgccagatattcttcatggtttacaggatcaagtggtttgtattgtcactgaaatattcgaggcaaatgggtcaagcactctaaatcccgagacagagaaggtatgccagctcctattggtgacacttgaaacgtcactttacatggaactatgtgtatcccaatcatgtggcatcaggccagtacttggtcggcttgaagatttctgcaaaggaattaaggctatgcttcaagctatagagaagcactccagttttgaaccttttgtcaggtcgctaactgaaattacttctcttttgtatcccgggcttttgcataataaccttctcatgtgactcttgtaaattgtcactgttaaagagatgtgttgttggctaactttgaattgagccacatatggacttgcatactcagttgacgtcacccgaggaagcttcgttttcgcacgttactgtcaccaaagtaaagtgggttccagcggctacgaagcaaattcgcagagccagggcaccaaatcaaactgaaggcgacgacgcccgaggaagcttcgttttcgcatcacctttgttcggtttcacagccgaggctcccaaagtggccagagaatcttggtggacttgcctttccgggactccacactgccgaccacgcttattcacccgtgtaaattatgctgggattctcctttgctggctcgtctggccgatgtgcgtcccatcatcacagagaactagaaacaaatgatacatatgtagatgctatgcgttcttgatcaatcagacacgcattttttttttctgtagaggaatacatgttcggcgcgttgcatctttacact

SEQ ID NO: 31001 - DNA, 1822 bp, Zea mays
  Clone ID: UC-ZMFLB73114E04_FLI
gccaggaacaggcgttagttactcctataatatattccttctgttatgttcctgagcccacatgtcggggctcagcatccttgtatgtgcctcccttgagctataaaagggaagacacacgacgttacaaggcaggttcactcagaccctcagactcacaagttcatacaagctctcaagttcacaaactcaatacaacacacagtggagtagggtattacgctccggcggcccgaaccactctaaatccttgtgtcctcgtgtgctcttccaccattaatgactgtaattgcagggacacgaagagttgtagcgcttttgccaacaagatccgctatatgcttgtagagtggaacctctttttcagcagcaccagctttgcaagctgcaattgacactccaagcatagtatttgctccaaactcagccttgtggcgcgccctgtcaagtgcatgatggcctggtcgatctgcgtctgctgctgcggatccatcccaacgagtgcctccgacaccttgtcgttgatcacccgcaccgcgtaggcgacccccctggcgaggaacttccgcctctcggaggccccggccgcgtcggcggcggcgccctcgagcgcgcccacgctagccgtagatgctcggtgcacggccttgttggtgtgcaactcgacctcaacggccggtgcgctacgcccgtcaaggatctggcgcgcccgcaccctcgtgatcacggtgggcgcctcccgcctcatgtggccgacgatgaaaagcgccgggttaggggccttggcgcggaccgccgtattcagggcctcctcgctcttgcgcgagagcaggtgcttccccaggtactcctgcactgacatggctgccacagcggtggaatttgtcctcacgacttcgccacgtcgtcctcacctccctggcttcccacgactccgccgtatcgaggtgctcggtgggtcgtcttaatccgaagtccgaactaggaagacgagacagagaggtctgaggaatgggcctcgtttgatgttgagctgaattatttttccagcataagcccaggtcttggtccatgaacaaaattactagaaacccagcccagtactacgatctaaaagagggactgccactggatagctctctctagcattctccacgctccaatacagcggcgtcgtgtctatccgggtctatccgcgaacacgtgagaactctccagaaactgctttctcctccacttcatctctctcgctttccctctataaaaagaccccttctaggaattgagggagacagcaagcaccaagcagcgatccgaagctcaatcaattcactcaaacctcttccccaaatcttcgattagattctcgttgacaagaagactagaaccgaacctgaccatgtcgctgatccgccgcagcaacgtgttcgatcccttctccctcgacctctgggacccctttgagggcttccccttcggctccggcagcagcagcagtctcttcccctcgttcccgcggaccagctcggagaccgcggccttcgctggcgcgcggatcgactggaaggagactccagaggcgcacgtgttcaaggccgacgtaccggggctggcaccgcgtggagcggagcagcgggaggttcctgcgcaggttccgactgcccgagaacgctaagacggagcagatcacggccgccatggagaacggcgtgcttacagtcactgtgccgaaggaggacgccaagaagcctgaagtgaagtccattcagatctccggctagacctcggtctgcggtcgtcgtacctgcgtggtttgaggaac

SEQ ID NO: 31002 - DNA, 1526 bp, Zea mays
  Clone ID: UC-ZMFLB73114F08_FLI
ctcgctctcaagcttcaaaatcccactagcgaaaggaaaacgggagaagctaggaagcagcagccgcggcatttcttccttgagcgttcgccttcggctgctcaacgcgtgcttcgtttcaggagagccttggtggcatctctgtttcatggccgagatctgctgtgaggcggcggcggcggcggcggggtcggaccagaagggggagtgcgccggcagccgcgcggcgcggcggcggaggatggagattcggcggctcagggtggtggccgaggaggcgtccgccaagaggcggaggctggaggcggatgaggaagacgcggttggggggcgagcgccgaggtacggcgtgacgtcggtctgcgggcggcggagagacatggaggacgcggtgaccgcccgtccggagttcatcaacggccaccacttcttcggggtgttcgacggccacggctgctcacatgtggcgacgtcgtgcggggagcggatgcaccagattgtggccgaggaggcgacagctgccgcaggctcgtcggtttcggacgagaccgcgcggtggaggggtgtcatggagaagagctacgcgaggatggacgccgaggccgtcgtctccagggagaccgccggcccggcgcccacctgccgttgcgagatgcagcttcccaagtgcgaccacgtgggctccactgccgtcgtggccgtggtggggcctcgccacctcgtcgtcgccaactgcggcgactcccgcgcggtcctctccagcggaggcgccacgatccctctctcagctgaccacaagcctgaccgccccgacgagctcgaacggatccacgcagcgggagggcgcgtcatcttctgggacggcgcccgcgtcttcggcatgctcgccatgtcccgagccatcggtgacagctacctgaagccgttcgtgatctccgacccggaggtgctggtggtggagaggaaggacggcgaggacgagttcctgatcctggccagcgacgggctgtgggacgtggtgagcaacgaggtggcgtgcaaggtcgtgcgcacctgcctccggaacagggcgccgcgcggtggccgggagcggtcgagcccgacctccaacctgagccctaggcagagcagcgccagcggcggcagcagcagcagcggggacgaggaggctggtgggcccagcggcgacggcgcggggtccgagagcgacggcgagagcgccgaggacagggcgtgcgccgaggcggccatcctgctgaccaagctagcgctggcgcggcagagcgccgacaacgtcagcgtcgtcgtcatcaacctcaggcggcgcccgcgatcgtgatcggtggtggtggctctgtgatggactagccgttcttggttggtttggttttctggccccctccgtaagttcaaatgggagcccggttcaccttcgcttcggcagagcaatcatcagacaagatgtcaaagcgaagatcgaacaaaatgtgagatccttagcaaaattgcatgctacttccttttac

SEQ ID NO: 31003 - DNA, 1173 bp, Zea mays
  Clone ID: UC-ZMFLB73114F09_FLI
cacgacctggggggttcagatcggatcggaagcttccataagtttccatcgggcttcgccggtatggcgatccgcaaggggtcttcgtacgccgtcgcggcacttctcgcgctcgcctctgtcgccgccgttgcaggggaggtcttcttccaggagaagttcgaagatggctgggaaagtcggtgggtcaagtccgagtggaagaaggatgagaacatggctggtgaatggaaccacacctcgggaaaatggaatggagatgccgaggacaaaggtattcaaacctccgaggattacaggttctatgccatttcagccgaataccctgagttcagcaacaaggataagaccctggtgctgcagttctctgtgaagcacgagcagaagcttgactgcggtggtggctacgtcaagttgctgggtggtggtgatgtagaccagaagaaatttggtggagacacatcttacagcattatgtttggaccagatatctgtgggtacagcaccaagaaggttcacactatcctgaccaaggatggcaagaaccacttgatcaagaaggatgtgccttgtgagactgatcagttgactcatgtttacactttgatcatccgtcctgatgcaacatacagcattctcattgataatgaagataagcaaactggcagcatctacgagcactgggatattcttccccctaagaaaatcaaggacccagaggctaagaagcctgaggactgggatgacaaggagtacattcctgaccctgaggacaagaagccagagggctatgatgatattcccaaggaaattcctgaccctgatgctaagaagcctgaggactgggacgatgaggaagatggtgaatggactgcccctaccattcccaacccagaatacaagggaccatggaaacaaaagaaaatcaagaacccgaactaccagggtaaatggaaggcacctatgattgacaacccagattttaaggatgatccatacatttacgccttcgacagcttgaagtacattggcattgagctgtggcaggttaaatcgggcactctgtttgacaacatcatcatcactgatgaccctgccttggccaagacttttgcagaggagacctggggcaagcacaaggaggcagaaaaggctgcttttgatgaggccgag

SEQ ID NO: 31004 - DNA, 2143 bp, Zea mays
  Clone ID: UC-ZMFLB73114G09_FLI
caaaacttaaaaccaatcgaaattagaccggcgacgaggattagcgctcgccggcgatggattctgactacggcgtgcctcgcgagctctcggaggtgcagaagaagcgcacgctctaccagcccgagctgcccccctgcctccagggcaccactgtcagggtggagtatggtgatgctgcaattgcagctgacccggcaggtgctcatgtgatcagccatgcattccctcatacctatgcgcagcctattgctcattttctcaggaagacagctgttgtccctgatgctaaggtcatatctgaacaccaggcggtcagggttggcattgtcttctgtggcagacaatccccaggaggccacaatgttgtttgggggctctatgaggctatcaaggcccacaaccaaaacagcaaactcattggtttccttggtggatcagatggtctgctagcacagagaaccttggagatcactgataaagttattgcttcatataaaaatcaaggtggatatgacatgcttggtcgaacaaaggatcagattaggacgacagagcaggtcaatggtgctatggctagttgccaagctttgaagttggatgctctggttatcattggaggtgtcacttccaacactgatgctgctcaacttgccgagacatttgctgaggcaaagtgtgcaacaaaggttgtaggtgttcctgtaactttaaatggggaccttaagaaccagtttgttgagacaaccgttggctttgacaccatatgcaaggtgaacgcacaacttatcagcaatgtatgcactgatgctctatctgctgagaagtattactactttattcgcctgatgggacgcaaggcttctcatgtggcattggaatgtgctcttcaatcacatccaaacatggttatcctaggagaggaggtggctgcttccaaacttacaatttttgatattacgaagcagatttgtgatgcagttcaggcaagggctgaaaaagacaagaaccatggggttattcttattcctgagggccttgtggagagtattcctgaactatatgctctgcttcaggaaatccatggcctccatggcaaaggtgtttctgttgagaatatctcttctcagctttcaccttgggcatctgcactctttgagtttttgcccccttttatcaggaagcagctactactacatcctgaatctgatgattcagctcaactttcccagattgagactgaaaagctgctagcccagttagttgagactgagatgaacagacgtttgaaggagggcacttacaaaggaaagaagtttaatgcaatctgtcacttctttggctaccaagctaggggagcactgccttcaaagtttgattgcgattatgcctacgttttggggcatgtgtgctaccacatcatagctgccggattgaacagttacatggctacggtgacaaatcttaagaatccagtgaacaagtggcgatgcggcgcgactcctatttcgtctatgatgactgtgaagcgatggtcgcgtggcccttcagccacccaaattggaaagcccgctgttcacatggctagcgttgacttgaaaggaaaagcatacgatgtgttgagacagaattcttccagctttttgttggaagatgtctacagaaacccaggcccgctccagtttgaaggaccaggtgccgattcaaagcctatttcattgtgcgttgaggatcaagactatatgggcagaataaaaaagttgcaggaatacttggagaaggtgaagaggattgtgaagcctgggtgctcgcaggatgttcttaaagcggcgctgagtgccatgtcttctgtgacggaaacactgaacatcatgacttcatcttctaccggccagactccactgagtcattaggtaccatttcatggtatggatcataatccccacttttttcagtggtggcgattaacgagtttaggaacagcaaccctggtatcatacgggttattcttttgtagccttttggagagttctatcggttttggattcggtagtttatgaaggcttgttgatgagtttgagctcgaatagcttttgaaacagccggatgatgccatctttaataaaccaaattctgtgactgc

SEQ ID NO: 31005 - DNA, 1241 bp, Zea mays
  Clone ID: UC-ZMFLB73114H09_FLI
ttcgaactcgcatcatggcgttccctcagatctcccgcagagccactgcaaaaagcttgcccccgagtatgaaaaacttggcgccagcttcaagaaggctaaatctgtactgatagcaaaggttgactgtgatgagcacaagagtgtatgcagcaagtatggagtttctgggtaccccacaattcaatggtttcccaaaggttccctggagccaaagaagtatgagggtcaacgttctgtggaagcccttgcagaatttgttaacagcgaagcaggtaccaatgtcaagatagctgccattccttcaagcgtcgtggttctgacttcagagacctttgactcaattgtccttgatgaaaccaaagatgtccttgttgagttttatgccccatggtgtggtcactgcaagcatcttgctccgatttatgagaagctggcttcagttttcaagcaggacgacggtgttgtgattgccaatattgatgctgacaagcacactgacttggctgaaaaatatggtgtttctggtttccctacattgaagttcttccctaagggaaacaaagccggtgaagattatgatggtggccgggacttggatgactttgtcaagttcattaatgagaagtgtggcaccagccgggatccaaagggccacctgaatcaagaggctgggcttgtgccaagcttgaatcctcttgtgaaggagtttctcaatgctgctgatgacaagcggaaggaagtcctctctaaaatagaagaggatgttgctaagctcagcggttctgcagccaagcatggaaagatatatgtgacagctgcaaagaagatcatagacaagggctctgactacactaagaaggagactgagaggcttcaccgcatgctggagaagtcaatcagtccttccaaagctgatgaattcatcgttaagaagaacattctttcgatattctcttcgtgaaggtgatgatccacagccacggcctgccagtgacttgaactgatagcgaaccaccactttacggaaaacagaacaaatcggatgatgtgagagaaaggtggtagtgaagtccagtagtggcagagctacttcgtgcacgtagatctcttttgcattttctggttccagggattgacttcgtactcacagtttacttcacacagaaggtttatgtagccatcctgtgataacatctactttctttttgatccaataaattggttattcagcttccgtg

SEQ ID NO: 31006 - DNA, 638 bp, Zea mays
  Clone ID: UC-ZMFLB73115G02_FLI
ctttgaggggaggggagctagctagctactggaggagggcttcctccggcgccggacatgggggaggtgaagcacctgtgcctggccaagttcaaggacggcgtcgtggtggacgacgtgctcaagggcatgaccgacctcgccgccgggatggacacggtcaagtctttcgagtggggccaggacgtgctgaaccaggagatgctgacgcagggcttcacgcacgtcttctcgctcaccttcgcctccgccgccgacctcgccgcctacatggcccacgacagccacaccgccttcgccgccaccttcatggccgccatcgacaaggtgctcgtcgtcgacttccccgtcgtcgtcgccaagcctccgccgccggcatgacccgctggccgctctcgcatccgccggccactgtacgcctccccttctcaggtcgcgcagcagatccacgtgtgcctgcggcggcggtgctggtagtagtactagtactgtctattgcctgttatttatgttctatctatctatctatctatctatctacgtcacgtacgtacctactattattgtttggttatcttcggaataaattttcggtcacttttatggtagcgtatatctagcggctagctgcttgcaat

SEQ ID NO: 31007 - DNA, 1454 bp, Zea mays
  Clone ID: UC-ZMFLB73116B12_FLI
gggcatatcagatatgagataatcaaaggaatttgccatggtttgcattaccttcacacagattgccaaattgttcatttggacctaaagcctgagaatatattgctagatgacaacatggagccaaaaattacagattttggtatgtccaggctctttggtctacaacaatccaaaatcatcaccaaaacttgtggaggaacacttggatacatggcaccagaatacttactaaaagggttgatttcagtgaaggccgacatattcagtttgggcgttataatcatagaggtgatgaccggaggccggaattatcccacttgtgaaaaatcttgcgagcaattcgctgttgatgtggttggacgttggaggaagaggttattggaggaggcaggaaggtacacacccttggaaaaatacgttgagcaagtagagacatgcatcttgataggattgatgtgtgtcgatgatgatcctaacaaaaggcccacgacattggacattatcgaaaggcttaccaaagtagatgtcacgaacacggacagagggccacccaaaactctggaggccgcgacagggcttacaggccaccccaacctcgcaactagatcatttcttgacaggttccgccgaaccatcgtgatagggatgctgaagaaggccctgaaaatccaggacgtatcgcagttggagcagctcctggccaaggaggtgctgctggagctccacaaaatcggcacgaatgcaactggaaacagatcgttcctggagaggctccacgcaagcatcaccatggctacgctggttcaggcgctgcattccttggacttggatccatcggcggcgctgcgtatggaggtgctgttcttggcgctggagaatatgcgtggaaaaaacaactcaaggcgaagaagcgaggacgtccttgagctggaggagcggccagagcagatccggtcggtgctggaggctggcaccagggccaggctcagtgatgaggaacacatgccgtcggtgtctgtgcaggctgaagaccaggcctttcccaaaccgaagttggccaaagtacgcgccaccgccccggtgtgcgtgtcagcagtgtggttggcggccggcataggattcctgtgtggattcaccctaggagagatgaggggattaaggcggacgagggtccacgaacgcacgtgatgccaatgtgcccacatgacatggccagaaaatgtcactgcggtggaccatgcatgcacgaattaaggagcaccagttagaatacgtattctagattcattttacaaattctgtatttaaaaggaacttgtgcattgtgacagaggcggcggactggatcaggttgtattgtttctgctggtgtcctgtcgtatgtataagccacggagtgtatcggatgaaattgaacagagaaatgtgcaatatagaaccgtgttgagggc

SEQ ID NO: 31008 - DNA, 1225 bp, Zea mays
  Clone ID: UC-ZMFLB73116D07_FLI
cccactcccactctccctttccactctcaggctcccactccccccctaccggctaccctacccatcacacacaaacagccactcctcacctcccccgtcctccggttcatgtcctgctgctccccatgtcgcccccactcgacctcgactacataggcctctcgccggcggcggctgccgccgctgcccacgacgacctgaagggtaccgagctccgccttggtctgccggggtccggttcgccggaccgccgtgttgtggctgccaccgcaaccaccctggacctgctcccggctaagggcgccaagcgcgggttttctgacgaggcgccgacgccatcgcccggtgcagcttccgggaagggaaagaaggtagcggaagaggaggacgacaagaaggttgcagcgacgccgcagccggtcgcaaaagctcaggtggtgggatggccaccaatccgaagctaccgcaagaacacgatgtctaccacccagctgaagggcagcaaggaggatgctgaggccaagcaggaccaggggttcctgtacgtcaaggtcagcatggatggcgcgccgtacctcaggaagattgacctcaagacttacaagaactacaaggacctgtcgactgcgcttgagaagatgttcagtggcttcagtactggcaaggatggcttatctgagtaccgcaaggatggtgaatatgttctgacttacgaggacaaggatggagattggatgcttgttggcgatgtaccatgggagatgttcgctgactcttgccgcaggctcaggatcatgaaaggatcagatgcaattggacttgctccaagggcagctgataagtccaagaatcgcaactagaatggttgcttcttacagtccagagcaagagggagatatccagtgactgtagggatctttgtggaagccggaaaacgtctaacagtttcaagaagaattctgccttatggtctgtaccacatgtttttgctgctacgcaagtaaagaactccacgtctgtcaatgttagttttacaacatcgtctacggacaaaaaaaaaaccccccgctatttgattgttgctaagccttcgtacgacgtgtaaatggtttggtacaatgagtgctgcgactacgattgagcacccctctacctagtttgcaaaaaaacagtgtcccatggactgtctgttgtccctctatataaatgtccaatgaagcttgct

SEQ ID NO: 31009 - DNA, 1140 bp, Zea mays
  Clone ID: UC-ZMFLB73116E03_FLI
aagaaatactgaggacattccacaaccaaaccgacaatgttatgtgctcatatctgcctctattcaattcattcaacttcactaaaggttggtgatgtccctccttgtttctaccttccttgctgcacagaataaagctaagagatgcaacattttgcaggaggactaatacaactcaaccatggaaggcctcagccacttcagtatgttgtcaacgcagctttccttgcttctctatacagcgactatcttgaagctgcagacacgcctgggtggtactgcggacctaacttctacaccacagaagtcctccgcaagtttgccaggtcacaggtaaaagcattgttcttaatgctctcaaagtgcccaacgtacggggaagtgaaattgatagttaaattaaatctgttaaatttgcagctcgactacatccttggcaagaacccattgaagatgagctacgttgtgggtttcggaaacaagtacccgaagcgccctcatcacagaggcgcgtcgatacctcacaacggcgtcaagtatgggtgcaaaggaggttacaagtggagggacacaaagaaggcaaaccctaacatccttgtcggagcaatggtggctggccccgacaggcgcgatggctacaaagatgtccgcacgaactacaactacacggagcctactctcgcagcgaatgctggtctggttgcagcgctgatctctatatccgatatcaaaaccggacggttcggcatcgataagaacaccatcttctctgcgattcctccgatgttcccaacacccccgccgccgccatcagcatggaaaccatagaggcaatacctctgaatgtttttccaaagcatcgaacagggaagtggagcaaacgtgtgatcatttggtacagcgaaggccagagacaggaaagctgacagcataagtttatagagcttctatttctgtaccaatatgacagatcagtataagatcctctgtcagacatagatcggaagctgtgtgcatcgcgtggagctaatttttgggggtcttgttgctattggcactccagctcatgtgtgaagttctttttgtagaaatggtacctttacaaattgttttataggagtgacttttcattattatagt

SEQ ID NO: 31010 - DNA, 996 bp, Zea mays
  Clone ID: UC-ZMFLB73116F01_FLI
gggatgcagatctctgtcagtatcccctctgtttggaagaccatcaagctcaatgtgatgaaatcccagagtgttgctgatgtcaaggcgatgatcgaacagatggggggaattcctctggatgaacaaatcctgatgcatggatgccaaaagcttgaggacaacaagttgttgagtcagtgtggcttgagcaatggccacaccctgcatgttttggtccgccccaccgacaggctgcatatctccgtggatgttgatggtgaagaaactctgaatctggatgtcaaaagctggtatactgttgctgatgtcaagttgatgatcgacaccttggagggtttacctgcaagaacacagatactcatgcacactcaacctggtggcgctaacacagtactcaaagacattgaaacactgcagaatcaaggcatcaagaacaacgacattgtcgctctgtatcataaagtcaacttcttcgtcaagacatatgaggggaggaatctagtgttatcaatgaggacttgtgacactgcagaggaaatcatgaaggtgattgaagaaaagcttaaggtcaacacaggtgtttactacctgcactacagggggcgtgttctggctcttggggatactcttcggaagcacaagatcgagaacaattgcacggtcgatgtccgccttcggaattcacatgtaacgaagtgaaacaaaagggggtgccttgggtcttctgggtgctagaccatggggcaaaacttaaaaagttgcttagcctcagagagaactatagcttttgccattttgcggtcgtggttagttagtggatgtttgtggctcttgactgggtaaggtcttttgttacctgtctggtggttgcacctgcgtaacctctcaagcatgcattgcctgtctgatggctgtacttgtgtaacctctcaagaacggtgtctgtctggtgactggtggtaaaaatacagttctgttatatggttctagttc

SEQ ID NO: 31011 - DNA, 1449 bp, Zea mays
  Clone ID: UC-ZMFLB73116G11_FLI
ggttcttaagaaaagaggctggggatttaatgaactgggccgttgtagacttgagaatagaaatctggttagcgccgagattgcttttgcggatgctattaaagcatttgaagaggtgtttgaccacacaaatgttatactgatcaactgtaacttaggtcatggtaggagagctttagcagaggaatgtgtatccaggattgatgaatttcagaaacataatcttcctgaaggcacatatatgcaatcctttaagtcggccaagtcagaatattttcaagcaataaactactattccgcagctaagaggcaactgaagtatgtcaatactgaggccgataaagtactataccatgaggtttacacacagtatgcccatacctacctgaggcttggaatgcttttggcaagggaaagcttcttaactgacagttatgaaggtggacttgtcaatgagtcatctaacagaacagctgtagagattttagcgagtgatgcttttcgggaggctttgtctacgtatgaatcccttggtgaacatcgcaaacaggaagctgcttttggtcattttcagcttgcttgttatcagagggatctgtgcttaaggtttctggatttagttgacaaggaggttaaacagaaaaacgaggataaatatcgtcagaaaagtaagtggtatggttcactagctgagaagaactggcagaaggctttagaattttatgggccgaagacacatcctactatgtttcttaacatccttatggcgcagtctgccctttctattaatatttctaattccttccactcaaccgcgatgcttgacaccgctctgactcacttgttggaaggccggcatgtggttgaagcaaatgaagacaactccaacgatatggatctggacataaaaccgaagttctggtgccagctgcagagcctgctgaagaggatgctggcgggatccctgcctagcagcacgggcagagcagcctctgtcagccaagccagcactagcagcagaacagaaacttctaagctgaaagagatgtatcgtttgtcgctcaaatcttctaccctgggccagctgcatgcgttgtacaagctttgggtatcttaacacctttattttacaaatggttgctgctcatgttttatatcgtcggcatctatctcttgaattacagagtttttatttggtgttcacggcacgttttttttgttttgatttccagccaacttttaaaactaaatattaagtgtaaccatggaatgtcatggacgggacacactagctactacagtctacaactgttttgtagacttatataaacagcaaataatggcatcctatgtgaagacagtgtattatatgtattgtatcatagagagccaatgccaaaatatctgaatgtatgtgccctgcttcaccgggaatggataaatgtttgg

SEQ ID NO: 31012 - DNA, 1558 bp, Zea mays
  Clone ID: UC-ZMFLB73116H01_FLI
gcagctgccacagagacatcagagagcggtcctccttgtgagtctgagctgaagaggaggaggaggaggaggagaagcagcagcgcagccggaggagggagagcgaagatgcgccgcgtcgcgctgttgctcgtcgccgccgtgtgcgcgctggcggcgccggctgccgcggtcgtcactgacggtcttctcccgaacggcaacttcgaggatggcccgcccaagtcggcgctggtgaacggcacggtggtgtcgggcgcccacgccatcccgcggtgggagacgtccggcttcgtggagtacatcgagtcggggcacaagcagggggacatgctgctggtggtgccgcagggcgcgcacgcggtgcggctgggcaacgaggcgtcgatccggcagcgcctggccgtggcgcgcggcgcctactacgccatcacgttcagcgcggcgcggacgtgcgcgcaggcggagcggcagcggctgaacgtgtcggtgagccccgagtggggcgtgctgccgatgcagaccatctacggcagcaacggctgggactcgtacgcctgggcattcaaggcgaagatggacgcggtgacgctggtcatccacaacccgggcgtggaggaggacccggcctgcggcccgctcatcgacggcgtcgccatccgtgcgctgtacccgcccgcgctcgccaggcgggcggggggaaacaacctgctcaagaacggcgggttcgaggagggcccctacttcctgcccggcgcgtcctggggcgtgctcgtcccgcccaacatcgaggacgacctctcgccgctccccgcctggatgatcgtctcgtccaaggccgtcaagtacgtggacgccgcgcacttcgccgtgccccagggcgcgcgcgccgtcgagctggtgggcggccgggagagcgcgctcgtgcaggaggtccgcaccgtgcctgggtggacctaccgcctcgccttcgccgtgggagactcgggcgacggctgcgcgggctccatggccgccgaggcctacgcggcgcgcgccacggtcaaggtgccctaccagtccaggggcaccggaggatacaagcgcgccgtgctggacttcacggccatcgccaaccgcacccgcgtcgtcttccagagcaccttctaccacatgaagcccgacggcacgctctgcggcccgctcgtcgacgacgcctcgctcgtcggcctgcgcaagaagaagcccgcgcgccgcctcatgcagctcctgtaagcgctgcttccacgtgcactacgcccggacggaccgcgcaagcgatggtgtaatacggctggtatgtgttttttggtttggtgtgtgcgtgcgtggtatacgcgtgccgtgcgcgccctgtggctgtggctgcagtggcgtcgcgttgggtgttttcttgttgtgacgaagaaaaaagggtatgggttggggtggtccgctggccggcgcaccggggttttaatcaacttatattaacctgatgaaggtgaaggtgaaggtgacacgggattaatggcaaaaatgctcctagtactatttttgt

SEQ ID NO: 31013 - DNA, 2581 bp, Zea mays
  Clone ID: UC-ZMFLB73116H03_FLI
gtaaataagagcaatcacctgttcatggtaaaaggtatagaggctggacaaagcagtaacatcttgagacaaaaagagatagagaatggttcaaggcagattaaatgggaacaaccaacccttagttttggggacatgggaaggcctttcctaactaggtctcaaagtgcattagagtcacctcaatgtactcgaagagatgacaataaggatccaactacagatagcacaagtgagtcattttcagaagcatgtctgagcatgagcctaggtattgcaaacaatgtaaacaggatggaggctacttcaacagcggaaaggcctgtgctattgtcaacaacagccattgctgaaggaagagaacttgccactacactatctccctttcaacacgcacaaagggcacggcatttcctgaccagacctccaaggattggtgaaggtgctgcttttgatccaacaagagacatgtttccacatcttcgtgttgctagaccacctgctgatggaaggggacgcaatcaattacttcctcgttattggccaagaataacagaccaagagctgcaacagatatctggagattcaaattccacgattgttccattgtttgagaaggtcctgagtgcgagtgatgcaggccgcatagggcgccttgttcttccaaaagcttgtgctgaggcatatttccccccaatttcccaaccggaaggtcgccccttgacaattcaagatgcaagaggaaaagaatggcattttcagtttaggttttggccaaataataacagcagaatgtatgtcttggagggtgttacaccatgcatacagtctttgcaattacaagctggcgatacagtgacctttagtcgtatagatcctggagggaaacttgttatgggctttcggaaggccacaaatactgtcagtctgccagactcacagatctcagctattgcaaatggttcccttctcagtgagacactcttttctactgcaaatgagaacataggtgtcgtaagtggttatcctggatttcttcactcaataaagggagccgcagatctccatccaaactctctatatgatcatcatatgaacttagttgatggggatgtcagttggaataaggcagataaatttggcagcaggccagatgagggatccttgcaatttttacaaaaacgtagtcacaatattggttccaaaagcaggaggttcttaatcgatgctgaagatgccatggaactaaagcttacctgggaagaggctcaagagttgttgcgccctgctcccactgcaaaaccaactgttgtgatgattgaggactatgaatttgaagaatatgatgaaccccctgtctttgcaaagagatcaattttcaccatccgtgcaacaggggaacaagatcagtggattcaatgtgacgactgctcaaaatggcgccggttgcctcttaatgttattgttgcgcccaaatggacatgcaccgacaactcatgggactcaaaatgctgctcctgctctgcgcctgaagagttgaccccaagagagttgcaaagtgttctgcagcagtatgaagaaatgaggaggcgaaagggcagttatggtctgaagctgaacgtcgctgaaatggatgcatccagccttgatgctttcgccaccgccgcagtatttggcgaagtcgggaaccaaggcagcgcctcagtggcgacaaccacaaagcacccccgacatcgccctggctgcacatgcatcgtgtgcatccagccgcccagcggcaagggcccgaagcacagccccgcgtgcacctgcaacgtgtgcatgacggtcaggcgccggttcaagacgctgatgatgaggaagaagcagcggcagtcggagcgcgaggaggcggaggccggcaagaagatcgcatgggtgaacagagacgagcctgaggggagcagcctgtcgagatccccgcagacgcttgacagcacccgagacaacagtgatgtgacggcgaccatgttggacaaggtgtccgacgtgaacaagcaggggcacatcgacgtcgacctcaacctccaccctgctgcccctgccgtccaggctgcgcagcagcagccccggccggtgagcatgatgggtctcttggaagtggcgggccggccgcttgacaactacatgaagcagaatggcctgacgagcctggtgggggagcaaggtggtggcagctccagcacggccacggtccctcctccggctctggtggagagtgaggagcggacgtccaacgagggcctcgtcccatcagcatcggcagagcgggaaccgaacgccatggccgtcgacgaggctggcgagaaccagcaggacaaggctgccgccgacgacgacgacgccgtcgctgccgcggctacttgacgtgattttttttcatggagctgcttctcctggaggctgggagtaacttacgtgtacgtatgaggcttgtgttggttggtgttgtaatctgacgcttaaacattggcttcaataactcatacagagtgagaacctgaaagtatcagtctagagcaagttctttttactggtgctg

SEQ ID NO: 31014 - DNA, 863 bp, Zea mays
  Clone ID: UC-ZMFLB73117A12_FLI
gaggaagcagcgagaggagccgaggaagaatatatccatcctaacatccacccacccacacaccagacacacataccttattctccgccgtttcttggcctccggaaatctcctcccccaagttgcaagcatgggcgggttcagcctcagcggcgctacaggtctcgcggcgtaccgcgaggaagacgacgaggagctgttcgagacgtcgtcttcgatctccggcgactccgacgatgagggccaccagctctccgatggagaggggggcgcctatgatttgtcatctgtgatggcacagctccctgtcaagaaagggctatccagatactacgacggcaagtcccagtccttcgcgtgcatgtctgaagtgcgatgcctggaagatctgcgcaagaaagagacgccctacaagaagatcaagacatcaaggagtagcgtcgcgttagacgaagagcaggactgtcatacgccgggtcgtacgaacagcagcagagcgcccggaagttgttgcgcaaacctggtggctcggaacaacggcaaaaacatgctgtacagacctcccccagtccctgtaaacaaaagtggataccgtcagtaggctctaggacattactggatgatatctatccagggtttcacctcttgttttttttccatttttgagggattttgttgacaggcgtattggcctgtctcagatgtaatgtaagagggtttccttctctgctcttagcagagttatctcctatgatcttgtccatgagacattggttcgtgtaaataatagtgatgttgtaaccacttcaaaagatccaggtaacttgtctattttgtggtcggatcgaagagacaaagtgggt

SEQ ID NO: 31015 - DNA, 1201 bp, Zea mays
  Clone ID: UC-ZMFLB73117B07_FLI
ggcggcgcaacaccagcagctccagcgccaactcttcctaatgcagcaggcgcagtcccatccgcagcagctgtcgcagcaggccatgtcccgcttcccctccaacatcgacgctcacctccgccctctagggccgcttcgcttccaacagccccagccccagccccagccgtcccactcccagggtccatctcagtcgccgtcgcaggccacgcagcaggcgtcaccccagcagcagcagcagcaggcggcggcggcggcggcagcggcgcaggcacaagcacaggcccaggcccaggcggcacgggtacgaagccccgagatggagatggcgctgcaggacgccatgcgggtctgcaatccggacgtcaagacgcccttccagtccatcgaggacgctgtcaacaggttattaccttaccatgttgttgccgactatgaggctgaagaagatgacaggatccttgatagcgacacaacaggccagatcccttctcgcctgcagcaatgggaccataatattctggtgaagattgctgagttcacgacaacttttgacaagcaagtattggcatataacataatgaccaagaaaagggccatcggtgagttcaggtcggaggagcggctcatgctggagcaagccttattgcaggaggaaaagcaagctatgctgggactgagggcagagatggagtcgagagagaaagctggtcgcgaggctgccgaagtgaagatgcgtttggcaatggagcatgctcgtgctgaggcacaagctcactctgagatgatgaatcatggtcctataagggccagtgctgttgcttcgcaaggggaggatggtccgagtcatgacatggtgcaagaacatggcgaagatgggtggggaaattctcagagggatgatgaagatccatcggaggatttcctcaacgatgagaacgaacctgagaatgggaactcagatgggcaggaggactggcgcagatctggggagtttgatctcaactctaggtaaggcagttggatttccacatgaaggtttctaggtaggctacgacatgctggtattgtatctactattctattgttgtgttcggtgaagatgtctttgtggctgtaaacatggcattcgaacaattcagtttctttgtaatttgactagtaatatttacttgagcactcaatatgtgccatttcc

SEQ ID NO: 31016 - DNA, 2383 bp, Zea mays
  Clone ID: UC-ZMFLB73117B08_FLI
gaacccaaagagacaaggcaaggaagcagagagaaactccaagattgggggcgactggtaagcaaggggaggagtagaggcggcgtttgttctccttcgattccctagtcttcctggagggcgacgaagggagatttcgccgggcgcggacggacgccgcgatggccggtgtcgacgccgccaggtacgcgcacagcccagcacaccacgctgtggcggcccgggaccacgccgcgctgcgccgcgtgctggacgcgctcccgcgggcgcgccggcccgaggagatccggacggaagcggactccgtcgccgaggaggcccgcgccgaggccgtctcggcggtcatcgaccgccgcgacgtgcccgggcgggagacgccgctccacctcgccgtgcgcctctgtgaccccacggcggccgagatgctcatggcggccggcgccgactggagcctgcagaacgagcagggttggagcgccctccaggaggccatctgcacgcgcgaggaggccctggcgcgcgtcatcgtgcgccactaccagcccctcgcctgggccaagtggtgccgccgactgccccgcgtcgtcgccgccatgcgccggatgcgggacttctacatggagatcaccttccattttgagagctccgtcatcccattcatttcccgcatcgcgccctccgacacctacagggtctggaagcgtggctccaacctccgcgccgacatgaccctcgctggtttcgatggcttcaagatccaacgctccgaccagaccatactcttcctcggggaagggtcggaggatggcaaggtgccgccgggttcactgtgcatgatcaaccacaaggacaaggagattatgaacgcgctggagggggcaggcaccccagcctcagatgcagaagtccagcaggaggtcgctgcaatgtcacagaccaacatcttccgtccggggattgacgtcacccaagcgctgttgctcccacagctcacttggcggcggcaggaacggacagaggcggttggcccgtggaaggccaaggtgtatgaaatgaatcatgtggtggtcagtgtcaagtcaaggagggtcccgggggcgatgacggatgaagaattcttttcatcttgcaatgacaatgatatagagagtgaggggtttgatgatgttctgacagaggaggagaagaagcagttggaggctgcgctaaaaatggattctccggatgccggtggggaagaccaatctgactcatttgctggccctcgacatagttgctttgagccaagggagagggaggtacccattgaggacatgagtgtttctggaaatggggagggtaagcatgacaagaaaggttggttcagtaattggggaaagagaagtcaggttagcaagtcagagggggtgaagaagatggcatctccaaggaactcgctctgtgtagatgacaaggtgagtgacctcgtcattgaatcgccctcaaatgtacaaacaagaccgggaaggcattcggtagatgtagtcagaccagatgacaacagaaggatcagggaaagggatagtaggagacatgttgcttctgcagagaatgggcataggcgcaaagaaggttccaaagaaagtgagtacaaaaaaggcctaaggcctgttctctggctctctccaaatttccctcttcggactgaggagctgctgccattgcttgatattcttgcaaacaaagtgaaggcaattcgtcgtttgagggatctacttacaacaaaactccctccaggcacatttcctgtcaaggtcgctattccagtcgtgcctacaatcagagtgcttgtgacattcacaaaatttgaagagctacagccgctagatgagttcaccacaccaccctcaagtcctgacaacagcaagagcccagcagtgcagccttcttcaagttcctggattcagtggatcaaggcgccctacctccagaacttgtcgacggcacctggcccaagcagccgcgtggaggacatccaggacccattcgccattccttccaattacgtgtggacaacacctgaagagaagaaaaagaagacacaagaaaacaagaacaagtcgaagaaaggcaggagcggcgcatagatagtacgtaggtgatagcattggtgggggggggggggagttaaagttatgctgtgagtgggtgaaaagggctatactcttcaggatctaacaggagggatgattggaagatttggagatttcggctgctctgacgtcgaatattgagaagcgaccgcttgtcttctttcattgtgataacagatctgctgtcaacattctttcgtttaacccatcgtttgggtcctgattatcattgcaatctactgtattggtag

SEQ ID NO: 31017 - DNA, 1449 bp, Zea mays
  Clone ID: UC-ZMFLB73117C08_FLI
aacatcccagagttcaaaaccacaatctggctcaccattcccggtcatgactcctggagttggagcatcctcgtctggacctgggacgctatcttttggacttggagcttcctcaactggttcaggcactgcatcttttggtgtcggagcttcatcttccgcacctggaactttatcaacttttggtgcagcagctcactcttctggacctggagttttctcttttggggcaggaacttcctcatcaggacctagcactgcctcttttggtgcagcaacttccacatcagggactggatttggcaattcaccatttggaactggagctacttttgcgaatccatttagctctagttcaagcactgggttcacattttcttcacctagctcttctgctggtgcatcaacagcggccagtacgagtgtatttgccagcacctctacagcttcttcagcctcagcttttagcaacccttttggctcaagttcatccccacccagcacatttacatttgggcaatcaggttcttcaggcaacacttttgcatttggagcgcagccagctccaacgttcccatctcaaccatcacttttctcatttagttcagccaacactagcatgaattcgtctccacagcctgcatttggaatgataaataccaacacagccttcagcatggcttcccccggaaatgatcagatgaacgaagacagcatggcagatgacactagtcaggcagcacctgcgccagcgccagtatttggttcatcatttggacagcagaacaactcatctgctgccccggtatttggtgctcccgcggtccagccaggtggtgtttttcagttcgggggccaacaaggttcagcacagcagaacccgtccttcccagctgttggcagtctagagtttcagggtgggaacttttcgttgggcagcgggggtggtggcggtgacaagtcgaaccgaagagtgatcaaggtcaaaaggacaccaaagaagagataagggtgcgccctctgttggaatcttcctttgatggtgtcatttgtgattggatcgcactgcttgggaacgaagtcaagtacgacgaggttttatggccacgcagatttccctgcagcagggcgatagcgctatatatctcatggctggcttgtaaacgcatccaccaaggtcagtgtagtctcctgtgcactcaattcatttcctcatcggggccggcggcctgcatgttgtgtaatatgcctgtgctcatggggtgtaaaatagaacaaaaaagtgttgtaatttttgttttcttgcctccaaatgccgacttgatttcttatctgtggtttggctacggtatatttgtatcggagtgtaacgcactgttgtatttttgtttttgggtttattacattcaacaaggtcagaactgtatcgtagaatacctgtccatactt

SEQ ID NO: 31018 - DNA, 2285 bp, Zea mays
  Clone ID: UC-ZMFLB73117D06_FLI
agaaacataaaaatgaaagtgatggtcttgacgattattggaaagattttgcattggctgttgaaagcacaaagcttgacgaagttgatgaggcggcaattgaaaaggaagataatggaaagatggaggacatcgattgcaatcatgacatccggattcatgaagatttgggtcatgtatgccgtgtgtgtggtatgattgtgagaagagctgattcaataattgattatcagtggaaaaaggcttcaaggagaagaacgaatggctatggaggacattcaaaagatgctgatgagatagattgtggtactgttaaactgtctgaagatttcatagtcgcagatattgctattcatcctagacatgctcggataatgaaaccacatcagttggaaggtttcaactttttggttaagaatttgattggagacaagcctggaggttgcattctagctcatgccccaggtacagggaaaacatttatgcttataagcttcattcagagcttcatggcaaggtatccatctgcaaggcctcttgttgtgctgcccaaagggattctaggtatatggaagacagaaattaaacgatggcaagtgcaggatataccagtgtacgatttttactctgtcaaggctgaaaaaagagtagaacagttgcaaatcctcaaatcttgggaagacaagatgagtatactatttcttggatacaagcagttctccacaatcgtcactgatgatgggggcagcaatgtcacagctgcatgtcgagacaggctgcttaaggttcccaaccttctgatacttgacgaaggacatacacctagaaatcgggagactaatgtactcgaatcactaaatagagtggaaacaccacgcaaagtggttctttcgggtacacttttccagaatcatgttgaagaagtgtttaatatcttgaatctcgttcgcccaaagtttctcaggatggaatcatcccgtcctactgccagacgtataatgagtcaagttgaaatagttggtagaagttcgaaagggcttgctgatggcgcattcactaaggcagttgaagaaaccttattgaatgatgagaacttcaagagaaaagctcatgttattagaggtcttagagaactaacaaaggatgttcttcactattataagggtgatatcttagatgaactacctggcttagtagacttcagtgtgtttttgaagctcacacccaaacagaaagacattatttataagttggaagcacatgatcggttcaaaagaaatgcagtagggagtgcactgtacattcatccatgtctttcagaactttcagaggttaatgctgagcatagggctaacacctttagagatgatttagttgatagtctggtagattctatcactgtgagagatggcgtgaaggccaattttttcatgaatatcctgtcacttgctaattctgcaggagagaaagtgctagctttcagtcaatatatatctcccatgattttctttgaaaggctgctggtgaagaagaaaggctggcatgtggggaaagagatctttatgatctctggtgatactagccaagaagacagagaattggcaacggaccattttaacaactctgctgacgcaaaaattatgtttggttctatcaaggcatgtggggagggtatctccctcgttggtgcgtcgagagttgtcattctggacgtacacctgaacccatctgtcacccgtcaagcgattgggcgtgcattcaggcccggacagcagaagaaggtgtttgtgtacaggcttgtagctgccgattctgacgaggtaaaggtccatgagacagcattcaagaaagaagtcataccgaagctgtggttcgaatggagcgagcactgtactacggaagacttcaaacttggtcaaattgatattgatgactctggtgacgaactgttggatactaaagcaatccgcaaggatatcaaagcgctgtatagaaggtaggtaacaagctttgtggccactggacaccatgtacatattgcagtgctgaccgtcgagctgatccttaaactgaagaaagaggtgacgggtgttgcggtggctacattgcgcggtcattcccagctatatccgtggaatggcggcttcttttgttcgtagtatgtgccaacttggggcagcagtcagctgatccccagacacatttctagactcttttttaggctcaagtttctgagaattaacctgctatggcgtttagccttaagtaaatatttcgttcgcaac

SEQ ID NO: 31019 - DNA, 559 bp, Zea mays
  Clone ID: UC-ZMFLB73117D07_FLI
cccgccgccgtcgtccaagccggccaagtccggaggcgggaagcagaagaagaagaagtggagcaagggtaagcaaaaggagaaggtcaacaacgctgtgctcttcgaccaggccacctatgacaagttgctctccgaggtgcccaagtacaagcagatcaccccatccgtcctctccgagcgtctcaggattaatggatcattggcacggagggcaatcaaggatctgatggcaaggggattcataaggatgatctctgttcattccagccagcagatatacaccagggcaaccaacacatgagggctgttttgcatcttgtcggcgggtctctagacggcttaatgttgctattatatcatgtttatttcaatcatggctcagtcagccttactgttgtgtcggatgttggaatatttttagattactgtactgtttaagctcatgttgctatccaaatatccatcttgaggaataccaatctgtctctgctctaatattacaacaattgttaaagttgcgcgtgttgtcatgaattcagtcctattgacatgcgct

SEQ ID NO: 31020 - DNA, 771 bp, Zea mays
  Clone ID: UC-ZMFLB73117E08_FLI
ggagttaccattgcccgcgctattgagcttgctgatcccatggagaatgctggtgcttccttgattcgtgaagttgctagcaagacgaatgactcggctggtgatggaaccacaactgcctctgttctcgctagggagatcatcaaattgggcatgttgagcattacttcaggggcaaatccagtgtccgttaagaagggcattgataagactgttcagaaattggtggaggaacttgagaagaaatcaaggccggtcaagggtagtggggatattaaagctgttgctgccatatcagctggaaatgatgaatttgttgggactatgatcgccgaagctattgacaaggttggccctgatggtgtcctctcaattgagtcgtcatcgtcgtttgagaccacagttgaagttgaagaagggatggagcttgacagaggatatatctcccctcagtttgtcactaaccttgaaaaatctattgttgagttcgaaaatgctcggattcttgtcactgatcagaagatatcatcgataaaagaaattattcctctgttggagcagacaacacagttaagagcaccacttcttataattgcagaggatgtaagtggcgaggcgctggcaacattagtcataaattgagtcaggaattgcatggattttgggccaggacgatttgcaaattggttggattagagtgtggatggctgattggacattgtatcctatctgcattctgttcactcagttggctaattcacatttctctcc

SEQ ID NO: 31021 - DNA, 905 bp, Zea mays
  Clone ID: UC-ZMFLB73117F05_FLI
gcaattgaccggttagccatcgtcacgaatgccaccactgcaacccgtgctttccccttgcgccggatgacgtcccatgcaaaaagaatggcgctgcaggttatcgaacacctttgctgtgttggtgggactgatccagtaggggctctgcacaagggcctcaagatattggaggaccgggcgcatcggaacccgagcaactgcatccttcacttgtctgatcatccagtccgcaactgtgttggtggtgtggacatgaaccactccagcatcccagtccaccagttccatgtcgggctcgggttcggtgtgcggagtggatttatcatgcatgagtttgaggagctcctcgcgcggttgcttggcggcgtgataggcgacacccagctgaggataggggagcatggcggaatggtcaggcttggagagctgaggggtggtgaggagcggaggataccgctcgaccttgcggcagattgtggcttcatactcgttggttacagttacctggagggtggaagagaggagcagctgaggacaggtgagatcgccgtcgggttcgaagagaaaggtgacaacgggtactgtggaatgagagagatggggctgagcattggcggcgagaggaggagctgctgcgccgagaggcgggactaccatgacccgttcatggcacggcgatgggcgaagcatttcaacgtgtacagggcctgagtagaagagcttgatcgtcagctgctgcgaaatatgagtcttgttggtttcttttctctcttttttttccccattcctgcaagcatctaggtttggtgtctgctttttggcttcttttgttgtggatctgaatccctgtaagatctctctctctttctctttttgcatgaaatgtgtgggttctgtctgac

SEQ ID NO: 31022 - DNA, 1144 bp, Zea mays
  Clone ID: UC-ZMFLB73117F06_FLI
gatcgatcccaacggcaacaggtaggggacggagtcggagaccgtaccgacgacgtcggctttcccgttccttgccattggctgcagaggcgacacccaagtccgtgctgagggcgatggccgtgccggggctcacgctgtaccacctcaagaggcacctgcaggtccgtccggccaccgccgaattatttctctcttggttggttgatgacgatcgcgcgctcaactctgccttgcctcctccttcctgatccatcgaccgtgtgcatgcggtgcacgcgcaccacactgccgctgcagaagtaccggctggtggcggtgagccgaggcgtcgcttccccgctgggcgacagcggagatggcaccgacgagcgttcgtcctcgtcctcggagaaccagccggcggacgagtgcgacgacggtaccgtcgccgagccgcatggcgattcttccaggagcgtggcgcggatgcagaggaagctgcaggagcagatcgaggtaaacgaaacgatagagtccggtcggtcgatcaccattgtcccgaccttgtggttgtggcagtgaaatccattaggtttcaggctttcagccgattgtgtgccgccggttcgtgcttggctgctgatcaagccgagctcggccattcatgaccacacacatccatacatggtggcaggtgcagcggcacctacagctgaggatcgaggcgcaggggaggtacctgcagtccgtgctgcgccgggcgcaggaggtcctcgccgaccacggcctgggctcggcagccggcgcggaggcggagctggcctccgcggtggacaccgggtccctgtcctcctcctgctgctgctccccgacgcgccgccgctccgccgacagctgcgtgacgtcctcctcttcggaggccgagagccaggcccccgtcggcggcgccacgtggctccacacgtgcgccggtacgcgcgactgctccgttgagcaacagccggtgcagggggagaagagtacattcctgcagaggcacggggtggccttcaaggttgggacttggggaggggggccaggcttttgagcaatgtctgctgctgaaacagctacctgctctgctcttcgttccagaatatgatgtgcatgtttattttcgttt

SEQ ID NO: 31023 - DNA, 1104 bp, Zea mays
  Clone ID: UC-ZMFLB73117G10_FLI
ccagcttccgcctttccatgacccgccgctcctgctgtgattttaggacgacgtgccgcccgggccggctgccttctcacgccgggagggttggggaacgagcgccgcagccgccgccgccaccacgaactcgcggaagaccatgccgagatccaggggcaacgagccgccgctgcggacgtcgcagcgcgcgccgctgcacctcaagacgacggcctgctccgaggcgaatggcgcgcaccaccgccccgtcgccgaccggagtagccccagggtctcgccgcgcagccctctgcccgagaagaagcgtgcggcgggaacacgtgttgcggagctggagggcaagctggggaaggtgcaggaggagctcaagaagctgcgggagcagctcgcgtccgccgaggccgccaagaaggacgcgcaggtcgcgctcgaggaggccaagaagcgcgtcggtaccaagggaagcccagcctccaccaccaccaccactcctctctcccccccttcgcctggggtcgaaatcgccaagaagaccgaggagctgaagctgcctcagccggcagccgaggaggagagcagcataaacgtcccggcgaccgatgtgtttgaggtcgtccgggccgagtcgggggacaaggagaaccagagcgcggctgaggtctgcgaggtcgttagctgcggcggcggtaaggcggcggtggacgtggccgagaatgaggagacggaggaagaggagactaagaaaatgatcggggaggacaacagcgcggcggtggaatctgacggcgccgacaaggagagcccggaggtcgtggagctgaaggcgaagctggcggagaaggacacggagatcgctgccctcacggcggaaaacgctgagctgaagaagcaggcagaggaggccgcggaggcggcgaagaaggccgaagaggggcccgcgtcgagggcggccaaggccgagcacgaactgaaggagggcgcagcgcgggaggcccgggtgggcgagcagctgcgggcgtcggaggccgcgcgggaggcgctggacggcgagctgcggcgcctgcgcgtgcagaccgagcagtggcgcaaggcggcagaggc

SEQ ID NO: 31024 - DNA, 493 bp, Zea mays
  Clone ID: UC-ZMFLB73118A04_FLI
cggatatgttcttgttaagcaagaggacatagtcgatggtattgcatgcttcatggctgcatacttgctgtcgctgaaacaaactaaggacctgacacccaaccaacttcaacaagctcttagcaagacattttcagctaaaaagaggaaaagcaaactgcagaaggcatgggatggaacgaaagttgtttataatatagcatcatggagcgcgacggctattggtatctaccagaatcctgcgattgtgcaagttcgttgattgatttaacagcgacatcagttactggtgatgagcaatatggggctgttcgacagtatctcacccatataatctaaaggtatgaatggacacaccaccatctatttgccaataccagctgtatccgacaatcaagaaccgatgtacataagccctcccgcgcaacattggtatatcagtgtgattgtaaatatttcgattcatttgaataaattcgctcgcatgtgtttc

SEQ ID NO: 31025 - DNA, 1111 bp, Zea mays
  Clone ID: UC-ZMFLB73118C07_FLI
gccgggcacaccccccgagctcagcttagctccactccagctccaatcacagtcgtgaccagagcgcgagagctagctagagggccgtgaaaatgccgatcaataggatcgccctggggagccaccaggaggtgtaccacccgggcgccctcaaggcggcgttcgctgagttcatctccaccctcatcttcgtcttcgccggccagggctccggcatggccttcagcaagctgaccggcggcggcccgacgaccccggcgggcctgatcgcggcggcggtggcgcacgcgttcgcgctgttcgtggcggtgtcggtgggcgcgaacatctccggcgggcacgtgaacccggccgtgaccttcggcgccttcgtgggcggcaacatcaccctgttccgagggctcctgtactgggtggcgcagctgctggggtccaccgtggcgtgcttcctgctccgcttctcgacgggcgggcaggccacgggcaccttcgggctgacgggcgtgtcggtgtgggaggcgctggtgctggagatcgtgatgaccttcgggctggtgtacacggtgtacgcgacggcggtggacccgaagaagggcagcctgggcaccatcgcccccattgccatcggcttcatcgtgggggccaacatcctggtgggcggcgccttcgacggcgcgtccatgaaccccgccgtgtccttcggccccgccctcgtcagctgggagtggggctaccagtgggtgtactgggtcggccccctcatcggcggcggcctcgccggcgtcatctacgagctgctcttcatctcccacacccacgagcagctcccctccaccgactactaaaagccgaagccgaccgacccaggggtgcgcagcgcagcgcagctagcatccagcgctctctccccgctcgccgccgtttagtttctctcgtgcacgtgcatgcatcgtagactgtctcaggccgccgctgcgccggcgccgctcgcatcgtttgcttccttggaccagcagtcgtcgccgtcaggctgaactgcttgtaaccgtgaattccggacccgtttgcttctgtaagatttgtgcatttgcctgagtacacctcgatctgc

SEQ ID NO: 31026 - DNA, 587 bp, Zea mays
  Clone ID: UC-ZMFLB73118C12_FLI
gggctcgcagccgcagctagttacagttcagagagaagaaagagaccgagatctcgccgatagctagcatcatggcgtccaaggcgctcctcgtgctaacgctcctgctcgccgccaccttcctcgccgcctccgctaacgagcaagccaaggcggccaaagaggagaagaaggtggaggtccaagactggcacggcggcggcggctacccgggtcacggcggcggcggcggcggcggctacccgcactgccggtggggctgctgcaaccgcgggtaccatggcggctgccggtgctgctcgcaccctgatcagataccagagcccatgtaccgtcctgagctcgtcgaggtccacaactaaatagtatacgggtacgtatgccccgatgggaatgaatgggaagcaagagcacacgcgtagtacgctcgtcgtagtagtcaataaaagtttggttccatcaccgtcatgaaataaaagtaaggaggttgcacgctttgtgtgcgtgcttggaaacgtcgactgtatctcatgcatcgaataaatagatgttaatgaatatcattgggacaactttttacggaacat

SEQ ID NO: 31027 - DNA, 2128 bp, Zea mays
  Clone ID: UC-ZMFLB73118D09_FLI
cgccttccacacttgaagcagccaagctaagtgaggtgagcttagccatgccgacggcttcctctgcccaccgctcactcctcctctgcctctgcctggctctgctctccaacccggtcgccgcctcgccctcgccccgcggcctccgcttctccgccaaggacatcgcggcggtggaggccgcgctgccgcgacacggcagcagggcgtcgtcgtcgtccaagaccaccttcttcgaggtcgaccgcccgctccgcccgcccaggggcagctcggggccctgctccacgctgctgctctcgcactccttcgcgttcacgctcaccaagccgcccgtcaccgcggcctactcgccgccgccgtgcctgtccggctccgacgcgccgccggtctcgctcgccgtgctcgagtggcgcgccgagtgccgcggcgcagtacgaccgcaccttcggcgtgtggctcggcggcgccgagctcctgcgcggcagcaccgcggagccgcgccccggcggggtggtctggtcggtctccaaggacgtcacccgctacgcggccctcctcgcggccggcaacgccacgctcgctgtctacctcggcaacctcatcgacgacacctacgacggcgtctaccacgccaacctcacgctccacctctacttccgccgcggcgtgcggccgtccgccgccgccgccgccgccgatgccgtcgtcccggtctccaggagcctgccgctcaacgacgggctgtggttcgtcgtccagaacgacaccgacgtgcagtccgcgcgcgtgtcggtgccgcgcaacgcgtaccgcgccgtcctcgaggtctacgtctcgtcccacgacgccgacgagttctggtacatgaacacgcccgagcagaacgggccgttccgcgaggtcaccgtcctgctcgacggcgccgtggtgggcgccgtgtggccgttcccggtgatctacaccggcggcatcaacccgctcatctggcgccccatcaccagcatcggctccttcaacatgcccacctacgacatcgagctcacgcccttcctcggcagcctcctggacggcgaggagcacgagctcgggttcgcggtgaccaacgcgcagcggtcgtggtacgtggacgccaatctccacctgtggctggaccccaagagctccaggaccagcggcgggctcgtcgcgtaccacgcgccgaagctggcgggcagcatcgtgtcgcgctccgcggacggcgtcgacggggagtacgcggcgacggcgagccgcaatatcacggccacggggtgggtgagctcgtcgcgcggcaacgtcaccaccacgttcgcgcagcggctcagcttctccaacaccaacgtggtgagcgggcagggcagcgcgcaggcgatcaaccagacgaccgacgcgctgacggccgtcagcggcgggcccgcgcccgcgcaggtgcaccagagcttcccgctctacatcttcctgggcggcgacggcagcggcacgtcgtcgcagcggctgatgcggcgcgtggagatcgggttcgacgagacgcggtcccggggaggaggaggagcaggaggagagggcgccgcgtccacgaccacgagcacgctgcggaactcgcaggtggcggcggcggaggtgacgctccgggacgacgccgtggtgggcgcgtcgtggcggatgcaccagacgtacgagtacggcgccagcgacggcggctgctacctgaggaacgtcagcagcgtcggttacgacgtgcttttcgaccatcgcgacgcgtcctgcgccggtacgctgggccgctgacgcttgtcgccgacagcgagcgccttgtcggcgcctccgccgcgcgggccgctggataacggccggggaagcgacagggtgtaatttgtaaatggaacgctgcaccggtggacaaaactgtactggcttggctcggcctggcccacgtccggtcttcaattattaaatataccacggtgacgggccattttcgtgggccaattagcttttcattaagaaaagatgtgacgtgacgtgacgtgatgcagctagtacacaggcagcactaaaatgtaaagaaaaccgctggctatgtttatttaacagtacctgttttatg

SEQ ID NO: 31028 - DNA, 1479 bp, Zea mays
  Clone ID: UC-ZMFLB73118G09_FLI
gttggaacagctctgtccactatgtattcgaagtgtggaaaccttgaagatagcatggttgtcttcagaaggatgcctgatagggatgttatttcatggaactcaattatttctgttttttcacaacatgggcgtggaagtgatgcacttgacatgtttgaggagatgaagctagagggaacggcaccagatcatataacattcattaatttgctatctgcttgtagccacatgggcttagttgacagaggctggttttattttagggcaatgaccaaagactataatttaattcctacacttgatcactatgcttgcatggttgatattcttagccgtgcaggccagttaaaagaagcaaaggacttcatagattcgataactattgaccatggtacatgcctatggcgtatagtcctaggggcatgtcgcagtttacgtgattttgatgttggagcatatgcaggtgagcagctgatggagttaggtactgaggactcatctgcttatatactgttatcaaacatctatgctgcccagcggaagtggaatgatgttgagcgggtgagacatttgatgagactccgaggtgttagcaaagatctggggtgtagctgggttgagctctacaaccgagttcatgtgtttgttgttggggaacaacaacatcctgaagcggaaaatataaatgtagagttgataaggctagcgaagcatatgaaggacgaagagtgtttcctgtttgatgacgaaaaggatgaactaggagattctcatgaaggtgaacaaatggaattgatatcaacaacatattactgagttcgcaagagattgatcccatgatgtcagacaaacaccctgttaaagcaatgtgtgacatccgtgatttggggttattttatgttgtattttcttttcctgacaaatccaaccctcctgtttttgacaagtgtgattggcactgtgtttcacatattgaagcagcttgggatcttgcatattctattgcatctgtgtgttcggcgatggttctgatcccaagtcacagatccattggtaagccatctacagaaaatgtgctaaccgtgctggcaagaggaaggagttctacacaaaattagaggagaaacataaagctttggaagcaaagaaggacaaggctgatgccaggaaaaaggagttgcattcatgaaacatttgatccatctacatgcatatcaaccgccagatgagacgcaacatgttctaaagattgaggctcattctggtggcctaaatgatatagcagtctctcgaccaaataagcaaccttttgatgtcacctgggagatgataaactgattaagaaattatttacactcgaaggacacaaggtgactgtgtattctatatcccagtgtaatctttattctaaacaagatcgatgttattacaatgaatcagaattgctgaatcaagagtttgtataacctaaaaaac

SEQ ID NO: 31029 - DNA, 1100 bp, Zea mays
  Clone ID: UC-ZMFLB73119A06_FLI
ggtccgcttgccgaccggagcgtgtgaaccgcacggagtcgcccgcgtgagatgacggccacctccgcgttcgagtcgtccccggagatggagcggttcctctgcgagcggctgctgaacacggagcagcccatcgcggagcgcttccgggcgctcttctccctccgcaacctccgcggggatgcgccgcgccgcgccctcctccaagctgcaagggatccttctaacttgcttgcccatgaggctgcatttgcacttggacaaatgcaggatgctgaggctattcctgcactggtggcagttctcaaagatctttcgctacatccaattgtccgccatgaggcagcggaagctcttggagctattggcctggaaaagagcatccctgtgttggaggaaagtctaacaactgatcctgctgtggaggtccaagaaacttgcgagctggcactaggacgaatagaggagaataagaaagttaatggggctgagagtacaaccacttcaccctttctctcagttgatccagcgctgccttcaaagcatgggctttcagtagatcaattaaggggccttcttctcaatgagcaagagagcatgtaccaacgttatgcagctctttttgcgcttaggaatgatggtggagatgctgctgtttctgctattgttgcagctctgagcgtcaaaagtgctcttctacgtcatgaggttgcttatgtgttaggtcagctgcaaaacaaagccgcttcagatgcgctttctacagtcctgaaggatgtctgtgagcatccaatggtcaggcatgaagctgctgaagcccttggctcaatcgcagaccaagaaagcattgcccttttggaggagtttgcaaaggatcctgagcccatagtctcgcagagctgtgaagtagctctcagtatgctcgagtatgagagatcggggaaatcctttgagtttctcttccttcagactcctcatgtgcagtcctaggttcctcttcgtcgatgatcactcaatgcgaagtgactgaaagcttcttgtattggttaatgtgactggaccagccatatatccactggctttgatgatactctttatcc

SEQ ID NO: 31030 - DNA, 2719 bp, Zea mays
  Clone ID: UC-ZMFLB73119B03_FLI
tgcagtttgccatcaactcatgtatactctggcagattgactgacaagataccactgggaaagattgaacgttctgttcaggctgtagaagcagctttaaaaaagctggaaaatggaggtagtgtcaatgatgctaaagcagtatgtgaacctgaagttttaaggcagcttgcaaggtggcatagtaaactcagagtgtatatatcaccttttattcatggcacaaggtacagttcctttggtagacattttacaaaggtggagaaacttgttgagattgttgatagacttcactggtatgtggaaactggtgacatgatagtagatttctgctgtggggcaaatgattttagccgtcttatgaaagaaaaactcgacaaagttcagaagaagtgccatttcaagaattatgatcttatccaaccacagaatcgcttctgctttgaaaagagggattggatgactgtgcagccaaacgagctgcctcatggatcccaactaattatgggtcttaatcctccttttggagtcaaagcaagtcttgcgaacaaatttattgacaaagcattgacattcaagcctaagctcattgtactaattgtccctaaagaaactaaaaggttagatcagaggagaacaccttatgatttgatttgggaggacagtgagtgtctttctggcaagtccttctatttgcctggttctgtggatcttaatgataaaatagttgaagggtggaatgcatctgcgccacccctctatttgtggagtcatcctggttggacaaagaagcacatgcaagtggctgaagagcatggtcatacttgtatggggaagatagcttgccatgttgaagagagtaatctatcagatgacctgtccgtgaggaaacaatctgatgctacaaacaaactgaactcgagatcagggaaagagactccattcaatgacagaatgtccaatctacttgatgatggttctgctaggaagcaagcaagatctgaagaagagaagagaactctagggaagatagaacaccatgtgaaaaaggctaatataccagataacctcccagtgaagaaagaacctgaagcttccagcaaagtcatgtcgcattctggaaaagatagaaagattggcagatacaacaggaggagacatgacaacaggagcagcaaggggacacctgatcacacagagagcctcccccctgaaaagcaagtggaagttgcatatgaggaaacaagagttattcctagcaaaaagattgctcataatgaaaaaaagagcgcgcagtacaactacgagcaaactgcagcagggatgccaaacatgaggtctagaggaggggattctgacatgagtatctcacccccagtcagttgcaatgctcgaagcaaacccatgagctattccctgacgagaccaattgaacacttggatacgaatgctcaccttttggcagaagaacctagtgactctgtgctcaatagggttccaaatcatgacagttatttggcaatcaaagaggaatactgtgatggatttaagaggaaaaatgatcctatcttcagtcacattgatgatagctcaaggatgaggggctccagcatcgaagaagtgaccaagccgtatattactgctccaaacagtgatccgtggtctaaaggagatggcagcttttacaggcatccgagctcagaagatttaaacgctaatgctgatgtgcttatgccaggatacagtgcaagatatggacaaattggtggtgacagtaacccacaagctagtatggtcccactagcaacagattcaagactgcatggtggaacggttgctgataattacctctcggcaagatactcccttggatcttcaggtgctcgcgttagccaaccagctccaactgttcccccttttgggctctcaggtgcaagttcacaacgaggctcagtaatggacaggtattcgtatgggctttcgggtccgactggaacacagcgctcagttattgacaggtatgcgccgtccctcgatggaacgaacacaacaagatcgaggagctccttgcctgagcagtacccgttcggacaacctggctcttccggtggcgggtggcctcatcactgatcgctggaacttggtcctcagatttgaccagcaaaagtgcaaccgatttcttgagtccggtggagcctacaacctatctacggcctaactttttggatcctactagtcgtttcttcctggcgccttcgacgaagacatcacctgtgtctaccaatacagaagtgtagacttcaattcctacaaatacagaagtgtaggcttcaatcctattgtttgctctggatttctgtttatgagcgtatttacaagagtatgtttggtctatgttagtatattaggaatacaattccaaaaccgttgtaccgtgccaaagtttaatactatacgtttgggtctgtcgatgagaaaaaaggacgagtgggtgagaagatgctgccctccgcagaactcgatcaggccggttcctctgcgcgtcctgctatgagaggctaacctgagcccgacagaaccggcttggtcgatttgggacctggtaggccggtatttttttattgaagtgtaactttctaaattaggtcttgttggtttgcgttggattgcgtccggaatcgtttcaagtttatataaattagagaagcaatccggttag

SEQ ID NO: 31031 - DNA, 1890 bp, Zea mays
  Clone ID: UC-ZMFLB73119B07_FLI
aatcaatgtctgtggtgaaggtggagaatatgaaacactaactcttgactgccctctatttcgtaatgcaagaattattcttgatgactctgaagtgatactccactctgctgattccattgcttctgttggaattcttcatccacgggcgtttcatcttgagcagaagccagattcatctgatagaattggggatggttctgccgttcaagagagttctagttgtgtatatgaggttgatgaagttaccactcacgatgatgtgggagaaaaacaggccctgagtccagctgttgatgcttacaccaatgttgacctatgtatctcaaagacagggaacaatttgcgttcaatgagctgttggattcaggatccatccagagcttcggaaggcctgaaggcagaccttatagcagttttgagcagaattgaaaatcagctcaaggaagaagggttaggttgggtgaatgttttgtacgttcacctctacatttcaagcatgaaggaatttggattggccaatgaagtttacgtcagccttattacggaaaagaaatgctacctgggtgttccttcgcgcagtacaattgaattgccactagttcaggctgggttgggcaaagcatatgtggaagtcctagtttcaaatgaggtggtaaagagagttctacatgtgcaaagcatctcctgctgggctcctagctgcattggaccttatagccaggcaactctttatgaagatattctttatatggctggtcagctgggccttgaccctcctacgatgaagctctgtcttggaggtccaagagcggaactagaattagcactacaaaacagtgaagctgtggccaatgcctttagctgctcaatctatatctcggcaatacactttctggtgtactgctctgctcagttgacgtccagcgagaaggaagaaattgaacagacattgaagagttcttatattactcgtttggatcgctcaaaaggtggatcatatccaactgttctgtacgtattcgcgtcagaccttccgaaaggggcacgtgtggaggtaaagcctatactgtatgtcccttccactgatgattgggttgctgccgaagagacggagaccggagttccactgccagcaccgagcaaaacctggactgattgtaccgcaccatactctgcgttgcgcgattcgtgttgccaggtccacacaaccggcgggagaatttgttccgccgtggtgtcgatcacagatgacatcgcatcgaagatctgctctgcagctggacagctgcaccacggagaggagaatctgaaaataatggctagattctgtgctttccagatcgcgaagaccctggcagacaacagattttcctgggacagcgtaacgatgttgaggctctactactcggtagatctcgccgtggcggcagatgcagtgtccggagcattttccgaggccttggccgagcttgcccaagacaacccttccatgagaactgacgttcctttctacaacgttgtgcccgtagccggagctggccgctctgcgtgtgccaacgacataatggcgtgcgagttactggcatccaacgtctccagtgcgaagtccataccagccgaaccgttcgctgtgacgcctgcttgaatgcagctttccttcggaaattggaggtgggcgcacgttggaatttctgccagaggagccggtggccagtcaactgccagttggacgacgacggttgaccagcttctctagggctggcggcggtagcttcgtttctgtgctggcggtcgattaaaaaaaaagaccgtacggtgatcatcacagatgcacccatactgtattattctgtttcagcgtcctatacaaagtatacattgggtctg

SEQ ID NO: 31032 - DNA, 3143 bp, Zea mays
  Clone ID: UC-ZMFLB73119C08_FLI
cggattcattgtcagtcaccgagaaattgaagctaacctagaaaaaatcgaggccatcatgagaatggaagcgccacgatcacagaaaaaggtacataggcttactggatgcatggcagccctgagcaggttgatatcaaggctaggggagaaatgcatgccattctataaattgctcaaaaaggtggacaagtttcagtggaccacagaggcacatgaagctctagaggcactgaaaaagttcctgactacaccagtactcaagccaccacgccgaatcagccagcagaagatctgttgttatacatctcctgcacaactcacgtggtgagcaccgcgttagtagtcgagcgggtggaggaaggacatacatacccggtgcagcatctggtctacttcatcagcgaagttctcgggcccttaaaaaatgaagtatccccaagtccagaaactgctatacgtggtacttctaaccgctcgcaagctccgtcactactttgacgaccacaaagtcatagtaggatttccaataggggacattcttcacaacaaagaagctatcggaaggatagccaagtgggcgtgcgagctgggagctcacgacatagagttccggccccgcacggctatcaagactcaggcactggttgacttcgtatctgagtgtactgaacaccaggtcctagacaacctggagactaccgaagtatggagaatgtactttgatgactcgctgaagttgcaaggagcaggtgcaaggattctctttattgctcctggaggtgaacaactcaagtatgcactccaactattgtttccggcatcaaataatgcagcagaatatgaagcactgatccacggattaaacatcgccgtatcactcagcatcaagaagctgatggtatatggagattcgctagtggtcataagccagattaacaaagattgtgattgctcgactgattccatgagtaagtaccgtgcagccgtccgaaaatcggagtacaagttcgaaggattggagttccatcacgtggaaagagaccgcaacgcaacagcagacgcgttgtcaaagctatgatccagtcgggcccaggctccacccgggatcttcgtacaaaaaatatcacaaccaagtatcctctcattgagccaacctgagtcggaccccaatgactggagagagcctatcatcaggtacatagaaaatgaagaagaaccggatgacaaggcggcagcggaacgcatcgcaaggcaatcagcccactacaccctcatagggggcatactgtacagaagaggtgcgacaggagtcctcatgaagtgcattcactcggctattgggaagcaactgttagacgaaatccatgtcgggcagtgcgaagcacatgcagcgtccagaactctggtcgggaaggctttcagatttggtttctattggccaacaacgaagagtgatgctgctgagttagtccatagatgtgaagcttgacaattcttatcaaagaaacaacatttatccgcacagcagctacagaccattcctgtaacatggccatttgcatactgaggctggacatgatatgacctttcaagaaagctcagtgaggctatactcacgtactggttgccattgacaaattcacgtactggttgccattgacaagttcatgtactgcttgtcttatagacttttgtaagagcatttcttgtaagaaaaaaaatcatgtagctcgttgttttatcgttatttatgtctcaatagctccttctgatatcttgtaaatatctgatgagtgcattgttttccgttaagttccaatggtaaaaggtcatccaatatttaacttataactatcttttgaagttactccattctaaattataagcggttttagctcaagagacatagtatatctaggtgtatagaaaaaactatgtacctagaaaaccaagaggacttataattcagagtacaatttacaatagcatacatggcaagcttatatgaaaagcaaaattaaaatcaacattcttcttaatacataaacaatcgcatctagcagcttaaagtttagctgttaggtcttgcaattcaaccaacgatatccatttcttatcactcggtttagttatcctcactgtatttaaagtcttatggcactttcagtgttctttattaaatcatctggtttactgactctgagttatcctgaagtttggacaaaaatctcaccctacacttggtgtttctgatttgtccctttgcacacttagctcaagattgatcggaagattctctgtattccgagtactgtgtctaacagtagtacttgtttgctcattatttactccttgtccatacacctgaaaatgaaaaagaaacgatgttttgtgattcacatacactagacatgtggaataaaacaaaacaaaattaaagatgagttctactaattgcatcctatttcgtctaactatttctagatgcatgtacctttctccgtaattcagtgttatgttgatgaagaaggttaactttgttgtatagttccatgctttcctggtgcatgaggcttccctataattcaaacaagaagtttttgtagtgaagcgagaccgtaaaatatgttattaattgtgaataagtcgtgtagacaaaccttcctgtttaattcttgaatctgataaaaaataagttggtcctgcaaattggcagttattaaacaaagtagcaactggtatctatatatgttgttaaatatgtgatggagtctgaagaatctgcaatgaaacctttttcagacgaatatttcttaggctcgtctccagcttattctctaaattctgcaaatctcccacgttcaggccagaaagctgctgacccaacaactgcctgcagtggaaaattgcatagaacattagcttatgcatttctgagaatgcaaatgttattgtacaatgtacaaaccaatttcacatgtaagagagaacattaaaataaagtaccattttttgtagccatcaagtgtacagttgaattaatcaacgaataacataacttcctttgtgtgtggagtaaggacacactcttaatcaaatagaataataatgaagcagatcgttgcttattgctgtttctg

SEQ ID NO: 31033 - DNA, 3584 bp, Zea mays
  Clone ID: UC-ZMFLB73119C10_FLI
atgatgactgttcccatggatagtgctagcgcagccccatcctctgcgcgggaccttgccatggatagtgctagcactagcatgaagcactttcagttttataataattgaaaaaaacctggcgcctgggctcatatttatgcaatagggaaatcacatggttgcttatatttcctgttttctgtgatgagactgttgatgtgaagatatatcaattcaagcacacatagctttaaccttcataatttcttcaccagttataacagttttcatttttgagataccacatgtcttttaaacagcataacttccttttacccaattattggtttacacaactaatttttacatttgcttctattactaaacttaaatttcacactcagccttgtgttaactaccttgaggtattatggtttatttctcgcattaggtattcttctgagtactggcataaggtcatttttttcattaggaacttcctgagaggcttcttcttacatacaaacctgaagaattggaggacattcctgagcctgcttctgttgaagaggaaaatgcaccagttgaagagcctgttctggtaccacctgttactgaagttgtttcacctcccaagaccgaggtggccgatactggtgacttactgggcttaaatgatccaaatcctgctgtatcagctatagaggaaagcaatgctcttgccttggctattgttccaacagatggggcttccacaactggtaacactgcatttcaagataaggggtttgatcctacaggatgggaactcgcccttgttactgcacctagcaacacgacttcatctgcgtctgtcggtcaattggtgattgatttctcgatttgggccgattggagcaatcgttggctattctatcggcatgaataattgatgagacaaactcaatgtcaaacatatttctttgagttttcttcattgatagagtcaaaggcataaagataggacgacaactgacagcacacccctgactaagcagtggagaggtaaagcatcacagtagtctggaggaaaccgacaacacaccggtgaccaagcagtggagaggaggagcatcacagtagtctcaaatcttttacttccatcgcaacgcacgtgcacatatctatactatatattgttaacaagggccaagcattgcttatggattgtggggaatggaaccactctgttcaacagcaattctgtttggcaaaatattgtcaaggacacaagggatagaggttgttttttaaatgccactgatgagaaggagttgttgaatgcaattttcaagcttgctgttgagtatcctcacgcggacaatttagctggcgaggagacaaggcagcgattgagtaccaggatgagtctattcaatgtcgctgaggcaacaattacaagatcctagaagaaaacccgtggcagctctacactacaataagggtgataaatatgtctcgcccaatggaaggcgcgaggatgctgcagcattcgaacagtgccaacgagctgctcttgcgccggaagctggaggagcagcagcaggctgccgaacttcagcacgccattgagctccagagccgccgcctcatggatctccagctgctcggcctcaaggctcgcgcagctgcgacagcagcagcggcatcggcactgccaacaccagttgccaatgcctttgcgtccaaccatcctttgagcaccatggcagtcgagtcgccactagagtccggagagcagctcaagctgagcagtgggtttgctctggaggggaagctcaacggtggcgacaaggaagaatctgcttgcgaggcgagccctgacgccgctgatagcgaccaaagatcaagattcagtgcgtttgttggctgttgaaggttgtgctgctcttggtaaattgttggagccacaagattatgtagctcacattcttccggtcattgtcaatttctaccagtatctgaccgagaacaattatttcgtgatgattggggtaattgggctgcccggtgtaggcaagtcaaccatcatgaacgagctttgttaatatgatgcaagctacctgtggtaacaaaagagatgccaagtgcgctgaggatgcagaggccagaacatacatacagttcccattttctgaacacagaaaccaatggcaccgtcgaattcagaaagagcagaaagcaagttctttttttaactttctttctgatttggctgggaatggaagtgagtactaagaacagagcaagtgatatttatgtttctagataaacaggcgtgaggcgtggagtaaaaacagaggagccgcggtatattgaattcggaattagcccaatccgtgctgctgccgtctgtctttccctatcctcttcccaagaaagcctcgccgcaatagtttggcatccatgggattcttccattgcatctccaccgtcaactccacgcatccctcaacgagcactgaagcccggcgagccccggatcgccgatgaccacttccggcgcgcccaagcgcccaagcttcaagcgctcctcgcccgggaagaagtcgcggctcagaaaccgtcgcgtcgccgccggtggccgagagggcgaggccgaggcggcggggacctcggcgctggcgagggcattgcttcccgcatcggtggcgctagacgcggtgccgcctgttgggcgcgcattgccgcgacacttcttcgaggtggatgccctcgacctggccccccgcctcctcggcaagctccttcggcgcgatgaggttgtcctccgcatcaccgaggtggaggcttataggccaaatgactccgcatgccatggccggttcggcatcacagcgaggacagctccagtgtttggaccgggaggccatgcatatgtgtatctgtgctatggacttcacatgatgctcaatgttgttgccgatatagagggcgttggtgctgccgttttgatccggtcatgttctccagttagcggtcttgaaactattcagcggcgccggggtcaacaaaccgagaaaccgatcctacttacgggaccaggaaaggttggacaagctctgggcctatccactgactggtcgaaccatcccctctacgcgcctggtgggttggaggtactggacgggccagagccggagagcgttttggttggtccccgcgttggcatcgagtacgcgtctcccgagcatgtcgcggcgccgtggaggttcgcgattgccggcacgccgtggatcagcgcccccaaaaacacgctacggccacgctactgaccggtgtctgagcaggaaccgttcgagtcccgttccaacccgaattgccatgtgtttgtatttgcttgacacttcggaatgctgcctataactggctcctgtaaatgtatcacagtgtgttcgacaaaaaggcctacgaactctacgagggcgggtgcccgggtcgaacattctcaaatgttaaaagcgtggagtgtgtttgaagggctgagaaagatgggctagagagaagtaaataagagtcaattaactattttttcctgaaatagccgttgtcctagaaaactc

SEQ ID NO: 31034 - DNA, 1297 bp, Zea mays
  Clone ID: UC-ZMFLB73119E02_FLI
gccaggcagtggttctgagtctgaagatgacacctttggtaggtcatatagttattcttcatatgatgatctgagtccccggctatattcaaactctgaggcatgggatcaagatgatggaactggactggaggaacatgagttatatgatgattcaaatcagataggatcctcaacagcacctttatctagctacatgggattcgagcagatgaacttatctgacatgaagtcagatatttcacttgcaaacattggggatcagaatgtaataggcactttacaatcctgtactgttgaagaacttccaaactttgatacattgatgtccagaagtgatgatcaaaatggtgaaacccccattccacataatctggggaatatgacaccagatgaagatcagttgccaccaccacctcctctccccccaatgcagtggaggatgacaagacaaacaacttcactagaagaggaaacttgcattacaactaaagatatgcttagaaaaacttctagcctaccacatatacacacctctgcccaggaagaacactgtcctccaactgcaccattggatctacaagggcatgctggggaagtgggtgtccagaaaactggtggggtacgagaaattactaatcctcctagtatcatcgatataaaatcaagtttgcttcagcagatcagggataagtcagagcagctgaagcttaatggacatgaaaggtcaaaaaaagcagtaggcggtgacattaaaagcttagacgaaagggaggagttgcttcagcaaatcaggagcaagaccttcaatttaagacgcacaaacgcatctaaggcagatggctcatcacaatctacagccagttccaacgttgcagcaattttggagaaagccaacgctatccggcaggctgtggccagtgatgagggtggcgatgatgatacatggagtgatatatgaccacctaattgcagacgttcatggtagtcttttcctgtatattaagctattacaagatgaagtgattaaatgtgaataccatccttttcttcattgtaattagattttgcaggtcttgttttgtaccttccttagttcatattagtgaatcctaccgtaggtcgctgtggtcgtggaaatgtcagagcatttccacattatgtaaatgcatctttattatttatttatgatagtgagaacagctgaatagctgataaaaataagcatactaatctatctttttatcattgtattgatttttttttgcaatgataataagatggagcatgatgttgc

SEQ ID NO: 31035 - DNA, 881 bp, Zea mays
  Clone ID: UC-ZMFLB73119E06_FLI
ggagagactatgccactagaagatgatatgctgctcccagataacgaggaacctactgcattgctgaaagatgtagggcagccacaagcaaatgtggttcctattccaatccccggtgatggcgttgggcactgtttcgaagaaaaacatgagggtgcctgctctgagagcaaacgggaggacacacatgctggagccatcagaacggctgatctgttggcctcagaagtcgctgggagctgggcagtggaaacagctccgtctgtcaatggggagaacgaatctccaaggagcttgggcgatgctacagagcacgatgaagctggaggcagcgtggcaggcgatgctttggtaactctggtgaactcagagggccaggcggctgggagccagaacaatgttgagcgtggcagctccaaaataacccatcatcatcatcatcatcgtcatcaccatcgtgttcttagtgccatgattggaattgttgatcctgagttcaggaagcaaatgtccggcagaagcggagttggaaacgaggaacccatgtctgacgccgagacgggtgagggcatcgaggaaggcgattcagattcaggttcagacggcagtgacagcgaggaggctatggttgaggattctgtcgtttagcttaaacagaagtgactgctcactgtaaatatacctcaattcgttttgtgtacctttcgttgtatcatcatgcgtagcgtaagcccctcgtgtgcgtttgattattttattcgttaagtgtcctcagcagctcgtggtgcatgttgtacgaaatcgaggccttttggtcttcaacacaaataaatatatgtactcacttggtttacaattataaaccgttttggtttttttat

SEQ ID NO: 31036 - DNA, 1595 bp, Zea mays
  Clone ID: UC-ZMFLB73119G05_FLI
gctcgataagatctccgagaaccgcgccgactacaacatcgagcacacgcccgcgccggcctgggccgcttgctcctcctccgccaccaccctcgctgcctgggacgatctagaggagtacacggtcggcctggacaagtacagcgacatgcttaaggagcagctcctcgacgactccgtccccgcgcgcgcgctcgtggccatcgccggcgagagcagcattggcaagacgacgctcgcgcggaaggtgtaccagagcctcgaggtccgcaaccacttcgagatccgcacgtggacggtgctcccgcacaagtgccgcgccgccgacgttctccgcgacatccacgagcagatgacctcccagctgcggcggaccccgtccgcgtccaactccaagcaggccgtggaagacgcctgcgatgacaaagccttcgggccgggaaaggacatcagcaaccagctgtacaggagcatgacggggaggcggtacctcgtggtcatcgacggcagcgttgccgtcacggactggaacagcctacgagcttccctccccgacgagggcaacggcagcagggtgcttctgatcacggacttggaaggcctggaggtggtcggccacgctcaggctggccacacgtacgacccgatcgagctgacccggctgagcccggagagcacgtacgaggtgttccgacgccgggtgttcggcgcccgcggcgactgccccggccggtacaagtcgaggtactaccaagacgtgttccggatcacgcgtggcctgccgctgtcgatcgtcgtcctcgccggtatcctgcggtccaaggagctgcccgcagagtgggacgaggtgatggcgcagctggccccgccggcgcgcgagcagcaaaggggcggcagcggcggcagcagcaacagctggccccggatcatgtcgcgggccttcgacgacctgccgcaccacctcaagtcgtgcttcctatacctggcggcgatgcgggagagcaccccggtggacgcgcagcgcctggtgcgcctgtgggtggccgaggggttcgtgcgcccgcgccgcgggagcaccatggaggaggtcgggcaggggtacctcaaggagctcatctcccggtgcatggtgcagctggtggacaaggacgacttcggcgccgtgctgacggtggtggtgcacgaccggctgcacgcattcgcgcaggacgaggcacaggaggccagcttcatcgagagccacgacagcacagacgtgctcgcgccggccaccgtgcggcgcctcgccgtcctcaactccaccacggacaggtacgtccagctcagcaacgcgctccccaagctgcgctccatcatctgcgacctggtggagggtcgccgagtcaggtccagcaacttcatccgcaccagcgacctgagcttcctccatgcttccaagttcctccgtgtcatcgacatccagggactcgagctcaagaggctcccaaacgagatcggctccatgatccatttgaggtacctgggtctccgctgcggccacctagagaagctcccaagcaccattggcaaccttgtcaacctgcagtcgctcatcc

SEQ ID NO: 31037 - DNA, 874 bp, Zea mays
  Clone ID: UC-ZMFLB73119H04_FLI
ggctccgtctcgcggaggggccccaccgaattggcctccacgctccacgccgccgcggtgctgctccgggagttcgacggctggagctggttcatcaatcttagcgcctccgattacccgctcatgccccaagatgacatccttcatatcttctcatacatgccaagagacctcaatttcattgagcacacaagcaatattggttggaaagagtatcaaagagcccgaccaatcattgtagacccagcattgcaggtcccaaataaaactgaggttgtaacaacaaaggagaaaaggagtatgccctcagctttcaaaatatttgtaggttcgtcttgggtgatgcttagtagatcattcctggagttttgcttactgggatgggataaccttcctcgcacactactcatgtatttcaccaacttcctctcgtcctcagaaggctacttccacacagtgatctgcaactcagagtactaccagaacaccactgtgaacagtgatctgcgcttcatggcatgggataacccacctcggacgcaccctgctaacctcacaacagagcattttgatgcaatggcagacagcggggcgccgtttgcacactcatttgccaatgataactcagtcctggatatgatcgacgccaagttgttggggcgagcacctgaccgcttcacgccgggtggatggtgcctgggtagctcagtaggcgggaaagatccgtgtaccttcttgggaaggtcctttattctcaggccgaccaaaggctcggccaagctagagaagttgctgttgaaacttttggaacctgataacttcaggcctaaacagtgtaaataacactcattttacatggtagccagttcttttt

SEQ ID NO: 31038 - DNA, 959 bp, Zea mays
  Clone ID: UC-ZMFLB73119H05_FLI
atttcagcaaccgagcattggccaagcataaatcaaaatatttcgggatttagctcaggcaacatagtttttggtggcagcgggaattctgtagggcaaacgaaaagcaaccaaatgagctggtcaaacacgtctaatctaatgggcacaaactcaactggcagctatttgaatcagggcagtgcagctctaggtttcggaaatccaaatggaggattgagcacaggtctctccaatccaagtagttccagtacaggcctgagcatgatgctaccaaaatctgattctggatcattgtcgacgtcggtcaacaatgccgcacatgggctactaagacttgcccctcctccatccacatcggttggaagagggcgcggtagaaatcaaggacagtccgcactctcccgagcatcaaggcctcatgccaactcggcatcaggacaacaacctatcctggatttactctagtaagagatggtcgcctctgttcttcgcgttcggattgtcaatgtgtacatcctcaaacctttgtaaggtgagcatcatactgttcttttggacatgcatgtggcgaaagcagttctttttgttcattttgaagctgggtggccttggtttatagtctgaagggattctacttcggggatcttgcagaggtttaccttttctcatgctcccgtgcttagggttttgaattgggcatcgaggccatcttcatactggtgacagaagaaatgttttgtgtatatttctgtccaaactcggctgtagctttcagagtttgtgaatagttgacatgtttatatgggctgtgaagttttgaaatgtttaatgggccttacaggtgtgtaccttttctcatgtactccgcgcaaaattgtacaacaatgtttaatgggccttataggtggacctttctcatgtactccacgctccaccaacaatgtttggccttatat

SEQ ID NO: 31039 - DNA, 1224 bp, Zea mays
  Clone ID: UC-ZMFLB73119H08_FLI
ccgctgtgttggctctcggcttcgttctctacaacgagcctgaacagacacccagaatcgtgtccctactgtcggaatcatacaatccacatgtccgttacggtgcagctctagctgtcgggatctcctgcgccggaacaggattaagtgaagccatctccttactggagcctctgacatcagacgtcgtcgactttgtacggcagggcgcgctcatcgccatggcaatggtgatgatccagaccaacgagtcctacgatccacgcgttggagcattcaggcgccagttggaaaagataatcctcgacaagcacgaggatgccatgagcaagatgggcgccatactggcttcaggcatcctcgacgccggtggcaggaatgtcaccatcaagctcaagtcgaggtcaaagcacgacaggctcaccgctgttgtcgggctagccgtcttcacccagttctggtactggtacccgctcacctacttcataagcctggccttctccccgacggccctcatcggcctcaactccgacctgaaagtgcccaagtttgagttcctgtcgaacgcgaagccgtcgctgttcgattaccccaagccagtgacccagcagaccacagccacgtcagtcaaggtgccggcggccatcctgtcgacctatgccaagtccaaatccagggcaaggaaggacgcagagagcaaggccaaggcgaaagcagaggactcttccagtgcttctacttcgatgcaggtggacggcgcttctgctgctggtgctgctgcagagaaggccccggagccagagcctacgttccagatcctgacgaacccggcccgggtcgttccagcccaggagaagttcataaagttcctggaagacagcaggtacaagccggtgaaggctgccccctcggggttcgtcctcctgcaggacctcgagcccacggaggccgaggagctcgccctaaccgacgcgccgtcaaccgctgccacgacaagcaccccggcatccagcgccggcgagccggttggcatggctgtcgacgacgagccccagccgcccccggccttcgagtacacgtcataaataagggtggtgatcgtcggatcaggatgtgtgggttgggttgtgttgtctgtaggaacttcgtactggtgttggatggcggaacccgggcgtaccactaagctcatttatttaacttgaaaatatattttttttcctg

SEQ ID NO: 31040 - DNA, 1766 bp, Zea mays
  Clone ID: UC-ZMFLB73120B04_FLI
ttgagatgtgcttagtggggttgaatagtcagagcatggcagggatagattacatgtctgccaagttcggtaatgaggaggaccctgtagctattagtgttgtgtcagctggtgtatatgataacactggagatgatccagatgttctagtttatactggacatggcatgtcgggtaaggatgaccaaaaacttgagaggggtaatcttgcactagagaggagtttgcatagaggtaatccaatcagagtcattcgtagcgtaaaagacttgacttgtccaactggcaagatttacatatatgatggtctttacaagatcaaagaagcctgggtagagaaagggaaatctggtttcaatgtgtttaaacacaagttgcttagggaacctggccaacctgatggcattgcagtgtggaagaagactgaaaaatggagggaaaatccatcatctagagaccatgttatattacttgacatatcatatggtgtggaaaataaccctgtctgccttgtaaatgaggttgacgatgaaaagggccctagccgcttcacttatacaactaatttgacatatgggaattctctcagctcgatgagaaagatgcaaggttgcaaatgcataagtgtatgcctccctggtgataacaactgctcctgtacgcatcgaaatgctggtgaccttccttacagtgcttcaggcatacttgttagccgaatgcccgttttatacgagtgtggtgattcctgcacatgttcacaaaattgccggaaccgagttgtacagaaaggtacgcagatccgttttgaagtttttaagacaggagatcgtggttggggcctccgtagttgggatccaattcgagcaggcacatttatctgtgaatatgcaggtgaaatcattgacataaatagagtgaatggtgaagatgactacatatttgagacttctcctttagagcagaatttaagatggaactatgcaccggaattgctgggtgagcctagtctttctgactcaaatgaaacaccaaagcagctgcctatagtcatcagtgcaaaacgaaccggcaacatagctcgctttatgaaccacagctgctcacctaatgtgttttggcaaccagttctgtatgatcatggtgatgagggatatccacatattgcattctttgcaattaagcatattcctccaatgacagagcttacctatgattatggtcagaaccagcgtaatagtattcaaatgggaacccattctggttttcggaagtctaaaagttgcttatgttggtccccgaagtgtagaggttcctttggctaataaccagccctataaggaatatattggatcataatactccatttcaaagttacacctaagatatctgctggtcgacttttatattcagctcccaaaaatctgtcacaagtttgtgagagcaactgaattgtctttaccagcagaagcagcccgtcatggtggcctgtatgaagcagcaggggtctcctatgtcctaggtgttccatgcaccatcgaataaatccacccctcttcatgttagaatgggaaacggggatgtgttttgcacaaattatctgtcatgcagtcgtcgtattaagttttcttgaactagtttgtagtcatcctcagagaatgcatgatgtgcactttgtagtaatatatgcaggttgttatcccacctactatataaccatcaaaatttcagtgtttgtacaggacgccctatgtagtggcgctgcttgc

SEQ ID NO: 31041 - DNA, 2377 bp, Zea mays
  Clone ID: UC-ZMFLB73120C10_FLI
ggccatcctgcctcggcagccgtgcgcaccccacccacaccacacactctccgtctccgactacgaccatggtccatccatggcgatcaactcaaggctgacaaatccattcatccattattatattattatatactgatgatgactcgtgcaactgcaggcggtgtccgacgaggcgcgcgccatgtacaacggcgggcgggcgggcctcaccttctggtccccgaacgtgaacatcttccgggacccgcggtggggccgcggccaggagacgcccggcgaggaccccgccgtctcggcgcgctacgccgccgcctacgtgcgcggcctccagcagccctacgccgccccgaacggcggccaccgcaaccgcctcaagctcgccgcctgctgcaagcacttcacggcgtacgacctggacaagtggggcggcacggaccggttccacttcaacgccgtggtggcggcgcaggacctggaggacaccttcaacgtccccttccgcgcctgcgtcgaggacggccgcgccgccagcgtcatgtgctcctacaaccaggtcaacggcgtgcccacgtgcgccgacgcggcgttcctgcgcggcaccatccgcgggcgctggggcctggacggctacatcgtctccgactgcgactccgtcgacgtcttcttccgcgaccagcactacacgcgcacccccgaggacgccgccgccgccacgctccgcgccggcctcgacctcgactgcgggccgttcctcgcgctctacgccggctccgccgtcgccgcgggcaaggtcgccgacgccgacgtcgacgccgcgctcctcaacaccgtcaccgtgcagatgcggctcggcatgttcgacggggaccccgcggccgggccgttcgggcgcctgggccccgcggacgtgtgcaccagggagcaccaggacctggcgctcgacgcggcgcgccagggcgtcgtgctcctcaagaaccggcgcggcgccaggcacaacagggacgtgctcccgctccgccccgccgcgcaccgcgtcgtcgccgtcgtcggcccgcacgccgacgccaccgtcgccatgatcgggaactacgcgggcaagccctgccgctacaccacgccgctgcagggcgtcgccgcgtacgccgcgcgggttgcgcaccaggccggctgcaccgacgtcgcgtgccgcgggaaccagcccatcgccgcggccgtcgaggcggcgcgccaagccgacgccaccgtcgtcgtcgcgggcctcgaccagagggtggaggccgagggcctggaccggaccacccttctcctccctgggcgacaggccgagctcatctccgccgtggccaaggcgtccaaggggccagtcatcctcgtgctcatgtctggcggtcccatcgacatcgcgttcgcgcagaacgaccccaggatcgatgggatcctgtgggtcggctaccccggccaggccggaggacaggcgattgccgacgtcatcttcggacaccataatccaggtgcgaagctgccggtgacatggtaccatcaagactacctgcagaaggtgccgatgacaaacatggcgatgcgcgcgaacccggcgcgcgggtaccccggccggacgtaccggttctacacgggcccgacgatctacccgttcgggcacgggctcagctacacccagttcacgcacacgctcgcgcacgcgccgacgcagctcaccgtgcgcctctccggcagcggccactccgccgcgtccgccgcctccctcctcaacgcgacgcttgcgcgccccgtccgcgccgtgcgggtggcgcacgcgcggtgcgagggcctcacggtcccggtgcacgtggacgtgagcaatgtcggcgaccgcgacggcgcgcacgccgtgctcgtgtaccacgcggcgccctcgccctcgcacgctgcccccggcgcggacgcgcccgcgcggcagctggtggcgttcgagaaggtgcacgtgcccgcgggcggcgtggcgcgcgtggagatgcgcatcggcgtgtgcgaccggctcagcgtcgcggaccggaacggcgtgcggcgggtccccgtcggcgagcacaggctgatgatcggcgagctcacgcactcggtctcgctcggcgtcgagcagctcggggtataaccggatgcttgaacggaaggtggaggatccagagtaataattgtgatgtgatgtgttgtttcgggtggggggtattattggcttctgattgccggggtgcttgctgctgtctctgcaaaggtggagatgggagatgtagaaggcaccggattactgaaaattgctggattgaaaacgaaaacgattgaaatggaaggaagacagaagaatgttgtttccctcctc

SEQ ID NO: 31042 - DNA, 1443 bp, Zea mays
  Clone ID: UC-ZMFLB73120D01_FLI
caagatttcctgcaaccaagctatgatgtggttgtttttctgactgtgattctgttcgtcctccttatttcaccaatcgcaatccctgtgattgtgtcgttcatgccggaaaaagctcaacatctcatggaagatgctctcctatctgaaccattgacaggagaggcaagcagttcacgacaaaaggaggatcaaccagaggtcattttaagtgaggtagaagaggagaagtctaaggaaactgattcattgccgccatctgaaaggagaaagaggattgcggaattgcaggccaagctagtggaagcagcggcaagaggtggggttagaatcaaaagaaggccacaccgaggggataacttcaccctgatgcaggcattggtgaaggctgatttttggcttatttggctatcacttttgcttgggtcgggatcagggctgacagtgattgataacctgggtcagatgagccaggctattggttataaaaatgcacatatctttgtgtcactggtgagcatatggaactttcttggtcgtgttggaggtggctacttctctgagatcattgtcagggaacgtacatacccaaggcacatagcattggcagttgctcagatcgtgatggctgctgggcatttcctctttgctatggcttggcctggaactatgtacattgcgagcttgctggttggacttggatatggagctcactgggctattgtgccagctgctgtctccgagctttttggtgtaaaacactttggtgcgatgtacaattttctcatactagcgaaccccgcaggatccctcatcttctcagagctaattgtcagcaacctctatgaacatgaagctgagaaacaagctagccaacaccagatgtcagcattgctgtctccacgattgcttcgtgatactggctttcttgcagatgatgcactcaagtgtgaagggcctgcttgtttctttttcagctctctgattatgtcggtgttctgtgctgttgccgctgggttgagcctcctcgtcgttcaaaggaccagacaagtttatcctcgcctctacagttctgtccggacttgagattctccaattctgcatggatgggaagctcaaatcctcgtattctatgtccgtttattcttgcatacatatgcacaaagataagtatgtgaataaattctcaaatcttttcctaagctggtattgtaaaaacagatattcttgaatggattgtcccttgtgacttgcgtatggattctggcacttgctgtcctgaaaagaaactatccctctccttttttttgaagcaattactgtatggagttcctacaatatttttctattaaatatgggtatgtacaagtgtaagtattcaaattacaaggaaatcaactataaacatgatttaattttggctgctatttggggttttactct

SEQ ID NO: 31043 - DNA, 1316 bp, Zea mays
  Clone ID: UC-ZMFLB73120D05_FLI
caaggtaccatacatctgcggcttccaatcaaggtgggacaggattggtaggtagctgttcgccgcatgataacagctcggaggctgtgaaaacggattctacttacaacatgaagtcaaattcagatgctgccgcaataaaacaaggctccaacggcagtagcaataacaatgacatgggttccactacaaaggatgttgtgacaaaacccagcacaaataacgagagggtgatgttgccctctgctattaaggctaatggatacacgtcaacattccatcctgtgcagcagtggatggttccagataatgcgacagcagggaaagcgaaggctgatgaagtggccaacaatgcaggcagaaatagtcatcctggtgacgtgcagagcaacctgacgcaacaacatcgtccaacccttcattacgtccattttgagaatagtggatcaggtgccctgcaatgtggttcctccaatgtatttgatcccccacttgaaggccaggctaccaataactatggtgtgaaagccgggagcaactcaggcagcaacaaggggcagaataatgggagtacagctggtgcgagcacggctgctgcaaatgctggacggacagatacagagatacgggctatcgataaaagtggacctggaggtggcagtgggagtggcaatgacacatatgtcagacggcttgctgcgagcatgacaccacgacaagaacagctaaagaaatatagagagaaaaagaaagatcggaactttgggaaaaaggtagcctgttttcaattgcatattaatatttattctttatttgttttcaattgcatatgtttaagaagagagagcattggatagaaggactggtttctttctgatggctgtctgccatttccaggtgcggtaccagagcagaaagaggctagccgaccagcggccaagggttcgtggacagttcgtgaagcaagctgtgcaaaatcaagagggagatggagagagatgacccccccccccctctggcttcagctcatggttgttagacgtggcggttgatgattcttccttctctggtgtgatctgatatgatcgacaacacaccatccttccttttcttcattggtttcttcacatctagaatttactgcctgaccgggaaaaaataagctaggaacttctatacatgtgtatgcatttctaatcatgtagaagaataagtgtgtcttgactctagataattttaggtagagtcatgctcgctctcctacattatgtgatgtaactgaagtgttgttgtgttgtcatgtatggtcttggatc

SEQ ID NO: 31044 - DNA, 1092 bp, Zea mays
  Clone ID: UC-ZMFLB73120D09_FLI
gattgcacatataaggcaatgaatcgtgaatatactgttggcgagttcagaaaggtagtcgacactctgtgtgagcttgtccctggaatgcaaattgctacagatattatctgtggctttcctggtgagaccgacgaagatttctctgagactgttaacctcgtaaaggaatatcaattccctcaagtccacatttcgcagttctaccccagaccagggacgcctgctgctaggatgaagaaagtaccaagcaacgaagtgaagaagcggagccgtgaattgacttcagtcttcgaatcgttttcgccataccaaggaatggaaggcaaagtagagaagatctggatcaccgagattgcgtctgatggtgttcacctggtcggacataccaagggatacatccaggtgctggtaactgctcctgatagcatgttgggaacgtccgcggacgcgaagatcacgtctgtcggacgatggtccgtcttcggtgtagtggtagaaggatctgttgcagtcatagaagcaccaatacaaactagtgccgaactgcaggaggaacacgtacagaatcaggtggaggaagctggttgctgtgccaccgactcctgtggcgcctgcgcgtgctccaatgaggcgcaaccgtgtggcccagaccgatgtggagatgcacttcgtgccccgcagacctgtggtggtgacgttgttacaactcgccaggaggcactccagcctacgctcgtgaggagaagcgtagatggaaccacgaaaggaagcgacagtactgcggcgcattcagcagggaaggaacagcgggtggaagtagtgactaggcgtggggtagatatcgacacggttctgtggtgcggtttggccgcgagcttcgctgtgacggtagccctgcttgcactcctcaccagcaagattttgtcgacgacatcacactagggctaataaggcgaagctttgtaacttgtggtttggttcttgagcgtgtcgctggatcgattttggcggtctctttctttacttgatccgcctgtatgtcgttgcaaaaaactgtgccactgtatacaaaaacacgtggttgcaaac

SEQ ID NO: 31045 - DNA, 1228 bp, Zea mays
  Clone ID: UC-ZMFLB73120H01_FLI
gcgccattggccagctagagccaaccagaagagcttgcagttactgagagtgtgtgagagagagaggatgatgggtggcagcggcagggctgctctgctgctggccctggtggccgtgagcctggccgtggagatccaggccgacgccgggtacgggtacaccccgacgccgacgccggccaccccgaccccgaagccggagaagccccccaccaaggggcccaagccggagaagccgccaaaggagcacaagccgcccaaggagcacgggcccaagccggagaagccgcccaaggagcacaagccgacgccgcccacgtacaccccgagccccaaacccacgccgccgacgtacactcccaccccgacgccccccaagccgacgccacccacatacactcccgcccctacgccccacaaacccactcccactcctccgacgtacaccccttcccccaaacctccgacacctaagccgaccccgccgacgtacactccaagccccaagccaccggctagcaagcctcccacgcccaagccgaccccgccgacgtacacccgacgcccaagccgaccccaccgacgtacaccccttccccaaagcctccgacacctaagccgaccccgccgacgtacacgccttcccccaagcctccgacacccaagccgaccccaccgacgtacactccaagccccaagccaccggctaccaagcctcccacgcccaagccgaccccaccgacgtacactcccacaccgaagccgccggccaccaagccgcccacctacactccgacgccgccggtgtctcacacccccagcccgccgccaccttactactagaaaccgatgcctaccataccacactgctgtcagtctctggagcatttaggtggtctcgatcgatggaagaattgtgtcctagccagccggcaaaggtgacctgctgatgatgatgatgagaggcgagtcctacgccctagtcctactactaccctctttgtgtgctgccatccatccgtccccgctagacgatcgaggagagaataacgcagagctctgtgctcccggcctctgtcttctgccgtcccggccgtttaatttatagtctctactgtgtgttcgtcccatgtgtttagcagcagcagcaggtgtattgtgcgggtatgtaatggtattgcaactatattgggtgtaaaaccataataaatgtggaaaaaatgcaagg

SEQ ID NO: 31046 - DNA, 1224 bp, Zea mays
  Clone ID: UC-ZMFLB731215A02_FLI
tcttactccaaaatgggttgtctctgttttcttaatcgttggggtcatctttgttcctattggtgttgtttcactgctagctgcaagagatgttgttgagattattgatcggtatgatgaggcatgtgtgccagttaacatgactgagaacaagcttgcttacatccagaatgagaccatatccaaagagtgcataaggaatcttacggttacaaaatatatgaagcagcctatttttgtgtattatgaacttgataacttctatcagaaccataggagatatgtaaagagccgaaatgatgcgcaactaagagatgctagtaaagctaaccagacatccgcttgtgaacctgagaagaccacagctaatgggcaaccaattgttccttgcggccttattgcttggagcttgtttaatgatacatataatttcactcgtggtaatgagaacttgacagtggacaagaaagacatctcctggaagagtgatagggagcataaatttggtaaagatgtctatccgagcaacttccagaatggtgcacttaaaggtggagcaacacttaacccaaagatcccgttgagtgagcaagaggacctcattgtttggatgcggaccgcagcacttccgacgttcagaaagttatatggcagactatactttgacctcaaggagaatgacacaataacagtgagattgaataacaactacaatacatatagctttggtggcaagaaaaagctggtcctctccactgcaacctggcttggggggaagaacgattttcttggctttgcataccttatagttggtgggctctgcattttcctggcatttgcattcaccttgctgtacttcgtaaaaccaaggaaactgggagaccacaactacttatcctggaacagacgctaggatgtttcggaacaccaagtgtccgtactactcgaaatgtagcttgtatgaaatgaaatgctctgaaccagaaatgtcgatgggcataagcaagcatggttcaggaaagaacttcatgtatattttttacgaaggggtctaggtggctacgttatttttgtttcttgtgttctttagtgtagcactgaacaggagaataccaattgatctctattagcttgcttcgtggtacaagcactctaaatggttgactgtgtggtgttgacgctttggctgccgaagaataccaattaatgatgttggttgactgt

SEQ ID NO: 31047 - DNA, 376 bp, Zea mays
  Clone ID: UC-ZMFLB731215G05_FLI
gaccaggccgccatcctcaaggtgaaggagatcaagaacggccggctggccatgttctccatgttcgccttcttcatccaggcctacgtcaccggcgaaggccccgtggagaacctcgccaagcacctcagcgaccccttcggcaacaacctgctcaccgtcatctccggcgccgccgagaggacgcctagcctgtaaggacggacgccacgctgccgagcaatgccaagtcatgcgctgctgcatgccgtctttgattttaccgggataaaaagctgtatgtgagggtctgaagaatgtgcaatgcccacgcgtgtaaattatcgagagggggaacaaaccttttcattctgattgtgatatgactgctgcttcc

SEQ ID NO: 31048 - DNA, 688 bp, Zea mays
  Clone ID: UC-ZMFLB731216F08_FLI
gcatctgcttccagagccccccgccgccgctgcgccctcctctcggtcctgccgtccgtcgaggtaaaaggacagcatggtgagggtcagcgtgctcaatgatgctctcaagtccatgtacaatgctgaaaagatagggaaacgtcaggtcatgatcaggccgtcatccaaggtgatcatcaagttcctgacggtcatgcagcgccatggttacattggcgagttcgagtacgtggatgaccacagagctgggaagatcgtggtggagctgaatggaagactgaataaatgtggtgttattagcccacgttttgatgtaggtgttaaggagatcgagggatggacggcgaggcttcttccatctcgccagtttggctacatcgtcctaacaacttctgttggaattatggaccatgaggaggcccgccgtaagaatgttggtggcaaggttctaggtttcttttattgaaaatgtgtttttttgagccacagatgcgtccaagaactcgtctgatgttttgaggtttgttaagactgggtgtccgagcctttgtggtttgttaagacagcgatgtgtcatgtatttcagaaattgggatttttatgagatgtacctgcgagagccctgtctgtttcgattttcagatattggttttgatttatgcgatacaaacaggtcctttagtcc

SEQ ID NO: 31049 - DNA, 1137 bp, Zea mays
  Clone ID: UC-ZMFLB73121A03_FLI
atgcggagacctgtttgagaacagtgtagtcgatgaattcaatgattgtgctgtttcacgcaagaaatgtgttccaaaaaaatccgacgtcggcgagttccccgtccccgatccatcttcgctggttaagagcttcaacatggcagattttaatggcaaatggtacatttcaagtggcttaaacccgacgtttgacacattcgattgtcagcttcacgagtttcatgtcgagggagacaaattgatcgcgaacatcacatggagagtccgcaccccagactctggcttctttaccaggtcaaccgtgcagcgttttgtgcaggacccatcgcagcccggcatactctacaaccatgacaatgagttcctgcactatcaagatgactggtacattatctcatccaaggttgagaacaaggatgacgactacatatttgtgtactatcgtgggcgaaatgacgcatgggatggttatggtggttctgtattgtacacaagaagtaaaactgtacctgaaacaataataccggagctggaaagagctgcaaagagcgtaggtcgggacttctcgacgttcatcatgaccgacaacacctgtggtcctgagcctcctcttgtggagagaatcgagaaaactgtggtggaaggagagaagaccatcgtcagggaggtgaaggagatcgaggaggaggttgaggagctggagaaggaggaggcgtcactgtttcagaagctggcagaaggtctcatggaggtgaaacaggatttcatgaacttcttgcaggggctgagcaaggaggagatggagctgttggatcagctcaacatggaagcgactgaagttgagcaagtcttcagccgtgcactaccgttgaggaagctaaggtagctgcagagcaaaggacttggagaaaacaagccatcaagtactggccgaaacggattctatttgccacagcagtacccacagtagagattgttgaacagatacaacaaacatttttaattttcttttctttttcttttcttttcttttcttttctttgtttacccttttctgtggtcaaaacacatgcctacgttagccctatttgtaaagcatcaagagacaacgtaactttttcttgccaaacagag

SEQ ID NO: 31050 - DNA, 663 bp, Zea mays
  Clone ID: UC-ZMFLB73121A12_FLI
ccttcgtccacgacgagcgcgccggcacgtcggagctacttgtggtcaatgccgccgacatgcggctggaggccacggtccagctgccgtcccgcgtgcccttcggcttccacggcaccttcatcacgggccaggagctcgaggcccaggcggcctgaccgagctccacgtttctcggaggaggaacagaggagccagccatggatcaggggagaagtcaccagagggagcccagatcagttccccggggtcttcctgtccccccacgcacaccagagttacagttggtagttgctttgctttgcctttttttttttcattatttcatttgacactagtgtaagtaaattgggatagtggcagcttagagagagagagagagattagtagaaaggcgcccagctcgtagcttttcagctggtggtgcctctggctagtatagagtacatatttttttcttcttcttctttgctttatcccttttttttttctccctttggatgacatggatgtgcatccagctccagttgttgtcacccagtccagtggactggggtgtctgggatcttggttgctgctacttgctcgccattgccacccagttgctgccgctgctgctgaggtgttgctggcttggcttatatactctgtgttccctgtggc

SEQ ID NO: 31051 - DNA, 3250 bp, Zea mays
  Clone ID: UC-ZMFLB73121B01_FLI
caaaccaatccctagatcctctcgccctcgcaccaacccccaattcgatccaccccgtcccctatccgcctcgagtcccacccaattcggcgctagcctgatcggcattgcctgccggcctcgtcgtacagatctgagcgccgtctcgagcgccagatctcgccggctccgcgcctagcattccgccaggaccaggattcgcgcagcgccggcgccggcaccggcaccggcgcctgacgccaagttggcgcctcagaagcggtcccagcgtggcggcggcggaggtggcgcctccgccgccgccgcggcttcgtcagccgccgcgggggactccggcgacgccgttatggcgcggtggctgcagtccgcaggtctgcagcacctcgccgcgtcctcggccgcaggcggggccggggccggcgaccttcgcgttggtggcctgagtggcggtggcggcggcggccttctcccgagtcttctcatgcagggatatggaccacaaacaatcgaggagaaacagaagctttatacattattgaggagcctaaatgttaatggtggattagcatctgcatctatatccgagccctatacttcaacaggacagagctttgctggtggtgctcctgtagatggattttattcacctgaacttagaggtgaatttggggctggccttttggatcttcatgcaatggatgacagcgagcttctttctgagaatgctgcatcagaaccatttgagccttcgccttttatgccaaaagaaatggatgatgacgactacgatgtaatagcagaaaaccaacaaggtctagtagacaaccagagtgccttcaccaacgaaaaagaaaacactgtggtcagtgcaagagaaagtaatgtagcaaagattaaagtcgtggtaaggaaaagacctctgaacaaaaaggaggtatctcgaaaagaggaagacatcatagatgtacacaattctcaattcttaactgtccatgagcctaaactaaaggtggatttgacagcttatgtggaaaagcatgatttctgctttgacactgtcttgggcgagaatgtaactaatgatgaggtgtaccgtgagactgtggagcctattataccattaattttccaaaggacaaaagcgacatgctttgcatatggccaaacaggcagtggcaagacctatacaatgcaacccctacctcttagagctgcacatgatatggtttgtcttttacatcaacctatgtatcggaatcaacatttcaagttatggcttagctactttgaaatttatggtggcaaactctttgatcttcttagcgaaaggaggcaactcttaatgagagaagacggaaagaaacaggtctgtattgttggtttacaggagttcgaggtttctgatgtccagattgtcaaagaatacattgagaaaggaaatgctgcaagaagcacaggcacaactggagccaatgaagagtcctcacgatctcatgctattctgcaattgtctgtgaaaaagcatatcccagttactgaaacccggagacagagagaccgagatgctattgaagcaaagaatacaaagcatgtggggaaaatgtcatttattgatcttgctggaagtgagcgtggtgctgatacaacagataatgacaaacaaacaagaattgaaggtgcagagatcaacaagagccttttggctctcaaggaatgtattcgggcactggataacgatcaaatacacattcctttcagaggaagcaagctaacagaggtgcttcgggactcctttgttggaaactcccgtacagtgatgatttcttgcgtttcaccaagttcaggttcatgtgaacacacactgaatacgttaagatatgctgacagggttaaaagtctttcaaaaggtggtaacacaaaaaaggagcagtttgctgtgcagtctgtatcatctggcaaggaatctacctacacatcgtaccctttatcatgtgaagctgaagagactatggagcagactcaagaaattaggcctgttgattcttctaggaaaggtgttgacagtttcacttccaattcttccattgagcctgagaaaaactcctattgtatgattccaagctatccacataaaggaaaagaagaaactagtactagatctggtttgaatgatagggagagaggggacttgaaatataaccaggctggttttaatagtaaaacacattcacttcaggaatcaataaattcacaagaagaggtgaaagtgacaaaagtctcaccaccccggagaaaagctaacagggatgagaaatcagaaaggcaggtcaactacatgaaaaaagaaagtgggcctgaaattagtcggactggtgttaagcagcaacagcaacttaaacagctgcaaaggccatcatcaacctcatcgtcgcaggttttatccaagcaatctgagaaggaagatatggaaataaacacaatacttgaggaagaggcgctgatagcagctcacagaaaggaaattgaaagtacaatggagatagtacgagaagagatgaatctattagcagaggtcgatcagccaggtagtcttattgacaactacgtggcacagctaagctttctgttgtcgcggaaggcttctggtttggtaagccttcaggcacgcttggcacggtttcagcagcgcctcaaggaacaggagattcttagccgtcaaaaaccattgagatagtttaaaccgcccaaaatggaaacctttcggtttgtcgttgatcgcgagaagcctcggatactggaaactgccatcgattgcgacagcctcggatcatggcctccaacatcgccttttagggatctaagggtgaaaggatgggagatggaaatgtgggctgatgaagtgcgcattcattattgattttgaggttttatgaaccagtttactaatttttcttttactgaaaagggtgcttgagtgtattttctatcgatgtcatgggtttgtcaacgtttgccattttcttttgtacgagtatagttgtaactgttgttcgaataccggtagtgaagtgctgcgagtgaggaaataaccttgccttgccgttatggtgttgtatcttttgttgatatttatttcgcatcaacaaaagaaaagcagcgttcgataaatgtctacaggatttgctttgtaccttgggggtgccctgtttattgtgactacaagtctgtgatatgcattttttataccttt

SEQ ID NO: 31052 - DNA, 1022 bp, Zea mays
  Clone ID: UC-ZMFLB73121C02_FLI
gctcccatccagccgccaccaggtgcagagtctttcgtcatctcttctccggcgaagaacccccagtcgcccaccagatcacttgttaaactttgttgaggggtgatggcggtttctttcgcaaacctcaactccgaggcagggcttaaaaagcttgatgagtaccttctcactcgcagctacatcactggctaccaagcttccaaggatgacttggctgtctacacttcgttttcggctgctccctcgtccaagtatatcaacgtagcaaggtggtttaaccacattgatgcgctcgtgaggctgagcggaattactgcagagggccaaggtgtgaaggttgaatcctcagcagttccttcagccccaactccagatgttgctgaagcacaggccccagttgctgaggaggacgacgacgatgatgttgacctttttggtgaggagaccgaagatgagaagaaggctgctgaagagcgtgctgcagctgccaaggcttctggcaagaagaaagaatctgggaagtcatcagttttacttgatgtgaagccatgggacgatgagactgacatggccaagctcgaggaagctgttaggagtgtccagatggaagggctgctctggggcgcatccaagcttgtcccagttggatatggtatcaagaagctgcaaatcatgatgaccatcgtcgacgaccttgtctctgtcgacactctcattgaggactatctgtgcgctgagccagtgaacgagtacgtgcagagctgcgacatagttgccttcaacaagatctaggcgtgacttccgatcagtccttcccctggggtgctggcgatggtggtggctgggcaatgcaccagcctaatttatccatagctatatgtctgctttgtgtggccagtgatattgccgtgagtatttttggatcctattcgagtcgaatgtaccagtaccagagttaatttgctttaattcgaaacaccgttccagttggaattctgttacccgtgttctttgcttgc

SEQ ID NO: 31053 - DNA, 2142 bp, Zea mays
  Clone ID: UC-ZMFLB73121C12_FLI
gttgatcccaagaattaaggatttatattctctaaactgtgcatagatcataaaagaagccagtaaatagtgcaactaaagaagggttgtactggaaaaaataggtaaacgaggctaaaatttgggatccaaatacagtccatcttgtacataacttttatttggaatttggaatattcctgaatatcatatatgccaaactgttttgcaaccgaaggattcagaaaaccctgcatgaagctattttattatgtgttatctgtctctattatatgtgcctggtggatctgcaggttgctgtccaatgttgtttttgtgcttaaatagtatcatttgaatgttgtctttgatgcttcattctgtttaatatttttcaacctcagtaaagtaatctagctgatttttatatatcctgtcatttagcaatgaattgaatattttagatggtagtgaaagcacctttctatatcacatacatctctagacatctattggaactctattccacggcattgctattcaacatatgtatatgtatatgttcgtctagtccaatcttcattagccccatagttttgcacatgggcaacgctagatgggcatcactagcctgacgattttgatcggtgagttgctccctccatttttcttgttggttattgaatttatctacaatatgtcttctgcttttgtatgtctgctatctgcactgctatttttttcttctattctgttctccatgcccctttcatgtatacatatacacatgtgcaaactatattttgcagaatcgtgccaggaatccaatgtctggtggctattctcagcagggctatcaccctcctcgtcctcagtcaaactggggcccgccttctgcgccaccccagcagtctggttatggttatatgcagcctggggcttatcctggggcaccgccacagtatggtgcacctcagcaaccttatggtagctatcccccaacatctggtggctatcagactgggtgggatcagtctcaaaaccagcaatctcatacaactccccctggtactgggtatgattattatagccagcagcagcaacctcaacaacaacaatctgcccctgggactgctgcttctactgatgccactagctacaattatggccagccttcaacatatgcttcacaaggatatgattctacctatactcagcatagtggtgggcagcaagcatatggacatgatggctactctggttaccagacccaaggccagcagcagggctactctcagcagactggttatgaccagcagggatatggtgcatctgcttatggatcagctgcgaactcgacccaggatgggtccagctatggtggtcctggtggggccacccaggcatctccggggcagcaaacttcaaccccagctgctggaagccaccctggctatgccagtcaaccgcctactagtgctgcagcaagctatccagttcaaggttcagctccatctggatatggtgctccaccaccccagcctggctatggcacccaacctccacagcaaggtggatatggtccgggcgcttatgggcagccttctccacacggcgagaaacctcctgcatcttcaccttatggacaagctccgcctcctggatctgctcagggtggttatgtgcagtatggttacagccaacctgcatacggtgcaccaccagcttaccctggtgcacccactgcaagccacccgggctatggccaacagcagtcttatggcgatgcttatggtagtggaagctatgggcagcctacagcctacactactgaagcagcagctcctgctgcatcccaggatcactctgccgcacctgccgcggcccctggaacaacagctgcgccagctcctgacaacaatgggggtgccaaaacttctgcggaaacttgatcttcaacagctaattgggaacaaactttttacaagcctctgttgtgtcgtttcctccactgttgcttaatattacacatctagtttaggctccacatctacaggttatatctttctgcctgttgttttgaccccatgaatcgctctttccgtgctgttgattagtactttgttgtttttttattgctggttagatgtttggactggtgat

SEQ ID NO: 31054 - DNA, 514 bp, Zea mays
  Clone ID: UC-ZMFLB73121H02_FLI
gaggttagaaactggataatgactataaacagaaaggagaaccttaacttgcttcttggcactttaagaggtgaacttaacctcagaaaaaaaacaaatagtgctatctgaatatgccatgctttctggagtgaacggcagtggatgatgccaaaagtcttttgtagagctactccaagggatcccatgcaagcaagataaacctcatctctttgagttccctcgacggttcccaatccaagcccacatcagacgataaaatgattgagttcggcaaacttttaattcaaggtgggctcactgtctttgttcggtcagcagaggggatgatcagatcagatggctgcctgcgggcagctcagagagcctggagactaccagctgcctctgcaccgtgcacctgagaaaattttgaggtcgtcttgtgatgctagacagtgcattacagtaaactggtcctgaggcctgagaaaattttgaggtcgttttgtgatgctagacagtgcattacagt

SEQ ID NO: 31055 - DNA, 1633 bp, Zea mays
  Clone ID: UC-ZMFLB73121H05_FLI
cgcctatctccgcgactcaaagctttccccaattcccccccttctcccatttctcaccaccgccgtcgctccccccgttcaacaacaccatgagggagtgcatctcgatccacatcggccaggctggtatccaggtcggaaacgcgtgctgggagctgtactgcctcgagcatggcattcaggctgatggccagatgcccggtgacaagaccattgggggaggtgatgatgctttcaacaccttcttcagtgagactggcgctgggaagcacgtcccccgtgctgtttttgttgaccttgagcccactgtcatcgatgaggtgaggactggcacctaccgccagctcttccatcctgagcagctcatcagtggcaaggaggatgcagccaacaacttcgctcgtggtcactacaccattggcaaggagattgttgacctgtgccttgaccgcatcaggaagcttgcagataattgcactggtctccagggcttcctcgtcttcaacgctgttggtggaggaacgggctctgggcttggttctctcctcctggagcgcctgtctgttgactatggcaagaagtccaagctcggtttcaccgtgtacccatccccccaggtgtccacatccgtggttgagccatacaacagtgtcctgtccacccactctctcctcgagcacactgatgttgctgtcctgctcgacaatgaggccatctatgacatctgccgccgctcccttgacattgagcgcccaacctacaccaacctcaacaggcttgtctcccaggtcatctcatccctgacggcttccctgaggttcgatggtgctctgaacgttgatgtgaacgagttccagaccaacctggtgccctacccgaggatccacttcatgctttcgtcctacgctccagtcatttctgctgagaaggcctaccacgagcagctgtccgtggctgaaatcaccaacagcgccttcgagccatcctccatgatggccaagtgcgacccccgccatggcaagtacatggcatgctgcctcatgtaccgtggtgatgtggttcccaaggacgtgaacgctgctgtggccacaatcaagaccaagcgcaccatccagttcgtggactggtgcccgactggcttcaagtgcggaatcaactaccagcctcccagcgtcgtcccaggcggtgatctggccaaggtgcagcgtgccgtgtgtatgatctccaactccaccagtgttgtggaggtcttctcccgcattgaccacaagttcgacctcatgtacgccaagcgcgccttcgtgcactggtacgtcggtgagggtatggaggagggcgagttctccgaggctcgtgaggatctggcggcgcttgagaaggactacgaggaggtcggtgctgagtttgacgagggtgaggacggcgacgagggtgacgagtactagacgctctactggcgcggcgtcgtcgggcttgtgtgccactgctatcctgtgatctgccctgagtggctcctatcgtgttatgtttctgtcggttcttatctatctgtcgttgtgtggtttacaacttacgttgtaagactttattcccccgctttgctactgggttattaagtttggcgttattgttt

SEQ ID NO: 31056 - DNA, 980 bp, Zea mays
  Clone ID: UC-ZMFLB73122A03_FLI
aatggagatgagcaggaagacgagagtccagtgaaagctaaactatctagcatcccacctccgtaccagaagccactgaagtcttctcttcgccccccgctgattccaaatgatgacgaacccgtgaaacaagaggaggaagggctcttcacgtcgattggcaaactcgtgggtgtagcaagatcatcagtcgcagagatcgtcggcgccacattctccagaaagaagcgagtgaacgttcaccaccaccagctgggcaggccgacctcgtggccagtgcaagagagctacgccatcccgcgggacgagaccccgccgccactggacacgagggcgccgaccccacgcaagagctacgccttcatgtcaaaggagccggagaagatccaccacatccggcacggtcggcctcagtcacacggctggaccggagaagctgctgctgctcctcagcagcaggcggcgtcgctgccgccgcagcagcagcagcagcagcagcaggtgcatcaccagcagtaccacaacaggcagtactcggccgggccgcagaccttctacgagccgagctgcgatgcggcgaaggagatcgtcttcggagccgtgcaggagggggacaccggccgccgccgtcccgtggagatcaagcccgtgaaccacggcgacgtggcgccgttcgagctgaacgggctgcggttccgcagcagttacggcatgggctaaaccagtggcaataagcagtcgaggaagagatctattgttgcctccgtccgtcctagtagtgttttggcgtcctccgttgtactggtagctgcctgtaaagtgtaaggaaaagagagggagcgatatagagatatcagtgcactcgaggggagcatttgacaagtgcaacggagaagttgggagttttggtaggaagagcttggtcatcatcatggttattggactctttactggcggtgatatatataatatatgtatgt

SEQ ID NO: 31057 - DNA, 606 bp, Zea mays
  Clone ID: UC-ZMFLB73122B12_FLI
gtgcaaccaatctgatcacccagtcgtcccttccaatacccggtgcggtgatgatgatggctcggggaagaggtggtgcgatcggcggcggcggcgtcatcgcgttggtgctcctggtcggcctcttcgtggcgacgagtgccccgccggtcgccgaggcggcggcgtcgtacatggtcggcgactacggcgggtggaagttcaacgtcgacaggtgggccaaggggaggaccttccgcgccggcgacgtgctcgtgttcagctacaaccgtgcggtgcacgacgtggcggtggtgaacgcggcggcgtaccggagctgcgcggtgcccaacaagggcgcgagggtgctgcggagcgggcgcgacaaggtgaggctcggcagaggcacgcactacttcgcctgcaccgtgcggggacactgccaagccggcatgaagctcgccgtcagggccgtgtagtagtcccgcctggcaacggcggccacgcccaacttccagagtccagatccatcgatccatgcctcaggtcggctgcgtgtgggatcctgaaaaatctagacctcctagctattttgcgttgcttagttaatctaatggcgagctatct

SEQ ID NO: 31058 - DNA, 1353 bp, Zea mays
  Clone ID: UC-ZMFLB73122C11_FLI
taggttttgtaaaaacagataaagacttccaaggaaaagctgcacgctcagggaccactgtgacttttgttataatagatggatgggttgtcactgtagcatcagttggcgattcacgatgcattctagaatctgctgagggttcaatatattttttatcagcagatcatcgcctggatgctaatgaagaggaggtggagcgtgtaacagcaagtggtggtgaagttgggagaataaatatcgctgggggtgccgggattggtccactcagatgctggccaggtggattgtgtttatcaaggtcaataggtgatatcgacgtcggggaatttatagttcctgtcccacacgtgaagcaagtaaagttgtccaatgctggtgggcggcttgtcattgccagtgatggtgtgtgggatgcactgcactttcaagaggctctgaactacaccaggggcctgccagctgaagctgctgctaatcgaattgtcaaggaagctgtcacttcgaagggattaagagatgatactacttgcatagtagttgatatactacctccagagaagttaagccccccactaaagagacctggaaaaggagtcatcaaagctctgttccggcggaggccctctgatgaaatgtctgaagatcagatggacagaggatgcttagaaactgatgttgtggaggaaatatacgaggagggctctgcaatgcttgctcgaaggttgaatataaattacccagaaggaaatatgttcaagctgcatgattgtgctgtctgccaattggagatgaaacctggtgagggcacctctgttcatggtaacatgcccaaacattcgagagttgacccctggggtggtccttttctctgttcctcctgtcaattgaaaaaggaggccatggaagggaagctacattcaagaaattcccaatctgctgttcaacctgtacctaagtaggccttccttgacgggttcaatacattggttcatacacactaactaccactaacaacagcattagcaaataaagtagactcgtcaatgccatcttattcatcaatcaatgtttgacagagtcatgaattttcacctactacattcttatcaaatggcgatcggtacagattttagagatttatggtgtcatttatatgatgcactacagttgttcggtagtagaaggttcaagtctgagccttatcaagtctatattcagagagaccacaactgacctctaggatcaaatgaactggtagccttaaggtgtgctgctttctgtagttctttcattgattatcaagtctgcacgacttgtctacttgtgaataccagtcgttggttgaacccc

SEQ ID NO: 31059 - DNA, 1059 bp, Zea mays
  Clone ID: UC-ZMFLB73122D05_FLI
gggttgtgcctgagatgactagtagcagcagtatgcccaatttagctattgcaaaagatggaaacaccaacgttttgcctttcgaatttcgagctcttgaagtgtgccttgagtcagcctgcagatctttggaagatgaaacttctactctggagcaagaggcatatccagcattagatgagctgacatcaaagatcagcacattaaaccttgaacgagttaggcaaatcaagagtcgtctggttgcgatatctggtcgagtacagaaggtgagggatgagctagagcatttactggatgatgaaatggatatggctgaaatgtacttgacagagaagcttactcaacaagaaattagtgaggcttcatctagagctgaggttgatgatccatctcaaacagaagaggatagcttagggagtacgttgatgacacagaagattatatcaatataatgttggacgacaagcagaatcagctgttgcagatgggagttatgctctcaactgctactgttgtcatcactgctggagtggctgtagttggcctttttggtatgaatattggcatatcactttacgcagacccaacaactgaggaggaaactcgagcagcaaacagaaaattttgggaaactacttttgggaccgttgctggctgcgtgattttgtacatcatagccatgggttggggaaagagaagtggattactgcaatgaggtggaaactcatgcaatgaggtggaaacatgagtgttctgcacccaatgaaaactggtttgacaaaaatctccaagatgagatgttgcattggcatgccgctcaaatacagtacgtcctattccactatgccgggaaagaaacatcttgtgtacgctagtagtaatgtgtgtgaaataaaactattgtacaatttgttgcccctcacctgtcatggcaactcagtaattctgtacctgtttaccacggtagctgcggtttttgctcttgcagttgtaatcatttctgtaactgttgtaactgtatccaccgaactgtaatatgtaaaggaagtatatgag

SEQ ID NO: 31060 - DNA, 1319 bp, Zea mays
  Clone ID: UC-ZMFLB73122E01_FLI
gcagtcctgatgagtttagctgcaaccagatccaagctgaacaaatgacagggcaattgagatcattgactcaatatatattgaatggcgcagttcttgctctgtgtccctatctagatcgttatgtgttggcagctgctggtaatatgatttatgtatttggtttcacaaatgaaaatccccacagaataaaaaagtgtgctgttggtaggacacgatttacaataacttgcctgaagacatttgcatcacgaattgctgttggtgattgtcgtgatggtgttctcttctattcttataatgagagtcataggaagttggaattggtctattctgatcctgctcatagattggtgggtgatattgctcttttaaattgtgaaactgctgtggtatcagatcgacgtgggagcatatctgtattatcatgcaccagattggaagtttcagaaagtccacagaagaacttagccgtgaattgttcattttatatgggtgaaacagccatgagcattcagaaggctgcattcaggtatcggcttccaattgatgatgatactgacccggtgcttgagacagtttacaactgtatcgtggcaagtaccatgttggggagtctctttgttatgattccactttcaagtgaggagcatcagcttttgcaagatgtccaagaaaaactctcagtacacccattaactgcaccggtcctgggaaatgatcatgcagagttccgtcagcgtggtaccccttcggtagtgcctcccattcttgacggtgatatgcttgtgcaattcttggagctcaccggtgaacaacagcaagccatccttactcatgctttgccagggaaggggcaacataggcccctctcggttttccaggttttgcaaacattagagcgcgtccattacgctcttaactgaggctttcttcaatcacagttactacaaggtttggatattagagctggttgaccttcattgtttgagatgccgtcagagctgaggttttagtgaccttcgcaatctagacggccgattccaagtctgccatgatatttatcagaacgtttgattgatgatgcaactggagcttgatactgggaagtctcatggtggcgagtatcccgtggaggcaccagattcgtcgaacctcctgtgtatatacagtcggccgcttttggtagactgttgtatggcgcattctgcatagaaacgaatattctttccgtttgtttcaatagataatgtaatgtttcttacgtcagctggtcggatgctcaacgagaaataagggaaacaatgaattgcattggc

SEQ ID NO: 31061 - DNA, 3607 bp, Zea mays
  Clone ID: UC-ZMFLB73122F08_FLI
cttttcctcctctctgctttctcgcttttcctcctctctgcctttctttgctaccgtcggcgtcaggcgtcaggaactccgcttccacacgaatatttcgtctattgtcagcttgctcagtggctccgtttgtttggtgagatgtgttttcccctttatccttcgtcgtgcgtttccattcggtggatatctttttccatattcctttgtggattagatccaggcttctctagtcgagatcctcttgctttttaccgagatgaaaattgggaccgaaaaggcaagtatttttctttgatagctttggcatgtgcagacatataaggaagtgttctacctcattgaactctattttggagattgagactgaaaaggcaattatttctttttggtaaagtctttcgcatgtggacatctggttccaattccaatctattgttttttgtcgtatcctcttgctttggtacatttagatctgcaagtaaatgttttttatttcattgaacttcaataagggcaggttatgttctgtttgtactttattgaacttcattatactattttcttttggtaaagttgttcgcatcaagtgcatattgcattctttttagttttttaacggttttgctgtcatcttattttttggctgtgtttccattcttccaactgtgtttccattcttcctttgtcaactatttcaatttcgttaacaactaatttcctttgggtaaaataatctactcgaagttgagatttcgctttcttttgtttatgaacgcaccaagattccaacacgccactatttttcttctctggtttagtagtgaggaaatccctttttacggcctaattttgggtttagggttttaactgatattttgaaggaaaaaaaaagttgttcctctctgtcccgactcttccatctactctctgattgttctgctccagactatggtgtgtaaatctgccgcatcatttttttgttctggaaagctctaaaaacaaggaaattatttgcatcgttttcttaaataaagatagcatcttgcacagttgctttttggagaaagaaaagtaacccggtttgattttgtttgtccaaattagtttcaatttaataccttctcgagttttgcttcctgtttttatcctttgggtttactaaattgcttagactatttgtggatctgtacatattaacttaacacctgcaagcacactgttgctaaatgttgatatatggtggtcgaatgctacttaggccccgtttcaatctcatgggataaagtttagcttcctgctaaactttagttatatgaattgaagtgctaaagtttagcttcaattaccaccattagctctcctgtttagattacaaatggctaaaagtagctaaaaaatagctgctaaagtttatctcgcgagattgaaacagggccttagtacgcattgtagtctaaattcactctataactggtatcagctattacatgttgcaaagtgttgatatatggtggttgaatgctacttagaatgttttgtagtctaaattcactatgcaactggtatcaactatattacataaaaataacgttatatgcttacattttgtttcctgcctacatattatataatcatattatatttaaatttgttttacatggctgggtacttacaccaaactcttaagacatatgtgctcacgcgcgctgggcgcgcgctaaacactagtatagagtagtagagattgaatggctgttcagggcagtgtgttgctacagttcctcgtttataccattactggtcttcctatctctgtcattgctggcactaatagcagatcatatctgcatgtacttttatagactgtatcaattaggctagattagaggacattaggaggatagctttgattctttcctttgcatgtacagtccttcgcataaatccagcctttgcatgtataagtacagcctacacaatagagaattcgttccacctaatcgcctatcttctttcactgaggtcctatcacttgacggaatgcaatcgtgttgggcaggtctggatgagatttcatcgaaacatttgtcaaattatgccatgggagcatcttaggctgttgcattgatttggctgatggctgtagttctgtattcaaatgttcccaatgagccacctttttaaatgtgttcagtgcctcttagaatatgcacagatgagtaacatactaccgtgctgtagtgctggactcgaactactataaatttgcctttctggttatctggtataagttaagattaaatgagccacaccagcagctcccaatctttatgaaatgaatgcaaagccaatggcaagcgaacctgcatggatccatgttttgtattgtggagtaaatcatatttgtttgtgcaatacatgttgtctgagagaggtcgcggaacaagggctgttcgggtgtgagtatccaaaaaaataaatgaatttgttaggtttcaattacttcttttccctgcattttacttagttatactggtagcagcggtggcctgtatgttgtcctggacccgtagaataccagatctaagaataaaaaacgtctgcagcggtatccagtacctcgtcctgtattatccaggggggcggctccatcccgtagatatgggggacaagagagcgtccggcaagtcctccagctcccggctcctcctctcattcgcgtgattgggcatggacccgtaggacatagaggatatgccttataggataccgttgcggataaaatttatttacgggaagaaatcttttggaggaatctttaaattagtatttaggggatgcaatatacaggctaccgttgctaccagtcttagggctagtttgagaacccttttttcccaaaagattttcatttttcaaagaaaaattagttcatttttccttgagaaaataggaatcccttaaaaaaatagtgttttcaaactagcccttaatgttttttttcatgaacagaagctgcggccgtcagaaaagcttgacaggtttcttgagggtagaaacttatatgaaggtttggactgtcataccatttcgagtatatgccaggagtatgatttggacaagactgatgttctcaagtacagggatcttccgtaaccacatccagattgtttcattgaggcttatacggtaaaaattcttctgctagtgagatcaagattaagggtacaggagttgcatggacccactagaaattggtggccaaagtaccaaacgagttctttgaaacagcttcagtttttcttgttatgtaccaaatcggtctgccactagtgcaatgaccacagaaacaaaaccagggcaggttcccacttcccaccgtgtaaatagagatgcagtcgtcatttttctagctgtcatttttctagctgggttctagtctttggacgacaaatacaagagtagggttgagattgaccatccgtacgtgcttttctttttttttcatggctcccaatctatctttggttgtatttgaatcttgtgctggggtccaatgcgtaatcttctcgttttgtgagggattctaaagctttgatctctg

SEQ ID NO: 31062 - DNA, 1147 bp, Zea mays
  Clone ID: UC-ZMFLB73122H11_FLI
tgaagatttgattcagttttatcttgtttgagatatggactatgataattcagtgtgaagatttatgtgctcttaaatatgctcgatagagtaaaacagacatcgtccaaaatcttagcaaagtcttggcacatcctgattcatactcttatttactcctaaatgatgtgttttaatcaaatctgaaagaaacaggtggtacttcttcctctttgatggtttggtgttttctgcacatatttagttttacagttgatggttgagcgatatcgcactgtattgttgaaattgattgaactgagttctatgcttgtgtgcagaataagagttagatcttttatactatttcgttagtggccatgtcagctatcatgatagttgctaaaggtttcttctccaattctgtatgtcattagttctgttggatgtttcttttgcaggtttaggctggagttttccatgtgatatttggagtgttggctgtattcttgttgagctatgctctggggaagcattgtttcagacacacgagaatctggaacacctagcaatgatggagagggttttgggacctctaccagaggatatgatacggaaagcaagctcttcagctcagaaatattttaggagagcaacacgattaaattggcctgaaggtgctgtttcaagagaaagcatcagagctgtgaggaaactggatcgactaaaggacttggtatcgaggaacgctgaccattcaaaggtggcactggtggacttgctatacggtctcctacggttcgagccatcggaacgcctgacagcagaagaagctctggaccatccattcttcaggaacccaacatgacttgttgagcaggcttgactcatgtaactctactgaaggtggtggtaggaagcaggcagagccgtccccattgcaaagctgaaggcatcttgttcctctataccagagagtttgtgtaaggcctgtcaatggggcttcttgtggtgataaaactgatggctttagtcacccaatgtcatgtacactagcatttttcctagggagcttagttcgccagacggcgcttgtatgttgttaaccgggatacactatgagctgtgccccgatgccctggtgctataatccaatcgccaatgatgg

SEQ ID NO: 31063 - DNA, 233 bp, Zea mays
  Clone ID: UC-ZMFLB731237D08_FLI
cgtgactccagggacgtatttgttgacacctgcttgaaaactgacaagcctctctattagacagagtgttaacctgtggtctcagaatggagtaaacaatggtagacagagtgttaacgtacatcatgtctgatgtaagccggcaggtattttcgtcgtgagccaaaactcggctaacgtcgtgacacggactattatttttatttttcttaaataataatcccttttcagac

SEQ ID NO: 31064 - DNA, 1553 bp, Zea mays
  Clone ID: UC-ZMFLB73123E01_FLI
cccaccagcaggcggccccctcttactccacgaccgccaccgtcttctggccgtacgcgactcgccgcagaaagagagccgaggacggcagcgacctctcgctggcgtcggatatggatctcgacgccgacgcgcagcgcgccgcagataagctgaaagcagtgtcagaggaacttggacatgagatccgggttttttcaagtgagaactttgctctacaaccgagcaagctgcctagtgcagatcatgaggaaggtgacgacttttatgagcttcagcctgctgattactacaacttgatttcaaacaggatgggagagctatctaaaatgctaaagactcgcaagatgcgggaagcagaacttgctgctcagcgagcaaagcgaacaaaggcagtaatgagggtgcgattccctgatggctacatacttgaggctgactttcttccatcagagaggattcatagtctagtggacctgctcatgaaagtacttgctagaccagatctgccattctatctctatacagtacctccaaagaagcgaatactggacacatcacaggacttctatacatctggttttgttcctggagctaatgttcatttttcttatgatctgcccgaaggtttgttgttaaatgcagatgatctaaaagcaggacccttcctccgtgaaggaattctaagtttggatggattgtcacttctgctgaaacctgctagtcaacctgatgattctagaatgaactcttctactcatcaatctggtgcatctcaatctgaccctgtaccaacaacaaataagaagcctggcagaccaaagtggctgaaaaggtaaaatccagaataatcttcttgccattgtggtacaatagttaaaaggagaaaaacttgtcaagtttctggggataattccaattccttatcaatcttcttaagcaatgatacacagctctcatgcgtatttgagaagaataattccttatcgtcttttggtaagttagcatatgcccttgctatccactgtttcagaacattgttagaacttgcaaggagcttttaaattgcagtttcattttagtgcgtgcatctcatactatcttgattgttgaaccaaccccacccaccatagggttatgtctcgtgataattctgtttgcttgaactccatttcccatctagctattttgtttcggaacatcttttgcctttgcaagaccacgacaaaataactggtacccacttgttgcaggtgataccactccaggcgtcaggtgtgtgctttcaacacagaatcagtctgtaaacactattcatggttgaacaagtttaaagtttggacagactacactgctgcagtacaaggattggaccctctgcccactgaagctgttgggggcattataattggggccccacctttttgtaggtgggagacaagtagcatgtaaacttgaatgtgttgctgactcaaacagaacagtgctctgctctggctaagcacctggccatcttacacatcgtgtaagccccatagtaacttgaatgtgtt

SEQ ID NO: 31065 - DNA, 656 bp, Zea mays
  Clone ID: UC-ZMFLB73123G03_FLI
cgggtaagccaagaagcaattcaagtagacccccattcatcatcgctcctgcaggacctcgtgcactcatttgctcgctgtaggtaccggtcgctgcacaccgtcgtcatgggcgaaggtgtccacccgttggaggtccagatccgcacgaaggagatgcacctgcaggccgagtacggattcgccgcgcactggaggtacaaggaaggccgcacctgcaggcactcgttcgtgctccagatggtggaatgggcgaggtgggtcctcacatggcaatgcgaagcgatggacaaagaacggaccgcctcctccctaggcagtggcgacgccgcgagcgcgaggccaccgtgcccgttccccctgcactcagaggactgcccttactcgtatacccgccagtgcaaccacgacggaccgctgttcgtcatcctcctggagcacgacaaggtttagccccagctctgactggttgcacacatggctcgcccatcgcgtgtttatgttcggttccagccatatctgataaggtctgtggtgccgtttcagatgtctgtccaagaattcccggcagactcaacggtaatggatctcatggaccgtgtcggcgccaacagctcgagatggagcccctacagcatccccgtgaaggaggatct

SEQ ID NO: 31066 - DNA, 987 bp, Zea mays
  Clone ID: UC-ZMFLB73123H01_FLI
gtcgccccgctcaacaagctggtgccgacggccacggccagcctgcacggggtggtgcaggcggaccggggctgcctgcagtggctggacacgcagcagccgggctccgtgctgtacgtcagcttcgggagcatggccgccatggacccgcacgagttcgtggagctcgcgtgggggctcgccgacagcaagcgccccttcgtgtgggtggtcaggcccaatctcatccgcggcttcgagtccggcgcgctgcccgacggggtggaggacgaggtgcgcggccgtggcatcgtcgtcgcctgggcgccgcaggaggaggtgctcgcgcacccggccgtcggcggcttcctcacccacaacggctggaactccaccgtcgaggccatctcggagggcgtgcccatggtctgctgcccgcggcacggggaccagttcggcaacatgaggtacgtgtgcgacgtgtggaaggtaggcacggagctcgtgggggaacagctggagagaggccaggtcaaggccgccatcgacaggctctttggcaccaaggaaggggaggagatcaaggagaggatgaaggaattcaagatcgctgcggccaaaggcatcggcatcggcgtcgacgtcgacgaaactgcgtcgccccgcacggatttaaccgatttggttgatctcataaaatccttctgagctcatgacgatcgatctgttgggtgatgcctactctgtccatcgtgctcgacttgtcttcctactactgtaccactgtctgtgctcactttcacgttcctgacggtgttgtgttctagtgtatcattgtgcgatcagttccatgttcttggccatgttttagaataaaacagaaaacttgtgttcttggtgtaccactgtgctcactttcatgttcttgacggcgagttggaataaaacaagacttgtgtcatggtgtaccattgccatcattttcatgttaatataaagatttgacgc

SEQ ID NO: 31067 - DNA, 1369 bp, Zea mays
  Clone ID: UC-ZMFLB73124B02_FLI
ggaatgataaatgtggagcgagttgagcaaagtgcagctccaggtggcagctggagcatctggccatttagtttcagacgaacaaggactattactgctatccagccagtttgtgaaagtattgttgagacttctgtatccactcctaaagaattgacacattttaaagaactagatagagaaaggaataaatccagggtaaagaggattgagaggaaggtgcgatcactcactccaacatctgacgagcttgcatctcttgatctcagagagggcaggaacgtggtaacatttacgttctcaactgcaattgttgggaaacagcaggttgattgccacatatatttatggagatggaatacacgcattgtaatatctgatgtggatggaactatcaccaagtctgatgttcttgggcagttcatgccactagttggagttgattggtcccaaaacggagttgctcatttattttctgcaataaaggaaaatggataccagcttctatttctgagtgcacgcgctatttcacaagcccacatcacaagacagtttcttttcaacctaaagcaggacggcaaagcacttcctgatggccctgttgttatatctccagatggtctcttcccgtcactttacagagaagtcatcagaagagctccgcatgaattcaagatttcgtgtctagaggccatcaaagatttatttccacacgactcaaatccgttttatgctggatttggaaatagagacacagacgagcttagctacctcaaggttggtattcctatgggcaagatcttcataataaaccccaagggtgaagtcgcagtgaaccgacgggtcgatacaaagtcgtacacatccttgcatgctcttgtccacgggatgttccctccaatattgtcgtcatctgagcaggaggactacaatgcttggaattactggaagatgccattgcctgatgttgatttgtgaggtacaagtcgagtctgcacaacagcactgcactaattttatgatgtgccgtagtgatcatgagaaggccattacttggttggctacatgtggatgctcctgctcctgatataagttcctgcaagatggaattttgtatatataggatcataatagatgtagtagctatttcttgtgtctcctgttgttgttgttgttgtcgtcgtaggactggaaatcatacctccgtgtgtcctgtaactgaaggtacaaaatttactggatggagggatctgatagtatgttgcagccccccctttttcgtttcatccttgatgtaattgtggtaccgatgtattttgtacaagaacaaatcaataataatgcaatcgaaagcgagctgttcatacgc

SEQ ID NO: 31068 - DNA, 986 bp, Zea mays
  Clone ID: UC-ZMFLB73124B09_FLI
ctcctagcgaagcggaacgcgaacaaccggatctgcatcgccgaggccggtgccatccccttgctactgagcctcctgtcttcgtctgacctgcagacgcaggagcacgccgtgacggcgcttctgaacctctccatacacgaggacaacaaggcgagcatcatactgtccggcgctgtcccgggcatagttcatgtcctcaagaacggaagcatggaggcacgggagaacgctgcggccacactcttcagcctatcggtggtggacgaatacaaggtcacgatcgggggcacaggagccatccctgccctcgtggtcttgctgagcgagggcaggcagcgcgggaagaaggacgcggcggctgccctattcaacctgtgcatctaccaggggaacaagggccgcgccatacgggctggcctcgtgccactcgtcatggggctcgtgacgaaccccaccggagctctgctggacgaggccatggcgatcctgtcgatactgtccagccaccccgagggcaaggccgcgatcggggcggcggagcccgtccccgtcctcgtggagatgatcgcgggtgggtcgccgaggaacagggagaacgctgccgccgtgatgctgcacctgtccgccagcgtgcggcagtccgcgcatctggctcgggcgcaggagtgcggcatcatggccccgctgcgggagctggcactgaatggcacggggagggggaagaggaaggccgtgcagctgctcgagcggatgagcaggttcctggtccagcagcaggaggacgcggtggatccacgtgtgcaggagctggaggagatcgagcgccagcttgccgcctttggacctggcgttacggaggctgatgtccttcaacagttgggggctctttaacctatggtacatttttcactatgatactactatacttatatagaaaagttctagcggcggactttattatcagtaaaatctcagttctagct

SEQ ID NO: 31069 - DNA, 1873 bp, Zea mays
  Clone ID: UC-ZMFLB73124E03_FLI
tcctaatctggtcagattaattggctattgtgccgatggtgaccagcgcctcttagtttacgaatacatgttgttgggatcactggaaaatcgtctgtttggtccagcaggcaaggaacctcttgactggaatacaaggatgaagattgctgctggtgcagcgaagggtctggagtaccttcatgacaaggcaaatccaccagtcatatacagagacttcaaatcatcaaacattcttctgggtgaagactactaccctaagctgtctgattttgggcttgcaaaacttggtccagttggtgacaaaacccatgtatcaacacgagttatgggaacatatggatattgcgctcctgagtatgccatgacagggcagttgacgctaaagtctgacgtttacagctttggtgttgtgttccttgaacttattacaggccgcaaagcaatcgatcacacccagccttcaggggagcaaaaccttgtcgcatgggctcgtccacttttcagagaccgaaggaagttctgccagcttgctgatccattgttgcatggcggctacccgaaaaggggtttgtaccaggccttagctgttgcagctatgtgtttgcaggagcaagcagcatcccggccgctgataggagacgttgtcactgcactgtcttacctagctgcacatccttatgatccaaatgcgccttccacaaaggattctaagacctgcccgtctaccccaagggcaaagacacaccgacgaaccaccagtgttcctgatgctcaacatgctgctgagtcgcttattttgaacttcccagacatgaggaaggagactgtcagaggaggggaattcgagaaggatcgtactgaaggttctggcagcagcagtagctctggaaggaacgattgcctggatgtcccgcgacttctatccgttcctaacggcaaagtttgcggtgaaggtaataacattcagaagtccactgttaaggttggtgcccgtgagaactagaatacagagccggccaaattctgcaggcatctttgaatggatgcatggattagaccattctttccatgcttgctgtcaattttgcgaggaatcttcgtcgcttggcgtgagtctttctgaaggggactgttgtcgagagttgagtactaccactgcaacaggtttggttttgcagacccggatagcctcatgctccacggttggtttttggttgcctccacggaacagttcaacaattcctccaggctttacatgaagtctcatgctgatgaaaggaagaactactctgtcgctgagattcagagcttagactctttagagtgtgcatttcgatgagaatctgctacattctgaatgtcacccacaccacagctttcacctgtgctgactaacgaaccctgcagtaatgtgtcattgaaggatgtggttgagtttccttgttctgttcttgtaggaaccacgtgccgacagggctgtgtctgtacatgttaatgggttgtttgtaggaacaattggatctataccattaaaagatccaaactttagatatataccatggacctcatatgtcattgactcatgtggacccacatgtaagtgagatagtaatggtatggatctaaagtggtgatcttttaatggtatggatccaaatttcccttgtttgtaagtagagctgttcatatatttattttttcttcttcgtcggtattgtgtaatggggtgatttgcagacaacatgtcaggcgtagctctgtagtctgtacagaaaaaaaaggtttgcttttttgtttgcttggtattgtatgtaacattgactcgtcatatactattgtacaaatggggaagaacactgatcctttgggt

SEQ ID NO: 31070 - DNA, 874 bp, Zea mays
  Clone ID: UC-ZMFLB73124E10_FLI
cgcgacaacgacgccgagaaggacgcgcccgacaacgtgtccctcgctggcgacggcttcgacaccgtggtgcgcgccaaggccgaggtcgagaagaagtgccccggcgtggtctcctgcgccgatatcctcgccatcgccgccagggacgtcgtcaccatgtcgtccggcccccactggaccgtccagcttggccggcttgacgggctcgtctccaaggccggcaacgtcgcgggcaagttgccgggacccaacatgcgcgtcaaggacctcgccgccctgttcgccaagcacaacctcaccacgctcgacatggtcgcgctctcgggagcgcacaccgtcgggttcgcgcactgcacccgcttcgcggaccgcctctaccaccacggcgtcggcgacagcgatggcgcgtcggtggacccgtcgtacaaccctgcgtacgcgcggcagctaatggacgcctgcccgcctggcgtcggcgcagacatcgccgtcaatatggacccaatcacaccgaccgccttcgataacgcctactacgccaacctcgccggcggcctgggattgttcacctcggaccaggcgctgtacagcgacggcgcgtcgcaaccggcggtgagggacttcgctaagaaccagacccgcttcttcgaggcgttcaaggacgccatggtcaagctgggcagtgttggggtgaagaccggccggcacggggagatcaggagtgactgcactgcattcaactagtagatcgaccacccattcttttgaagaaaaaaaaaacagccgcgtacctgagcgaactcaaccacgtccacgtgacagcacagaactcaatccttagagctaggatgaaaacggacgaaatcggtct

SEQ ID NO: 31071 - DNA, 744 bp, Zea mays
  Clone ID: UC-ZMFLB73124F06_FLI
aacttccagattctcttgtagcggaagcaaagaaagcagcatctaaagccaccgatgatagtgctggtcaagaggctttgaaaaatgtatttcgtgcagctgaggcatgtgaagaatttagtggaactttggttaccctaagaatggctcttgatgatctttgtggcctgactggcgaaaatgtgggtcccttacctggttatattgaagatgctgttaaagctgcatataatcgctacatgacatatctggagtcctttggtcctgaggaaaactatctaagaaagaaggtggagactgagttggggacaaaaatgatacacctcaaaatgcgatgcagtggcataggttctgagtggggaaagatctccctgattggcacctcagggatctcaggttcctatgttgagctaagggcatgatgggacgtctgcaggtaaccatggaaatcatcgatgagctgaggaagtctgtagatcagaatatgccagtactgcattttcctttcccctttctagctagcatggcaataacaatgagatcatcaaacagcggcgcggtttaaggaacttcagatactcccggcccttgtgtctgtgtctttgtctgtaataagaacgtgtatatgcgtgaaacctatcagttctgttattttttggcatgcgcctgacttcttgttcaactggtgtgagttgtatgctttgttcatgaagcactgatcaatgatcatatgccttcgcccgc

SEQ ID NO: 31072 - DNA, 2053 bp, Zea mays
  Clone ID: UC-ZMFLB73124H02_FLI
ccatactggtgactggaaaattgatgaatcaccagtggatggaaaaaaatttgaccgacaagcattggaggagctctccaaagaaggtgttactcttatgatgagtgactcaacaaatgttctttcccctggaagatcaatcagcgaatctgttgttgctggttcattgctgcgacatatttcggaagcaaaaggaagagtaattacgacacaatttgcttcaaacatacatcgaattgggagcatcaaagctgctgcagatttaactggtcgaaaaatggtgtttgttggaatgtcactcaggacataccttgaagctgctttcaaggatggaaaggcaccactggatccatcaaccttggtcaaggtagaggacatggatgcatatgcgcctaaagatcttctggtggtcactacaggttcacaaggagagccacgtgcagctctgaatcttgcttcttatgggggaagtcatgctcttaaactatcgaaagaggatgtccttctttattcagctaaggtcattcctggaaatgagacacgggtaatgaagatgatgaatcgtctcactgatcttggccccaaaattatcatgggtaaagattctggcctccatacctctggacatgcctaccgagaggagctggaggaagttcttcggattgttaaaccacaacatttcttgcctgttcatggagaactcctatttctcaaagaacatgaattacttggaagatcaactggcataaggcacacaactgtaataaaaaatggagagatgcttggtgtgtcacatctaagaaacagaagagttttgtccaatgggtttgtttcattagggaaggaggatcttcagctcatgtatagtgatggtgataaggcttttggtacatccactgatctctgcgttgatgagagactaagaattgcatctgatggcattatttttgtaagtatggagatcttccgacctcagaaggaacatgggttagcgcagtcaggtttgaaaggaaaatttaagattaccacaagatgtctatggcttgataatggaagattattggacgcgctctacaaagcagctcatgctgcattgtcaagctgtcctgtgaattgtccacatagtcacatggagaggatggtagctgaaatcttgaggaaaatggtacggaagtatagtggaaagaggcctgacgtcattgctgttgctacagagaacaccacagcaggtttctcagaacacctcgacactaaagcatctggaaattttggaccgtcctcagctactagccacctgagcaggagtccagctacgagtcttgaaggcagttataaaacacacccagacaacccagaggtggatgctgaagaaatccttcccgagactgtgagaacaacacccgacgatgcaaccacaagctccaatggcgaagcattattctcttcagatttacatcagcctaaaacattggagcacttttgggagtcattcaaatcccctacagctgtcaaaattgcacggatcgtcaatgggggggacaaacaaaatttcggcaagattggcataatgggtcaggactcattaatccagtcagctcctgctccagttaaatcctcaaaacggaacaagtggaaacctgaggaaattaagagcttaatacagatgcgtggcgaaatgaatgagaaatttcagagcgtgaaaggaagaatggtactgtggaaggagatttctgataccatgttgaaccaaggagtaagtcgtactccggcacagtgcaaatctctatggacatcgctagttcagaaatatgaggaaagcaaggatacggaaagcatgaagacttggccgtatttctcggccatggataagattctatcgcagcaaggggagatggcaaccaaaggatagaaaaaggcttgtagcttagtggtagaaatttagaatattgattggtatgttgcagcagagcccagtcagtctagtaatataaagatgaaatgtctgtctacagtgcctggtgatctattgggatcggattcttttgttttgtgt

SEQ ID NO: 31073 - DNA, 713 bp, Zea mays
  Clone ID: UC-ZMFLB73124H07_FLI
aagaaatcttgcctgcacatgaagaagatgatgtcaatgtagttaaggcaggagatgcaaccggtgaaaggcatgatccgacgccacagagaaggactactgctgcaagagggaacaatgaggaaacgaggacaaagaggcataaaaagggcgataacctagaaggaataatgggaagatacattgacatgagaatgaagcaagctgaggaagaagccacacatctagcaaaagagagggaggaaaaggaagtgagtcaagctgcagacttctcaatcaagaagtgcatatccattcttggtacaatggaagttacaaaggaggaaaaagcaaaagcctacaatgccttcaaagaccttgacaataggcaaattttcttgagtgcctacgatgatgatgctgagtctgcactgatttggttgagaaacgagatggcttagctgaaattacaacaaggactgcagagaaatccagaatcgcttccttttgatgagatactctactgtaacattggaaatctccattccattggccaacagccagttacctatttcagaactagatcattggataactgcattttgttcatgctttaaactgctttaaactgaaatacgttacagctagaactagatcagctgtacatgcttctgcattgaactacattttgttgaacgtggactgcattttgcaaaaaacatgaactttactat

SEQ ID NO: 31074 - DNA, 1587 bp, Zea mays
  Clone ID: UC-ZMFLB73125A02_FLI
ccatccgggagctttggaggccgaatcccagtcaattaattctcctacaaacaaggggaattggtgctttgcataaagagcttccaaaagcgtgtgctttgactggcagcagtgatccgtgctacatcgaagcatatcatttggcagatccaactgatggcagaattaccctacatctaaagattttaaatttgactgagctggaactcaacagggtggacatccgtgttggcctgtctggagcactgtattatatggatggtttctctcgcactgttcgtcaccttcggaatcttgtttcccaggatccagtccaaagtagtgtgactgttggagtttcacattttgagagatgctcgctctgggttcaagttttgtattacccgttttatggaagtagtggatcaacagactatgaaggagattatgcagaagaggattcacagatgatgaggcagaagcgctcacatcggcctgaacttggggaaccggttgttttgcggtgccaaccatacaagtttcctctcgctgagctcctcctaccattagagtgttctccagttgagtatttccggctatggcctagcctaccagccatggtggagtgcactggcacatacacatatgaaggcagtggtttcaaggccaccgctgctcagcagtatgacagctctcccttcctcagtggattgaagtcgatttcttctaagcccttccatcaagtctgctcacatttcatccggacagtagctggattccagttatgttatgcagcaaagacatggtttggtggatttgtgggcatgatgatatttggggcaagtgaagtcagccggaatgttgatttgggtgatgagaccaccacaatgatctgcaaattcgtcatgcgcgcatccgatgaatccatcacgagagagatcaaatccgacctccagggctggctggatgatatcaccgacggcgctgtggaatacatgcctgaggatgaggtgaagagtgtggccgccgagcagctgaagatctccatggagaggattgccctgctcaaggcagccaggccaaaggtcccacccgcaaagaccgatcaagaggaggaagaggagcgaaagcagagcgaggaactagatgggtttggaaaccccaagggcccctcgacgctctccaagctcaccgcggaggaggctgagcaccgcgctctccaggctgccgtgcttcaggagtggcaccagctatgcaaagagagagccatgaaagcgcagtgaggtcgatttggaccgtgtggatcttacgcgcatgtataattttgtatttttccttcgtctcccattctttgcgtgtctatactgctggtttcactcactgtataccgtcgccgatttgttcattgtattctcaaatacttgtgcacgaaaaaacctgttttgtaacatactactgttagggcgtttttaagcttcggtgtgaagatcgattgtacaagagaatccaaatgtcattgttgccttcccagttttatgaaaatgcattctgtaattgaagaattctccccaaaatgccacgatttataaataagaaatgtggaattgt

SEQ ID NO: 31075 - DNA, 1840 bp, Zea mays
  Clone ID: UC-ZMFLB73125A07_FLI
accaccgcaagaagcgcaaggaggccaagaaggagggcaaggccggccagcggaagaaggtcgagaaggaccccgggatccccaacgagtggcccttcaaggagcaggagctcaaggcgctcgaggcccgacgcgcgcaggcgctccaggagctcgagctcaagaaggaggcgcgcaaggagagggctcggaagaggaagctaggattgctcgaggatgaggaaattgctaatttggcatctgcagcttccgcgcagggcagtgagtttgcagcaaaggatgcagcaaaggataaagctcctttaacagtggcaaagagcaatgatcattctgagagatctttctacaaggagcttgttaaagtaatcgaagcttctgatgtgattcttgaggttcttgatgcaagagatccgctgggcacccgttgcattgacatggaaaagatggttaggaaggctgatccaagtaaacggattgtactacttctcaacaagatagatcttgttcctaaggaggcggtagagaagtggcttacatatctgagagaagaaatgccaacagttgcgtttaagtgtaatacccaagagcagcggaccaagctgggatggaaatcttcaaaactagataaaacaaacatcatcccacaaagtagtgattgccttggtgctgagaatctaattagattgctcaagaattattccagaagccacgagctcaaactggcaattacggtgggtattgttggactccctaatgttggcaagagcagtctgatcaacagcctgaagaggtcccgagtggttaatgtcggttccactccaggggttactagatcaatgcaagaagttcaattagacaagaaggtaaagttgttggattgtcctggtgttgttatgctcaaatcttccaacagcggtgtgtctgtagctcttcgaaactgcaaaagagttgagaaaatggaagatccagtcactcctgttaaggagatccttggtatttgcccacatgagaagttgctgtctatgtataaggttccaagcttcagttcagttgatgatttccttcagaaagtatcaactgtacgggggaaattgaaaaagggtggtgtggtggatgttgaagctgctgcgagaattgtgcttcatgactggaatgaaggtaaaataccatattttacactgccacctaaaagagatgctgtggaggactcagatgtagtgattatatcagaagatgggaaagaatttaatattgatgaaatttacaaagctgagtcttcatatattggtggtttgaagtccattgaggagttccatcatattgagattcctcctaatgctccaccggcaattgacgaagagatgctagaggatggcagcaaaccaagtgaacccgctcaggaaaaccgggaggagcaaatgtctgacgcgaacgacccacaaggaagcaagccagccaccgccagcacgcagaacgacaagttgtacaccgccgagggcatactcgaccctcgcaagaggaaagcagagaagaaacggcgcaaggcgaacaggttcagtgtgctgaacgacatggacgcggactacgatttcaaggtggattaccagatggaggacgccgcggatggtgaagacgaagacgctggggatgaagccaaggaggataatgagccgatgactggcgtcgacgattcgtgaaattttggccccttcgtcgtgtatgaggtgatggctaggctcagcgggggttgcaaaattgacccaccaaggttttgtgctcagtttgcttgtttaatgaaaagattatactatgagaaggcttgcgttttacctgttccagt

SEQ ID NO: 31076 - DNA, 844 bp, Zea mays
  Clone ID: UC-ZMFLB73125A08_FLI
cttcgtcacacggtacaaggagaacagatgggatcccaagcggcttatcggctcgggtggcatgccgtcatcacattccgccacggttacagcactagcagtagcaattggattccaggatggctttagctgctccctctttgcaacagcaactatatttgcaagcgtggtaggctatcagttctccattccaacccatgttccttctgaagagcacaagaggttttacttcttcaatcttgattgaaaaaaaaactggtcatttatattgttgtcgcttggatgcaattttcagccttgttggacgttattctgttgcgtgtgggcatattgtgcacacgtttatgctgacttcctccaatttttgaggtctcacgaatttattttttgtgacttggcaggtaatgtatgatgcttctggtatcagactgcatgctggaaagcaagcagaggtattgaatcaaatagtttgtgaacttccttctgaacaccccttgtctgagacaagaccactgcgagaacttttaggccatacaccaactcaggtggttgctggtgcattgcttgggtgtacaatagccacagcaggacaattattcctttgaactacgaaggtgcggcagaaatgttgtagcatttgtatcgcagggacttgagaagaagtttctccagtgttctgctactttaggtattggtaagatttgcatgttggtgctgtagtgttgttgaatgttgtatgttctgatggaatgtggttatatgtcaaaaaggtgacgttcacaggattgctgtacagaacattgttcatggttatgattgatgaaatctaaaatgtgattgaaac

SEQ ID NO: 31077 - DNA, 1648 bp, Zea mays
  Clone ID: UC-ZMFLB73125E04_FLI
cgctcccaccctccgtccgaccgtcctcgacctcccgtcccgccgcctcccacagtcgcaaccctagtcccacccgccgtcctcccgccctcccgcttcccattttcagtcgccgagccgcgtacagcgcacgcactgcacgcgcatcggcacttccagcgacgcgtcgtgagctcctcccttcgacccttcctgtggcgcgtcgtaagctctgtgcaggcgacggcggcgcgctaccagtgacggggggatacggcggcatcgtccccctcggcccctcctccatcccggtgcggcggcgccagcctacagggcaggagtaccaccaagcgagcgcgatggtgagctccgcactgaggcgctgtctcccctgccatgcctctctctgtcatgccttccctccccatccgctgctggccgctgccggcgtcttccgtcgttcattccagtccggggatggtgagactatggacgaattcgaagaacggttgtttgggggcaaggacacagacaaaggatcactctacgagaagctcgatagggctgagaacactggtaggagatacaatatgggctctgggatgggtggtttgactgggttaagtgacaagagcagatctgggttgtccaagggtggtttcacttggttaagtgacagtagcagctctggtttccctgggtttcctgcatctggcgacaggagcaattcaggatggatggatggttatgattcttttaatgatggcttaaatgatacgattgctaatgcggcacgcaacatccaaatggaggaggacgaggacgtcgacggtgactgggaagatgactttgagttcaggcctgatgtgcggtttaggcaaggttcaacgtattctgttcgggaccttgaccttagaaaacctgcagccgcaaagaaccctcctagacgacagtttgaaacaactacagcggaggtactgaagaaggctgattttaggaatgttagattcctctccaactttcttacggaagctggaattatcatcaagagaagccagacccgtataagtgcaaaagctcagcgtaagattgcaagagagatcaaaaccgcacgtgcgtttgggttaatgccttttacaacaatgggtagaagaccattcatttttggcagaagtgcggaggagcattattgggatgatggatatttcggctatgtgaagcagaaggatggtgagcctgttgagaatgaggatgctgagccaaatgtggaggctgtgtaaacattctgaagcatccttttgcaagcgctccgttcagtttcttctggtgccttcatgacacaagtcacacaatgcttgttttgcgtcttcagatcatagcgtagctcagcttgaataaaactgtaacatcacgcaagttttgtgaaactcgtgccttgctcaattgtgccactttagcagacatccccagctcacctcatcctggctggagatcatatgcagatatgaaatggaacgtgggatcagagttttagttgacgctcaaaattttgagatagcagcactgatttcagtttctgttggataatgattgtttggctgttcaacgagaaaaatattgtatgcacgtacaaaacgttagattttttaacaacgaaaatattttcttc

SEQ ID NO: 31078 - DNA, 988 bp, Zea mays
  Clone ID: UC-ZMFLB73125E07_FLI
aaaatcaagattcttttgtaggaagagtgacacctatagctcgtgatgggcttttgaggacaatttgtggaagctcttcatctcctggcggttatgcttctctagcgcaagctaatacctcccaaaccaatggagtttctgccccaggtgtcactcctaggggctatgaatctgctgtaccaagcttgtcacttggaaattccgaaagtacaggcgtgaaacaagtaaattctgcaccaagaatgacacctgaaggccagaagttcctttcgctgggtattgcgccacgaagcccagcactgcgtgatttagtaaaatgccaggccagttcgacactcgttgccatgcctccagcgggcctgggaaaatcacggtccatgaagatcgagggccatgattctctggcaccgagtgtgaaggagccaaaaggcaatggtggtctagcaccaagtaaaacgccaaagctgcatgaacctgtgatagctgatatgagcatcaagagctgtgattctctagcactgggtatcgcaccaaatggccatacccatgatggtccagcatcaggaagtggggaggccaagaaagagcaggcagcactagtaactggctcgcagagtaaatcatctgtaccaagtcttgacgctagcagccatgttaccggggcagcgagcgcccttgtcgcactatcaactctgcgggagaagggcgggcgttagaggagcagcagcagcagcagtgtagttcccgttggatcagatcctttttctctactgtacatgtttctatgtacaggaatcatccccgtcgactctgatccccagtgcgtacggttgctgttggtggccagtcccctatatgttgcttggcagcaaatgttttggttaataattagtttttataaaaggaatattcacccttgttatgttctctacatgtaaattatctgaggtatacttgcattattatgagtgctataatcttttctttt

SEQ ID NO: 31079 - DNA, 587 bp, Zea mays
  Clone ID: UC-ZMFLB73125E09_FLI
ctgatcaggataacgatggccgcattgactatggagagtttgttgccatgatgaccaagggcaatatgggagtcggtcgacggacaatgagaaacagcttgaatatcagcatgagggacgcacctggtgcattctgaaacttaacacgatgtacagcttgtggcctagtcacttcggccctgtttgtttcggcttctggcagcttctggccaccaaaagctgctgcggactgccaaacgctcagcttttcagccagcttctataaaattcgttgcggcaaaaaccatccaaaatcaacataaacacataatcggttgagtcgttgtaatagtaggaatccgtcactttctagatcctgagccctataaacaactttatcttcctccacacgtaatcgtaatgatactcagattcttcccacagccagattttcagaaaagctggtcagaaaaaagccgaaacaaacagggccaactgtcttgtcttgctgccctaccaaaccttctgcaaaattttttttcaagatgtttgtcaggtgtatgtgtggatgtgttttttctgattcaactcttgtgattgattccatg

SEQ ID NO: 31080 - DNA, 1433 bp, Zea mays
  Clone ID: UC-ZMFLB73125F11_FLI
gccggccgcttcccggctctccacgctgcggctcttgcccgattgggcggtctcccccgccgcgctgctcacggtctgccctgcactcgccggtctgacgtcgctccacctcaccgctgtccgccccctatctttccgctggctcaagctgttgccgcgcctcaagtcgttcgcccttgtcaactccgccgccaccgttgactccgcgggctcgagctcggatgacgccgacggcgaggccgaggacgtcgcagggacattgccgctggagaagctgtcactttgcggcatccgctccggcgaccgcgggcttgggtggctgtggcggcggtgcgggagcctcaagtggttgcagctgcgcgcctgcgacggtaccggggacgggcccgcgtcgctggccttcgcgggttgccttgctggcttgctcgcgcttgagcttcgtgcttgccgtgctgtcgccgaccgtgtactcctccttgcagccgaccattgccgcacgctaacgtccctcctggtctatgacggcggcggcagcgaggcccttcaccggttcatccagcagcgtgctgctggtctgcacaccttggaccttcgcctcccgcttgacctgcacaacgatcatctcctcgccattggagctgactcagttcacaatgctacacatggcctagcttcacttcgcctccagagctgcgtccttatcacaggggacggcctccggtccctggcacgcacagccgccggagccggcatagaagagctcgccttggtgagttgcgacgtggtggagcgggagcccgggttgctgacattcctcagtcagagcatgccgcggctccgtcgacttaacctgtcttacaatgagacactgaacgacaaggtgatcggcgccatgctttcatcctgccggaatctcatcgacatcaggctcagggggtgccggggcctgacgggaggctcgctcctctcgctgcttaggcactgtgggcagtcactggagatccttgacatctcccgctgtccgggcattgctgtaggtaacgttgagctctttgcccagcgcgccgctaggttgaatcatgtgatcatcgaggagagcgcgatgtcggaggaattgaaggcaatcgctcagaaaaaaggcatgaaggttggctcattgccgtgcgaaggaggaccattctgaagtaaggttatatctccttcagaatgcagttccatgttctgtgcaactcgatttgtgaatgtaaccttcactggaatgttaataaaatattgctgcttagtacttgtgtatgcagctttgtatctgccttgtaagcttattatgactagcctcttggtgcctgcttgacatgtaaattgagcgctaaaggtgtgctgttgtatatgttcaacaattgccatggaatagtacagaaaattcaaaccaagag

SEQ ID NO: 31081 - DNA, 654 bp, Zea mays
  Clone ID: UC-ZMFLB73125G05_FLI
ctcagtgccagccgccgtgcgctcgctctctctgtccctcaaggccttcgccggcgaagagcgcctagtcacccaccaggatgaagtttgttgctgcttacctgcttgctgtccttgctgggaactccagcccctctgctgaggacttgacggccattctggagtcagttggctgtgaagttgacaatgaaaagatggagctcctgctgtcccaactgagcggtaaggacattaccgagctcattgctgcgggcagggagaagtttgcttcagtcccatgcggcggcggcggcggtatggctgtggcagcagctggccctgctgctggcggagctgctcctgcagctgaggcgaagaaagaagagaaggtggaggagaaggaagagagcgacgatgacatgggcttcagcctcttcgactgagctgtgtgggcagtcatcacatcagagtagtttgttttgttttgacttttgagtcgtggaaccagaggaaaatcgtagtcgttgcttggactttaacctcgttttatgttggaaactagtttgaaaggctcctactgtctttatatttggtaattcagccgtaggtcgacattgcctccagagatgttatgaattggtcaggtttcctggctgctcactgttatgttgttac

SEQ ID NO: 31082 - DNA, 1240 bp, Zea mays
  Clone ID: UC-ZMFLB73125G09_FLI
tcgccgctgctcaactgcgggcgcgcgccggctgcggcggcgtcggtcgagcacctcgcggtggtttcgccgttgttgtcaccggcagtggcggcgcctaggcatgggccggtgctgtgccgcgccatgtccgagggggacctcgccgcgccgctcgtgcccaagaaggacgatggacacgggagggcgccgaggctgtccctgtccgcgtccttgtcctcgtccgcctccatcttcgtcgaggaggaggacggcgagggcgaggaggaggaggacctggtcgcggtcgcgggggccggcgtggacgtgccgctgccgctgcgtcggctgctgacgaacacggggctggacgtgtccgccgccgcggcgctggcgttcgtggagcagggcgtcgggggcagcggcgggggcgggaaggcgtgcggcagcagcggcggcaagggtgggatcggggacggcgacggtggcagcaaccgcgccgccacggacgcccactaccggcagatgatcgaggcggacccgggcaactcgctgctcctggtcaactacgccaggttcctcaaggaggtggccggggacgcggcaagggcgcaggagtactgcgagcgcgccatcctcgccagccccggcgacgccgaggcgctgtcgctctacgcgggcctcgtttgggagaccagccgcgacgctggccgcgccgaggactactacagccgcgccgtccaggccgcgcccgacgactgctacgtcctgggctcttacgccgggttcctgtgggacgccgaggaagacgaggaagagaactccgagcccttgccaccgccttcgctgttccagggggcagctcagcgtccttccatcacagcggcctcttagatgatcgtgaactcgatctagatctcaccaccgcctgtgaacgaagctgaatctggaaccctggagagtggagagtgactgggtgataaccgtgcagaaacccccgacgagtgactcacatcgccggcaggctcctcgccgcttgtgaactgaatcacggcacatgtaaaactgaatctggcagagcacacacgcgcctaagcctattagcgtctatagactttgcagggctatgtatagtagatatgtagattgagaccctgctgaacttgtacgtgcagtatgttcctagtcacttgtgtatcattactagtaatgcagtatccctcgtgaaataaacgtcaaaaccccttcctgctgcttaaag

SEQ ID NO: 31083 - DNA, 1238 bp, Zea mays
  Clone ID: UC-ZMFLB73125H02_FLI
gttgtaatctagatcaggaggtgttgatcaggagcagctaatcaggagcctcatcaaccaaactgcagggaaagcattataataccatagcaacactatgtgacatgtatgctttcttggtgttcctttttgtcatttttatctggtgttatcatctagccatatctatcgtaacaacacccaagaggtccgtgaatatgatgggttagcgtttagtactctatacaaggtatttaatctcaaacatattctgaatttctgatattagagataattttctttttctttttaatttattcaccttatatagagtactggactgcaagccattgatgagattgtccccaaatctatgacgagttcctcaagctctataagtttctggatggattcagttttatttacatcggtgcatggttgccttcagttttaaatcactatctatctactgacggcgagcagttgatcgtcatttgttggtttagttttcacagattcaccaaaaatccttttcaagtcccccccttttgaccaactcactgttgttttctattgttgtaatctagatcaggtgttgatcacgagcagttgatcaggagcctcatcaaccatactgtagggaagcattgtaatatcataacaacactatgtgacaggtatgctttattgttgttcctttttgtcatttttatctgatattcgttcttctggtatcacagcgctgacaacattggtccgtgagaggtaagttgataatggaactcaagcctctgcagatgttaacggttgtttcagtgctatgatttaaaccattctaatattcgttcatatcttgcaggcaaatgttggggattgtcgtgcagtcctgtgttggaaaggaataacagtggagatgtcaaaggatcacaagccgacatatgacgcagagcgtcaaaggcatcaaagatggctacctcaacggcgtactgcctgtgacctaggctttgggggactgggacctgaaactacatcaaggctcgccatcgcctcttattgctaaaccagagatccgctagatgatcctgatggaagatgacgagttcctcatcattggctacgatgggatattcatgatgactagccagaatgttatgagcagtccgcaagggactccggaggcatgatgatttgtgttccgtcgcaacgtatggtcactctattatcacatatatataagtccgcatgatactaatggttgt

SEQ ID NO: 31084 - DNA, 1633 bp, Zea mays
  Clone ID: UC-ZMFLB73125H10_FLI
tgggcgcctcggaggaccaggcgctggaggctaggaactccaagacggtggtggcggtcatcctcggcggtggcgccgggaccaggctcttcccgcttaccagacgcagggccaagcccgcggtgccaattggcggcgcgtacaggctcatcgacgtgccgatgagcaactgcataaacagcgggatcaacaaggtctacatcctcacgcagttcaactcgcaatccctcaatcgccacctctccagagcctacgatttcagcaatggcgtggccatcggagacggattcgtcgaggttctagcagcaacccagaggcctggaacggaggggaaaaggtggtttcagggtactgctgatgcagttcggcagttcgactggcttttcgatgatgcaaaatctaaagacattgaagatgtgctgattctttctggtgaccatctctaccgtatggactacatggactttgttcagagtcatcggcaaagaggtgcaggcatcagcatctgttgtttgccaattgatggcagccgggcatctgattttggcctaatgaagatagacgacactggaagggtaatttcattcagtgagaaaccaaaaggagacgaattaaaggcaatgcaagttgacaccacagtgcttggcttatcaaaggaggaagcagaaaacaaaccttatatagcttcaatggggatctatatttttaagaaagacatactcctaaaccttctaagatggcgttttcccactgcaaatgattttggttctgaaataattcctgcttcagcaaaagaaatcgatgtaaaggcttatcttttcaatgattactgggaagatattggaactattaagtccttctttgaggcaaaccttgctcttgctgaacagcctccaaggttcagtttctacgatgctgacaaaccaatgtatacatcacggagaaacctaccaccatctatggtcaacaatagtaagatcactgattcaatcatttcccacggatgtttcttggataactgcaggatagaacatagtgttgttggagttcgttctcggataggctccaatgtgcacctcaaggatactgtaatgcttggcgctgattattatgaaactgccgtggaaagaggagagctgcttgcagaaggaaaagttcctattgggattggagagaatacaacgattcaaaagtgtatcatagacaagaatgcgaggatagggaagaaagtggtaatctccaactctgaaggtgtagatgaagctgatagaacttccgaaggcttctacattcgatctggcatcactgtcgtactgaagaacgcgataattgctgatggattggtcatatgagctgaaaaggtctcacaggacgggtatttgccgcacaaaatatcaataggagttctttgttagttttacaataagatgctgtatagcagtcaacaggttattcttgtctatacaagatacctttgtctacaaatcttgtctcaccatgttgtattcgactcaaacaatgttgcagtcatggacattgtccgtttcaaattttcttccttgcacatttacacaaaccttttcaatttttatttcttgctaaacaataaaagctgttgttctaatcagtatgc

SEQ ID NO: 31085 - DNA, 1853 bp, Zea mays
  Clone ID: UC-ZMFLB73125H12_FLI
aacacgcgcaattgctgctgagctacttactacacacaccgcagcggtgcacaccacgtccacagtccacacgcgcgcgcctaggcctagcgatggagtgacaagcatcgggttgcttccggcgatggccattgccaaccccgccccccgtctccttcgtcatgcgtacaagacatccccacatcaccccctcctccaccacctcctcgccgcaccgcaaaatccacctccccttcccggccctgcattgcatccgttcttcttgcttgcttccccggaacctcgcgcttggtctgacgcaacgcaacgcgccttcgggccctgagataaaatctcccagcgctcgcttgctccgccaaaattcactccttggaatttcctgagctgtgggaaattttctcttttgttttggttcttctttgtccccttaggtcgctagcatttgtgcgttccgccgaagctcccttgtttgatccgtcctagttgcggaagcgcctcttgatttggttctaaaatacatcgtttcttgttttcatccttccgaagggggggaaatcatcttttttgggccctgatttgagtgtgtcacctttggttccggcaatggggaacagcagcagcagcaacagacgtccgccggggccctcggagccggcggaagagctgagctcatacgaggccgcgtgccggtcggacccggagctgcgcaccttcgacacgacgctgcagcggcgcaccagccgcgccatctcgacgctggccgtgggcgtcgaggtgcggtcgatgtcgctggactcgctccgcgaggtcaccggctgcctcctcgacatgaaccaggaggtggtgcgcgtcatcctcgactgcaagaaggacatctggaagagccccgagctgttcgacctcgtcgaggactacttcgagagcagcctgcagaccctcgatttctgtaccgcactcgacaagtgcctcaagcgcgcccgcgactcccagctcctcctccacgtcgcgctccagcgcttcgacgacgaggaagacatcgacgccgccgccgctgctccctccgcccggtacgcgcgcacgctgcacgagctgcgccagttcaagacggccggggaccccttcacggacgagttcttcgccgcgttccaggccgtttaccggcagcagctggcaatgctggagaagctgcagcagcgcaagcaccggctcgacaagaaggtcaagaccatcaaggcgtggcgccgggtgtcaagcatcatcttcgcgaccacgttcgcggccgtgctcatctgctccgttgttgccgcggccatcgccgccccgcctgtggccgcggcattggccgcggctgctgcagtccctctggggtctatggggaagtggatcgattcgttgctgaaagggtatcaggacgcgctccgcggacagaaggaggtggtgagcacaatgcaggttggcacattcattgccatcaaggatttggacagtatcagagtcctcatcaaccgggtggagctggagatcagctcaatggtagactgcgtagagtttgcagagcgggatgaggaggcggtgaaatttggggtggaggagatcaagaagaagctggagaacttcatgaagagtgtcgaagatctaggagagcaagcagaccggtgtagccgggatatccgtcgtgcaaggaccgttgttctgcaaagaatcatccgacatccaaactgaaaaataaagggaaatgtaaggtatggatgtcttaatatatagccatgttactcttaataatgttgtgatggaatgtacataagagatgcacctttaggaaagtgtgaatgagtcaaatcgatttcattatc

SEQ ID NO: 31086 - DNA, 803 bp, Zea mays
  Clone ID: UC-ZMFLB73126A07_FLI
gggctcgtctcccacaacacggtccactaaccctagcgacagcctcggctcgtttgatccccgcggggagctctagttccgccaagcgtgcgtaccggcgtccggatccgggaccgaagatgacggagtccctggtgcggaacaagccggggatggccagcatcaaggagatgccggtggtgcaggacgggccgccgccgggcggtttcgcgcccgtgcgcttcgcccgccggatccccacctcggggcccagcgccaccgccatcttcctcaccaccttcggtgctttcgcatatggcatgtaccaggtcggccaggggaacaaggtccgccgggcgctcaaagaagagaaaattgctgctcgcagtgctatactgccgatgctccaagcagaagaggatgaaagatttgtcaaagagtggaagaagtgtcttgaggaggaggcgaggatcatgaaagacgttccagggtggaaggtcggcgagagcgtgtacaactctgggaaatggatgcccccggctactggtgagctccgccctgaggtttggtaagggcctgttgcaggcactgaatgccatcatgtcacgggggcacggataaagcttcatttttcattaaggatcagctgtttaaagacctgtatttgttgtacttgaaatctggctggttaataattggacatgtaaagccgacgtttacattgatgtaacgtgttcttgtctgctattgcttcccagcctctggtgtttcttcctgtaagtcattccgaacatgaatccttgttattgaagaaagtatgaaat

SEQ ID NO: 31087 - DNA, 2381 bp, Zea mays
  Clone ID: UC-ZMFLB73126C02_FLI
gaggttcatcgttctgctctggccgccgcgcgccggcgcagatacgtttcatggtaccctcttgcatcgcactcccacatggcggctgcggctcaagctaggtcgtccttcctcgtcctgctcgtcgccacgtggtcgctgtcgccgcggcttgccggggcctccacgtccacggaagcagcagctgccggccgtggcgttacgctacgcctcgacgcgagccaggtggtcgtggacaatggcgcggtgcaggtggcgctgtcggcgccggagggccggatcaccggcgtcagctacagcggcgacggcgagaccaccaacctgctggggtacgacgccggcgagggagactccggagggtattgggattcggtatggaactatcccggctctggtctcccaggacagtacaatacgttggatagcacagagttcaacgtagtgtcctcaagtgaagatcaagtggagctttctttcaggagcacatacaacccgtcgcatcgaaacagccttcggctaaacatcgacaagaggctggtgatgctcagaggtagctctgggttctactgctacgccatctttgagcatgacagggcctaccccgctctcaacatcacggaggctcggctcgtcttcaagcttaacacggcaaagttcaattacatggctattacagacgatatacagaggtacatgcccagcgcggcggacagagaagagcctcgtgctgtcccgctggcttacaaggaggctgttctgctggttgaccccaaggaaccccagttccgaggagaggtggatgacaagtaccagtactcgctggacaacaaggacaacgttgttcacggatggattagccgcggcgatcccaacgccgtgggtttctgggtcatcactcccagcaacgagttcaagagcggcggccctctcaagcgggagctcacctcccacgtcggccccacatccctcactatgtttatggggacacattacgttggcaagtacatggtggccaacatcaacgacggcgaggcgtggaagaaagtgctaggcccggtgttcatctacctcaactcaggtcccagcagaggtgagctctgggaggacgccaaggctcgggcgcgggcggaggcggcgagctggccctacagcttcctcgcgtcaccggagttccccaaggcggccgagagaggatccgtcgtaggaaggctcctggtcagggacagccacgagaagcatggcatgcctgctgggtcgtcggccttcgtcggcctcgcctcgcctgggccgcccgggtcctgggcgacggagagcaagggctaccagttctggacgagggccgcgcccgacggcaccttccgcatcgccaacgtcagggaaggagtgtacggtctgtacgcgttcgttcccgggtttctcggagactactgctacggttcgccgctgaccgtagcgccaggccgtgccatcggcgtcggcgacctcgtgttcgagcccccgaggtcgggcccgacggtgtgggagattggcgtccccgaccggacggcggcggagttctacgtcccggatccggaccccaggtacgtcaacaggctcttcgtcgtccgagacaggtaccggcagtacggtctgtgggagaggtacgccgacctgtacccggacaaggatctcgtcttcaccgtcggcgaaagcgacgaatccaaggactggttctttgcacacgtcacaagaaaggtagggcaggttgccgtgccaacaacatggcagatacggttcagtctggaccgcgtcgtggcagacgacgacacctacacgctgcggatctcccttgcagcttctcaaatgtgcaggttgcaggtgcaagtgaatggggatgcaaggagaggcagggattttacaacgcccgacatgggcgatgacaatgcgatcacacgccatgggatacatggctcacagtggagccttgagtgtgtggtcgggggccacctgctacgccaaggcgataacaccattgacataaaactcatcgcacaacaaggaccgaaaggtcctgccatggtcgccggggtcatgtatgactatatccgcctagaagggccaccatctagaggcgttgcctcgagccgcattccagcgttctcccttcaccggattttgttcctgttagccttcctagtcatgtcctagtatgtctagctatgtggccatctaacatgtagcattttttttgctagttgttgtatgaaagcaagaaatatgatgatgtagtacaagcaatgttattgtggagagaatggaggcccatgctacactgattaagtatgtattcaacagatcatcaattggccggagataagggatcatgctaaatgttcacatgc

SEQ ID NO: 31088 - DNA, 1169 bp, Zea mays
  Clone ID: UC-ZMFLB73126C03_FLI
ctaggatctagtggtccaaacaaccaaacagccgctatatagcggactaggggctcgttggagagaaaacttattacaaccgaccaacgcgctttgtaacgcctccgctgcaatcagcccccgcggcgagcttgccctgcccctgattgctagttctcgccgttacgtaaggcttcttggccttgcgtcctccgtctttcgttgctgatacatcgaggtattaaagaagctgcctggttccgggcagcagaggtcgccgccgcctgcagcaatggccgacttctcctggctcacggtgcttggcttcctattcctcaccttcaactcaggcatggcgatttatcggtccaacggtgacgccggctccgtcgctttcgtcgtggtatcttatctcgacctggtggccctgttcgcctgcttgcgctactacgagcagttggatcagcagcactcccaaaagcgcgcgagggtcaaggctggggtttggagcctcacgaccctccttactatcatgttcagttacaaggtggctgagattatgcccctgccagtcaaacttgttgtctggtcgatggcagccgctaccacctgtggcggcttctacgctttcttcgtccacagcgagaagcctgtcatgccagcggtggcgccacggcccgccgcggccaaggatgcagcctccaactaggttcgtttgccaccacaaggcgcatactgccggccttggttcggcaccgcgcgttagatcccatatgtaacgcgcggtagctttaagattattatgtccagcagcttattcatatattatacatatattcaaatttcactctgtgaatagtagtctaaaatacagtagtgttttgagtaaactatggataaactgctggacaaggtctaagataagtgctgcgtggtggcaacaaacgacacttagtcttgtttggtggcaatgatattggaggggctaaagttttttcgctcctaaacaagctcctaaacaagctcctaagaatcttacgtgttatgttgcattatggaatatctatgtatctgcaaactctctgtagtctgtatgtacctcggatgtgctctatgtggctttgtaattctgaacggaggaagtaataataagataaatggatggcgtaacaagataagttgctttgtgc

SEQ ID NO: 31089 - DNA, 2284 bp, Zea mays
  Clone ID: UC-ZMFLB73126C09_FLI
ctctgggtgactcttgtcttccacacatcgccacgccactgattggctcgcgattatgtgattcgtgaaccttcttgccatggggatgtctgcagcgtctcatctctgtgcttcttcgtccctgcgagctttaaccgtgttgtttgtgttggcagcttttgtttcagatgtagaggggcgacatcgtcgtcatgtctgtcctccttatttctcctgcggtggtttaagcaatatatcgtatccatttcgtcggcaaggtgatccatctgggtgcggtgtccaatcgtatgagctggtttgcacggatacagatgctacaattcgcatcggcagtggaacatacaaggtgcttagcatcaactccacatattcttacttctgggttgttgatgccgacctggacatccagagcagttgcccccttccccggtgggattaccctgctcgttggatcaatcgcaactcacatcgttggaggattgagttcagccattattatctctattcttctttttatactgtttcgaggtgggctatctttgtgaattgttctcagccaatagagaacaatgatatatgtaataatatatatgatgacgatgtgtatgggccggtgtcttgcttgagcaattcttctttcatctacttgctggtaactgacaactgggatgttatttctgctggggatctggagccttcatgcggttacctagccaagactcctttgggtggtccaggcatgacggtgccctcgaatacaagctatccagatgttgttaagttcatgaggaatggatttgcccttggatttcctttttcgattagatcttaccccaccatcagagaatgtctcgcagagaatatgcgtactttccataaagaaccaagaaatagtacaggcatcaggcaacagatcttggacattcttacgttcgagacattatggttttgtgttattgaacaacttggatcaactaataatggtgtcaaatctgttctcatcgacatcatccaacaaataccatatgttctttccagtctgaaatctgcacatgttatttgcaggttcgtattgatgccgctggcagtatttgtcttcctagcctataaatactggaaaacacagataacaatagatgcagttgagaagttcctgcgaatgcagaatatgctcgttccgatgagatatgcatacacaaacatcattgctatcaccggccatttcagagacaagctcggacaaggaggctacggtactgtatacaagggagtgctactgccaggtgaaattcatgttgctgtcaagatgctaggcaactccaactgtaacggagaagagttcatcagtgaggtcgccaccattggcaagatccaccatgtcaatgttgtgcgcctcattgggttttgctccgaggaaaatattagggcacttatctatgagttcatgccccgtggatctctcgataagtacatcttctcgtcggagaagacattctcatgggacaaactcaacgagatcgctctgggcattgctagaggtcttaactacttgcatcacgggtgtgatatgcagattgtacactttgacatcaagccacacaacatccttcttgatagcaactttgttccaaaagttgctgattttgggctagccaaactgttcccaagagatgacagtttcgtgccactgagcgctatgcggggaacgataggttatatagctccagagatggtatctcgaagctttggtatcatctctagcaaatccgatgtgtacagctttgggatgctactattggagatgacgggcgggcgaagaaacgcagatcctcatgcaggaagctccagtcaagcatactacccatccttggtgtacaggcagctgagccaaggtgatgcgaacaggatcagtgaaggtgttgatatgcacgagttagagaagaagctatgtatcattgggctttggtgcatccagatgaagccgcaagatcggccgacgatgagcgaagtcatagagatgcttgaagctggtgtcgatggcatccaaatgcctccaaggccatacttttgtgatgaagagggtgacagttcttactctacaatctctgaactcgatacaatagaagagtagtagtggtagtaaaatgcacttgtgtctatgtgctcttaatgtatcagactattaagattgcaaggttgccataagctaaggtactggttgtatacttttattgagagtgtgataatgtgatatcatataaaatacctccatgaagttttttac

SEQ ID NO: 31090 - DNA, 646 bp, Zea mays
  Clone ID: UC-ZMFLB73126D09_FLI
tcgtagtccacgacaatcctgcatgctctagacctacttctctgaaaggtgcagctggcaaaatttattatcggagcaaagaaggcgagaccatccgtgtccctcccttttgtgctgatcaaaccatacagcatccatggcgacatcaccctgaacgacatcaacgagaagatccacgccccttcgccgcataagatcaggcacaggagcgacgaggagcccgacccgctccaggcctcagcagcgatctcagggaaacctgtggcccacaagacgaagatccacacggagggggggaagggggaaggggagcatcacgatcaccagaaccaaaggctaggctgatgaccatttgtgtgacgctggcgaagtggctaacagttgattcgcctttgcatttttggcgctctgggctcgttcccaattggttttgtggcccaggtgatgcatggccttagcagcgtgcttgtagcgttttctgttcttgctgtttactagtatcttacgcacgcgccttagcgcacgtcataggcagcgctgaatcgtgtcaatgagttaatataaaaatttaataaaataatccaaagaaaataagaatggttcatatgtagtggtactactaataatgaattgcacaatatactgt

SEQ ID NO: 31091 - DNA, 912 bp, Zea mays
  Clone ID: UC-ZMFLB73126D11_FLI
cgagaacaagggcaactgacgcggtcaccctcgcccccaacacagagagaaggtctgctctccaccggatggactcccacggcaagcccaagcccgccggttcgacgccgccgacgccgccgaagccgccgaagccgccgacgccgccgaagccgccgacgccgccgacgccgacgccgccgacgcccgaggcgaggaaggggttcatgcgccgcatcttccctttcctcctagccgccaacctctttgtcgtagcttatgtcctcgtgcgggccaaccaaaaggactcagcaaagaaggacccaacgactgatcctgctactgcaactgctgggaagcctgctgagccagtctctatccccagaaaggagctcccaccaatccctgaagatgaccagcgcaagctctacaaatggatgctggaagagaagcggaagatcaagccacgcaatgctgccgagaagaagaaactcgatgaggagaaggcccttctaaaagagttcatccgagcaggatccctcccaagcttctaaaagagatcaagccatttgggtctcttgtgtctgatgttcagccaagaagatgattgggcctgattggattgtgtacaaacacagtactgtgctatcttgtaaactgatgtctccatgatgtagcctcctcgagttcaaaggttgtgtggatgcaaactagtgttgtgtgcattggttctagagattcttcaaggctaaaaaaactaaagtgtgtcaaattcttctgttccattccatccgcaatttgctccgttgacaattttatgttctgtggctctcgtgtgatgagtgaactcatcgcgtgtgatgagctcatcgattgccatgtactgtattgttgagaccccaactgggccccaaccctatttagaatgttctt

SEQ ID NO: 31092 - DNA, 1563 bp, Zea mays
  Clone ID: UC-ZMFLB73126E06_FLI
atcttgtctggtcctgtcttggctccccgccaggaatagcgcaccgagatcccttgcgcgcacggaccagcagatcgcgcgcgggagtgagagggcgacagggcgtggccgcgaggtgggcatgggatcggagggacgggtctggaatggcgcgggcgtggccgccggcagcggctatggcggcagcgtcgaggcgaaagcgaccaccgcggcgcccgcggacgttcccacgtcggcggcctccgtcgacatctcgctgccgctcccggagatgtcgcctcacatcataggtctctgcaaggagttggtcaaagggtggtcgtcgattgacagctcgcgcttctccatcgagaccgtgtctgggggcatcaccaatctattgctcaaggtttctgtcaaaggaaacaatggcaatgattcttctgttactgttcggttgtatggaccaaatacagacttggtgattgatcggaaaagggaattgcaggcgataccgtatctctcagctgcagggttcggggctcggctgcttggaatgtttgaaaatggagtagttcagtcattcatctatgctcgaacactgtcacctgcagacatgaaagaacctaaaatagcagctgaaattgccaaggagctacgcaaatttcatcaagtagatataccagggtctaaagaaccacaattgtggaatgatatattcaagtttttgaagaaagctgcagcattgaagtttgaggataacgagcagcaaaagagatatgtaaagatctcatttacagaaatacaagatgaagttaaagaacttaaggatctcttggacattctgcatgcacctgtggtttatgcacacaatgacttgctttcaggaaatctgatgctcaatgatttggaagggaagctatattttattgattttgagtatgggtcatacagctaccgtgggtatgacattgcaaatcatttcaatgagtatgcaggatttgactgtgactttaatttgtacccagataaagatgcccagtatcacttcttcaggaattatctgcatcctgatagacctagtgaggcacaagatatggaagtgctttatgtggaaacaaacactttcagactagcatcgcacatttactgggcattatgggctcttattcaggcaaaggtatccccaattgactttgactatcttggatacttcttcttacggtatggtgagtacaagaaacaaagggactcctgcttcgccttggcacaaagtttcctctccgggctaagaaatggctagagcctgagaatctggtcaagggtttgcactgttgtacgcatactcggggcgggtacgcgttgtgatcatcgtctgctactcagaaactctattatagtggtggtagcagcctcattttgttgtatctgatggtagtttcgtcatcgcctgataggaaagtctcatgatcgccctcgggaacgcagggtggcgagatctgtacttatatttgtaataaacacaatccggatgggttctgtcctgtgcaatttgttgtgcgcataagcattccgtgtttttat

SEQ ID NO: 31093 - DNA, 793 bp, Zea mays; identical to SEQ ID NO: 30240
  Clone ID: UC-ZMFLB73126E07_FLI

SEQ ID NO: 31094 - DNA, 1079 bp, Zea mays
  Clone ID: UC-ZMFLB73126E08_FLI
cttcgatctcctccatctcccttcatcctctctctcgctgtttgaggagaactgcctgcccctgctccctcttccgctcctccccgcgccccgctcgccatccccagacttcatttcaggccgggatggacgactacgcccgggagatgatggagctcaagacgctcgtcacccgcaccctcgagaagaagggcgtcctcgccaagattagggctgagctaagagcaagcgtgtttgaagccattgaagaggaggatcgggtggagaatgatgatggagggaaccctgctttgcttggtagctgtaatgaccgagctaagcaactgcatgcttcaccttcaggtaggttactaactgcacttgtatgcgaatacttggagtgggcgcaactaagtcacacaatgaaagtttacttgccagagtgtaacctgcccaaggacttctggaagaatgaactgaaagacttctctaacaaaagtggagctgaagggagcaggagtgctgaaagtggtccaatgcttttagatgttctcgaaggttatctgaaatatgagaatttgtctcaaacaaggatgggcggcaggaggatgatgagttcagaatctgatccatcactaaatgttgaacatcggagcatgaggagggcaccattatcgtcagctgggaacctgcctcctatggggaggccaatctcttcgtcgcagcaggcatcagatcgcagagggggatcttcagcttccaacacaaggaaagatgagtacaactggagatacgataccaccgatgatatatctgaagaggtgctacgggcatcgactgctctagaaagtgttcagctagaccgcaaatctcggaatctgccaacatcttggaggcattcaggggatggcgccgagtaacaacaaggctttggagctggttgcttgacttgaccctgtatcatgtaatttgtatgccaatcatttgcagtgatacgatgcttggattgctgctatcttagagaagtggtaaactggttatgcgtgtttgtcttgtaacgaacaaaacaactttagtgttagtttcatgttgcaattttc

SEQ ID NO: 31095 - DNA, 1003 bp, Zea mays
  Clone ID: UC-ZMFLB73126E12_FLI
gtccaggccaacaccgtggtgcagtccctgaacgccttctcgtcggtggcgcacatctcagggatgggcctcaaggtggtgccgatgatcgcgcccttctcaaccctccgggccgtcaacctctccagcaacctcatcgttcatatctcccctggatcgctgcccaagggcctccactctcttgatctgtccaggaacaagattgccagcgtcgagggcctccgggagctcacaaagctacgcgtgctcaacctcagctacaacaggatttcgcggattgggcatggtctgtcgaactgcacggccatccgggagctgtacctggcgggcaacaagatcagcgacgtggagggtctgcaccggctgctgaagctggcggtgctggacctgagcttcaacaagattacgacggccaaggcgctggggcagctggtggccaactaccactccctcctggcgctcaacctcgtaggcaacccggtgcaggccaacatcggcgacgacgccctgcgccgggcggtcacgggcctcctcccgagccttgcctacctcaacaagcagcccgtgaagccgcagcgcatcgcgcgggaggtggccacggacagcatcgcgcgcgccgcgctcagcggctcggacagccggagcatccggaagaggacgtcgcggcggctcacgcagagcccccgctcgtcgtcgttgaccagggcccgtggcggcggcggcggcggttcacccacaccaagaaacacctctcgtcgtcgttgaccagaagaaccaactgcgtgattcgcgttgctctttggagacgggagacggtggcgtgactgcgtgcaggcagactcagacgacaccatgattcggcacggcgccagcatgatatgagacaaaccaagtatataaagcaagtatgatgtgagagaattgcgatgcaacacataatgtacatacttgttagggagatattgcttagattaatactacgaccgatgcatctttgtacctg

SEQ ID NO: 31096 - DNA, 1303 bp, Zea mays
  Clone ID: UC-ZMFLB73126F09_FLI
cggattattctacgggagactcagctgcgtgctttctattcaaccacagaagaaatctcttctctgtttgcgaaacagcaggaacagctgaaagctatgcagagaactttggaggatgaagagaactatgagagcaccttaatgggtgtggatcttaataaagtacctctaaccactgataatgctggtatgaagccagtagactgctcaaaaaatacagtgggagcttcaagtgcttcaccagaaaatactcaggtaagtgaacatgattccagtgacgaagatgccaacatgactgagcagcaggatgatgatggtactgccattggtggcagcactcaaggtctagaatgcaccagtccagaaaggtcagaggggagattgaagtcaggttttcatggcaatccggtttctacagctcctgagagagaggttacagataccgagcaagttcccgagacagatagccaagctggtaatgctggttgcgatgaccaaagatgtgacaacacgggaggagagactatgccactagaagatgatatgctgctcccagataacgaggaacctactgcattgctgaaagatgtagggcagccacaagcaaatgtggttcctattccaatccccggtgatggcgttgggcactgtttcgaagaaaaacatgagggtgcctgctctgagagcaaacgggaggacacacatgctggagccatcagaacgaatctccaaggagcttgggcgatgctacagagcacgatgaagctggaggcagcgtggcaggcgatgctttggtaactctggtgaactcagagggccaggcggctgggagccagaacaatgttgagcgtggcagctccaaaataacccatcatcatcatcatcatcgtcatcaccatcgtgttcttagtgccatgattggaattgttgatcctgagttcaggaagcaaatgtccggcagaagcggagttggaaacgaggaacccatgtctgacgccgagacgggtgagggcatcgaggaaggcgattcagattcaggttcagacggcagtgacagcgaggaggctatggttgaggattctgtcgtttagcttaaacagaagtgactgctcactgtaaatatacctcaattcgttttgtgtacctttcgttgtatcatcatgcgtagcgtaagcccctcgtgtgcgtttgattattttattcgttaagtgtcctcagcagctcgtggtgcatgttgtacgaaatcgaggccttttggtcttcaacacaaataaatatatgtactcacttggtttacaattat

SEQ ID NO: 31097 - DNA, 1552 bp, Zea mays
  Clone ID: UC-ZMFLB73126G05_FLI
atctctccccgactccccctctccctctcgtggccacgactgccgccgctgccgccctacgccaggtgtccaggtcatctccggcccattcgccggcgacgagcaccccactagatcgaccgagctatggacggcctgtggcatctgggggacgagctccgcgggcagcccaaggtggtggaggaccgccagtggtcgctcatgacatccaagctggcagagatcaccaggtccaggggcgagaggacgaacgacctcgactacgccaggatgaacgccgcccccgacgccaagcagtggggcaaggcggcgtcctaccagcaccacgacgagggcaggatggaccaccacgtcggcctcagcctcaagatgaacgatctcaagatgaacgaggccgccgctgccgcagtcatgaagctccccttccgcggcgtgccctacaacgtcaacccgatgtaccccaaggggagcaacgccaacgccaatgtcaacgcgttcaagatgaatgtcggggtgaacaagtactccagcagcacgaacgggaaagactccggcgggaaaagcggtggcggcagcaacaacaacagcggcggcggaggcaacggcaatgggaccgccaacggcagttccgcagttgacaagcgcttcaagacgttgccgacgagcgagatgctgccgaagaacgaagtccttggtgggtacatctttgtctgcaacaacgataccatgcaggaggacctcaagaggcagctttttggattgccagcacgatatcgtgattcagtccgggcaattactcctggcctgcctcttttcctctataactacaccactcaccagcttcatggggtatttgaggctgccagttttggtgggtctaatattgatcccactgcatgggaggataagaagtgtaaaggtgaatctagattcccagcgcaggtgaggatccgcgttaggaagctgtgcaagccgttggaagaggattccttcaggccagttttgcaccactatgatggcccaaagtttcgcctcgagctctccatcgcggagaccctgtccctgctagacctatgcgagaaggaaggcatctgagctgttggctgcctcgtgaggttctagtaaatatcaatcatccttgtatgttctgtagatggtggttggcaatgttgtttatttttcaagcgcaagctgctgccggtctcgttttccctgtcctggatggaagcaaagggacctggtactttgaaggccccccctcaaacataagctgtgagcctgtcagtgcacgtgtccgccgttgtcgtcaagaaccaaaccaaatcatgaaatcttgcgccgacggagagttggagcgtgtatgttttgctatctctatctacatgtctcagtagagtggatataccctggggtccccaaaagatgggggcctgtatgtaacactacgtgtaatggttaaggtgaatgtgccgtgaggccccccaaaagttggagtgtgtatttttgttgtcaccttgaaccgactttgcgtatgcttttttttagtgctgct

SEQ ID NO: 31098 - DNA, 1813 bp, Zea mays
  Clone ID: UC-ZMFLB73127A05_FLI
cctctccatttccgccaccaccccccctctctctctctcttcttcttcttcaatcctccctccccgcgccggagttggaggagggagaggggacaagctttccggcgccgacgccgacgcggacccggcgccgacacgatccggtggatcaagtgcatcacacctttagggaggccccttggacagcagtttgtgctgcaaattctatatagctctgtcgcagcatggcctcggtgggcgtggcacgctcttctttgggatttcagaatggcacaagttctagcagtgacccagatcgtcttcccaacgagttgggcagtatgagcataagggacgacaaggacgttgaagatattgtagtcaatggcaatggggcggagcctggtcatatcatagtgaccagcattgatgggagaaatgggcaggcaaagcagaccattagttacatggctgagcgggtggtaggtcatgggtccttcggaaccgttttccaggccaagtgtcttgaaactggtgagaccgtagctataaaaaaggttcttcaagacaagagatacaagaatcgtgagctgcaaaccatgcgagtgcttgaccacccaaatgtggtggctctaaagcactgtttcttctcaaagactgagaaagaggagctttacctcaatttggtgcttgagtatgtaccggagactgctcatcgtgtcatcaaacattacaacaagatgaaccagcgcatgcctttgatttatgcaaaactgtatatgtatcagatttgtagagccttggcatacattcacaacagcattggagtgtgccacagggacattaagccgcaaaatctcctggttaatcctcatacccatcagctaaaattgtgtgactttggcagcgcgaaagttctggtaaaaggcgaaccaaacatttcttacatctgttctaggtactacagagctccagagctcatatttggtgctactgaatacacaacagccattgatgtttggtctgctggctgtgtgctcgctgagctgcttctaggacagcctctgttccctggagaaagcggtgttgatcagcttgttgaaatcatcaaggttctgggcacacccacacgtgaagaaattaagtgcatgaatccaaattataccgagtttaaattcccgcaaatcaaagctcacccatggcataagatattccataaaaggatgcctgctgaagcggtagatctcgtgtccaggcttctgcagtactcaccaaaacttcggtcgactgctttggaagcattggtccatccgttctttgatgaacttcgggatccaaacacccgcttaccgaatggtcgttttcttccgcctctcttcaattttaagccccatgagctgaagaacgtgccggcggatttcatggtgaaattggtccctgagcatgcacggaagcaatgtgccttcgtagggtggtgatctctggataagaggatgacgactcgatgattagctgaggaccaagttaatgtctgttagaaactgccggagatcgacattgccagatgtggtgtggtataagataggcaatatgtgtgattattttttgttcgaggttatcaccccccttgccccagaaaagatgagaagatgtcgatgtaacaagccctctgcgcttctgtaagtagatgagtgttgctgcatgccccctgggtacatgtatcggtttgagcagaattctgtttgcctgaatcgtgccatcaccacgcagggatccatcccttgtgtgacgatgttcagcccaacatttgtttatggattcaggctattcgttc

SEQ ID NO: 31099 - DNA, 637 bp, Zea mays
  Clone ID: UC-ZMFLB73127B09_FLI
gggctccaccacagcaaggcggctgtagcggccatggagaggctgaacacgaagctgtacctgcagaactgctacatcatgaaggagaacgagcggctgcgcaaggcggccctgctgctgaaccaggagaaccaggcgctgctctccgagctcaagcaccgcctcgccaagtccgccgccggtggcggtggcggtggcagcaacagcaacgcggcagcggcgagccgcgcctcgcccaagcccggcgccgacgccgacgccgctgcgccgccgtctcatcatcaggccggcggcatgcctgcccccaagcccaagcccaagtaggctgcggctgcggctgcagtccgtcgcacggctgctgctgctgctgtcggatagtggtggccttcatggtgtttgttttagcgatcactttaattagctccggatgttacttagtttcaggaatgtttgtctagttttagttgatgggcactcatgtgtggcaatgatcttgcgatgaatggataactagctagatggatcgatcggtcgatcgtcggggggtatagagaggtgtgcgtttctgaactctgatgagagcggagcttcttcagtcttcgattcgcaaatggtttgaggagagtggcttcctctg

SEQ ID NO: 31100 - DNA, 1102 bp, Zea mays; identical to SEQ ID NO: 12882
  Clone ID: UC-ZMFLB73127C04_FLI

SEQ ID NO: 31101 - DNA, 1955 bp, Zea mays
  Clone ID: UC-ZMFLB73127E08_FLI
cgaagccaccactcctagagagacgagcagcgtatgtcgtcgtcgtccgacctcgagcagcaggtggccaccgccctccgccgtgtgacccccgtcgccgccgcgcctgctgtagaccgtggaggcgcgccggatctggcggcggcgattcagcgccgaatggcctcgcaacgcgccaggggtgccgacgcgttctacgcgaagttcgcgtcggcccggtcgctcgccgaccagaccttctcacgccgacgagtacagctgaagggactcaaggatcagctccgggacctccagtcgcagctcagggagtctcttacacttcagtcgtgcaaggaatggaaatacaggattgccacggagccgatgtcggaggccacagctacgaatgagcggctccgtagctgggttgcggatttcagggacaagaggaacaagggtgctgcaatcgtatttgagcaacttcaagctgtcgaatcacttgaggcaaacagtaatgaagatgcagagatggcggagaaggtaccaaaagctgttctctggtacaataagttccttggcttccgggtgatcggaggagaaagaggtgtgaagttcgtgttcgacaagattgacccacagcgtccggagaaggaatactcgtttcgcgtaagtccgagatcacaattcatcgatagtgatcctcatgtcaaggacattgatgaattggcgaaggatttggatttgaacgaacatctattcgagtttgtaagaatggccagagagaaattccagtctcccttcatgaacggtaaccagcaatttttgtattctttttacgataatgtgaccaagtatcatacttaattacttattataaacatcttctgcaaatataaacaatccgaatcttctttccctaaaatactggcaaggggcaataggtttaagcagagcagacttgcaagtaaacatgtgactttgcctcaaatacatcctttatatgtagatgcaggacaataggacatacaatgtatacactgtcaagtttcagttgaagacatacaatctatacactgtcaagtttcagttaaagaggctctatggtcttgttattatgtagttttggctgcgtggaagttccaaagcatatttttaatgttgtcgcaaaatgcaaataatatggtgcatgctttccaatctagaaaccagttctcattttttccttccttccggatatggagcgggcccttttatgaccaaagatttgtgtatggaagatgagattgtgttcttcttgttctcctctggaagctgtcggctaactcttgtcactgcgttcctcagagacacttcctgtaagcccagatgcctctgccgcaccactcccgtctcccatggtggtgtcagttaacagcagaagcggggaagctcacagtcaaacccaatctctaagcaagaacagtgcacggttacttcctgctaagagaggcgccacagccctgccaggagcttctcctggtgttttgcgtcgttccccacgtctcgagtcaatttctctctctctctcttgcattgtttgtgcagggaatgcggtgagctagttagtagccgtagcaggttccgacccctggatcttgaaccaagcgatcatcatcagctcatataaaccgtggtgattcagctgcccttgcttatgggtggtgcttttttctcccttctaatctaactggaacttatagaagtgtatggttggcaattggccgggtacagtgattaaccctaacctggcctgtaatatattgttatactctggtcattagatgatgagttcgtgagtcgtgtcctggtctgttgtatggtgtcaaatatatagcaggtgttgtttttgtgtgacacccggatttaagggtaaatccggacgtgaattaaatgtgtgctatgatcaagttttacacatatgatgatttatgatatag

SEQ ID NO: 31102 - DNA, 1102 bp, Zea mays
  Clone ID: UC-ZMFLB73127E11_FLI
cattaatcagttttattatcagtttatttctgctaactgccatattacgatttacactgcattcatattttctctgcttgaagtacatgtaagttatacggaacaccctgtcacattttttttttctaatttatgtctttgtgcagtaaatgggttatgatgaacaaactcactaggaagcttgcaagaattccagatgaagtgcggactgaaatagagccatacttttttgagcattctgctattgttgacgaagacaaccgcaagcttccaaaactgccagagggacaaagcacgtctgtagctaaatatgtgaggacaggcctgactcctcgttgggctgatcttgatataaatcagcatgtcaataatgttaaatacattgcgtggattcttgagagtgcacccatctctattcttgagaatcatgagctggcgagcattgtgctggattacaaaagggagtgtggccgggatagtgtgctgcaatcacacacctctgtgcacacggattgcaacagtgagtctggagaaacaaccttgcactgtgagcatgtgctgagccttgaatcaggtccgaccatggtgaaggcccggaccatgtggaggcctaagagaaccaaggcccaagaaacagttgttccatcttcaatttgaattgtgtgagacgttcgggatggtgattttggcaacaaactactactatttggcaaaaagatcagaatggttactagcgtcctctattggaagcaagtcacacagggcgagacctaaactaatttaattatgaagtgtgaacaatagaggagatataaatagtgtgaacaatggactggaagagacagaagcggggggagatcgaagacaagggaggcctcatgtgcatgacaatcttcggtcgcacaaatgggtgttgtaagtattgatctgtaagctacaaatgtatgaaggggagtgagtgcttcccatacatgttccttctggggctatgtccatatgctataagcccctcgaaaacattgtcgcagccatatattcatgcagaggattttaatctcgtacgtatattgtatttgctgatattaagattgatattattact

SEQ ID NO: 31103 - DNA, 2529 bp, Zea mays
  Clone ID: UC-ZMFLB73127H11_FLI
gggcgcctagtgtgtgtttgtgcgtcttgtgccttctgaaggcacgcaccattctgccctcctgctctctcccctcctccttcccactcctgtctctccccgtcctcctctgcttgagccattcaggtccagcaaaattgtttccagtcagtttcattcattcgcaaggtcggtgtctggagagaagaagagaaaatggcggcgctagagaggagaggaggccaccacactgccgctttcatcagagcagcgaaggcctccagtcctcctcctccagcgaggcagaggcagagccagaggtgctccaagagcggcagcggtttggacgacgacgacgacgacagagatgccagggccgcgccgcgttctccgcagaaggcgtccagccagaccaagctgcaagagcagaaacgcgaggccgagacggaagttcagcggcgcaggaggaggagcgaggcacacaactccctgaggaaagagattcagcagctggagacgcgcctcagggatcagcaggtggtgcgcggcgcactggagaaagcgctggggcctgagcctgagcctgagcccgacgacgacggcgctggtccacgtccactcactctccagaacgagagcccagcgctaaagctcataagggaggttgcgacactggagctggagatcaagcacttggagcactacctcctggcactctaccggaaagcattcgagcagcagcaagcacccaccaccgcgctgccgccttcagacgatcggcgggacgcggcgcgcaagctgtcggtgagctcacggcccgacgacgagacgcccagggcgagggcccccgtgatcaggggaggcggcggcaacgggaggaggaacggcggcacggcggacgactgctcgccgtcgacgacgtgcccccggaggacggccgtagactccgacccggccgggctccggagccagtcggcgctgtcgttccgaggcgcgtggtcgtcgtcgtcgtcgacgtcgtccaggatatcgcccacggaggacagcctcgcgcgggcgctgcggtcctgccactcccagcccttctccttcctggagcaaggcgagacgacggcgccgtcaggaggagtggtgagcctggcggactacctcggcacgagcgtggcggaccacatcccggagacccccagcaacctgtcggaggagatggtgcggtgcatggccggggtgtactgcaggctggccgacccgccgctgctggcgcgccaccgcccgtcggcgtcgtcggcgtcggcgtcgctgtcctcggcggcgagcgcggtctccccaacacagtgcctcggcggcggcgacaacaacacgtggagcccgaccagcagcagcagctaccactgcggcaggagagacgccgcccggctcgtcaacccgttccgcgtcgagggggtcaaggagttcagcgggccctacagcgccatggtcgaggtgccggcgatctcccgcgaccgccccaggctcagggaggccgaggacctgctccagacgtacaagctgattctctaccggctggagacggtggacctgaggcggatgacgggcgaggagaagctcgcgttctggatcaacgtccacaacgcgctggtcatgcatgcgtacctcaagtatggagtcccgcataaccagctgaagacgacgacatcactgcttgtcaaggcggagtgcaagatcgcggggcgcgccatcaacgcggcggccatccaggggctggttctcgggtgcacggcgcactgctcctccgggcattggctgcgggctttgctgcgttacccgaggacgacgacgaaggcgagccggcgggcgagcagagccgggggcgaggagtggcgagccttcgccgtccgccagccggagccccttctgcgctttgcgctctgctccgggagccactccgatcccgcggtacgggtgtacttcccgaagcggctggcgcagcagctggaggcggcgcgggaggagtacgtccgggccacggcgggggtgcggaaggacgaccgccgggtgctgctgcccaggctgctggacgcctacgcccgggacgccggcctcaccgcggaccgcctcctcgacgccgtgcagcggtgcctcccggagacgctgcggacggcggtgcagcgctgccgccgccgcggagacgggcccggcgccgggaaggcagtcatcgagtgggtgccccaccggcggagcttccggtacctgttggccagggacctcgccttcccgcacctcagcctcagctagctataagctgcacgtacgtcgtgaagatgattcctcgtacggtgactagttgaaagattggtagttgtggtggggtgtggatgacttgatagattttggttctagattaatgataatgatgatgattgcacatggtccattaggcacgggcattcttcatcttaatttgcgtgtgtgtgtgctgtaaacagatgacacatcgagcttagcttgtagatatagcaacaaatgaaagagataaactaagtttgtatt

SEQ ID NO: 31104 - DNA, 1724 bp, Zea mays
  Clone ID: UC-ZMFLB73128A06_FLI
ggaaaaaaaaccatcgtcttcaagagtatgttaaatctgaatatgatcattcatgtctccgctcctgcaggtcacgggctctctataaaggcttgaaggttggttcaactccagacttgatggttgcgtacatagatttctttctcgggggtgatgagaaacgacttgatgtagcatccaccattcagaagaggtttcccatgtgtctaatttttggtggtgatggaagctatatgtccccatactatctacatagtgatacattgctatcaaatcttcttggccagtatgtatctactgcgatctggaatagattagtcgctggtttgaatgctcaattaaggacagtaagacaaggaagtgtccgttctactttgggccctgttgtttcttggatcaacagtcatgggaatccccaacttgagagacatggtgttcgagtggagttagggtggttccagtccactgcttctgcatattaccagcttggtattatcgtagctgtgaatgagaacttctacaagaatctccgccaccatgagcatgccacagaattttgtgaacgctcaaggaagaacgttgcagttccacttcaggatttcaatcaggcaaatctggatcagccttgcacaagctatgctgtttctagaaagcgattgacaggtggagtcaatggtgggatcataaatgagggaacgctcaagtcactgcactataaaagagactatctctttccattctcattgttattgcgtaattccaggcctctaggctatgcggaaacattgcaattgctcatttgtattgtacttctgggtgatttctccatcaccctgcttatgcttgtacagtactattggatatctgtcggagcttttcttgccatactgctcatcccccctcttgctttgctttcaccttttcttgctggtctcaatgcactttttagccgaggactaaaacgatcttcagtgacccgcatttttgcactttggaacattacttctgttgtaaacattattgtagcaatcatatacggctctttgtatttttggctctcttctttggcggtgtcctcagttcatcaagtatacaacacaaaaagcttcaagagtagagaagacaatgaatggtggatactgcctactatcctttttctcatcaaatcactgcaagctggactagttaactggcacgttgccaatttggaaatccaggactactcgttatttagcccggacccagatagattctgggcaatgtagtcgcctgcagcaagctaagaattgcagaaagcatggtttagtgatcgcaagaatggcaagtattaattattggatgctgaatatttgcgttttgtcccttgcaacgtcatcagcccaatacaatctctgaatctgaaggggtctaacacgctggctggaacttccttctatttatgggaagcgctcctgcgtagtgcactagtgcagatatgttcattttctttttctcagtttttttcccgtcttggtcgtgtgcctagaataggtctgtcgctcggtggggattagatttgtgcattttctttggttcaaattaaaccgttgattcgagtgtacagcaagaaactattgtgattgtcgctctagatgtacatcactgtaagtataatagtagaaccatttcaactgtatacaatcctcaaaggaaagtatgtttctttctattttctttttcctaac

SEQ ID NO: 31105 - DNA, 1249 bp, Zea mays
  Clone ID: UC-ZMFLB73128A10_FLI
gaacgaagaaagaaagctcgagacttgtttcctcagcgaatcagcactataacaaacccttcagctggaaggccccagccattattttggccttcgaattcttggagagcattgcttactctggtatagcactcaacctggtcgtgtaccttggaaccgtcctccatggaaccaccgcctccaatgcagcgaacgtcgatgcgtggaacggcgccacgtttcttacgccggtccttggagcctttcttgctgatacatactgggggaagtacaagaccgcagctatctccataatattctacgttgttggcctgctcataattaccacctctgccgtcataccgtccctacggcctgcctcgtgtgaaggcggttcatgcccacctgcaacagggtttcagtattttgtgctctttggttcattgtacctcatctccattggtacggggggcgtcaagtcagctttacttccattgggagcagatcagtacaatgatgcgaacgccgaagagagtaaaagcaagcaactgttcttcagttggttcttcatggctgtcaaccttggagtgttcatctccggcactgttcttgtctggatacagcaaaatgtcgcttggtctcttggattcggcatctcctcgatatgccttgttatcgccgcagttgcctttttggttggaacaccgctttacagggttcaacttccaactgggagcccactcaagagtatagtcatggtgtttgttgcctcttataagaagagaggagtggcggttcctgctgatagcacactgttgtttgaagggaatgaatcaagcagcattgtgccgaacaaaattgaacacactgacgaattcaggtgcttagataaggctgctgtcgttgtagaggaccaagagatgaaggacagccatcgcccatggctattatgtacggtaacccaggtggaggaagtgaagattctgatccggatgcttccgatatggttcacctgtgtcttctattcggctgcaatgagccagactgctaccactttcgtccagcaggggaacgcgatgaacactaagatcgggtccttctcggtgccggcggcctccatgaactccgccgaggtgatcttcatgctcgtctgggttgtgttccaggacagcgtcgtcatcccgatagccaggaggtacacggggaacccgatggggctgacgctgctgcagcggatgggcgtcgggcggttgctggcgatcccatctct

SEQ ID NO: 31106 - DNA, 1829 bp, Zea mays
  Clone ID: UC-ZMFLB73128C03_FLI
gggggccggtgccgccgagggcgagggcgcggtggactccaaggaccttcagcagcagagcaaggcgctcgacaagctcactgatcatgtcgaggaccggcagctcgattcatcccgtgtccaatccgaatattggagatgtgccttcaacaatctacgctcgattgtctccagatgagcaactcactgcagaaacaagatacacctcttgacatctgaaagaaacggttcgaacacatacggcaagaacaatgagtcgacgatccgcaaacagcagatgcagacgaatctgcaaatggagggtggacaaacgcacgtaccgtggaggcggacgccagcgcggttgaggtggttgacgcgatcgggacgccagcgagggggccctggccaccgtcgcggcggggggccaggagcgctcctgcaccacgagcgcgcagatctgagaagggaggactacggctggcttcgtccgcgaaccgagtcgtcgtcctggtctaggcgttcccaggaagtcagcggcgagctccgccatgagcacgcgcacctcggtgcggctctggttcgtcgtgcccaccggccccgactcctggaacatgtacccagggcagcgccacggcaccacttcgaagatcctgctgctttgctgctagtagtggtagcgacggtggtgctagcggtggctgtggtttgagcggaggatttcttgagccacttgaggcgacgaggtagggaagcaacgggggacgcgggctgggcgagcacctagcgggatctaatttgcggggaggatccgagggggagggggttcggtggatctgcgcgacgaccgggaggtgggcgatccctcgacactcgatagtcgacaccaaatacccggaccgcgaacggccgcccgcttcgcggtcgcgcaaaatgccgccgaaacccgcgccccagctcttccagtacatctccaacaagtcgcggaaaccaccgccgccaccagtcgcgcgggatctccggatctggtggttgtgttagggttgggcgcgagaggcacgagcacgagcgttgccgcgatttgctcggggtaaaactcgcgctccaggcaagtgggctgctgctgctgctgagagggggaggcgggggcacccggacggtctacactaatgccttaatagttagtagagatttacagagtatgatgtacttgagggaaagcattggatcagcattaaatggccctcgattgtatttgcttggataacctttctattcacatctgattcttatctgctcattgcaacggtcttggactcttggggattattttatagttttatgaatattaaagtcatagataaaagtagcgtcaaatgtagagttacggagaaatgttgtgtttgtgattcagctatgtttttaaatactaaacatgtttttacatgctttgtttatggtgcaggccatggcggcacttgcttcatccaaggaggctgactggaacgcgatgaggctgagggagaaagaattggctgctgtgaagatcaaccctgcggatgtcgaaattatcgctagtgagcttgagctggacaagaagatcgcggagagaacgctccgtgagcacaagggtgatgccgtggctgcggttcgattcctgctgcgctagttccgagatttcgtcgccagcatcatatgttccccttcagttccacacaagaggtgatgatgtgaagtgaagcactagtacttttgtgtgcctgttttggaagtttgctattagaactatgttgcagaaaatttaagaatgagaataccatgcaaaaggtgtaatatgatttgtattagtt

SEQ ID NO: 31107 - DNA, 1608 bp, Zea mays
  Clone ID: UC-ZMFLB73128E08_FLI
gcgtgaaagagctcctccgacgactactggctctcgcttgctccggcgacccagaaagagctaggctatagccaccgacgacccctgccggccgcctctggtacaacgtacgtagagagagagagaaagagagacgatcgtcgatggccggcgccaccgtgaccgtggacgaggtgaggaagggccagcgcgccagcggccccgccaccgtgctggccatcgggacggccacgcccgccaactgcgtgtaccaggccgactacccggactactacttccggatcaccaagagcgaccacctcaccgacctcaaggagaagttcaagaggatgtgcgacaagtcgatgatccggaagcggtacatgcacctgacggaggagttcctgtcggagaacccgagcatgtgcgcgtacatggcgccgtcgctggacgcgcggcaggacgtggtggtgacggaggtgccgaagctggggaaggcggcggcgcagaaggcgatcaaggagtgggggcagcccaagtcgcggatcacgcacctggtgttctgcaccacgtcgggggtggacatgccgggcgccgactaccagctgaccaaggcgctggggctgcgcccgtccgtgaaccgcctgatgatgtaccagcaggggtgcttcgcgggcggcacggtgctgcgcgtggccaaggacctggcggagaacaaccgcggggcgagggtcctggtggtgtgctcggagatcacggccgtgacgttccggggcccctccgagtcgcacctggactcgctcgtggggcaggcgctgttcggcgacggcgcggcggccgtcgtggtgggcgccgacccggacgggcgggtcgagcgcccgctgttccagctcgtgtcggcggcgcagaccatcctgcccgactcggagggcgccatcgacggccacctccgcgaggtggggctgacgttccacctgctcaaggacgtgcccgggctcatctccaagaacatcgagcgcgcgctggaggacgcgttcaagccgctcggcatctccgactggaactccatcttctgggtggcgcaccccggcgggcccgccatcctggaccaggtggaggccagggtcgggctggacaaggccaggatgcgcgccacccgccacgtcctctccgagtacggcaacatgtccagcgcctgcgtgctcttcatcctcgacgagatgcgcaagcgctccgccgaggacggccaggccaccaccggcgaggggctcgactggggcgtcctcttcggcttcggcccgggcctcaccgtcgagaccgtcgtgctccacagcgtccccatcaccaccggagcgcccaccgccgcctgagtcgtccatctatcctcgcgatcgctccagagacatgaacgacccgacctacgaataatgtatctgcgtaattaatttctatctgtgttgtgtcctagtagctgttaagtaccgttttaaaaacccttaattaattttattatgggtgagctagctcaagagtggagtcataaaaccgcatggatggtgaggtattgtatagtacctgtgtaagacaagcttggctggttttttattttatattttaatctgtttgctc

SEQ ID NO: 31108 - DNA, 292 bp, Zea mays
  Clone ID: UC-ZMFLB73128F01_FLI
gcggtcatggtcgaagagcaggagaggcccgagaagaaaggaggcggaggcggcttcttctcgttcttcggcggcaggtgatgagtcaagtcagtctttaggctgtagatggtgtacaggctcggagtttatgaatgctttctaggctagtgcccgattcattctgtcgttattgtgttgatgagacttgatactactagtcgcttgcattggacctgaactacaagttgtactaggcggctgatccacatccgaatacactccttgattgagctgctagttggtggccggg

SEQ ID NO: 31109 - DNA, 2109 bp, Zea mays
  Clone ID: UC-ZMFLB73128F06_FLI
cttcgccgcctttcgctccgccgtcctcaccacggccgtcgccctctcctcgcgcgcgggcgtccggcgcggcgacgtcgtcctcttcttcgcccccaactgcttcctctaccccgtctgcttcttcgccgtcaccgccctcggcgccgtcgctaccacggccaaccccctctacacccctcgggaggtcgctaaacaggccaccgactcgcgggccaagctcgcaatcacggtctctgaactccttcccaaaatcgtggacctcggcttccccaccatcctgctcgacggcggcggcgacggcgacgcggccagtgccgccgcctccaagcctcagggagccagcgtgacgctttactcagacctcgtttccggggcgcgggagacggagtaccgccgcccgccgacgaagcagagcgacacgaccgcgctgatgtactcgtcttcctctgcttcctgcccatgttccacatcttcggcttgtccgtcatcacgttcgcgcagatgcagcgtggcaattccgtcgtcgtgatgtcgcggtttgacatggactctgtgatggccgcggtgcagcggcaccgtgtcactcacctcttctgcgtgccgccggtcatgatagcgctcgccaagctcgggagcgttgggaaatatgacctcagctcgctcaggttcatcggctctggcgcagcaccgctcggcaaggacgtgatggagggagtggccaagaattttccagaagctgtgattgcccagggttacggaatgactgaaacttgtgggatcatatctttagagtacccagaaaaaggacaaattcgtcaatttggttcaactggagcacttgtctcaggagttgaagcaaaaattgttgatgtagaaacattgatatgtctgccaccaaatcaactaggagaaatttgtgttcgaggaccgaacataatgcaagggtatttcaacaatgtgcaagctactgaatttacaatcaagcaagggtggttgcatactggtgatattggatactttgatgagggaggtcagcttttcgtagttgatagacttaaagaactgattaagtacaaaggttttcaggtaagattctcatttttttgtaaacaaatgtttagtttctgcaaacttttatttataattatgtaggtggtgaaaattagtaatctgaacagtgcttactgaaaggagactttgtccagcctcatttgggtcctttctgcagctaacgtttgcagttctactaagcatttatattcatacaaaatattattcagtagattgatattctttgcttactattcgatctaactatcataaaatggattatccttcacatatgttattttaccttttgaatcttatatcatgtgttttttttctttagtcgaatttcatatttttcttcggcagattgcacctgccgagcttgaagggctacttctgtctcatccagaaattctggatgctgttgttatcccgttccccgatgctgaagctggtgaagttcctattgcttacgtcgtaaggtcctctgagagttctttgactgaagttgatgtccagaaatttattgaaaagcaggtcgcatactacaaaaaattgaggagggtgacctttgtggacagcgtaccaaaatctgcttcagggaagatcttgagaagagaactcatctctaaagtcagatcatccaagctatagcaagccggcttctgtgttcgtaatactgcttgcctcctatctactcccctcagtctaaattataagtcatagatcatagatgtatatcatatctaaatacatcgtatgcagagaagctagaacgacttccaatttgaaaatttgtcagattgagcgtaaaggtttacatgttactgagcggagcttatcaagcaatacattcagcttgacacagtttgtgggacatgtatacatggtggtgtcggatgacttgtatcgaatattgggcctgatttacattcactattcgaaaatagtacagatatgtaatatggctctgctgcgtgtacatcttacagacagttgtacgaagaaatattgtccgacagtttgtgcaaccagcgcattatctgtgggactgtt

SEQ ID NO: 31110 - DNA, 1843 bp, Zea mays
  Clone ID: UC-ZMFLB73128F08_FLI
cacaaacctaaggatcgatctgaagctgattttgctcgaagaaggcttatatttgatgatttcttttacctccagttaggaagactatttcaaatgcttgaagcagttggtacgcgggttgagaaagaggaattgttatacaagtgcaaaagtcatgagctgaatactgttggtgtagatgattggtctcctcttacaaagaaattgttgagggctcttccttattggcttactcctagtcagttggatgctgttcaagagattatatgggatctcaggagaccagttcccatgaacagactcttgcagggggatgttggttgtggaaagaccattgttgctttcctggcatgtatggaggttgttaattcaggatttcaggctgctttcatggttccaacagaggtgcttgctgtccagcattatgaacacctaacttcattgctagagaagtttgatggagatgagaaaccaaatattgccttgctaactggttcaacgtccacaagggagtcaaggataattcgagatggtctgaaaactggagagataggcatggtcattggaacacactgcttaatagctgataaaattgaattttcagctttacgtatctctgttatagatgaacagcagcgctttggagttgtacagagaggcaggtttaacagtaagctatatacttcttcctcaaagttgagtggtgaaaatacaagttcagacgaggcttctgattctgaaacatttatggctccacacgttcttgcgatgtcagctacccctattccaagaacattggcacttgctttatatggtgatatgtctcttactcagatcacggacctgcctcctggaaggcaacctattaaaacccttgctcttgaaggaaatgatgtagggtttgaagctgtcttccagatgatgagggatgaactgatagacgggggcaaggtctaccttgtgtatcctatcatagacgagtctgagcacttgccacaactccgtgctgcaacagctggatttgattccataaagcaaaaattcgaaggctatccctgtgggctattacacggccgcatgaggagcgatgagaaggaagaaactctcaacagttttagaagcggagaaacacgcattctcctgtcgacgcaggtgatcgagatcggggtcgatgttcctgatgcttccatgatggttgtcatgaacgctgagcgatttggaatctctcagctgcatcagctgcgagggagagtaggtcgcggtgagaggaaatccagatgcatattcctggcttcaacttcgagcacgctgccaaggctgaaggttctcgagaagtcctccgatgggttttacctggctaatgcagacctgctgctccgtggccctggcaatctactaggcaaaaagcaatctggtcatcttccagaatttccaatagctagattggaggtcgatggtggtattttacaagaggcccatcttgccgctctgaaagtgctggtcgcaagtaacgacctagcgttgtatccacggctgaaggtggagctcagcatgaggcagccattgtgcattcttggagattgacctgtcaacagtactgctcgtaggctcgtagcattgggcgacgcgtgtactgtggataactattggtcgtaggctcgtagcgtcggcaaagttgacatgccgtgtctggtgagcgaggcgtgtaccatggataactattagactgtatgtgtgagtgtgtgtgggctggcaccactgttgggctgccggtccattaggtttagggttgagtctatatattgtaaccccttctctatgcaatacaatgatccatttcact

SEQ ID NO: 31111 - DNA, 392 bp, Zea mays
  Clone ID: UC-ZMFLB73129B12_FLI
aaaaggacgaagccgccggcgaggtccccgtcgccttcgtggtccgcgccgccgacgccgacatcgcggaggacgccatcaaggagttcatctccaagcaggtggtattctacaagaggctacacaaggtgtacttcaccccctccatccccaagtcggcgtccgggaagatcctgaggagggagctgcgcgccaagctcgcggcagccgcgaccgcctgaggagcttgacgctcaggttccatgccttgctacgtgcaactcgtttggtagtggcgtttactgccaatccagtgtatgggtacaggcgtgaaacatgaggtaccgagaatgtactatcaatatatgctttgtatgcgagtgcttcgtcaattaaggaccaccatttattcc

SEQ ID NO: 31112 - DNA, 1637 bp, Zea mays
  Clone ID: UC-ZMFLB73129D04_FLI
cattattagcatcaactattgttccacatccgaaccaaggaaatatgcatgaacctgctatcgacatgccttttggaagtgtacttctgcaagcactggtttcaagtgatgtcaatggagatatggaggcatgttgcagagcatctagcgttctttctcacattgtcaaggacaacatgcaaagcaaggatcgtgtattgcaaattcagcttgagacacttacaccgtccttggggcgcactgagccagtattgcatcgtattgtcacatgtttgtccatcgcagcctcaacagagggagaaaacaaccaaaacaaccaaccagaagaaccgtacattcaacctgttattcttcggctactcatcatatggcttgttgattgttcaaatgctgttaactgcctgttggaatcagcagtgcatctgaactacataatagagcttgcttcaagcaaacgttacactgcttgtgttcgtggactggctgctgttgttctaggtgcttgcatcctgtacaatgctagccatgagaagggccgtgatgcttttgctgttgcagatgctataagtcaaaagattggcctcacaacgtacttcttgaggtttgacgaattgaggagaagcttggcacatcctttgccagagcagcatcatcgcaaggagctttcccgatcaagtgcgaatagcatgtcagatttccaagaaattgaagaggatgaaacaaataaagatgatcaacaccctgtcctctcagaaatatttgattcacagtttgttaattttcttagtaagctcgaggctgatattagagaaaacataatggatatatttagtcggacaaaaactgcaactgcactccttcctactgaattggagcagaagaacggggaggttgatggagagtatatcaaacgactaaagtcgtttgtagagaaacagtgcaatgagatgcaggacttgctggctcgaaacgcaatgttagcagaagagttagtgagaactggtggtggtaccaccacagatacttcacagagaccgaacaacgggcgagaaagggtccagatcgaagccctgagacaagaactggagggagcgagacgacagatagaggcactcgaaactgacaagtcccagatcgaagccgaagctaacaaccaacgaaaccttgcagtaaaactggagtccgatctcaagagcttgtcagaagcttacaacagcatagagcaggccaactaccgcctggatgccgaggtaaaaaccttgcggcagggaggcagtgtgccgtatcctgacgtggaggcaataaaggcgcaagccaaggaagaggctgagaaggacagtgaggcggagctgaacggtctgcttgtctgcctcggtcaggaacaaactaaggttgagaagctgagcacaaggctggcagagctcggcgaagatgtggatgcccttctgcaaggtattggtgacgacactgccattccggacgatgatgacgacgacgatgaagatagtgaagagtgatatgtttatgtaaccctgtaggtctgttggtgcacacaacctcacgttgggtcatgatattgtaatggcaattggcattgtacagtggataatgtgtagacaaaggcaccgttccaattt

SEQ ID NO: 31113 - DNA, 1350 bp, Zea mays
  Clone ID: UC-ZMFLB73129F06_FLI
ctgtcaccccctctccctctgttcgccactttataccgcccgcccaccactccccgtttctctctgcttcatccttcgctttcccctgcgccaggcccgccccgccccgcccctccagaacgacatcctgcttccccgccccctccgatggggaacccgccggagctgtaccacaagatcctcaacatccccaaggacacctcgccgcacgaaatccgcgccgcgtacaagaacctcgtcaagaagtggcaccccgacaagcacccgccgtcgtccaggccggaggccgaggcgcgcttcaaggccatcagcgaggcctacgaggcgctcctggaccagcaggagaacaggggcgtgttcgagctgtgcaacgacggccgggcgggtgagaggacgcgcggcgccttcggcggcgccggcggcggcggtggcggaggcctcggcgccggcgtcggggcgcgcatggagaggacgcgcagcgacgggttctgcacgaggagcgcgcccggcacaccggcgagggagttcaagaaggtgtacagctccggcgaccccggcgggcgccgcgccttcgccgagttctccagctccatcgtgcgcaaggcgccgccgctggagcgcaagctcgagtgcaccctcgaggagctctgccgcggctgcaagaaggaggtcagcttcacccgcgacgtcgtcaccaagaacgggtcaaccgtgaagaaggaggtgacacagacggtggtggtgaagccagggtggaggaaagggaagcaggtggtgctggaaggcatgggggacgagcggccggggtgcctgcccggcgacgccatcctcacggtgtccgagaagaggcacccggcgttcaagcgggtgggcgacgacctggtgctcaaggcggaggtgccgctggtgggcgcgctcaccggctggtccttctcgttccgcctcctcggcggcaggaaggtgagctgctcgttccaggacgaggtcgtccgccccggctacgagaaggtgatcgccggcgagggcatgccggtccccgggcagaagggcgcgcgcggcgacctgagggtcaagttggacgtcgtcttccccaaggagctcacccccgagcagcgcgccggcctcgccgagatcctcagagggtcctgctgatccatcggccccagttccaagcgtatcaagttttcttggccgtgtccgtgtgttaaattttaatatgtatactcatagcgcgtgtgatgagtatataagtacataaagagagaggggagggggcgtcgttgtacatacaggtcgtttatatattatatatgtaaggataaaaagaaatatgaaacgtgagccaaagcc

SEQ ID NO: 31114 - DNA, 1313 bp, Zea mays
  Clone ID: UC-ZMFLB73129G10_FLI
tctgtgatcatcttgctaacaaccttccattatcttttcctccttcttcttcttcttttgctccctgctttctctagctctcagctcagctcagcgcgctcacaaacaaatatctgtcctcttcgatcggatccacaactactaaagcaccaccgtaccaccattaccagaccggcgcccgtatgcgattacccggcaaattagcacccgggttctgatcgatcatcgtcagcccttggattcattccatcctcgttccattgatacggtacggtggccaagctaaattaagaagcccacacccagcgtcgtcgtcgtgcttgcaattgcatcttcttccacatgtctccttcaccgccgccaagcagcggctgcagcctagcagtactagtaggcggcacgagtactgcagggtcgtccaacatgagcctgcgcgagaggagggacgccgtcaggcacgccgccgacgccgccctcgccgccgcacggggcgccgcgccgcgctggagccgggctttggcggcggagctctcgtcgcagtcgcagtcgcagcagcatggccggtggcactggcacgacgacgacgcgccccacctgcttgtcgccggcgccgatgcacggccttcgggccatcagacgtgcttgccgtgcgggacggcggcggcggtggcagcagccggctgcaggaagaccgtgccgaggcggcggaggctccgggtccgggccaggcccaagagcggagccactacggcctggtccgctggcgctgtcgcgcgggtcgtggcgaggcggcgggcgcgggccggggcgctgaggaggatggtgccgggagggcgagggatggcggacgagtgcacgctgcttggtgagaccctagactacgccgtgtcgctcagagctcaggtcgacgccatgcagctcctgttgaggacgctccagcctccaggccacgccaacaacaacccttaatttgctgaagcagcagtagtgaggggaattcgaactactacacatatatatacgtactgaaatgtgatcaagaccgtccatcgttcatggatataatataagacatgcatcatgacggaatggagagcttttccccggccctctcttcctttattctcctcttgcatacgtgctgctagcagctctcttcctgtttgtttcttcattctgtagcactgagagagatcatgaggcgaaggtcatgtgtgcgtgccgtatatatatgtacagtacagtactagtgtgtgctacgtacgtgctactccgacacaaatatatatatgcatgtacataagtttttggtt

SEQ ID NO: 31115 - DNA, 822 bp, Zea mays
  Clone ID: UC-ZMFLB73130A03_FLI
attcatttgggatgaggaccttggggttgaacattttaatgcagaggagtacatcaaacttgttaagaagcataacttggacatctctcaacctggattagagcctgatcgggggttaacatggcagatgaccaaaagaagaggtgacagtgaggttcacaaggacacagaggagaggcctggctggtgctctgaccctcatcttccaccgtgtgctgcttttgttgaaataatggctccagtcttctcaagagatgcatggagatgtgtgtggcatatgattcagaacgacttggttcatggttggggcttggattttgcgctcaggaaatgtgtggagcctgctcatgaaaagattggagttgtcgattcgcagtggatcgttcaccaagtggttccttctctggggaaccaggggcagtcagaaaacggaagggcgccatgggaaggggtgagggcgcggtgcaggaaggaatggggcatgttccagaccaggatggcggaggcggagaaggcgtattacaagatgatgggcatcacccctccaaactccacgcgtgtctagccgcgcctctcttcttggttttccatccccgccaccctgacctttgtggtggcgggtgagctgatgatactatactatagcactacttgattatagggagttagagatggtgggtgtagctgcttttgatggagaggtccttctgtaagtaaatgcgaggcgaaactgtgatgagaaaacatgtacacgaggatgattacctgatgatgatgatgatgatctatctattataaaaaacatatataccgttaccgagc

SEQ ID NO: 31116 - DNA, 2512 bp, Zea mays
  Clone ID: UC-ZMFLB73130B04_FLI
cccacgcgcggccacacccacgtcagcccatccgattcctcgccgccgccgccatgcttctcctttcctccgccatcttcaccaccgcacgcctcccactcgccgtctccgctcgcctcccaaaccctaccaacaccacccgcctcatcttcgccggcctacctgcctcctccccggtccgcgccttctgccccagggcgcgcccctccccctccacttgcgccgccttctcctccaccatggccgcctccgacaaccccctcctcgtcgccgacttcgacttcccgcccttcgaccgcgtcgagcccagccacgtccgccccggcatccacgaactgctaacacgactcgagggcgagcttgaagagctcgagaagggcatcgagcccacgtgggcgaagctggtcgagccgctagaacgcatcaccgacaggctcgaggtgatctggggcatggtcgatcacctcaagtccgtcaaggactccgctgatctccgcgccgccgtagaggaagtgcagcccgtaaaagtcagtttccaactaaggctaggacagagcaagcctatctatgaagctttcaaggccatcaggaactcttctaattgggacagtctcagcgatgctcgcaagcgtatagttgaagctcaaataaaggaagctgttctcagtggagttgcacttgaggatgaacaaaggaagaaatttaaccaaatcgaacaagagcttgaaaaactgacacaaaagtttagtgaaaatgtgctggatgccacaaagaaattcgagaagttaattactgataagaaagaaattgagggtttacctgctacagcccttggttagcagcgcagactgctgtgtcaaagggccatgaaaatgctacagctgaaaatggaccttgggttatcacgttggatgcaccaagctatattcctgttatgcaacatgctcgaaacagagagctccgggaagaagtttatcgtgcttatctgacccgcgcctcaagcagtgaacttgataacaccaatatcatctgccaaattctaaagttaaggctagagaaggctaaacttcttggctacaagaactatgctgaggtaagcatggctcagaaaatggcaactgttgagcgagtagaagagcttctcgagaagctgcgtgctgcttcctgggatcatgctgtcaaagatatggaagatctgaaagtctttgcgaaagattctggttctcctgaagctaatgatttgactcactgggaccttaccttctggagtgaacgactgagagagtctaaatatgatatcaatgaggaagagctgcgcccttattttgcactacccaaggttatggatggcctcttcactctggcacataagctttttggagttactgttgaacctgcagatgggctggctccgatctggcacagtgatgtcaaattttattgtgtcaaagactcttccagtagccctgttgcttacttttacttcgatccttattcaagaccatctgaaaagcgtggaggggcttggatgaatgtagtcttttctcgaagtcgcgtgctagctcgcaatggtttggctgctaggctgcctgttgcccatatagtgtgcaatcagactccaccagttggcgagaagcccagtctcatgaccttccgtgaggttgaaactgtgttccatgaatttgggcacgcccttcagcacatgcttactaaacaagatgaaggctttgttgctggcattcgtggagttgaatgggatgctgtagagttaccctcccagttcatggagaactggtgctatcacaagaatactcttttgagcattgcaaaacattatgaaaccggtgaaactcttccagaggaaatttatgcgaagcttgtagctgcaaagaatttccgtgctggcaccttgagcctgcgtcagatacgatttgccagtgtagatatggagcttcatacaagttatgaccccaatggctcagtgtccatatatgatgtggaccaaagagttgcagaacggacacaagttcttgctcctctgccggaggacagattcctgtgcagctttagccatatttttgcaggtggctatgctgctggatactacagttacaagtgggctgaagtactgtcagctgatgcattctcagcttttgaagacgctggtttggatgatgagaaggcaatcgaggaaactggcagacgattcagagacactgttcttgcgcttggaggtggaaagtctccgcttgaggtgttcgtttcattccgaggacgggagccttcgcctgaaccacttcttagacaaaacggcttgcttcctgttgctgcctagtgccccaaagatttctctgttatttatgcttaaacagggaccattttcatccggtcaattatttgatgaagatagacatttcacccttgtttgtttaccctcctctagattattaaataagttagaagacaaacaaacaacatatattattaatgtatgtgttttttatatgtgtct

SEQ ID NO: 31117 - DNA, 761 bp, Zea mays
  Clone ID: UC-ZMFLB73130C11_FLI
gatactaatcatggtgtggcgcaagctgatccgcaacccgaacacgtactccagcctcatcggcctcgcctggtccctcgtcgcgttccggtggcacatctccatgccggcggtcgtggccaagtccatcgccatcctctcggacgccgggctggggatggccatgtttagcctgggattgtttatggcgctgcagccgaagctcatcgcgtgcggatggcgcgccacaggcgtctccatggccgtccgcttcctcgccggccctgccgtcatggccgccgcgtccctggccatcggcctccgagggacccttttgcggatcgccattgtgcaggcggctctaccgcaagggatcgtgcccttcgtgttcgcgaaagaatacaacgtccacccggccatcctgagcactatggtaatttttggcatgatgatagcgctgccgattaccttgatctactacatccttcttggactgaagccagtgtagtgtagctgcttcgttcgtcctgctgcacacacatgatgaggcatgcatgagcgaggtcctagtagaccaccatggacgacgctgagctggttgcactcgagcgtggcccacatgcatggctggagccttgtaattttgagtcagctccagtgttccctttgtgggggtgattagacatgcatgcggtttttgttgcttattactaatccatcttgtcgtttgaggattgcatgtagtgtcgtccatgcccatataaaccctagtttaagctttg

SEQ ID NO: 31118 - DNA, 1217 bp, Zea mays
  Clone ID: UC-ZMFLB73130E03_FLI
accatatttctgccttggagatctctgggaggctttcaatgagtggagcttttacggggctggtgttccccttgttataagtggaagtgaatctgtgattcagtattatgtgccatacctttctgctatacagctgtatgcagaccctttgaagcttccatcgaggatcaggcatccttgggaggaaagtgatggggaatctatggatactagcagcgaaggtagcagtgaaactgatgatatccgattaagaagcttaactgtggaagctacacatcgattggatggtggctttcaaagggatggcgatgaaatgcactcaccatcgactcgtccaatttttgaatatcttgagacagatccaccatttggtagagagcctttaacagacaaggtatcagttcttgcaagtagatttccagatttgaagaaattcagaagttgtgacctgctgccaaccagttggatgtctgttgcatggtaccctatctatagaatccctactggaccaacactcaaggatttggatgcatgtttcttgacatttcattacttatcaacaccttccaaggatactgatcccagtacaccaccatgccccaatttgggggggcttaattgcaacatgaacgccgctggcaaactaacattgcccgtctttggactggcatcatacaaattgaagagctctatttggtcgtcaaataggcctgaggagcagcagcttgcagcttcactgacgcagacagcagatgactggcttcgccatcgccaagtgtaccatccagacttccggttctttctcacccacttcaacacagcattgagatgacatgagatggtcgcatctctcgctgtaaattgtcttcgttagtacaacctccgttctcgaatatttgttgtccactatatttttgaactaaaacgcgacaaataaaaaagaacggaggaagtatattatatgttgttggctgagccaggctacctgtaacactatgtggttgaccgcgtaactagcgcttctctgaacttttttcgtatggttcagtagttcaagccagacagctaatttgtaacttctccaataattcttttgttgtaggtaaacttttgagagtaaacattatggagatctgtaaaacagaaactgatggttataaactttttaaacttagacttgagaacacattgcttataatttagtttaaccttgtatt

SEQ ID NO: 31119 - DNA, 1148 bp, Zea mays
  Clone ID: UC-ZMFLB73130G11_FLI
ttctttggtcagtcccaaaccctaacagcccaccaccctccgcgacgaggaggcagagtggggcttaaaccctaccgcccccgaagcccagcggcggccatgaagacgctgtgccccaagcccggaaagggcggcaagatccacccttcgcccgccgaggaccccaccgcggcggcattccgcctcctcccggccgccatcctcgtcctcgtcgccgggctgtgccccgaggaccagcgggtgctggcccacctcgtcacgcgctcgttcctgctgggctgggacaccatcacggcgccgccgccggagcaggcgcgcgggggcccgcgtcgcaggcgcggccacccgcccaccgtcgggtgcctgtgcttccagtgctacggcagcttctggtcgcggtgggactgctccccgcagcacgaccgcatacacgccgtcctcgacgccttcgaggagcacctcaacgccgccgagtccgccgccgccgccaccgccacccctccctcctccaagcgccgcgacaagggaaagcgcagcagggctcctgccgctactacacctccgccacagccgccgacgcggggcagccccgagtcccaggagcccccatccgaggtggcgcatgaaccctcggcgccgctcctcccttcctgcccttgtaccccgccaccaccggcccccgcggcgtgcctctccgagaacaaggagaatgtcccggaagagactggcgcggaggccaaagcggagcaatgcggcggcgaggtggcggcggaggccgatgaagagaggaagcgcgggtgggcggacgtgatgggcggggtgctgaacctgcgccgctgggggatttggagccccgccgtggagagcggcgccacctaggtgcggcaggcggccaatggcattcctgtaaatgctgggcctgtctagggtacttttggcaatagatcggactgcgcacgcagcagcagaggtagagagagagagagagagagagagagaagcgctggtaactcttttctctcctctgttgggggcagggaaatggtgatctgcaagcgcgggtagctactgtattttgttggtaattatggcaactaatgatggtgcaactgcaactgaaacaagatggacatcacttggtgcttgat

SEQ ID NO: 31120 - DNA, 872 bp, Zea mays
  Clone ID: UC-ZMFLB73130H10_FLI
cagcttcccttgccggctagggtttgcagatgacgacggcggcgcgccccacctgggcgccggccaagggcggcaacgagcaagggggcacccgcatcttcggcccctcccagaagtactcgtcccgcgacctcgccgcgcatacctcgctcaagctcagaaaagacggtcaacagacccaagaggagttacagaagaggaatctcagggaggaacttgaggaacgtgagcgcaagcactactcttccaaggataagtcctatgctgaagaaagagaccggcggaaaagctcaagccagctactcctagaaggttcaaagagagaggcagaggataagatagttccacgagaaatcgatgcagatgactccgatgtggagcctaaaagtgatgatgagagcgatgaagatggcgacgacgacgacaccgaagctctaatggcagagcttgagaggattaagaaagagagagcagaggagaagcttagaaaggagcggcaacaagcagaggaggaggccaagatgaaggaggctgaactgatgcggggaaaccctttgattaatatcaacaatcctggctccttcagtgtcaagagaaggtgggacgacgacgtggtgttcaagaatcaagcacgtggagagaccaagacgccgaaacggttcatcaacgacaccatcaggagtgacttccaccgtaaatttcttcatagatacatgaagtaatggtattgtcgtgtacaattcagatgtctccgtgctgtttatgtcagtgcattggttctctctcatcgttgttatgtttcgtgtatgagtgaacggccattgttgtgttgtatatgaaacaaaacatctgtcagcatcttaacaatgcct

SEQ ID NO: 31121 - DNA, 1270 bp, Zea mays
  Clone ID: UC-ZMFLB73131A03_FLI
cgaaaaggcaggcaagggaaaggcaaaggacaacccatcccctgcctcctccgttgctctgctgctccccctccttatctaatcctctggttcctggacaccggcctgcaagctccagcagcagcggcgccggcgacgaaaggaggaggattgctaccatcctatatcatatcatacatatacacaaggaggaggagaaggtgtgtagcgaggttgaggtccggaggatgccttccagtgccatgagttccgggctggagccggtgctctgcgcgcctcggccgcgcagggtccagcagctgcacccctgcagcgccgacctcatccttggcgcaccgcccttcccgcgcaacgccaacagcaaggccagcggcagcagcagcagggaaggaggcaggaagacgaccaggccggcggcggaggacgaggactgccgctgggcggcgttcggcgggtcgccgccggcgcgcgcggacaacccgctggtgcacgacccccggttcctgcggaaccagcgccacccggcgccgctggagctcgggtcgccgaaccaccggcggccgacctacagcagcggtggcgacggcagcgggtttgcctcgtcgtcgttcgcgccggccgtgaggatccagggcttcgacgtcgccgcgtgccgcgcgtgagagcgagctccggccgggcggggctttggcttttcgatctattaaattaaattaacagcaggtgaggtcaggtcagatcagatcatagtagggaggaaggcgaggagggcgggagggatgggatgagatctcctcttcctcctcctcgcgagggaggcgatccagtcgtatgagtgaagtaaagaagagtactccagtcgtactataggttgatgttcgccgataccacaccacacagcagccggtcaaagggagtgaaaactgattttttgtttacggggttttgtcagcaaggttattaggttttgtgtttgtgctgtagcctgtaagatgtaagctactactagcacgggtctcttgttcgttgctgctgctctgctctggcctctgggtgcccctgtattgtagatataaatcagcacccagttcgggcggtcggccagcgttcgtttttcttctagttgacgaggaggaagaagatgtccgctcctcgccatgtaatgtaaccatggctgtactcctacatacatgcaatcatgtataaagatgaaaacgtgtacatacacaagatgaaagtggcatgcagtgatgatctatcagaaaatgag

SEQ ID NO: 31122 - DNA, 1254 bp, Zea mays
  Clone ID: UC-ZMFLB73131B09_FLI
agcggagccggcagccaagcagaaaaatacgagtatcgcacgcgcaaggcgattccgtccccattctccacccaatagggagctagagctacgagacggggaaaggggggacgggaataggcgtcgtcggccatgtcgtcgtcgtggaactcggtgggtctggcgatcctgtaccaggtgctgggctgggtcgccttcgccgcgtggtccttcagcttctacccgcaggtcctcctcaactacaagcgcaagagtgttgtgggcctgaatttcgattttctggtgttgaacttgacaaagcactcgtcctacctcatatacaatgctgctctcttcttcagcccattcatccagcaacagtatcatgacaaatatggtgataaagagatgattcctgttgctgcaaatgatgttgctttttcactgcatgctgtagcattgacagcctttaccgtttttcaagtattcatatatgagcgaggaacacagaaagtctccaaagtttgcatatcaatttctgctattgtctggatcgccgctcttgtttgcctcattattgcttggccaaaaagtgactggctttggcttattgatgtattcaattcaatacaagttggcatgacagcaatcaagtacatccctcaggccatcatgaacttcaggcggaagagcacaattggttggagcgttggcaatatattacttgatctcacaggaggggtgctgaatttttgtcagatgggtgtgcagtctatagatcaacatactttggtgaatttctatggaaacattgggaaaacccttctttcattggagacggttttctttgatgtcctgttcattatccaacactacgtgttgtaccctgtcaagaaggacgagaatggtaaggcaatcatttctgaaagggtagccccccttatcaggccttcggacaagcctgaagaagataacgtatgatctagctgtagttatattgcgcgcattgcattcacgcgctgtttgcacacaggccacacacgcatgcgaattatttgttcaaaaggaattgctggcgcgtcttgattatattactgcttataacttttactacttggtgcactggtgagagatgtctcatataccaggttgcggtttcaagtggccccgtttttactatcgtgatttgtgaaggttattagatatcatctcggccaacatttacgatcaatgctcatgtaaatatttggttgcattacatttctatggtttcat

SEQ ID NO: 31123 - DNA, 1173 bp, Zea mays
  Clone ID: UC-ZMFLB73131C04_FLI
cttgtcagccatggccaccgccgccgcgtctagcctcctcaagtcctccttcgcgggctcccggctcccggccgccacgcggaccacaccggcgtccctcgtggtggccaccggcccgcgcggcgccggcgcggggcccatctgcgcgtccatgtccatgtcctcctccaacccgccctacgacctgacgtccttccggttcagccccatcaaggagtccatcgtgtcccgcgagatgacccgtcgctacatgacggacatgatcacctacgccgacaccgacgtcgtcatcgtgggcgccggctccgcggggctgtcctgcgcgtacgagctctccaaggaccccgccgtgagcatcgccatcgtggagcagtcggtgtcgccgggcggcggcgcgtggctgggcgggcagctgttctcggccatggtggtgcgcaagccggcgcacctgttcctggacgagctgggcgtggcgtacgacgaggccgaggactacgtggtcatcaagcacgccgcgctcttcacgtccacggtcatgagcctgctcctggcgcgccccaacgtgaagctgttcaacgccgtggccgtggaggacctcatcgtcaggggagggcgcgtcggcggcgtcgtcaccaactgggcgctcgtgtccatgaaccacgacacgcagtcctgcatggaccccaacgtcatggaggccaaggtcgtggtcagctcctgcggccacgacgggcccttcggcgccaccggcgtcaagaggctccaggacatcggcatgatcagcgccgtgccggggatgaaggcgctcgacatgaacaccgccgaggacgagatcgtgcgcctcacgcgcgaggtcgttcccggcatgatcgtcaccggaatggaggtcgccgagattgacggcgcccccaggatgggcccgacgtttggcgccatgatgatctccggccagaaggcggcgcacctggcgctcaaggccctgggcaggcccaacgccgtggacgggaccatgtcgccgccgttgcgcgaggagttgatgattgcgtacaaggacgacgaggtcgtggacgcctgagtgcggcaagcagagaggaggatcgacgccagcagcgtcttatcttaattgccttgttgttcaatgatgaatcgatcgaattcccttgggttagcttt

SEQ ID NO: 31124 - DNA, 779 bp, Zea mays
  Clone ID: UC-ZMFLB73131C09_FLI
atctacggcgccttccaggagcgcgccaccttcgtctcccacgcccgcaccgccaggcgcgccgcgctccacggcgacgcctgtctcgccaagctctgcggggtcatcgccggcgacgagaagcgccacgaggtcgcctacaccagggtcgtcgccaggtgcttcgaggccgaccccgacggagtggtgcgggcgctcgcggccgtcatgcgagccaaggtcaccatgcccggcgagcgaatgacggacggccgcgacgacagcctcttcgaccacttctcggcggtggcgcagcgcgccggggtgtacacggcggcggactacggcgacatggtggagcacttcgtgcgcacgtggagggtggcggggctccaggggctgtctggcgaggggcgccgcgcgcaagactacgtgtgcgggctgccgcgcaagatccgcaggatggaggagctggcccacgaccgtgccgcccaaaaagaggcccaatctgtcagcatcagctgggtgttcgacaggcccgtccgtctgcactgaaggaaagttgaaggacatacaccaatcctcaactgaagccccaatcactactactactactggaggcgttggaaatgcaccttactagttaaatgctcctatattctaagttttctatatatatcatataaatatcatataagtaagctttattttaataaaacctaaaatatatgtgttattgttggttagatagatgctaatgtgaagccaacgatcaaagttcaaacccccactttatacac

SEQ ID NO: 31125 - DNA, 1454 bp, Zea mays
  Clone ID: UC-ZMFLB73131C10_FLI
cgctcatccgctcctaatccgcgtcttccaggggtggcagcccctgcatgatccaaaatttgggttagaagtcatgaaaaaatggaaggacctgctgcagggggaccaaccatatgacttctcagatagtgccgcatcaatgacaccatatgtgcagcttgttagtgaagtcatcctaccggctgtgaggatatcaggaaccaattcgtgggaggctagggaaccggaaccaatgctccactttcttgagttatgggataataagaagttgctgccgcctgttttgcttcaatcattactagagcatgtgatcatgccaaagctctcagctgccgtggattcttgggatcctcgcagggaaagcataccgatccatgtctgggtgcatccatggctgccaatgctaagggaaaggatagagaccttgtgccattctattcgatacaagttgagcactgtcctccatgtatggcaagcacatgatgcttcagcatatgcagtgttgtctccgtggaaagacgtgtttgattcggcaagctgggaagacctgattgtgcggtatatcattcctaaactgagattggcgttgcaagactttcagatcaacccagcaaaccagaagctcgatcagttcaactgggtgatgttgtggacatctgcaatcccagtacagctcatggtccatatgttggaagtcgatttcttcagcaagtggcagcaggttctttaccactggttgtgctcaccaaatcctgatttcaatgagataatgaactggtataagggatggaagggccttttcccaccagagttacttgccaatgagcgcatacggatgcttctaactgctggtcttgacatgatgaaccaagctgctgaaggacttgaggtggtgcaacctggggctagggagaatgtgggctacttgagggcaacggagaagcgacaatttgatgcagcacagcaagcttaccatgctgtgccaggagcagccatggcggatttgagcttcaaggagtctatacaggcatatgcaatggaacaaggtttgctatttatgcctagagttggcaagttctataatggcatgccagtgtatgagttcggcacagttagtatttgcatagactctgtgaagcgactactctatgcacaacttcaagagggaatcgacagatggagtcctgtaactcttacacaattgatggacatgaaccgaattggaagaccacactagtagatcgctcctagcctttgacttgcatgatgtttttactttcttccctgttgtgtaaaacttttcagagatgtcaattcattagctcttttgaacaatatctccgttaaagaagaaaggggttagatctatatctaaatgtgctggataatgttgtatgtctcattgtgctgctggtatttacggtggtgctgtcaatatgacgtggctctttggt

SEQ ID NO: 31126 - DNA, 1172 bp, Zea mays
  Clone ID: UC-ZMFLB73131D06_FLI
tccggagatggaggatgccgttgctatagtgccgcgattctttgacttgccactctggttgctcaccggcaatgcgatggtcgatggcctcgatcccatgacgttccgcttacctgcacatttctttggtgtctatgacggacacggtggtgcacaggtagcaaattactgtcgggaacgcctccatgtggccctactggagcagctgagcaggatagaggagactgcgtgtgcagctaacttgggagacatggagttcaagaaacagtgggaaaaggtctttgtggattcttatgctagagtggatgacgaggttgggggaaacacgatgaggggaggtggtgaagaagcaggcacaagtgatgctgctatgacactcgtgccagaacctgtggcacctgagacggtgggttcgacggcggtcgtcgctgtcatctgctcctcacatatcattgtctccaactgtggagattcacgggcagtgctctgccgaggcaagcagcctgtgcctctgtcggtggatcataaacctaacagggaggatgagtatgcaaggattgaggcagagggtggcaaggtcatacaatggaacggttatcgagttttcggtgttcttgcaatgtcgcgatcaattggtgacagatatctgaagccatggataattccagtcccagaggtaacaatagttccgcgggctaaggatgacgagtgccttattcttgccagtgacggcctctgggatgtaatgtcaaatgaagaggtatgtgaaatcgctcgcaagcggatacttctgtggcacaaaaagaacagcacaagctcatcatcagccccacgggttggtgactccgcagactcagccgctcaagcggctgctgaatgcttgtcaaagcttgctcttcagaaggggagcaaagacaacattactgtcgtggtagttgatctgaaagcacagcgcaagttcaagagcaaaacttaaccgtgacaagcgtagcaacaagttgctaagaacctatagattcggacagtcccaagttcggtcattttagttcgctgctttagtgcattgcttagcccagttccttatttttctcagttctttttaagccatgccaagggctgtattccccgtatacggtacagatcgcgaaatccctatcagggatggtttggtg

SEQ ID NO: 31127 - DNA, 2133 bp, Zea mays
  Clone ID: UC-ZMFLB73131E11_FLI
gcacagctaggctggctgggccaattggtccagatcagtaacacaaagacgacgatatgaacaaagcaagcacatgacatgattccatggtattgttgcaatttctggcgaatacatttacagacaaatcgtgctagtacgtgccacagcgtgcggtcatttctaaatatcaccctcagcaaggaaatgctagacacaacacaagagagttatgcactctacaagcagcgccgccgtagatcctcactggattttctccatcccgtaggtatcttcagctccactggctacatttcttcttctctctgctatcatctcggtgtatgcctgagagaaggcaccacagggtcagttgttaagaacagggtgaggcggttgccggttaggccaaaggtatttgacatggaagaaatgcttcattggcaggtatgctgcagttagaggttggagctggtaacacagacgatgctcctgaccactaatagccatctcaagatatggaactagaagctttgggagccagctcagcattccaagttttggcatggatgatgagtagtggctaccctataatttgtatatggcaaactaaggtaaatctgcatttattaagtccatttgcagtttgaaaacaccatatgccaaatacaatactgggtcttttttaataaagctatgtcagaggacatggtgtaatgagttgcttaagtgatactacctccgttcataaatctatgacaccgttgacatttttcaaaaaactttaatcaatcatctaaaaagcgaaaatgtagaacagaaattaaattattagataaaatgatgtgcaaaccttagggtacgagtagagaaatatgtaccaccatgcggatattacaaaagaaaccccagcagtaattacaacagattggataagcacccaactacaggcaacggcaccagttcccgtaagcaatattgtccaaggctgacacctgaaaaaggggaaaatatagttgtcttgattataacactttgagcatagaagctaagcttatagaagaaacgttatcttcacatatggccaaactcgtgatgtttggtaaaaaatggcaacatgagaagaggtgtggaaaaatctaatagctcctttttagactgtagggcaccattctcacagctatggccattagttcatgatgacctttggaagctgaatgatgttattgtgtacaagaaagacaggcaataaaaattatcatcaattacatcatcatgcaaacaaaaaaaaactgaaagggctaaatcatggagctgacactagaacataatttggtgagctattcatttaaataaatatataagttcaaaagagatttatctattgtgttagtacacacgacattcaaaaatggttggcagagccaatgttgataataatagtaaagtaatttagaatcttttttttcttttaaacgaacaagcaggaggaacaatttggaatctagctacatctgacaataaacacagctacgataacaaatttgggcaatctctacgatatgcgttggaaacaacccatgctacaccatcataatcttcgccaattttgatcaatgcagcgtccagcaagaaacaactacggctacggaggagcaaagggaacggaccaggcaggcttggtgtcccagacagagtcgtactcgagggacaggtagttgaggtacccgtccatgtcgtccaccaccccgtcctcatcaaagaacgccgccgcgccgttcttgccactctcccccttgcccccaccgccgccgccacctacccgcgccacgccgccgcgcctctggctcctgccgcagagctgcagccttgtttgtgcaccggtggcagcacatgatgagaggaaaggggaaggcgcgaaggccgcggtcgcgtccgcgcgggcgccgcatgggcagcgcggcggcgtggatgggtagagcaggcagagcgcgcccatttcttggcttgtgctagcagtacggcgtcggcctcctcttcctaagctgctcccgtccggcggctgacgatgctgcggttatggccagtgtttgctttgatttcctggcaaatttttgtgccgtacatcatctttgcaattaaaagttttttggc

SEQ ID NO: 31128 - DNA, 1626 bp, Zea mays
  Clone ID: UC-ZMFLB73131F01_FLI
gtttgaaagacctgatttccctcagtttttctcaggagcaactccactagtggggagtttgccctacgcacagtgctatggaggacatcagtttggtgtatgggctggtcagttgggggatggaagagcgatagctcttggagaggttgtcaactctcgaggtgagagatgggagttgcagctcaaaggttgtggaaagactccatacagcagatttgctgatggtcttgctgtcctacgcagcagcatccgtgaattcttatgcagcgaagccatgcacggcctaggcattcctacaactcgtgctctttgtctagttgaaactggaaaatcagttgtccgagatatgttctatgatggcaatgcaaaggaagaacctggtgcaatagtttgtcgtgtagcaccgtcttttttacgttttggttcgtatcagatacacgcttcaaggggcaaagaggacattgagattgttcgtcgtttggcagactacacgatacatcatcactttccacatcttgaaaatatgaaaaagagtgaaggtttgtcattcgagacagctataggagattccccaacaatagatctcacatcaaacaaatatgcagcttgggcagttgaggtggcggagaggactgcttacttgatagctagatggcaaggtgttggcttcacccatggtgtacttaacactgacaacatgagtgtgctgggcctaactattgattatggaccatttggatttctcgatgcatttgatcctagctatactccaaatactactgatcttcctggggagaggtactgttttgcaaatcaacctgatgttggcttgtggaatattgctcagttcactggaccactgtcctctgctgaacttatcagccaagatgaggcaaattatgtgatggagaggtatgggacaaagttcatggatgagtaccaatctatcatgaccaaaaaactgggcttaactaagtataataagcagctaattagtaagctgcttagcaacatggcagttgacaaggttgactataccaacttcttccgtcttctttcgaatgtcaatgcggatcctggtattccggagaatgagctgcttgtcccactgaaggctgctctcctagatattgggaaagaaaggaaggaagcatggattagttgggtacagacttatattgaagagctggtggagagcggcgttcctgatgaagaaaggaaagccgcgatgaactctgttaatccaaagtatattctccgcaactatctctgccagtctgctatcgacgtagctgagcaaggcgattacgaggaggttcgccgggtgcttagggtaatgcataatccgtatgacgagcagccgggaatggagaaatatgcacggttgccaccagcttgggcatacagacctggagtgtgcatgctgtcctgctcctcgtgaaccccatgatgcaagacgtggagtcgtcgtggacattacaaaaatgcttgggtgcttatagtcttcctcctgtataggggtccatctttgtgctgtaatgtgtcaagcatcgcatgctattttttttccggtgatgcaagtgtgtaagaaccatgtcgttgcaggaatagtgaagcagtgggacc

SEQ ID NO: 31129 - DNA, 605 bp, Zea mays
  Clone ID: UC-ZMFLB73131F03_FLI
gcagggcttagattccgagccaccttttgttgatctctcagttgggactcctcaagaagatgtcaatgactctgaggaacctggcaccaccatggagcctgaggaccttccagagacagaggataatgcatctacaccagagaaatttgaatctgaatctgataaatcatctgcacaggttaacagcgagcctaagctagagtcaccaggagatacagcggttccaaattcggatcttactgaaccacgtgatggagagctgaataaatcctccccctcccatggcaaaggtgaagccaagaaaacgacgactgataatgcctctaatcctgactctgttcatcaggatcaggcagccagtatccctatgatacgtgagagcatatgggaaggtgcaattcagctgaacgtgtcttcactctctaatgttgttgctattttcaaaagtggtgaaaagccatcattaaaagtttggcgtagctttgttgagattaagggaagagttaaacttagtgcttttcaagaatttgtcgagcagcttcccaaatctagaagccgtgctataatgataactgagctgtgttggaaggagggttcatcagaga

SEQ ID NO: 31130 - DNA, 3505 bp, Zea mays
  Clone ID: UC-ZMFLB73131F05_FLI
ttccattcccccccagacgccgctaccgtcgccgccgcacgcacgcttgccccgggatctggagatctggtagcgccagggggatggaggccagcgccgggctggtcgccggctcgcacaaccggaacgagctcgtcgtcatccgccgcgatggcgagccagggccgaagcccatggaccagcggaacggccaggtgtgccagatttgcggcgacgacgtggggcgcaaccccgacggggagccgttcgtggcctgcaacgagtgcgccttccccatctgccgggactgctacgagtacgagcgccgcgagggcacgcagaactgcccccagtgcaagacccgcttcaagcgcctcaaggggtgcgcgcgcgtgcccggggacgaggaggaggacggcgtcgacgacctggagaacgagttcaactggagcgacaagcacgactcccagtacctcgccgagtccatgctccacgcccacatgagctacggccgcggcgccgacctcgacggcgtgccgcagccattccaccccatccccaatgttcccctcctcaccaacggacagatggtcgatgacatcccgccggaccagcacgcccttgtgccctcgttcgtgggtggcggggggaagaggattcaccctctcccgtacgcggatcccaaccttcctgtgcaaccgaggtctatggacccttccaaggatctcgccgcatatggctacgggagcgtagcatggaaggagaggatggagagctggaagcagaagcaggagaggatgcaccagacgaggaacgatggcggcggcgatgatggtgatgatgcagatctaccactaatggatgaagctagacagccattgtccagaaagatcccgcttccttcaagccaaatcaacccctataggatgattataataattcggctagtggttttgtgtttcttcttccactaccgagtgatgcatccggtgcctgatgcatttgctttatggctcatatctgtgatctgtgaaatttggtttgccatgtcttggattcttgaccagtttccaaagtggtttcctatcgagagggaaacctatcttgaccggctgagtttaaggtttgacaaggaagggcatccttctcaactcgcccctgtcgatttctttgtcagtacggttgatcccttgaaggaacctccattggtcactgctaatactgttctatctatcctttcggtggattatccagttgataaggtttcatgctacgtttctgatgatggtgctgccatgctgacatttgaagcattgtctgaaacatctgaatttgcaaagaaatgggttcctttctgcaaaagatatagccttgagcctcgtgctccagagtggtacttccaacagaagatagactacctgaaagacaaggtggcgccaaactttgttagagaacggagagcaatgaagagagagtatgaggaattcaaggtcagaatcaatgccttggttgctaaagcccaaaaggttcctgaggaaggatggacaatgcaggatggaactccatggcccggaaataatgtccgtgatcatcctggaatgattcaggttttccttggtcaaagtggtggccatgatgtggaaggaaatgagctgcctcgattggtttatgtttcaagagaaaaacggccaggctacaaccatcacaagaaggctggtgctatgaatgcattggtccgagtctctgctgtactaactaatgctccttatttgctgaacttggattgtgatcactatatcaataatagtaaggctataaaggaagcaatgtgttttatgatggatcctttgcttggaaataaagtttgctatgtgcagtttcctcaaagatttgatgggattgatcgccatgatcgatatgctaacagaaatgttgtctttttcgatatcaacatgaaaggtttggatggtatccagggcccaatttatgtgggtactggatgtgtcttcagaaggcaggcattatatggctacgatgctcccaaaacaaagaagccaccatcaagaacttgcaactgctggccaaagtggtgcatttgctgttgctgttttggtaacaggaagaccaagaagaagaccaagacctctaaacctaaatttgagaagataaagaaactttttaagaaaaaggaaaatcaagcccctgcatatgctcttggtgaaattgatgaagctgctccaggagctgaaaatgaaaaggctagtattgtaaatcaacagaagttggaaaagaaatttggccagtcttcagtttttgttgcatccacacttcttgagaatggtggaaccctgaagagtgccagtccagcttctcttctgaaggaagctatacatgtcatcagctgtggatatgaagacaaaacaggctggggaaaagatattggttggatttatggatcagtcacagaagatattcttactgggtttaagatgcactgccatggttggcggtcaatttactgcatacctaaacgggccgccttcaaaggttccgcacctctcaatctttccgatcgtcttcaccaggttcttcggtgggctcttggttcaattgaaattttcttcagcaaccactgccctctctggtatgggtatggtggtggactaaagttcctggaaaggttttcgtacattaactccatcgtatacccttggacatctatcccgctcttggcctattgcacattgcctgccatctgcttgctgacagggaaatttatcacgccagagcttaacaatgttgccagcctgtggttcatgtcacttttcatctgcatttttgctacgagcatcctggaaatgagatggagtggtgtaggcatcgatgactggtggagaaacgagcagttttgggtcattggaggcgtgtcttcacatctctttgctgtgttccagggactcctcaaggtcatagctggtgtagacacgagcttcactgtgacatccaagggcggagacgacgaggagttctcagagctgtacacattcaaatggacgacccttctgatacctccgacaaccctgctcctactgaacttcattggagtggtagctggcatctccaatgcgatcaacaacggatatgaatcatggggccccctgttcgggaagctcttctttgcattttgggtgatcgtccatctttacccgttcctcaagggtctggttgggaggcagaacaggacgccaacgattgtcattgtctggtccatcctcctggcttcgatcttctcgctgctttgggtccggatcgacccgttccttgcgaaggatgatggtcccctgttggaggagtgtggtctggattgcaactaggaggtcagcacgtggacttccccgtcagtgtgtggtcgaagaagtatttttgcagatgttttgtgcccatatttcttttttcaatttttgtccctctgtagatagaaacaaggggagaaggggaaaaaaagtacttgtatttcttttgttcc

SEQ ID NO: 31131 - DNA, 1005 bp, Zea mays
  Clone ID: UC-ZMFLB73131F10_FLI
gggcgagcaacagcggccaagcactcaagtgttccgcgctcggcactttggcttcgggattcctgacctagcgcagccgccaccacagcgctgcccctgtcgcgatagctctgcgtcgccgctcaacggaggccgacgaggtgacgagaagcggaggccgagcagtcgcacttgcaggtccagtcctgctggtccgcagtccacagttcgccctctaccctctgctctgggatctgcagtaccgtctgcttcggcctcagcactgccatccgcttcagcctctgcactaccgtccaagtcaagtcgctgtatcaccttagcccatggacgctccccatgccttgacggcttgacctccgatggagaggaagcaaggtgagaaatcacgattgtttgttgactgtgtgaggccgtaaaaattgagatgtatttttaatatttttgtaatgctaaccatgtcaaatatgtctacacggttggatgaagttgtactgctgtaccagttcactgtatttgtagactacactacgccatgctttgccaatgaaccagccatcatgttctacaaaattggaggatgaactagccatgatactttgccaatgaaccagccgaagagatctcctctaccttggcagcacgatcaagaatgctgttgtcacggtccctgcctacttcaatgactcacagagacaggcaattaaaaaagagaattgatctttttatgggcgaagtgtcttgttagcatcaagtaagtggcgacatcacaacccctacaagcttgtgtcttaaaacaagaggatacaagaagttggagtgcttttgtgaaggcttttgcgaatcacttgaagcgttggtacttttgtgaatgattttgtaaagtgtttgcaaatatgtgcaaaacataataacatgtgtaggttttgtgaatgattttgttgtggtgcttgttgatggtttatgtgatgtggatctatcattgtgcaatactaattaaatttgtat

SEQ ID NO: 31132 - DNA, 737 bp, Zea mays
  Clone ID: UC-ZMFLB73131G05_FLI
agtgcaacccggcggtgggcgacttcgggctggcgcggctgctgcatggcagtggcagtggcaggcaggtggcgatggcgggcagccggttccggcagggcggcggcggcgggatggggtacgtggccccggagctggcgtgccagagcctgcgggcgaacgacaagtgcgacgtgtacggggtgggcgtgctgatcctggagctggtgacggggcggcgcgcggtggagtacggggacgacgacgtggtggtgctgactgaccaggtgcgcgcgctgctggagcacggcaacgcgctggagtgcgtggacccgggcatgggcggacgcgggcacgtcccggaggaggaggtggtgccggtgctgaagctgggcatggtgggcgtcgcagatcccgtccaaccggccgtccatggcggaggtggtccagatcctgcaggtcatcaaggcgcccgtgggcggcggtggcagaatgcaagcctccttctgatccgggcgccgtgaccgttgggcgttggcatgcgttgcaggcagggcaacggcatctctggcctggctcggtcggcggcagcccgctgcaagtactatgtgtgcattcatgctagtatagcatggcaagcacagtagggctagggacgagggcagcttctagctccgtctctttttccatgcatgcgtgtccattcattttcagccccactgtatgtaccttgtacttgtacgggcttctcttctcct

SEQ ID NO: 31133 - DNA, 1423 bp, Zea mays
  Clone ID: UC-ZMFLB73131H04_FLI
acaaatatatttcaaaggtcttgttggatcattgcgactaggaggttgtctcatatacacctcttcttcaagcacccaatgcaaagaatgcattctgaatgcctatttgtttcatgctccatatttgagagattacaagtgataggatgactctgattgttgttggtttgataactggacaaaatgtatcaagataatcaatagcatacttttgctttgtgacaagtctagctttaagtctatgcactaaattaaaccatcaacctttctcttcactttgaaaaccatctactatcaatgagatctattcctttccattatggaagcagctcccatgtgtgattcctcttttgcatcttgtttttgacaaaaatcagaggtaaagggtatgatatatcatcaacacctagaagttcattgtgtagcgtgtggtcatgcttatttgttttgtgcttgcattctactctttatattgaaaatcataatttaaaatgtgaaaatgcactacataagtgaattgtcattgcgagtaaaattaatatgatcaagttcaataaccatgtgaagtgttgttaaaaacatctagtttccaaatgtgaatacatcaaacatgggcgaatgtgttcttataaatttctctaaaaaataagacgagatgataagtattccaaattcatatatacctcatgctagctcttctatttttggaacctctgtctaatataacacaaaagaattttttcctaatgtttaagccttcccttggttggtgtgaggtgttcatgaaggggtttcatgtggtttgcatagtatactttgcaattgtattgactattatttaactatattagagtgcttttgaacaaagggagttttgtaaaatatgtatatctatgatgtatatatgtcctaataataatttcatatgtccgatgtttgtaataaacaacagctccagagaagaggcagcgtgttccttcagcatataacagatttattaaggaggagatacgaaggattaaagcatgtaacccggacataagccatagggaagccttcagcactgcagcaaagaattgggcacattttccgaatattcattttggtctagggccctgtgaaagtagcaacaatcttgatgaggccaccggtgcaatgtgccatccccagaaagtccaagatctctactaagacctatatcagcactgccctttgtttcctcttagttctggactagttggtgagtgccatatatatatgcatgagtgtgatatgatcatgaggtaaggaattatgattaagatgatatatatgtacgagatgaacatgcccctaggttcatgaaagactaaataaggatcgtcatctcaccatgttatcataggtagtaactattgtttgaaataaattatcctttgtgtgc

SEQ ID NO: 31134 - DNA, 597 bp, Zea mays
  Clone ID: UC-ZMFLB73131H08_FLI
cgtcgacgagttccgccgaggtggccccgagcgtggcggtggacttcgtgcggcggtcgtgccggtcgacggagtacccgcgcgtgtgcgagagcacgctggtcccctgcgcggctggcgtggggcgcagcccgcgcctgctggcgcgagcggcgctggtggttggcgccgaccgcgcgcgcaactgctcctcctacatccgcggcggcggcggcggcgcgatgaaggactgcgcggagctggcgcgcgacgcggaggagcggctgcggcagtccgcggcagagatggagcggatgggccgtgccggcacaccgcgcttcgcttggtccctcagcaacgtccagacctgggccagcgccgcgctcaccgacacctccacctgcctcgactccctcgcccagcagtcccgcggtggcaaggacagcgacgacgccgtcagggtgaagaggagggtggtggccgtcgcgcaggccaccagcaacgcgcctgggactgtcctgacctattttatgaggtcttgattggatgtatatatatattcatcttaatctatatggatttctgaagtttgatctaaagttcacaccagattactgc

SEQ ID NO: 31135 - DNA, 2362 bp, Zea mays
  Clone ID: UC-ZMFLB73132A06_FLI
attattacacaataccatatatgacgttgttcccctttctagcaaggttaggtttatttcttgcaagccagcacttctctttagactatgtgtataatcggatttcatatgaacatttcagttaacagttttggacactcagcttcctgttaaacaagcatttaaaataatgcatgatgaggtatgtatgttactgtgcttgctagagttgcttcaaatagttcactttccctctatggtgcttgtttgctctcatttcaactttgctctgtttttaatttcattttgaagaatttttaaaggtgtgctagcaattatttgcctttttaagtagcagtttaatttgttttcctattatgttttgcagtttaaaaacacaacaaaatcgctcctagaagcaggcacttctttcatctgcactgcatacgtggcatcagtttaataatttaagaatagcttcaaaccttttgtgtctcatagggtcttgctctggttcctctttgggatgaccgtcagggaaccataacaggcatgctcactgcatcagattttgttttaatcttgagaaagttgcagagaaacattcaagttattggcaacgaagagcccatttctgcttggaaagaagcaaagctacagttctatggtgggcctgatggtgctgccatgcagagaaggccattaatccatgttaaggattcagataatttagtggatgtggcactgactataatcagaaatgaaatatcttcagttcctatctttaagtgcatggcagattcatcaggggtgcctttccttaatcttgcaaccttacaggggatcttgaaatttctttgctcgaagctacaagaagaggctgagggctgttcccttctgcacaatcagcttctcagtattcctattggtacatggtctccacatacggggaggtcaagtagcaggcaactcagaactttgctactgagttctcctctaaatacctgcctggatattctgcttcaagatagagtaagctcaattcctatagttgatgacaatggatccctccgtgatgtctactcactcagtgatatcatggctctggcgaagaatgatgtttatgctcgcatcgaacttgaacaagtgaccgtacaaaatgtaatccatttcctcttgctttttaattttagcagacactgctgctttggcatttttttttttgcatatactcacataactgaaaaacagcaattcctctgcttttgattttgatggccagcattcaacacaagtcctttgcagtattgtgttccatcagaatggaaaatgcaaacaagatttgtgttccactcttaagtccaatagcccattatgtttaatatatgaataagtctattttagaatcacatcctgaattacgaaacaggttatttaccttttcatcttgacagaactgaccagatggctgcaaacaacgtggtagctgtagattgtgacagaactgaccagatggctgcaacttgcctcgtcaatacttcagagcttgttaatgtctactcaaaacaatagtcgtggtaggatctgaatgcggtgagtggtgcaaatatgagttcttaggttggggctcatttcaacggtggtggcagagcacctaggatatggtctgacggagacaacattggattaaggagagttgatggtaaattagctcctcaaacttgctttgaatctaatcagaggaagcaggcagaacaacccaaaaaatagactcaggcctgtttggcagagctcggctcctagattctctggctctgctctttgattctctagtgaagacgtgaagtgattgtacttgattatggtgggggagcagggtgggagtaggtgagatttgattctagatggttttgaacagggagtagtggatatcaggttttttagctgccaccttgtaatgtaaatggagaagtgattcttgcctgcgtccattcaaagtgttgactttatagcagttgttaatgtttttatatttcatcataagacttgcataattggttctcagagaataatacaatccttgtcttttactctatattaggctttggatgtgcaataccaggtgcatggccgaagacagtgtcatacttgtttacagacgagtaccttgctggaagttttggagggattgtccattccaggagtgcgacggcttgttgttattgaacaaagtaccagatttgtggaaggaatcatctcattgagagacgtatttacatttctccttggatagcatgtgtagccattccatacatgaaaaagcttgctgtacttggttcaaacgaaataaaaagcttacaaatgtgatagtcatcttcttgtt

SEQ ID NO: 31136 - DNA, 678 bp, Zea mays
  Clone ID: UC-ZMFLB73132A08_FLI
gtttgagcttaacgggaaaggaacactaaaacattttaagattgatgatgtcagtgttactcatttggatattggggacaatactgatcatttggaggcagtagacgtgagcaacttcacaatagtctggccaaaattctatagcatgatatccagggcatctaatttgcgtatgctacgattttggggtgttgtgtttgatgacgaggatgagatcgtggattcagaaactatagctgtttcatttcctcttcttaggcatctttcattgagttatgaattacgagatgggttacttcactacagccttcagggatcatcattactggagaatgtctcagttctggaacttggttggacagtaataagtgagcactttggaccctgggtgtttggtatgattggaaggtgtccaaatctcaagaaacttgttattcatggtgttctttctgagacaaaaacgcgagaggatcgccagatgttagcaagctttacctcattcatagtctgtgtcatgaggaagtatgtgcatgttgatgtacaatttgagtatgagtgacagctactaggttgggtgggcatcttgtcattgttcagatgaagctgtgccatcaggtaacctcttgcttattgtggcttcaaaatattttattcagcatggtcttattacagattctc

SEQ ID NO: 31137 - DNA, 1913 bp, Zea mays
  Clone ID: UC-ZMFLB73132D06_FLI
caaaagtctccgcccgtcggccgtcgcccgccaaaggtctcttcgatccggcctctccgggccacccagtcggccagtcccacacaaggatggatcgctagcgccgatgagctatactctttgctcactgtactagtcacacgattggctacacgacacgagctcagagctctcaggtttcccaacgccggctgctggccaatggcgcagcaccacggcagccactccctggaggtcggcggcgtcggcgccggcggcgtcgagctcgacgacgacggccacgccgcgcgcaccggcaacctatggacctgcttcgcgcacatcatcaccgccgtgatcggctgcggcgtgctggcgctctcgtggagcgtcgcgcagctgggctgggtgggcggccctgtcgccatgctctgcttcgccttcgtcacctacctctccgccttcctcctgtcccactgctacaggtcccctgcctccgatgatggctccctgaaacgccagaggaactacacctacatggacgccgtcaggacgcacctgggtacgcgttgctcctgcatccttgttcttgttcctatcatatctatcggctagcgtattagcctttgcacatctttccatggcgactccacttacgagagctagcaagagcaacgcgcccaggggagaagcgcacctggctctgcggcctgttccagtacctcaacatgtacgggaccgcaatcgcctacaccatcaccacggcgacctgtctcagggcgatcgtgagggccaactgctaccacagccagggccacagcgctccctgcggcgccggcggcgaccacctctacatgctgctcttcggggcggcccaggcggtgctgtccctcatacccaacttccacagcatggcctggctctccgccgtcgccgccgtcatgtccttcacctacgccaccatcggcctcggcctcggcctcgccaagaccatagaaaatggggcgatcaaaggaagcgtcgccggagttccgatgagcaccgcgccgcagaaagtctggcgagtcgcgcaggccatcggcgacatcgcgttcgcctacccgtacaccattgtcctactggagatacaggacacgctcaaatcgccgccaccagagagcgagacgatgcagaaggggaacgtgctcgcggtcctggccaccacgttcttctacctcgccgtggggtgcttcgggtacgccgccttcggcaacgctgcgccgggcaacctgctcaccggcttcggcttctacgagccgtactggctcatcgacttcgccaacgcctgcatcgtgctccacctgcttggtggctaccagatgttcagccagcagatcttcaccttcgcggaccggtccttggcggccaggttcccgaacagcgcgttcgtgaacaaatcctacgccgtgaaggtgcccggcgcgccggcgtcgtggagctacagcctcaacctgcagcggctgtgtttccggacggcgtacgtggcgagcaccacggggctggccctcctcttcccctacttcaacgaggtgctgggcgtgctgggcgccgtcgtcttctggcccctcgccatctacctccccgtcgagatgtactgcgtccagcgcggggtcctgccgtggacgcggacgtgggtcgcgcttcaggcattcagcgtcgtctgcttcgtcgtcggcaccttcgccttcgtcggctccgtcgagggagtcatccgcaagaggctcggctagttgtggtattagcgccttttctgtcgtcaaccatgtcatgaatggtggaagtgtgtaaagagagtgtactgtatctaagttttttttatttccctgtgttcgcttagccatgagcccatgaccatgatgattgatgaatatatctacccgtgcgtgtttagatcc

SEQ ID NO: 31138 - DNA, 921 bp, Zea mays
  Clone ID: UC-ZMFLB73132E03_FLI
agcaagttgactatcttcttaaacaagcaacaagcattgacaacttatgcaatatgtacgagggatggacaccttggatatgattcaaagatgtgactttccttcattgtgcatggacaaatagtccagctgcacaaaaaaacgaaggaaccgtagcacgaccaacacatgatatggctgctatggatgctagtgaaacaggagggtttgaattcgatccagcccctcaaatgctggcaaagaagaggctccatggtacgcatgaatgttgaatggctatggattggtccaagtgaattagccaaataacaatcgagcatacacgtgcagcccatggcctggtcatatacaatatcttttctgccgaaccccatatattccgaatatcaacaatgtggaacgctaagctagtgtactgtttttgtaatcgggcttgcacatggtatgcgtcaaatgtgcaattgaacgacccagcatttgcaatttgatggggacacggtacacggcccctctggattaagagttgaagaccttgtagcgacggttgacctggccaaagaggcagagaacattgaagaaaagatgagaaggcaagttactttaggctgacccttgattgttggtctattttggacccctcttcttaagataatgatgtgcagaaaaaaaaactatcctcttttctccataggaaccttatcaactgatgtagactttatctggttcaaatataatgtacatgctgtacctatggttttggtagttcccttttgtaacatataaaggtagacccactgccagtcttccacctttgtggggtgtagtggagtaaactgaggcaggagaggctattttgaacccatgacttggttgactgagacggcgttcatcgtacatagatgttggaaatacaatttttgg

SEQ ID NO: 31139 - DNA, 733 bp, Zea mays
  Clone ID: UC-ZMFLB73132G01_FLI
ttctcctccccctcttaccaagtcctcctcgggttagggttccttagggttttgtggaggggcgatggcggcggctgatgtggagtaccgttgcttcgtcggcgggcttgcctgggccaccagcaacgagtcgctggagaatgccttcgcctcctacggcgagatcctcgactccaaggtcatcaccgaccgggagacggggaggtcccgcggcttcggcttcgttaccttctcctccgagaactccatgctcgacgctatcgagaacatgaacggcaaggagctcgacggccgtaacatcaccgttaaccaggcccagtcccgtggcggtggcggtggcggcggtggctacggcggcggtcgcggcggcggcggcggttatggtggcgggcgccgtgacggcggttatggcggcggtggcggctacggcggtcggcgcgaaggtggcggcggcggctacggaggcggtggcggctacggcggtcggcgcgagggtggcggtggcggctacggcggcggtggcggcggcggctggagggactgatgtgtgggcccatcctggcttcggccgagttatcttatctatctatagtatcgtgttaccgttcgcttctgtcaccgtgttagtgtccgttctacctttggattaggtgttggtaccctgttgttcgctttggttgctcccgctatgaaacgagacgagagaagaatgagcaaggtttttgttcgcagc

SEQ ID NO: 31140 - DNA, 1330 bp, Zea mays
  Clone ID: UC-ZMFLB73132G03_FLI
gcggcagttctcttacagtgagctcgccgccgccaccaagaacttctctgacgaccggagactcggcagcggaggctttggatccgtgtaccgcgggatcttgacaaccgacggcaggaaccgctgcgtggccgtcaagcgggtgtccaagaccgcgcggcaaggctggaaggagttcgtctccgaggtggtgatcatcagccggctgcggcaccgcaacctggtgcagctaatcggctggtgccagggcagcggcaacaagctcctcctcgtctacgagctgatgcccaacggcagcctcgacgaccacctccacaggccggacagcgtgctgatgtggccggtcaggtacggcatcgcgctcggcgtcggcgccgcgctgctgtacctgcacgacgacgccgagcagcgcgtggtgcaccgagacgtgaagcccagcaacgtgatgctggacgcgtcgttcaacgccaagctcggcgacttcggcctagcgcgcctcatcgacgacggccgccgctcgcacaccacgggcgtcgccggcacgttcgggtacatggacccggagtccatgctcgccgggaaggccagcgtcgagtcggacgtgtacagcttcggcgtcttcctcctagagatcacgtgtgggcgtcggccggcggtgctcgtgagagaggaggactacgtccacctggtgcagtgggtctgggactcgtacggtggcggaagcatcctcgacgcggccgacccgtggctcggcaacaacttcaacagccaggagatggcgtgcgcgatgctcgtcggcctctggtgcgcgcacccagaccgcagcctgcgtcccacgatccggcaggccgtcaatgtgctgcggttcgaggcgccgccgccgagactgcccgccaagatgccggttgcgacgtttgggccaccggcggctcatgcttccggctcaacaacgtcgtctgcagaagcactgatgacctggggcagtagcctgccaaccatggcaatggcagcgtcatcactcgacatcgagcattccagcacgaaaacatcttgatgtaatggcaagcaacacattgtggatttttatgtccgaattatttttatttttatgggccgggggatggttcatccagccatgtagcacagtatgagtgtgagccaagtcaagtcgacggggacagaacaggtcaatcagtgccatgatgtgcggcagcgacgactttgctcaacaagacaaggaccgggggggcggagctaacgtcgagttcggcaaggaaatacgtagacaatttctgtgaaatggagtggagttgccatgatgtttggttcg

SEQ ID NO: 31141 - DNA, 859 bp, Zea mays
  Clone ID: UC-ZMFLB73132H03_FLI
cttcattcccagccgaagtccactgttggaacacctgcttatattgcacctgaagttttgttgaaaaaagaatatgatggcaagattgctgacgtttggtcatgtggtgtaaccctctatgtaatggttgttggcgcatatccttttgaagatccagaagagcctaagaacttccgcaagacaattcagcgtatcttgaatgttcagtacgcaattccagacaacgtgaacatatctccagagtgcaggcatctaatttcgaggatttttgttggcgatcctgctacgcgaataacaatccctgaaatccggaatcatagttggttcctgaagaaccttcctgctgatctgatggatgatgatagcatgagcaaccaatatgaggagcctgaccagccaatgcagaccatggatcagatcatgcagattttaacagaggccaccataccacctgcctgttctcgcagtataaatgtcctagctgatggactggacatggatgacgacatggatgatcttgattccgactcagatcttgatgttgacagcagcggtgagattgtgtacgcaatgtgagtaacatctcagcagccatctcagcagtcaaccaaggaaccaatcaggcatgggatgccctgttgtatactctggcaaagggcatgcttccttttgtgaaaaacatccatgtagttttctcaaggaatcgcaatgtgttctgtggaacacatatgttgtagtcaaactcgggttactcagcttgtaaaactagcctcctcttgcttcctggttactgggctttggatactctcaggcttcgacttgtgtgttgctgttaaatatgtataagaaacttctactc

SEQ ID NO: 31142 - DNA, 1286 bp, Zea mays
  Clone ID: UC-ZMFLB73134A03_FLI
aacacgttgcaggcagaagttgaaaatcttagtctgcaggagcaagcactagatgagcgtataagtgacatgcgtgaaaaactaagggggttaactgaagatgaaaataataaaaggtggctctatgtgactgaagacgacatcaagggattacccagctttcagaatgaaacactaattgctattaaagcacctcatggtactacacttgaagtacctgatccagatgaggcgggtgattatctccaaaggagatatagaattgtattaagaagtacgatgggaccaatagatgtttacttagttagtcaatttgatgagaaatttgaggaactgggtggtgttgcgacacccgtcaagcattccagtgtgcccagacatcaacccgcggaagatttcaatacttatgctggacaaagtagcacaccaatggacgtggcacatgatgtacagcatggccagaagattccccaggatcctagtgctttgcatgactttggagggatgacaaggattagtccttccgacgtccatacggattctgattactggctcctaacagagggggatgttagcatgactgatatgtggaaaacaggacaagaagtgcagtgggaccagatggatttcctgtcagaagatgttgtcacccctcgagcccataatcagcagccggtcacagttgacgggccacatatggaggttccaagcatggacccataagacattaatggctcaacaaaactgacatctggagcggtgagttctcgtgtgacagcaaatgtttattgcaacagaagggccagacggtttcatgagcgtatgtcatctggagtgtagtcagggcagagcagtccacaacttcagattggtgcacgcccggcacctctgttgtgaagactgacgagctcaactgactaagttaacagtctactgcctgattagtaagcgcagcactttagcttagcagacactgaagcgccagtttcttcgtgactggtgctgtgcacttgctctcatattcaccaccgctccattcgcttaccaagctaacattatcataccagatcagtggacctccactgaaaaatgctgcaaaatgtataaaacatcaggacaaaacagtgcacagtgcaaggggtgttggcgttacaggatgagctatcgattgaaggcaggaaattctttgtacaattgtttgatgccccaaaacagaacaaagcagagctgttcgcttgtaaacaaatgtttctatgcatgtatttaagaggagactccattttttt

SEQ ID NO: 31143 - DNA, 1305 bp, Zea mays
  Clone ID: UC-ZMFLB73134A10_FLI
gctagagacgcgcagtcgcgcagagtcctggctttttgcccctttccggctttgccccccttccccccaaaccacaccgatcccaatcccgccgtatccggcgaacgcgcgccgcggccatgtgcagctgctgagagaaggagcgagcgcaacgacgccactggccatggacgagggctattccaacctccccaccagccacctcctcggctccgtccccgctgtgacacaagatgacaggaaattgggtccccccgccgcccaagatgcagctgccacctctcggttgcaggagttcccacctggaggtggtaatgttggagggtatcggccaccaggtggccctgcagatggagatgttgaaaaccaagcagattggaaaggatacttcaatgttgcatcttatgctccatacttcaatgttgatactgatgttgtagttgacaggctcatcagttcagtttatccaatggatggtttttacaggaaaattgatgctaatcctgacatgtatgggcctttatggatcaccactactctgattttcatgcttgctgtgtttggtaactatgccacttatctggtgcaaactaaaaaggatatggacatatggaactttgatgttggttatttcagttgggcagcatcagtcatgtatagttatgctatcattgtgcccgtcgtgttctttttcctgtttcagtattttggatcacgcccaagtcttgttcgattttggtgtatgtggggctattctctgtttatcttcatacctgcatctgtacttttgcttattcctgtgggatttcttcaatgggtcatcatagctcttgctggtggtgcatcatcttggttcatcactttaaatttgaaggaatgcactgaaggagctgatctaatggttctgatggctagtgcatcagtgctgcaatttgctctggcactgttcatcaaagtttactttttcgcctgaggtttgcttgatgattttgcaaaggtgacctgatgcgccctttgcccacggcttgttctggaatacatcttttgaaagggcatggcagaccagttctactcgacatcgtgacatacgtactgaccctagattgttatgctttgggcgttcttcatttgaagtgtctaatctgcaagtctctatctagctagggaacagaattttacagcgtgccgtacagagtaccgagtttaggcaccaaagtctttccacgttgttcagtgaaagcccttcacttggatttgcatacaatcctttcttgggtaaagatctccagtgtgtatttgtgtgct

SEQ ID NO: 31144 - DNA, 2606 bp, Zea mays
  Clone ID: UC-ZMFLB73134A11_FLI
gccttgaaaaaaactcaaacattcggccaacgaagatcaatatacaaagtagtagcaactaacttgttggtatacttacagaaatacttggttcagatcttttttcagtagcaacaaacgaaagcactgcatctatgtcattcctcgtcagacttctgctgcttatgttgcttcatgggatcctaccggtatcaacttcgttcaattaggcgccaacaatagcgttctgcagtgagacgagccgacaagccttgctggaactgaaggccatcctaggctagctatcgagcaggttgtcctcttagaacagtagtggtagcctatgcctctggccaggtgtgacatgcagccgtaggcacgagggcacgatctcagtgcttgatctcagctctgtcggccttgcgggcaccatacccacgtccgggaccaacttgacatttctaacgagcctcaaccctgcaatgcattattgccatcggttgcatgtagttgcttccttcatccagcttcagcttcctatcctttagcaaccactctctttccatttgacatagctaactcccctaattactttcacttggattcactttgcacctcagtagcaatttcctgttgggtcaacatccacaaatctttcttatcaagatcacatagacagctccacatgcaagaagcatgtacatggcaatctcctagagcaaaatcagatcatccctttcaatacttgggtctgccttcatcataacaacaacacttgcctccagaacttcatcattgcgatcagtcaagacgacctctttgcagaaacagtttttaagtagcaggtcaccaaatttgcttgtacaggtatcaccaaacaagaaacaccaagccagatgccctgagcaaaagacatttgtcgaagcaaaactttaatgtttctttcaaacaccatcaataacatgagctaatttcagcaaacaatgtgtgcagtgttgataaaaacatctatgagtcgttgatcctggaatgagattgtgcaaagctcttttgtgcccatcattgagtttgtcgcagttctgttatattagtatacaaattttaagtacaagatattttttgtttgttaatattcaatttctattccaaataaattttggtagttacttatatatgttgagtcaacattaattggaaaaggtaatgtaaacttttcttggaaatgatataaacttctaaagttcacttaaagcatcaaatagattgtagactaccaatttcaaacagtggttatagattaagaaatttaccttgtggattatattgatgtctttcacaaagtgacaaaattcaactatgtttatgttatcgatgtcaagggaaaacaagaattggtttgtggtcatagaagacacagtgctaccattcttgattgttgatcagaacatgtgtggaagaccttgttaaaactaccaaggtctggatgtatcatcaattcctagctcccaaaacattgtaaaatctattaaggtattcatctaggtgggaaaggactgctttcagctacaatccaaaaggaaaatgaatacatgtaaatgcagttaggagaatgagaaacggatgccaaagtttgtttctgaacaacacaatttcacctgtaaacagcacatggcagaaaaatgcaagaatcctagtttttagcccaagtaaacaccaaaaatgtcaatttagaaagcatgctcaagtcatgtatggactgaatgttgctttcaaaatgaaaattctaaacctaaaccagatgaaaccatatatagaatctcttataatgtgccatacaaccccataggcaagctaagctaactccaccactaaaagaccctctttgtttatgcccctttataagccaaataaattcctaaatctcccttttgtgctttgacaatagtactgaatgagcatcaggcacacaaaatacagagctatatgccatttatgttccagcaaaaatcataactaatggacaacatggaatgtagatgtttatgttcattgaatgaaacacaaagcaatacaattgcaactaagtataatgacctatggcacaaggcaaaatactatttgccagactgtgatggaaaggttaatgaaaggtgagagtaacctaagaagatgtaagctttgacttatatatcttattcaaggaatcaactaagttgtcagcttcatctatgatgacaacactgttaattagattaaggacaagtgattatctagcataattgagtaacaaagattgataaggaagcacatattatagaactataaatctatagagcaagtgaaattggggtaaatctagggacttgtctatcatttttttcagacattcttcagaggatccacgcttttctcagtttgtttgaccgaattcaagcaaacaaaaaaacataattatgggtcataatccgaatgaataagctaaaaaatggattcagaaggaagaatcacttaagtgggaagagccttcaatcgggatggtcctaaatttagctggtatgtgaatcaatagtatggccagatactcggagcgccagcaatgggatgtactcaaatatcgcaagtcaaac

SEQ ID NO: 31145 - DNA, 1995 bp, Zea mays
  Clone ID: UC-ZMFLB73134D01_FLI
cactgtttcttctctcaagggaagcgatgatgtctcatgtatggattacgacataagtttcaagttatctcttggcaatgaagatacttccaagctgcataaacaggcttgtggttctaaaaggactatggagaagcctcggttggatcttaagttatctttggctccatctcaatccgatgtaactgacgcggatctaatcagaagcagtgcacctcaggacatgtttgtgcagccgtacttgatgtcctcagtgccaacagtcgatgaaggatctacatctgctcgacatccatctggaggcatggtggtttccttccttaaccaggctgggatttctccgaaccagttgcccccacttaactctcatctggtccagggtccagcttgttcagcaccaacagtgctccaactgccaaaaagttcagctgccacttcttctgggtttgtccgcccacagcaacgcaacggtagcacaaagatctgttcagagccaggttgtgcaaaaggagccaggggttcatctgggcggtgcattgcccacggtgggggcagaaggtgccagaaagaaggctgcaacaaaggagccgaggggaggaccatcttctgtaaagcccatggagggggcaagcgctgtgagcgccttggatgcaccaaaagtgccgaaggccggacagatttctgcatagctcacggcggcgggcggcgttgcagtcatgacgggtgcaagagggcggcgcgaggcagatcgggcctgtgtatcaagcatggtggcgggaagaggtgccaaacgctgaactgcacaaagagcgcggaagggcggtcaggcatgtgcatcgctcatggtggcgggcggcgctgccagtacgctggctgcgggaagggagcccagggcagcacaaacttctgcaaggcccacggcggcggcaagagatgcacgcaccccgactgctccaagggcgcggaggggagcacggcgttctgcaaagcccacggaggcggcaagcgctgctcggctgacggctgcacgaagagcgtgcacggcgggacccagttctgcgtcgcgcacggaggcgggaagaggtgcgtggtggaagggtgcgggaagagcgcgagaggcaggaccgaccgctgcgtcggccatggcgggggcaagcggtgccactccgccggctgcgggaagagcgcgcaggggagcaccgatttctgcaagtcccacggcggtggcaggcgctgctcgtgggggcaccctggctcagacctcgggtctggtggcgctccctgcgaccggctggcgagaggcaagaaggggctgtgcgaccggcacaacccgctggtccatgacaacagcgtgcatgggggtgcgtcgttcggtggcttcagtgtcgtcagtgccgccgccctttctgagggagatggctctccatctccaggcaccgagacaagcatgcgcagcttcttcatgcacgcggtggaggctcctcgctgtgtggcggcctcggcccatgaaggccgggtgcatgggggcaacttcatgcctatcatgctcgacggtggcgtgggactcgggaagaggccggccgacaacgctgatgctggtgcctctgcccctcctcgcagctggaaaagtatggagaaggcctgtggatctgcgccgcgcagctggctgtagtatttgccagaagttcgtgacctgctcacagctcactctctccatctgggtctcctctgctcctgctccaagtgtctcccgtgtcctctggtcatgcgtggtatggtatgataacatgaactgtgtgtgtactggttggtcaggactcgggacttgtttggtactgtggatattgtggttgtttgtgctcttgtagcataggtctggtcgaacatacctactagtaacagtcgtcgtgtgcggtgtgtgattgaattgtaaatgaaaggaacgcctcgtcatgatacaaataaaaaatagtacctttcctcgcggcgcccgcc

SEQ ID NO: 31146 - DNA, 2612 bp, Zea mays
  Clone ID: UC-ZMFLB73134D03_FLI
gcgagagacgagagagagggaggtgccgaaaaaaaaaacggacaagagagggcgaagttaacactaacagggagggcagacggagaaccaggagcggcgtcgagctaaaagccccggcggcggtcatggccaccgcagaccagagccgtattttcatgaaggacgtcaaacgcgtcatcatcaaggtgggcactgcagttgtcacgaggcatgatgggcgagtatccacaggcaattttggtgttctttgtgaacaggtgaaagagataaatgctctaggatacgaggtgatcattgtgtcctcaggtgctgttggtgtggggaagcagaggctcaattacaggaagcttgtcaatagcagctttgctgatatgcaaaagccacagacggagctggatggaaaggcttgcgctgccgttggacagagtggcctcatggctctctatgatatgctatttactcaacttgatgtatcctcttcccaacttcttgtgacagacagtgattttgagaatccaaacttcagggagaggcttcgtgaaactgttgagtcactattagatcttaaagttgtaccaatatttaatgaaaatgatgccatcagcaccagaaaggctccgtatgaggattcatcgggtatattttgggataatgacagtttagccggtcttttggctatagaacttaaagcagatcttcttgttctactcagtgacgtggatggcctctacagcggtccacctagtgaacctcaatcaaagatgatacatacatacatcaaagataaatatcataacgaaattacttttggggataagtcacgtgtaggtagaggaggaatgacagctaaagtgaaggctgctctcgtggcttcaaacagtggcacacctgttgttataacaagtggatctgcatctgggagcatcattagagttctccaaggagagaagattggtactctctttcataaggacgcgagtttgtgggaaccatccagtgatgttagtgcatgtgagatggctgttactgcaagagaatgttcaaggcgtctgcagaatttgtcgtcggatgagcgcaataaaatattgctagacgtggcggatgctttggagaaaaatgagaatctaattaggaccgagaatgaagccgatgtagctgcagcgcaagatgctggatatgagaaatttttggttgatagattgaccctaaagccaggaaagatatcagccctcgcgaaatccattcgcactcttgcacgtatggaagacccaatcaaccaaatactcaaaagaacagagattgctgaaaatttaattctcgagaaaacatcatgtcctttgggtgtcctattggttatttttgagtccaggcctgatgccttggtccagattgcatctttagcgattcgaagtggcaatggtcttctcttgaaaggtggaaaagaagccatgagatcaaacaaagtattgcataaggttataactggtgccattcctagcaacgtgggtgaaaaacttattggccttgttacaagtagagacgaaattgctgatttactaaagcttcatgatgtaattgatcttgtcattccaagaggcagcaataagctggtttcacaaatcaagacatcaactaagatccctgttcttggtcatgctgatggtatctgtcatgtatacatcgacaaatcagctaacatgaatatggcaaaacaaatagtgatggatgccaaaattgattacccagcagcctgcaatgctatggagacattgcttgttcataaagatcttataaaggctccaggtcttgatgacttactgctatcactcaaaacaaaaggagttgctatttttggggggcctgttgcacatgaagtattgtgcattccagaagcaaattcattccatcatgaatatagttctatggcctgcgcaattgagtttgttgatgatgtacagtcagcgattgaccatatacattgttatggaagtgcacatacagattgcattgtcactacagatgataaagtagcagaaacttttctgcgtcaagttgatagtgctgctgtgtttcataatgcaagcacacgattctctgacggggctcgttttggattgggtgctgaggttggcataagcacagggcgtatacatgctcgtgggcccgtgggtgttgaaggtctcttaacaacgcgctggatcatgcgagggagcgggcaagtggtgaacggtgacaatgatatcgcatacacccataagaaccttccattgccatgaggccgtttttgtgcttcatcaggattcgtgtctatccagtgatgtttgatagtgtcgtcagacaggagcagagagtggtgaatcttttcgatgagggacggtgaactgcaatgtccacttatccagtcatttttatctagaacattctggtgagacacccaccaccccgataaagcagtgctgggagtagtagagcactaatgtaccgaggctgtgtctagtctaggttaaacaagagaattcggttatattgttaatttttttgggtctgattgaacatatatgttgtcagtttttgtagtgatacatatatttctttaaatcctacttgatcgc

SEQ ID NO: 31147 - DNA, 2391 bp, Zea mays
  Clone ID: UC-ZMFLB73134F02_FLI
ttgggccgtgtgcctagtgcctggcctattaactggcttgttcgctgcggctttaatccgactgcgactgcggcttctacagtattttgtctctaggaattgcagctgcaatagtattttgcagctgcaacagtgctcccgcatgggcagccgaacaagctaaacatgtacatatatacttattataccagtgaggtgtgtgtagagtagtgtactctgtactcttccagaaaactttacatggtaccggaaccgggaccagcggcgacggtgtagtggtgaggaggcagaggagtgccttcggcctcgacggaagaaggccgccgatggagaagaagaccagctgggagcgtggcgcggcgtcgcggtcgtgcacgaggaggaggagcctgcacttgccggagggagaagaagcatgtagcacggtgcggtgctgcagtcgtgcgtgagtaggttcttattattgttttctatcctgctggatatgtagtcatgacagttaaattatgtacaactatgattacaaacgggaatacaagctaggagttgagaccacaatccttatgaaaagttacactgtaagtatgtcgtcctgcttgcatttcttccatgttccttttctcactgtaagcttagtttttgtgatcagcttccagatagaagagttattaaagtagacactaaacgattccaacctcctgaatctctttttactcctgtaacacttccatttatatttatacataatggtattgtcaacagtacacatagtttccatcagtttgttaatagtgcacctttagattgaatgagcttcttgcagagcaccaaggattaggcattgaaatgtgtggataaaaatattagaggaccacacatcattattatgcaacattgtctatgcacatgaacataattgtatcggtagtaagccgccagcatgtttgaaagttaaaaatgtgaattaagaacgaattatcgtatcctgctatacttatgcaacctaccaagaattagggcattgtagaaaccatataaagtattgagatcaatttgaatttgtctgcctcatgattttttgatacctgacctttatgaaggtagaggacaacattaaggatgatcatagactaccaacattcttcttcagattaaatgttaaattcagtaatttaatttgtttcaggtgagccttcttcacatattgagcaacaataatcatcttcgtggtcatggtggtgatgaccatgatgcgcctagaaatgcatgtgtgaaatattcaatatatgtcaccatttctattttcagtaatacaagattagaccatccctgcacatctgcctatctgcctggcaaaatattatcgtcgcttccaagattgagaatatggctgcgtttggaaagccttagattctagcattgggtaacatgtctattatcccacattatctaagtttaactagatactcatattttatgaaaaaaactgcactgaaaaatcacgaggtgctagatgttgcgctagcagcagcatcatagcacatcttgtctattccagttacaaatgtgcatattgtagaatatttttgtaacatactgctgctcccttccattcgttttggttttggcaattttctatgcacgtgtcgctcatccatggtacctcttttgtactaagatcattgtgacatttaacatgtttacatcatctcttactcgacacatactcactggactaatgttcttgtccctccttttgctttccttagcagatggcggaggttctaataagtaaccttatgattggaaattgcagtgatcggttgtgtgtacgtgtctcccgtctgtgaaaaatttatgatcccgaggatgagtataagcttttccatgctcatatggtcctcatcgacgaggaggctggcagtgctcatgctcaaatataccctccactcactgacgttttcaaacctctgataaaggagggcaatgtctacaatgtctcctacattcagatcaagaaagctaataggatgtacaagcatgttgacaacgatatcatgatcggtttcacaaaatggatcctatgctgcctcaacaaacccgcggtttgaacacgtgacagatgacggcttagcttctgtggatggacatcttggtcgcttttgtagatggaatgtttggttggcttttgtagacagaattaggctgcacttgtgattgtgtaacgcttatgagcatggttgtgtggactgtgtcggccaaagtatacctcccaatgccttgtatatatcacatgcttagctgtctatccccaactaggtcgcctgataatagacttcgatcatgtcatgctattctataacaattttcgctgtaacttgcctaatcgtc

SEQ ID NO: 31148 - DNA, 974 bp, Zea mays
  Clone ID: UC-ZMFLB73134G06_FLI
gtccgtgcaccagccgccgtcgggcctcgcgggctttggccgcggcgcgccgtccgtgcccgcgcagctcggcctcccgaagttctcctactgcctcctgtcccgccgcttcgacgacaacgccgccgtgagcggctcgctagtcctcggtggcaccggaggcggcgagggcatgcagtacgtgcccttggtgaagagcgcggcgggcgacaagctgccgtacggcgtgtactactacctggcgctgaggggcgtgacggtgggcgggaaggcggtgcggctcccggcgcgggcgttcgcggccaacgcggcggggtccggcggcaccatcgtggactccggcaccacgttcacgtacctggacccgaccgtgttccagcccgtggcggacgcggtggtggctgcggtgggcgggcggtacaagcggtccaaggacgcggaggacgagctggggctgcacccctgcttcgcgctgccgcagggcgccaggtccatggcgctgccggagctgtcgttccacttcgagggcggggcggtgatgcagctcccggtcgagaactacttcgtggtcgcggggcgcggcgccgtggaggccatctgcctcgccgtcgtcaccgacttcagcggaggctccggggctgggaacgagggcagcggcccggccatcatcctcggcagcttccagcagcagaactacctggtggagtacgacctggagaaggagaggctggggttccgccggcagtcatgcacgtcgtcgccgtcgtgaggtctcacgacgtcggcatggcggggatcggagtggaggccagtaattactccagagtccagtccacgtaacgctccaaattccaattccaaaagctggctgcttgatcttttgttagtgctcgtgtactgctaataaaaactaaatttactgtcatctactactactattaagttattgaaagacgtggcttgctttgggtttc

SEQ ID NO: 31149 - DNA, 772 bp, Zea mays
  Clone ID: UC-ZMFLB73134H03_FLI
gatatgtcagccatgcatcatgactcctcacatgacctcaaaactcttggagctaaactgaaggacatagtcggggtcgcggacacttccctggaagtaaggtacatcactcgtcacatctgtgaccttgtcgcagagcgtgcagcacgcctggccgccgcaggcgtgtacagcatcctgaagaagataggccgggacaaagtaccaagcggtggcggtaaaatgccgaggaccgtagttgccttggacggtgggctctacgaacactacaagaagttcagcagttgcgtagaagcgactctcacagacttgctcggcgaggaggcttcttcctccgtggtcgccaagctggccaacgacggctctggcattggagctgcgcttctcgcagcctcacactcccagtatcagtatggcgcgagtgactagtagtcctgaaatgggcgcggatcgagattttgagtgtagctctcatttatcttttcttttttcccttttcaaaacatctttttggggatttttttcggcttccttttgttggctattccgtggatgcacttacggctctgcattgggatgtagctagtatagagccaatgagtttggaggttatctaatggcacaaggcaggagcatggaaatggaagcagagcaatgacattcatgctctgcccattcttttttccccttgtatggtgttgtaaaccaataaaaaaatgttaacccttttttttgtgtgtgttggcaataaagagaatacgataatttgacc

SEQ ID NO: 31150 - DNA, 947 bp, Zea mays
  Clone ID: UC-ZMFLB73134H09_FLI
ctagggttttgctgctctccgaccccgagctccgaaggccgcagcatcaggcgcggcccccctcgcgtgtgaccgagatggcgctgccgaatcaggggaccgttgattaccccagcttcaagctcgtcatcgtcggcgatggtggaactggtaaaactacatttgtgaagaggcatctcactggagagtttgagaagaaatatgaaccaaccattggtgtggaagttcatccgttggatttcaccactaactgtggtaagatcaggttctactgctgggataccgcagggcaagagaagtttggtggcctcagggatggatactatatccatggccagtgtgcgatcatcatgtttgatgtaacctcaaggcttacttacaagaatgttcctacgtggcatagggacctgtgcagggtctgtgaaaacatccccattgtcctctgcggtaataaggttgatgtgaagaacaggcaggtcaaagccaagcaggttactttccacaggaagaagaatctgcagtactatgaaatttctgccaagagcaactacaactttgagaaacctttcctgtacctcgcaaggaagctggctggtgatccgaaccttcactttgttgaagctgttgctcttaagcctccggaagttaccatcgacatggctatgcagcagcagcatgaagctgagcttgctgcagcagctgcacaacctcttcctgatgacgatgatgatctgattgagtagaaaggatcatgagtcttgaacttgagcaggagttgtgccttgcgtgttttaagttgttctagggtgaactcttgagttctcattgtctggatcatctttttctccttggatgtgttgcatcttttgagtgtggaaatggatggtactcctcgccatgaatttgctggctactttatacattgctttgtaactctgtttgatgat

SEQ ID NO: 31151 - DNA, 970 bp, Zea mays
  Clone ID: UC-ZMFLB73135A12_FLI
agaaaagacatggggccccatagttgaaatacattatgtagggggaacttatagaggtagatgtcaagaaggtgtccctgaaggaaagggacgtctaaccttcagtgacggaagcttttatgatggactctggaggtatggtaagagatctggtttggggactctatttcacagtaacggtgatgtataccatggaacgtggagggatgaccttattcatggaaagggctggtactattttcacagcggtgaccgctggtttgcaaatttttggaagggcaaggctaatggtgagggtagattttatgccaatgatgggagtatcttctttggccatttccgaaatggatggcgccatggggagagcctgttggtagatgcaaacggttcaaggtggatcgaagtttgggctgatggtgtacttatcaacagaactaaaatggagaaataaggttcagatctaaatacattttcctgatgtttctaaaacttggctcctcagatggctacgcttcaaagtctcagatgttgcaaggcactctggtccggagcctctctactgtacacgaagtcgtcctatattcagtcttgaaagtcgtaaataggtgcgctgttgaggtttcgatgccctaatttcaaaggggcagactgcaggcgtttctgtatataccactagactgcaagtatgggaggatgcctttgttcatacggctgatggatcaagctgggaacagctatatacccaactgtacctgaacgtgaagtgtgtttgattagttccactgataacccatagatattttcttgtcaaggttacatggacgaaacaggctctcgtggccgtgctcctttttctccccccccccccccccccaattgagtgcttgagtttccacgaatgtgggcccaaactgtatcctttaccctttttaatgtttccatcaatattatctgcccgttgtatttcgat

SEQ ID NO: 31152 - DNA, 978 bp, Zea mays
  Clone ID: UC-ZMFLB73135D04_FLI
tgacaattgaactgttttccatgtatggaaagcaggtaatgttgcttcagtatatcatatgactacatattctcggtattgtgcccattacagtttcatgtattctgtggatcactgcagtttaagattgatccacaagattttcaagattcagaaccagatattcttgcaaattctgcttcatcgataatagaacggatcaaagaaaacagtgatcagtgtgccgcggctctcaggtcgctctgtcgccggaaaaagggcctcactgtcgaggaggcaagcttgattggtgttgacagccttggtattgatgtaagagccttttctggcttggaagttaagactgttcgattttcattcaatgcacaggcgctctctgaacgttcagctgaaaagaagatcaggcgaatgcttttcccccgttaccagcgtaaaaacgtgaaagcctctactgaagatgagtcttaacctatcagctgtttttcctgagaaagcatgcaaacacctggttcaaagacaaggtgtcaagggaatcaacacaatatcatcttatgcgagtttgctaggagatagcgcacaacctgtcgactatgagaatgaccaaaaacatcagagtaataaggtttgccatgcatggtctctaacatgcttccaagaatatagtttggtttctgacagataataaaaaaaaaacgaataaggtgccagttcatgtataaaagatgaactgcgactttatgctggcggaaactgattagctgaccaagccttgtcagctacaaattcccagtaataataacgagctgcgaggtgaaagggcagagtaataaggtctcgttggcctaaatcagttcttagtttcttacccacaacctgtaactaactttgttgtctcttttcatgtagacataaatgtcatgcaacgcaactgcgattatggcattgttttgttgaactatacataaaagaaaacttgat

SEQ ID NO: 31153 - DNA, 1029 bp, Zea mays
  Clone ID: UC-ZMFLB73135D11_FLI
ggctcgatcggtctctctggtacaacgtagggagaaagatcgagggggagaggacgacgacgatggccggcgcgaccgtgaccgtggaggaggtgaggaaggcccagcgcgccaccggccccgccaccgtgctggcgatcggcacggtgctgcgcgtggccaaggacctcgcggagaacaaccgcggcgcgcgggtgctggtggtgtgctccgagatcacggccgtcacgttccgcggcccctccgagtcgcacctcgactcgctcgtgggccaggcgctgttcggcgacggcgcggcggccgtggtcgtgggcgccgacccggacgaccgcgtcgagcgcccgctcttccagctcgtctccgccgcccagaccatcctgcccgactcggagggcgccatcgacggccacctccgcgaggtggggctcaccttccacctgctcaaggacgtgcctggcctcatctccaagaacatcggccgcgcgctggacgacgcgttcaagccgctcggcatctccgactggaactccatcttctgggtggcgcaccccggcgggcccgccatcctcgaccaggtggaggccaaggtcgggctggacaaggccaggatgcgcgccacccgccacgtcctctccgagtacggcaacatgtccagcgcctgcgtcctcttcatcctcgacgagatgcgcaagcgctccgccgaggacggacaggccaccacgggcgagggcctcgactggggcgtcctcttcggcttcggcccgggactcaccgtcgagaccgtcgtgctccacagcgtccccatcaccaccggagcggccaccgcctgattcatcgattcatcaacgatcaaattcctcccctctccgatccaattcgtcgtcgtctcgttcgtcattattttacgtcgtccgtccgcaaataatgtgctctctgctataattgtcgtgtgtagtagtaagtagctgttactatttttccatgtactgtcagtcgcacaatcatcatatataattaatatctctatat

SEQ ID NO: 31154 - DNA, 1200 bp, Zea mays
  Clone ID: UC-ZMFLB73135E03_FLI
cgccaagctccgctcacacctcacagtcacagcagcatgactctgtagtccatctccctttgcagccgccgccgccgccgcctcgagtggctcccagatccgagccgacgccggagcagggacaagccgctgccagcggcaatggcggacgccgtgggggcgctacctcctcctcctctgccgccgccgccggagtgcgagtccgggaggtcctcgccgtcccacgccgcgtcgccggagttcgagttctggatggtgggcaggaacccgtccccggcgctgctcaccgccgacgagctcttctccggcggcgtcgtgctcccgctccacaccctccaggcgccaggcgctccggacggcgacggcgcgcctcagcctcaagccgacgcggacgcggacgcggacgccgcggcgctcccgctgcctgacgcgcaggcgcaggtggaaggggaggccgcgcagccgctcgcggagtccgccatcgcgccgacgccggacctccccgcggtcacgttcaagtggaaggacatcttcaaggcgggcgccggcgccggcgccgagggcaaggagcgcaagaaggtggaacggcgcgtgagcagcgtcagcgggaacgccgagctgattaacatcaacatatggcctttctccaggagccgctccgccggagcaggtgccggcaccttgagtagggccaagcccaatccgaatccaaacccaaaccccaaccccaacgccgccgtcgccgccagcggcggcgccagcgttaacgccaacaccaccgccaatgccaccgccccgagcgcgccgccggccccggcgccggtcccgcgcaaggtgagcagcgcgccgtgctcccgtagcaactcccgcggggagtcctccgggcctgtgccgaccatccccaccgccactgcaactgcagcgccagaagcagcagccggagaagaagacgccgacgcggccacccaggttcaggcggcgccactgaccgccgccggcacatccagcgccacgtccatgttgaggaggtgggtgcccggacagggccgtaataacaacaacgcagcagggcccggcggcatccgcgtggggcggcccagcgccgtgtggaagctgaggcgcaacaagctgcagcaaaccgccgccgagcagaagcaggtgggcggcaagaagaaggcggccccggcccaggaacccgcc

SEQ ID NO: 31155 - DNA, 1209 bp, Zea mays
  Clone ID: UC-ZMFLB73135F02_FLI
gaaaaccctagtcgggcttcatacgccgccaccgcgccgcttcctccctcgccatggccctctttgctgccgcacgccgcgccgcggcctcctccgtgcccgttctcctccgtgcctccgcctcctcggggtcccaccgcagcgccgtcctgctccggcccctcgctgccgccgtggcgccgccgaagccccgcgcgatgccgttctcctcggcgcccgcgacgagacccagctccgacgccgagctactcagcgtcatcgactccgagatcaagtacgccgaggactgcgatgaccacgacagggttgaggagattccagaaaatttccctttcaaaatcagcgacgagaaggggacgaatgcagttacccttaaaagaacatatcagggtgagcagattgaggttgtggttcacatgcccagccttgtcactggagatgagcctgatcatgaccgtgatggtgaggatgaggacacggcgggagatgacaatgacgaagatgaaggccagaagcctgaacagtcaagcattcctctcacagtcactatatccaagggtgacggtcctgttcttgaattcacctgcactgcctatcctgacgaggtcatcatcgactccatgtctgtgacacaacaatcaggggatgatgaacgtgacatgattgcatatgagggtcctgatttcaatgaccttgatgagaacctgcagagggaattccacaggtacctggatctgcgtggcatttcacccaggaccacaaatttcttgcacctgtacatgatcaacaaggacagccgtgagtacctgctctggctgagaaagctgaaggatttcttcaagcagtaggtgtgaagacctgaagatcagctttatctctcttttgttcctgctagggccttctcggttattccaattccatgtggattgaagtgtattaaaatggattttgacttgttatggatttaaatcaacttaataccactcaatccacatggattattggtgaaacaaacaagccctagtcgaaattcttgttaagttggtagtttgtcagacccgaaatagagttttttgggtttcgaatggaaacactagacaaaataaaggatttagtatttttttctataaatttccaagatttatttaactgatgacaatttagggtgagaaagtgtggctatataaaagctttcatgaagttaatttg

SEQ ID NO: 31156 - DNA, 2183 bp, Zea mays
  Clone ID: UC-ZMFLB73135G02_FLI
gacaaattgttatttgacagatccaggacttggagtgcagtgatagcagttttgggaacaaccctaatttatgtggtcctggcaccacaaaaccttgtcctggtgctcctcccttttctccacctcctccatacaaccctacaacccctgtgcaatcaccaggaagtagctcttccagtactggagcaattgctggtggagtggctgctggtgcagccttgctatttgctattcctgcaattagttttgcctattggcggcgcaggaaaccacaagaacatttctttgatgtacctgccgaggaagatccagaggtgcatcttggccagcttaaaagattttcactacgagaattacaagttgcaacagatggcttcagcaataagaacattcttggaagaggtggatttggcaaagtctacaaaggacggctggcagatggatctttagttgctgttaagagactaaaggaggagcgcacgcctggtggagaattacagtttcaaacagaagttgagatgattagtatggctgtacacagaaatctattgcgtcttcgtggattctgtatgacaccaacagaaaggttgcttgtgtatccatacatggctaatggaagtgttgcgtcacgtttaagagaccgaccaccagctgaacctccgctagattggcaaacaagacaaaggattgcattgggttctgctaggggcctgtcttatttacatgatcattgtgatccaaagattattcatcgtgatgtcaaagctgcaaatattttgttagatgaagacttcgaagctgtggtgggggatttcggtttggccaaactaatggattacaaggatacccatgtaactactgctgttcgaggaacaattgggcacattgcacctgaatacctttcaacaggaaaatcctctgagaaaactgatgtatttggctatggaattactcttttagagcttattacaggacaacgtgccttcgatctagctcgtcttgctaatgatgatgatgtcatgcttcttgactgggtagttaactgtgccatttcctctgttcaaattgtaccccaagtgttcatgccttttttgtggcttccgtactgtgcaggggctggtgctcaccttttcctatgcaattgttagaaatttgctgatcatttcatccaatgacaaatagagctttgatattaatgtctaaaagataaatattttaactgaattgatattgtgacaggctgataactaaacaagtagagtgacatgctcgtgtctctgaaagtcctcatatatttgttagaatattgctttagcctgttaggatttatttcattgcattcttttgatatgacatgatttggctagcaaattaataccatgttcaattgctttacttaggtcaaggggttgctcaaggagaagaaactggagagtctggtcgacgaagatctagaccacaactacatcgatgtcgaggtggaatctctgatccaggtggcgctcctctgcactcagagcaaccccatggaacgtcctaagatgtcggaggttgtgaggatgcttgaaggcgatggtctcgccgagaggtgggaggagtggcagaaggtagaagtggtacggcaagaggttgagctaggccctcatcgaacctcggaatggattctcgactccaccgacaacctccacgctgaacagctgtcagggccgaggtgaaggcaagcttgagatcagactcccactaattctggtacggaggagtattttgcaagggcacaatagagatgtgtatcaatcatcctagtaaaaaaaaaatccaccaatttgttaatataccagtcagtgggtgaagcgaagattggcagccatggctttggatgtatattgcttgatgtggtcagccatgccttttgagttcttctatgccagggcagcagagctggaggagcttatgtcatgtgcagttgccgcatgcgccaatgctcctgtgtttgtaaaggtcggagctgaggtgctgcggctatcatctgggtccgcgataagttaattgtactgatagttgatatctaactactattttgtgtatcaaatgaaaatgttggaactaaaggatcggatagtataggtgtcttatgaacctgttctggctggcaaaattaaccagaaatatggatttgccacttc

SEQ ID NO: 31157 - DNA, 1582 bp, Zea mays
  Clone ID: UC-ZMFLB73135G03_FLI
cgcttcgccaacgcctgcgagagctagggtttcgtgcgccactgccacttccggtcttccgcccgccatggccgaggcccccacgtatcagatcctggtgcgtctcctcgacgggcgcaccacatgtcttcgcttctccacgcccaccgtctccggcgccgtgctcctcgaagctgtcgcgtctatatctcgcgtccccgccgccgccctccgcatcgtcaccggccgcttcgacgtctcgccctccaacgtcctcacctcatcagctgatggccagttcccctccgcctccgcgctcctccgccttcgaggaggcaagggcgggttcggctccctcctcagaggggccgcctccaaggcggggcagaaaaagactagcaactttgacgcctgccgcgacatcaacggtcgccgcctccgccacgtcaacgctgagcgccgcctcgaggaatggaaggccgaggccggggaccgccatctagaaaagctcgccgagaacttcatcaagaagaaggccaaggaggcgggccgccgcggcggaccctcagctgctgaggtggacaagtacctggagaagtaccgcaaggatgctgagatctgcgtcaacgcggttgaggaatccgtacgtgcatctcttggaaagaggaagaccgcccctaagccgccctctggcgcagacgctaagaagcttaagatttggttgggaaagaacaaagtagaagaagatgaaagtgatagcgatagtgacagtgacatggatgatgaggacagtgaagatcaggagagcgcagatgcaaaatctctcgtagttgatgaaggcaattgctcaaatggatccataaaaaatgagaaacttgatctgggttctgtttctggatcacattcagaaggagagtcctcaggggaaaagtcccaaccgacaacaaaatcaggagctgaaggtggtgactttgaatctgatggcagtgcagagcctgaattaggaatggtggatcatcccattcctgtgaacaatgctgttgctgctgcttcagaagaagtgctgaaatcagatgaagtgacagcagatgaggataacactacttcagcaacttcaaaccaaaacaatccagtggtaccacaagttaaagaagcgctgaaagcagacgaggataacagtgcttcagctacttcgaaccaaaacaacccagaggtgcccaaagtagaagaatatgccgatgccagcaaatcttattcagagccattggaccttgcaaagtacagttcagctgtagaattggaggtgcttggtctggagaagctaaaaatagagctgcaatctcgtggattaaaatgtggtggaactttacaggagcgagctacccgactcttccttctgaagacaactccattggataagttaccaaagaagctgcttgctaaggccgctattggggggaagtgagaagctgtataaacaagtactgatggtgcaatgcttaagttttttctttgacgatgtatggaaatctgttgtggtgtaatcacgtgttacaagcccttggtgtggcattgacgattaatgatgtgtctgtatctacgt

SEQ ID NO: 31158 - DNA, 839 bp, Zea mays
  Clone ID: UC-ZMFLB73135H09_FLI
gcgagcgagggacccggggcggaagaagagagagaagacgtctctctcctctcggcgtccccgttccccaacctctcgtctgctgcctgcctgcctgcctgcctgcaaaaaggagtttgtcatggcgtctaagcgcatcctcaaggagctgaaggacctgcagaaggacccccccacatcatgcagtgcaggtcctgctggtgaggacatgtttcattggcaagcaacaattatgggaccacctgacagtccctatgctggtggtgtttttttagtgaacattcatttcccgccagattaccccttcaaacctccaaaggtttctttcaagacaaaggtcttccatcctaatatcaacagcaatggaagtatatgccttgacattctcaaagagcagtggagccctgctttgacaatttctaaggtcctgctctccatctgctccctgctgaccgaccccaacccggacgaccctcttgtcccggagattgcccacatgtacaagacggaccggccgaagtacgagtcgacggcccgcagctggacgcagaagtacgcgatgggctgacgaacgctttcctgctcgtccacccgactggcgtctcaagaaagtcgttcctgggcgccattgttcccttggatttgttgttggtcgtcgtgtgtatccctgatccatctaggatcatcgtattgtattgtagtgtatgtatatcgtcggcctaccatcgttgccattcaccatagtgaggtggttggacatgcttcgcctatatgcacctgtgcttgccgtccttcgggtcggtgctctttggttaatgttcatcgaagacgttgatttc

SEQ ID NO: 31159 - DNA, 294 bp, Zea mays
  Clone ID: UC-ZMFLB73136B06_FLI
ttcatctcccacacccacgagcagctcccctccaccgactactaaaagccgaagccgaccgacccaggggtgcgcagcgcagcgcagctagcatccagcgctctctccccgctcgccgccgtttagtttctctcgtgcacgtgcatgcatcgtagactgtctcaggccgccgctgcgccggcgccgctcgcatcgtttgcttccttggaccagcagtcgtcgccgtcaggctgaactgcttgtaaccgtgaattccggacccgtttgcttctgtaagatttgtgcatttgcctg

SEQ ID NO: 31160 - DNA, 936 bp, Zea mays
  Clone ID: UC-ZMFLB73136D05_FLI
ctgccgagggagcaggtgcaggtggccaccaagttcgggataggtcagggcgccgctggcatgaccgtgtgcggcacgcccgagtacgtacgcgcctgctgcgaggccagcctgcgccgcctcgacgccggctacatcgacctctactaccagcaccgcgtcgacaccaccgtccccatcgaggatacgattggtgagctcaagaagttggtggaggaggggaaggtcaagtacatcggcttgtcagaggccagcccagacacaatccgccgtgcgcacgccgtgcatcccatcaccgccgtgcagatggagtggtcgctctggtcccgagacatcgagcccgagatcgtgccactctgcagagaattggggattggaattgtggcttacagtccaattggccgtggattttttggtggaagaggagtgatacagcaagtttcttctgaatctagtctgcaaaggcatccaagatttacaacagaaagcttggagaagaacaagcagatttacctgaaaatagaagatttggcgaagaagtaccagtgcagcccagctcagctagctctagcctgggttctgcgtcaaggggatgatgtggttcctataccagggacaacaaaaacgaagaacctagatgccaacgttgactccttgaaggtgaagctcacagctgaggacctgaaggaaattggcagccagatacgtgcagaagatgtggctggtggaagacaatacaattcctatgcacatacctcctggaagtacgcagatacaccaaaaaagtgaagttctggtcctggaaaccttgtagcaatcacaggcgtatgcaaatgttgaactatttccctgcatttgagccggaatcgtacgatgatgcatcttgtgaacatgcggcactaataaatcgagacgaagaataatgtgttttccatc

SEQ ID NO: 31161 - DNA, 1657 bp, Zea mays
  Clone ID: UC-ZMFLB73136E12_FLI
cccaacccgaaaccgtttccaaaatgcaaaactcgactccacgcgtcgcccttcttctccggagagatcgtttaaatagccccgtaccaaatccaattcgtctctcctcaccggagaacagaaacgatacggttaatagatagcgaagaagggcagcaccaccagtagcagcagccatgcccgctcgcgctcgatggcgactcctcgcgctgccgctcgcgctcttactcgttgccgggtcggcgcatggcctcgtgaagccggaggcagccgcggcgcccaagccccccgtccccaaggccatatcggacctgagggacgcgatcgtgaaggggctgggattccaggccgaggggctcaaggtgtccgggttcgacgtgcgagacgcgctcgtggggcacgcggtggcgtacgagttcgacatcgaggtcggcaggaaggtcctaccggtgcgcctgctggaggacgtcagccggtgggacttcgtcgacctccccatcttccgttcccaggccgacgctgacgatacggcgctcgccgagatccggcggaccgggacggggagcatcgttgagcctaccctgccgcccttccagctcgccgggcccatggagctctggatccagaacggcgacgacgtcaggcttgccttgccgcatgatgtggacgctggtaccttgaagaaggttgttctttctgatggtgcagtcgtaacagtgaagggtgctagagctgtgagcctccggttgccgcttgaattaccacttcctctcaaccgtaccacttacaagggtcgcctctcaagcctgatatccatcgcacaagccctgcgtggtgcagcccggtctaatcagaaacccctgctctctcttcgcgttgagggtccagtttccttgtcctcgactccttccatgtctcccaaggacaagctcaagctcaaacggttggccccaggccaagtggagctctcctcacaggcgggggcaatccctgctatcaccgaagacgaggatgaaccacataaccctggattgtggcctcttttgtctctgaatggttcagatggcagcctgcaggggtttgaggagctattggcctcagtacttggaaagaaggcaggcgagaagggtaccttcaagctactgaaggcacgggcctcggctcaaacctatgtcaagatggcattcacggtggagaagaagcttgctgaaggggatgtgaactggtcaaatattccagaatggaagacgaagcccaagaggatgagagcgcactatgaagtccttgctcgagtggaggagggtcaggcgatccctgagaggatagcgcaggtacagcctttccaggccaacgaggccatgtcggagagtgtgctcaccggcaacgtcacgaggtcgaagatggaaatcgtccatccaccgccggtttacttcactctctgagtgagggaagaactggatgctgtttgatgttctcttcagagctactacacgttgggtggtgggtagtttacgctggctcgtaggcaacaaagttgtacaagcggcaagagtttgttgcctatacactgactgcgttgacatgaatattgacgttctatgtgtactgaaaggctggcaagcctttaatattatcaattggaataatgaggaataag

SEQ ID NO: 31162 - DNA, 2018 bp, Zea mays
  Clone ID: UC-ZMFLB73136F03_FLI
gaaaaatttgtcttcttcctcgcttccttctccttttctgcctctcctcaccctctgaattccttgttcggttgttcctcttcccacttcccctctctctctctcgtgcgtgtgtactacttctgaggccgaaaggtcagaagagagtgtccacctttcagttcgattttcgatgatttgagtccttccgccgcggggaatttgagcgttttccttgagaaatttgagtttcttcgagagtaatttgtgtgttttctcttgagagattcgtgcaaggatgtcgccttcgaatccatttattgggtagtcaaattgttcctatatagcgtcaaagcatccaactttgacttctccgtggtggcttcttctatcgtgtgtcatccagacaatttgatctttatttaattgggttggatgcttgttcaggttaggtagttggaaagggtagcataagacaccatcaattttggtgattttggtttttctctgaataattgcgggtcaaattagtcatcttcagttatcacttctcgtttttattgggaggatttggtgaattttagtggcgggcagagctttcttcgatcctcggtcctcatttttatggatttggatggttggggacttgggggtatcttaactttatccttgttgaaaaaaggctataaacttgggagttcctgtgagatattcctttcttgggaggatttgatcttgcttctgttggttcctggtgagttggttgagatgaaaggagtactatgctaactcatcgaggaaagaacagtacagccagtactactctgaggaagagctgacatttctatgctttcctttggaggactgtggtctgttcctccaagaatctatgcaaaagtgctcctcatctaagtatatctatccagttcaagttgttgtggttcatcttatcatctgtgtatgtatctgtgtgtaatgcgcgcactctgcaagaaggaagaatttgtgtaaaacgggtggtagttcagaattttctttgcacaggagaagctcagttgcgccttgcagatccaaattggccgatggcgcaacctgaaattcctgcatttgaggattgggaaaccacaggaaacaccccttacacacaaaagttcgaggatgtacggaagaacaagaaaacaggaattcctgcacagacaaatgatccaaggaggaacccggaacatcctcgtaagtcccctttgcatccaacggcctacaaaaccgatcctcaagaccaaggtccaaggaacccaccacatcgaccgagacctgaaactgatcaacaaagacactccgaccggcctactcaccgtgagcctgcaccacgaagacatgcaaatcctcacagagaacaagggagtaatgctgtggcaccaagaagcccctacaggacagctgctgggtctgcttcgccaatgcagtcaaacaaccaatcaaagccgaatcatagatcgactgcgacgcaggctccagagagaaggcattcttcagaggggcatagccagcatacacctggaaggagcaggatgaagcccggtagttatgagcctgaagaagtggctgtaccaccctttggtgaatgggatgatgcaaatgcagcatcaggtgaaaagtacactggtatcttcaacagggtaagggacgataggttgtcacctacctcttctgctaggcaaccatctaccgcccgtagggaggagaataaggtgcaacagaaatgttcttgctgcatactttgagaaaatgaggacatgatctcaaagagtttggacagcatcctattgtgcttctgtagtgagcaccctatcgtgtaactcttcttggctagttgtcatgtatgttattgtcggtgtgattatgtatctgtaattggattgttccatttaagctcttcaattacaaggaacatatatatgataccatatagatttgtaaagtatggagtgagcaatttccttgtgataataaaaggtttattgaatggggtctagatttcc

SEQ ID NO: 31163 - DNA, 1200 bp, Zea mays; identical to SEQ ID NO: 31154
  Clone ID: UC-ZMFLB73136F08_FLI

SEQ ID NO: 31164 - DNA, 1769 bp, Zea mays
  Clone ID: UC-ZMFLB73136G01_FLI
gcttatttactttttcgaagaaaccacaaccaaacctcggctgctcggtggtcggtgcccaggtgcgccgattatctccatcaaagccgcgcatcccgctgcccccttactcatcctccccgctgctcgaaggagagccaaatccagagcgccgccgcgatggcctcccctgacgcggaacagccggcgccgacggaactcgagcggtggcgtgacctcgacatgctcttgtcccgccctggaaacctcgtggaggccactttcgatcccagccccggcctgcgagacctactggggagcctcgtggaggttttggttgtgggcgcgggcgggcttggctgcgagctcctcaaggacctggctctctccgggtttaagaaactgcacgtcattgatatggacaccatagacgtctccaacctcaatcgccagtttctcttcagagttcaagatgttgggaagtccaaggctgaagtagcagcgaagagggttatggagcgagttaatggggtgaacatagttcctcatttttgcaggattgaagataaagagatagagttctacagtcagttccacataattgtcctaggtctggattcaattgaagctcgaagctacatcaattctgtggcttgtggtttcttagattatgactcaagtgacaatccactccaagagacggttaaacctatggtagatggtggaactgagggcttcaagggacacgctagagtcattatacctggaacaacaccttgctttgaatgcaacatatggctttttcctccacaggttaagttccctttatgtactctcgccgagacaccaagaactgcagctcactgcattgagtatgctcacttgatcaaatgggatgaggttcatcctggaaaaccttttgatggcgatgatgcagagcatatgcagtggatttattcagaggctttaaagagagcagagcttttcggtatttctggtgttacatattctttgacacagggtgttgtcaaaaatataatcccagccattgcaccaacgaatgcaattatatcggctgcttgtgcattggaagccttaaagcttatttctgggtgcagcaaaagtgtgtcaaactatctcacgtacaacggtctggaaggaacacacattaaagtaactgagtttgtcagagacaaagattgccttgtatgtgggcctggtacccttgttgagctggatacgtcatctactctttcagatttcatcaagatgcttgaagagcaccccaagttgcggatgtcgaaagccagcgtgacgcacgaaggtaacaacctgtacatgcagtcaccggaggtgctggagcagatgacacggccaaacctgagcatccccatgtttgagcttctcaaagaggtcccatacaccactgtccatgccacgggcatggcagagaacaacgggaaaaaagtgtcctcgttgaggaagctccgtgtggccttcaagggcatcgaagacgcctccaagatggatacgaccgtgagctcatgatgccggtcgtcgtcgtcttgttgctaatttcaagtctcccaggaaagatgaggattaacccaatgtttttggacaggttaagtgtagttttcgagcgccatattacaaattgaaatgtgcgcctgatactgttcaaacatgaagaaatttatcgtagatgatactatggttttgtgagaatctacttcttggtgtttcgaatcttgctcgacaagtaaattaaatttattgtgcgtattctg

SEQ ID NO: 31165 - DNA, 951 bp, Zea mays
  Clone ID: UC-ZMFLB73136G05_FLI
ggctatcacttccaccttgttgagatataggaaactcaaaagacagcatgtgtctcatgaatcaagctcttcgctcctcttggaagcatggaaaccactttcaatgggcttcaaaaagagatggtgggagtgtgttgctttgcctgaagatgttgattccagtgaagaagaattgtttagacagcagataagggatctggcgtttacgtcactgcagcttctcaaggatgcaatctttgatcctgagtgtgcgcctttgttttcgcttgacatctatggccatataattggcatgtttgagctgaacaatcttgatttagttgtcgcatcaccagttgaagactatttcatatacattgacggtcttccagagagcgacaaggaggaagcagagaaggtgacagggccattcctagatgctttaggagaagactacttagttccgtgcgagggaacggcattctttcctctgcagagctgcatgaaccattcatgccgtccaaatgctaaagcatttaagagagacgaggacaaggatggccatgcagtgataattgcccttaggcccatcagcaaggacgaagagattaccatcgcctacatcgatgaagaccttccttacgaggagaggcaggcgcagcttgcagattacgggttcacgtgtacatgcttgaaatgccaagaagagcgaccggtctgaaaggacaaatatgtttgaattttgcggcattcagcctatgtcactgggtagttttgaaagctcgcgagaagtgagtgcacaaaatgatgtttgttttcggctgtaacttgcaaaagttttgttgttgtccaatgaatatgaatagtgacgaacagacgatcagtcgtcgtaaccagcagcctcatgggactaacacaaccacaagagcgaatggcaatagcagcaggttgacacttgcaactattttggtt

SEQ ID NO: 31166 - DNA, 782 bp, Zea mays
  Clone ID: UC-ZMFLB73136H01_FLI
tctcccttcgcgaaaaccatctcaagcaaatcaagggtgaccctgaagaatggccactcattgtacatttctctcagtatatggatgttcctgatgtccttctgcatgatgtgctttatcgcgaagggagacccgggaatcgcagctgtgtacgacaaattgctagtggctgatgatttgcaatccttcggcgagcaactgaggaagaactatgaggagacaaaagagctactccttcaggttgctggtcacaaggacgtccttgaaggtgatccttatctgaagcagcgtctgcggctgcgtgagtcctacatcaccactctgaacgtgtgccaggcctacaccctgaagcggatacgcgacccgagcttccaggtgagcccgcagccgcccctgtccaaggagttcaccgacgagagtcagccggcggagctggtgcagctgaaccagcagagcgagtacgctccaggcctggaggacaccctcatcctgaccatgaagggcatcgccgccggcatgcagaacaccggctaggccaagatcttcggtgtgcaaataacctgtctcccatgagacggtggacgatatgtgtaggcctgtgagcagttagtacaccggcgccagtgtgttctggaggatttttcatgtcagagcctttctcttgtgtgcttgctgtagatgccaaggggagcttattggctgttgaagcctgatgcaaaataaagtacgaaactatgttttttgtttaactaataactagcaaacatgcttccgttgcattg

SEQ ID NO: 31167 - DNA, 906 bp, Zea mays
  Clone ID: UC-ZMFLB73137C02_FLI
ctagggcattagagcagaacagagcagggcaaaagctcccaaaagaaccagtaaaagccaagaagcaccgagggccggagaagcgtacgtagtacgtacaggagcagcagaaacaatgaggccaggagccgggttcaacgcggcggcggcggcggcgaaggccgccgcagtcgcaccggcggtggccggcagcgccgcggcgcactccgcgtggcactcgccggtgccgtaccttttcggcgggctggccgcgatgctgggcctcatagccctggcgcttctcatcctagcgtgctcctactggaagctctccgggtacctggagggcggcgccgccgggcggggaggcgaggacggctccggcgccggcgccggcgccggcggcggaacgaagccggcggcgggcctgccgccgccggtatgggaggagaagatactggtgatcatggccggggacgcgaagccgacgtacctcgccacgcccatgtcgagcagggcgtcctccttcggcggcgaccgtagcagcagcaagggcgtcgacgacgaggaggaggagagcaacaaggaggtgcaggcagacgaagccgccgtggccagcgtcatggacgccggcggacagaatggtggcgagcacagtgagcgccggagagaaggaggagatcaggagcgccgcattcctgaggtgtgatttttgtctcggtttttgctttgctcggagaagctgagctcgcttttgacgctggaaaaaccatctccggccaggagaagagaaccccgacccgagcacgattttggtggggttgtaatttttttttgcaaatgatgaagtggagaacgggactggtggtgtggctgtaattttgctgagttgcatgtaacttcttctacgatgggaatggattaaca

SEQ ID NO: 31168 - DNA, 1476 bp, Zea mays
  Clone ID: UC-ZMFLB73137C08_FLI
tgaaaaataggtatttacaggaactagaatgcaaatacagtgagacaactgcatcacttgagaagatgatggggcaagggaacaacttctccagtcatacaatgaagaaattagcaagatgcagcagctagctcgcaggcattctcagaagatcattgatgagaatcaaaagttgcgttctgaccttgaggcaaaaatgaatgatcttgatgtgagatccaagcaactcgatgagattgcagcaaaaagcgattatgacagaaggagccttgagcaggagaagcaaaagaatgctatcaaatcgagtcatcttaaattggcaacattagagcagcagaaagctgatgagaatgtgctgaagcttgtggaagaacaaaaaagggagaaacatgctgcgttaaagaagattctgatgttggaacaacaattggatgcaaaacaaaagcttgaattagaaatacagcagttgaagggcaaactaaaagtgatggagcatatgccaggtgatgaagattcagcgtcaaagaataaaattaatgagctgagtgaggcattgcaagaaaagatagatgaactggatggaatggagtcacttaaccaaactctggttatcaaagaaagcaaaagcaacattgaactgcaagaagctcgcaaagagctagaaaatggcctgcttgatctttcaggtgggcagacacatataggaatcaagagaatgggagagcttgatctaaaagcattttcaaaggcatgccaaaaggagcgtacagaaaatgcagaagttactgctgcctttctttgttcaaagtgggaggctgaaataaaaaatcctgactggcacccttttagggtcgtcacaattgatggaaaggagatggcaataatcgaggatgatgcaaagcttcgagcactcaaagaagaacatggagaagaaatctatgcaatggtgacaaaggcgctgcttgaaaccaacgagtacaaatcaaaaggcagctaccctgtgggggagctatggaacttcaaagaaaaccggaaggtgactctgaaggaagctgtccagtttgtcctgagacagtggcgaacaaacaggaggaagcgataagctctcggctactcaatgctcttggctttttttccccaccacctgatccgaaagccatgagttcgagagctagtaacctggaaacagtagtattaattcgtgataaaatcaacagggcgatacagccctgtggatctgttccttgttggatataagctggcactcctattgcagtgtcagcatcagtggactcgaacgccattatggcgttatccttgtgccacctttgtaacaagtagttcgttcttgttcttgaaccgtgtgttgtagttggcccttggccgcatgctaccggctctgtacggctgtgcctacaaagttgtggtggaacatgcagactcataataaagcatgcttgggctcttgtgatactc

SEQ ID NO: 31169 - DNA, 1483 bp, Zea mays
  Clone ID: UC-ZMFLB73137D09_FLI
agaccaaagtgcccatcgcaccatgtcggccgccgaaaccgctgtttctccgacgacgacgccgcagccgcagctgcaatcggatccgaacgccgccgccgacgcggccagttccaattctctctgggtggccgacgagacgcaaaccctaaccgaggtcctgctccaaccccaaccaaaccacctgtcgcctcctccttctggtgaaggggacgacgggatcactgcctccggtgctcctgttggtggggacgccgcggcatctgcttctgctgcggcggcggctaacgcgacgatagaagagcgggtgagggggccgtggtccccagaggaggacgcggtgctgagcaacctcgtggagaagttcggggcgcggaactggacgctgatcgcgcgtggcatcccgggccgctccggcaagtcctgccgcctgcgctggtgcaatcagctcgacccccaagtcaagcgcaagcctttcactgaagaggaggaccgcattataatggcagctcatgctgtccatgggaacaagtgggcatctatcgcaaagcttttggatgggagaacagacaatgccatcaagaatcactggaattccaccctgaggcgtcgctactgcaatgatggccaatgcaagcatggtggttctgtggagcgaagtatcccaaaggtgtccagggaagtttcagaagaaccttggcctttaaacgatcttaattccttcaccgctatggatgtaaaggatgatcctgtgcaaacagctccagatacttctcctcgggcaaggcacatcacagatcattgttctattactcaagtcgttgatccaccatacctgtcccgaccagcggcaaagattggtgctttcagaccatattatctaggacacacggaacctacccaacaagaaatgccaggtgctgtcgtcatgtttgactcaactcataaagtctcgactcctgaaagcgaggtattcaagtttgttgatcctatatgctttgctgctgaggtgccagacaaatgtgggtatggttgctgcggtgctcatgagcagcatcgtaagaactcattgctgggtcctgagttcagtgagtttgaaggtcatccacctgttttaaatattagctttgcttcattggtatcagaaattagcagcattgcctggatgagaagtggtatgcaaagcagtgattccagcaacttgatgcaatcaattccaccaacctgacaaagtaggaatcttttgtcagtggcggatccagaaacagatcaaatgaggggctaaattatggattggggaggctggagatggctgcaatgcgaatgaatggaaccaccatgtaaataatgtgcgaattacaaacgcgtgtgggttgctgtgtgccgtgcacatgggtgatgaactgatggacctgcattgtgctgttatgcgcctgcatcttgtaatcgtgggccttcttcgtattactatgctgaaatcact

SEQ ID NO: 31170 - DNA, 733 bp, Zea mays
  Clone ID: UC-ZMFLB73137F09_FLI
catggccctcgcctcccgcgccgccgcagccgccgtggcgtgcgtcctcctggcgctcgccgcctccgccgcgggggcgggctccaactcccctgcaccggcgccggcggtggactgtatctcccaggccgccagcctgatcgactgcatcgactacgtccagaaggggagcagcgcgcgccgtccgtccgctgcctgctgcggcgaggtcaagaccgcagtggccagccccgtcatcgtgggctgcctctgctccctcgccggctccaactccagtaacctgggctttcccatcgacatgaagcgcgtgctggcgctccccggcgcgtgcggcgcgtccaacgccgccttcagcaagtgcaacatttccgcgcttcccccaaccgaagcacctgcaccgtccgccgccggggggtcatcgagcggtggcgcggcggcatcttcaccgcgcgccgcggcggcgagctctcctccgatgacggcgaccgccctgttggctgccgtggcggctcccctgctcgcctactactgctgctacctcttctgagggtttccttctgctgctgctgccgtctaggctgagtgacctatttctatgtatgtgacgattcaagttaacttgtggagcgcggctgcgcgtgcgtttgtgcttgtgcagtcgccactgttgctgtgttcttgcgatactcttgtcacttgagaggtggtgttgtatggactggtttagctggct

SEQ ID NO: 31171 - DNA, 2284 bp, Zea mays
  Clone ID: UC-ZMFLB73137G12_FLI
cgtgccgtgctcgatgacgacgagacgcctggcgctgacgcctacgccgccatggtcgccagccgactcagggagcgcgacctgacgcgcgcggaggcgctcttcggcgcggcgcccgcggctgcccgggggctgtatctggataccgccatgctcgacgggtacgccaaggccggccgcgtcgatcgcgcgcgcgagctgttcgacgcgatgccggtgaagaacgtcgtcacttggacctctatggtttccgggtacttccgcgccggccgcgttcaggaggcgcgggagctgtttgacgtcatgcctgaacggaatgactattcgtggacgacggtggtgcaggggtacgcgcgcaatgggatgctcagggaggcgagggagatgtttgatcggatgcctcagaggaatgtggtcgcttggacggccatggttaaggcctacgttgactgtgggcagattcagcaggcgtgggaattgtttgatatgatgcctgagaggaactcgtattcctggaatgccatgatttctggttttctcagcattgggaaagtggctgaagcagttcagttgtttgagaggatgccacacagacacaagaatgtggtttcttggactacaatggtcgctggcttggcaaataatggacttgcttgcagggcaagagagttctttgatcggatgccagcgaaggacactgcggcatggaatgccattatcaccgtttatgccaacaatggccagctgaatgaggcgcagagattatttgattcaatgcttgcaaaagacctggtgacctggagtaccatcattgaggcatattcgaagaatgagcgtaagcatgaagccttaaacatgtttctacttatgcgccattcagcagtgtctcctaacattagaacattaattagtatcctggttatatctgagagcacagtcgaagttaagcaaattcacgggttggtcattgcacttggattcctgtcagaaacttccttaggaaatgctctgctcacaatgtattcaagaagtggagatctgatgtctgcctggtttgccttcaaaaggttggaacagaaggatgccataacatggacgtcgatagtgcaagcttttgcagaccatggctgtggttaccatgccttactggggtttgctcagatgctgagacatgggtataaaccaagttcgactaccttcactgctgtgctgtctgcttgtaggcatgtggggttggttgggaaaggtcgcaagatgtttaaatccatctaccatgtttatggattggaaccaaccattgagcactattcttgtcttgtggaccttctaggtcgagcagggtatgtaagggaagccaaggaacttgtcgatggtatgcagcagggtatgcgcgatgaggccattcttgcgacgctcctgggagcctgtgtggtgcataatgaggtagaggtagcaagagaagtgggtgaggatcttgtcagatttgacccctctggtaccggaggctacaggctcctggccaatgtatttgcatcgcatggaatgtgggatgaaacagcaaatgtgtggaaggtcatgaggggcagtaaggcaaagaggactcctggttttagtcagattgaggtgaacatgaggaatcatgtgttctactcaagggatcaagagcatccacaatgtgctgaaatatatgagatgctgattgacacaattgctcctcagatgaagggttcatcatgcgtgggactctgggaactgaccctcttgtccgatccacgcgaatcgactgcctggtgaccttggttgcctcattgcctgggcttgcttgtcaagtgtaaaagagatgcgaccaatgctgcagcatccatttaccaacaatagtgatgataacgatgctggacctgtgggtcatgttcggtgctcattgttgatattgtggaagaaaccagcagaacttctttttggatatcgaagggctcagcaagaaactcaattcttcaattattatttccccttgcagaattgcaataatgttgagcatcttgtttgtagagagcagcgagcagtgtgccttgtcagcacctatagcttgaaaaattatggtaatcctgctaggacataatgattaatgaagctcccgggccttgaaaggaaactgtttatccaaggtttgtcttgtcagatgaagtgagcattgttctctccttggcctaccacaactggatgcagatacagcgagatattgaagggggtgtggtagcaacaagtttaggagcacgagccggcc

SEQ ID NO: 31172 - DNA, 2091 bp, Zea mays
  Clone ID: UC-ZMFLB73137H09_FLI
cgcttagatttaccaagcattcaaatgcttacatgcttgtttacattcgagaaagtgacaaagataacattatctgtgatttggatgatgaagatatttcagaacaccttaaggttaggttgagaaaggaacatgaagagaaggagtacaagaaaaaggagaaggctgaggctcatatgttcactgcattgaaggtggcccgagactttgatattaaagagcaaattggaagacacatgcactttgatcttgtggactttgacagagttaatagcttccgtgcacctaagaacatgtcaatcaacgaagtcaaggaggagctttctaaagaatttggcatccctgtagaatgccaacgattttgggtatgggcaaaacgacagaactgtacctacagacccagtcgtccattaacctcccaggaggaaacatctactattggggttctcaaagatgcaacagtggcgaagttaccgaattctgaagtacgattgttcttggaggttcatttcagacaggagaaccaaccaattgctccttggaataccaaagaagatatattacttttcttcaagctctatgatcctgaaaaagaagacctaagatatgtcggcaatttttttgtgaaagcatcaggcaaaccatctgatatagtagaaaggctgaatcagattgctggatttctgtctgatgaagatattgagctctatgaggaaataaagtttgaaccagttgtgatgtgcgtacccattgagagtaatgcttcgttccgttcaagccagattgacaatggtgatataatatgctaccaaaagcactgtttgccagattcaatggatcgatatcgatatcctaccgtcccttctttctttgaatatattcataatagacagattgtccatttcagattgcttgagaaaccaaaagaagaaggcttctctcttgagctttcaaaatgctccacatatgatgatgttgttgagaaggttgctaagcaactacgtatggatgacccttctaaaatccggcttactcaacacaatccatcgtctcagcaacccaaacctcacttcatcaaatacaggagtcttaattatctttcggacatgctacataatcacaatcagatgtgtgacatattatattatgacatcctggatattcctttgcctgaactagaatctatgagatctctgaaggtcgctttccaaaatgccgcaaaccatgagatgtcgtttcacattatgcggttaccaaaaagtaactctctccttgatttgattgaagacttaaagtcaaaggttgaaatttcttgtaatgatgctgaatttcggttttttggagtctaccttcacaagatatgcaaggtgtatcaacctggagataagatagattcagttaatgaccatggacccttgtatattgaagaggttcccgaggatgaaaaaaatgccgggcctcatgaccgtttggttcatgtctatcattttgaatataatcatcatattcagtattttggtgaacctttcttcttcctaattcgtgatggtgaagctttgtcggatatgaaagtacggattcagaagagacttcaagttcctgatgagcagtttctaaagtggaaatttgctcatgttacattcagtaagccagaatacctccaagattcagatattgtaatgaacagattccatagacctgtttatggaggttgggaacaacaccttggattggagcatacagccaccaccccaaaaaggtcctacttaggcaacaaccagaaccgccattcttttgagaagcctgtgaggatttacaactaaagctaggaatactttttacatgcgatgaatgatgaacaggatatgaagcagtcttgttccaaaagcagtcttttggtgatgtacatggagcttttgcatagagtagtttatgtggcaattatctcaagaattttcatctggtggatgtacagggtccgtatagcaacatttccttgtagaaagttgaagctgtatatcgagggtggatttacatgtgttaatcttttcgaccccaagcctctgggaggctgtgaaccatagcctcatg

SEQ ID NO: 31173 - DNA, 545 bp, Zea mays
  Clone ID: UC-ZMFLB73137H11_FLI
ctttgatatgcacaagtgtcaaatatctatcggaggatgaatggatacttgatccagtaatcattgcagatctttatgagccactggggcttgattttattgttgatggcggacctagaattgctgacccttctaccgtagtagatatgatgggagcaaaccctactgtaattcgtcagggaaagggtctaaagttggattggatggtagcaaaagatgaagaggaggacgaggcacagtcgatgttttctttcaaatcagcttgaaatttgcttcgcctgacctgtatgggctggcactttgctatggtcccccaaccgaagcgtcttctttcaactgcatataggatgtcagttgttagctgtaagcatagatgtcgaacacgaactgcgtgctgtaaatatgcaaggcgatgtaagcgaactggcagaatttgctcagtagcaacctttgctggaggtgatggaaagtttcctgctggttttcttgaactttgccgtgtacgcctaccagaatttccgtcctggaaggttccatattattcc

SEQ ID NO: 31174 - DNA, 811 bp, Zea mays
  Clone ID: UC-ZMFLB73138B03_FLI
aaacacatgactgcagtggatatttgaagcatgaaaaggcaaaccatctcactcttcaaacagttcacttagcacacttaatgacggaggtgtttgcatgacattctctttgagctgatatatatgggagcagtggctgcattggtaatttaagaaaatctcagtcacttccagattctaagccgaaacgatctttaagaaagaaatctctggattcatctactggaaacagaagacgatggcaatcgagtctagaagcaatggagaagaatgttagcatatcagtttctcttgaggggaatatctcttctattcccaactcgatagtcaacgattctaaaacgttaatggaaaatggggtagatacatcatttatcaaccatgctgctaaagaatggactgagatgagaagacaatgggttggacatcaggcagaagttccgagaaggcccctcaagagccagtgataagttggtccgcaacatatgatgatctcttgtcgacaagtgagcgttttccacagcgaatcccactatctgagatggttgattttttggtcgacatatggcacgaagaagggctctatggttagctgacgtctggctttctttccgccttgcatttagaatgtggtcaacttcctccccacaaaagatgtaatcttttgaagaaatgaaaaaaaaactacttagtcgcaaaattagttttagcatttgatttttttttaaaaaaactgttatttggaaagatactacagtggtttggtatatttggtgatgagctgtcagaggtttgtttatgttaaatgact

SEQ ID NO: 31175 - DNA, 1300 bp, Zea mays
  Clone ID: UC-ZMFLB73139A03_FLI
aaatcacatccacgttctagaaagtctatttttacttcaaaagtactccttctgttccaaataaattagtgttagcatctctgcactctattgcccacttcccccctcatcggtgttttttattgttgcatatcaattttgtggctcaaatgcccctttgaaacatatagcaccaaaattatcctaattaattaattggtttctaactggctactctatttgcaacaatggggatatataaccttaccatgtctgtttatcacagtgcatcttagattgcatcgtattgtaattgttttagttccttgacatactgtttgtgcaacaggaactgcttgatgtacttacggttgggtatctgtgtagctgtagctgccaagttgcctaaagaaaagttcccgacctttcacatgctgccacattgccacaataccttaagagcttttctatacttctatgatttgtgttttcgagatctgagttatttaaatgttgtctgctattttgaatttttatatgaagatcaaagttctcaattgataaagtaattaatataacaagcgaacaacacatagacaaactaattaatgtagcatatagacgaataaggaatcctgaaacattgaccgtgaagaaaattattgtgcacatatgcactctttctccaaaatttggcatttaatcttattgcaacatacttgtacagaggggcgagggttgttcagtgctttgacatgtgtgcaactattcaagcacaatggttagatgatatccccattcattttagattattacattgtggtgttcggcttcttcagtcaagcagcaatcatgcaacatgccttactgtagttttttatcactgcacatgttgctggacaaatttatggactggaggattatagaggactaacaagtgctactgggagattctcgagcaccattgaactaagagattccaaatagttctttggagtctattgttgatgttggcggggataatctagcagagatttgtcagattttttgtgcaacacggaggctacatgaggcagcaacgatcccattcttctcgcatgccactttacacaagctaaggatagcttctggtctcactcatggttgtggcagggaaagccgagtcagtagggtttgtcatgtagctggagttatctcagaccacatattagatgcagtgatgatgttaatggaggatgtttacatttaccgtgcaagcaagatgacttatattatgccttaggacaataagtattgttttcactctaatgaaatacttggt

SEQ ID NO: 31176 - DNA, 821 bp, Zea mays
  Clone ID: UC-ZMFLB73139A04_FLI
tcgagtcggcaagaaaggaatagataccagagaaattcctggcgtgaaccacgggtgttgttcacatttggtaccagagccaatactggatcctccacacgggtactggacgagatcgcaatcgaagttgggcggcatggcgccagcgaagacggacgatcctttgtcccagcttctggcgaagatcgaggagggaaacaaggagactcaccgacgcatggaggcgattcagggggcggtgggaaatatggaggcggcggtcaaggtgtgcaggtgacattaccagccggcgctgtcaccgaacttttgctcttgtcagtggaatcacaggctacacccgctggacaatcggtcgatccaaaagtccaagcagttctggatcagttcgtggaggtatttgaggatccagtcggcttaccaccaagcagaacatgcgaccacactataccattggttccagggacaaatgtgtgtgtactaccactgtccagtaaggtattcagagactgctcctgtattctccctttaagtttcaaggtctgatgacaagttgtccctgaccaggccgagtagtcagaatatcttgatgctgaatttgatcttgtaaatgccatgtggtagctgtcgcagtgccagaccatgctgaagatgacaacaccatcaggggctgctctataggttcgggcacaacttcagactcgtcatctgttccctgactgaacatctcacggaaaagctcttccggattgtgagtactagagcagatgaaaatgaagtgagcagagtggaatatgtaataaaaaatagattgcagccaaaac

SEQ ID NO: 31177 - DNA, 1615 bp, Zea mays
  Clone ID: UC-ZMFLB73139A07_FLI
cttcgtactcgcctatctccgcgactcaaagcttcttccatttcctaccgccgccgctgcagctccaccccattccgtcgacaccatgagggagtgcatctcgatccacatcggccaagccggtatccaggtcggaaacgcgtgctgggagctctactgcctcgagcatggcattcaggccgatggtcagatgcccggtgacaagaccattgggggtggtgatgatgctttcaacaccttcttcagtgagactggtgctgggaagcacgtccctcgtgctgtttttgttgaccttgaaccaactgtcatcgatgaggtgaggactggcacctaccgccagctcttccaccctgagcagcttatcagtggcaaggaggatgcagccaacaacttcgcccgtggtcactacaccattggcaaggagattgttgacctgtgccttgatcgcatcaggaagcttgccgacaactgcactggtctccagggcttcctcgtcttcaacgctgttggcggaggaacaggctctggccttggttccctcctcctggagcgtctgtctgttgactacggcaagaagtctaagcttggtttcactgtgtacccatccccccaagtttcgacctcagtggttgagccatacaacagtgtcctgtccacccactccctccttgagcacactgatgtggctatcctgctggacaacgaggccatctatgacatctgccgccgttcccttgacattgagcgcccaacctacaccaacctcaacaggcttgtgtcccaggtcatctcatccctgactgcctccctgaggttcgatggtgctcttaacgtggatgtgaatgagttccagaccaacttggtgccctacccgaggatccacttcatgctttcctcctatgctccagtcatctctgctgagaaggcctaccacgagcagctgtctgtggccgagatcaccaacagcgccttcgagccatcctccatgatggccaagtgcgatccccgccatggtaagtacatggcctgctgcctcatgtaccgtggtgatgtggtccccaaggatgtgaatgctgctgtggccaccatcaagaccaagcgcaccatccagtttgtggactggtgcccaactggctttaagtgcggcattaactaccagcctccaagtgtggtgcctggtggtgacctggccaaggtgcagcgcgctgtgtgcatgatctccaactccaccagtgttgtggaggtgttctcccgcatcgaccacaagttcgacctcatgtacgccaagcgtgccttcgtgcactggtatgtcggtgagggtatggaggagggcgagttctctgaggcccgtgaggatctggcagcgctcgagaaggactacgaggaggttggtgctgagtttgatgagggtgaggaaggtgatgatggtgatgagtactagaagtatcctgatgcggtcatcgtcaggcttgtgtgctgctcttgtccccgttgtggtttgcaacacctgatgttgtaagactttctggttatgtccgccccgctgtgccactgggttattaagaacgtcgttatggatggttgtctacactacattattgcttctcgatattgg

SEQ ID NO: 31178 - DNA, 633 bp, Zea mays
  Clone ID: UC-ZMFLB73139A10_FLI
gcatcgatctacacctccacactcactgactagcgtcgtccgaactgtccagtgcttgctgactgataccaacgcatgtaatgtgcagaggaagctcgaggagaagcgcgccaaggcgatggagaaggcgcagaacgaggtggccagggcgcggcacaaggcggaggcgaagcgcgcgtcggcggaggccaagcggggcaccaaggtcgcgcgggtgctggagctcgccaacttcatgagggccgtggggagggcgccctccgccaagcgctccttcttctgaaccctcccccaccgcccaccgggcctctcctccttcaccagttcctctgccctgctctgctcgtcgtcgccgcccgccgcctgtgcagttcagttgcatcgttcaccgcttcactccacgggatcagacagagtgatcagtgccgtgcttagctgtgtggaacgcttgttttagtgctgtgtccacatgtatgatttgtaaccttttcttctccctcctgtttatgtcagtacacgaaggatgtgctctgccggagtgttgagggcaagagctgcctgtattttgttgatatttcgtcatcaacagctgtgtatgtcagtacgaacaagataatggaagtccattaccac

SEQ ID NO: 31179 - DNA, 781 bp, Zea mays
  Clone ID: UC-ZMFLB73139B09_FLI
ataaaaggttcaaaaaagggcatcacagtgaagatgctgggacaaatatccaatcttacaatgggacttcaaagtacgttatccttgatgatgatactgaagatcaggatgattcaggctgacctgaatatggtagaatgcagactactatatgcactggcgtttccagagaagcaagatcttctggtgcctgcatagacttacttccacaggctaactgatatcatactattttttgagttgatcaaccgctgtggccactggccagccatgcacgagcgtgacgcttgcagccgtgtgacaagttgagaagactacacgctcgtacatggaacatacaaggtacagcctggtatcagtacagatgttttctcctttcgttcaagacaaagaacggtgcatatatctgaacgaggcattctgcagtatgtccacgaagaaaatgttgcatcaattacaattagaaacacaggtaacacacttaactttatggatgaggatagggttcggttttgtagtgcattctgattgttgaagggagattcagcatcggaacatagctttcttttctttagttctttctttttttgagatgaaaaataaatagtactaacaatcttatatgtaataatgttgtatttacgggaatgtgtaccgtttcacgtaggagcatttcgcgccttattgtaatacctcatcttgagaggtcagtgccaagtcggcacggtccatctcaaatttcctttgcgtattttgagagcagcttgtcattgtacatgtc

SEQ ID NO: 31180 - DNA, 541 bp, Zea mays
  Clone ID: UC-ZMFLB73139C01_FLI
tgttcttgtgaggagaaatcccatgatttgggggaagacgaagtccaagcacaacccccgccaatcgctcgatgaaaaatctaaaccaaaaccctcagcgttttcaagggttccggagggattttatgttggtaagttacatttgcattaggctttgatgattgctgtacaaggatgatatggcctcccgcccaaagctgtctggtattcagaagcaggttttggcgctgtataggggattccttcggacagcacgccttaaggcccctgaagaacgccgcaggatcgagtctgttatcttggcagagttccgtgacaacgcaaggagtgttgaccttaggaactttgtacacatagagtacttgttgaggagagggaagaagcatcttgagcagctcaagaatcctgatattactggactcgctacccttgtagtaaagaaatgagcaagagaagaaggaagactagtcagacaaaatagaagacgagaagaactgatgtagccatgttcatgcttccatgtaatagttcattattccat

SEQ ID NO: 31181 - DNA, 385 bp, Zea mays
  Clone ID: UC-ZMFLB73139C08_FLI
cttctttctagctgtttatcagctacagaagttgtccaaggagtaaggtttccaagaatgttcattgcatgtattccattaagagaagttgggaaaaaaaacaaagcatccaagtacaaagcctggcgaaccaaaacaaagagaagcccaagcagtaacacctgatgtcttcctgcttgaaccatgccacaagttgcctttactacatcaagctgcattacatttctgacagtgcgcttgtgcacatctaatcttttttttcacctgatgcaatgagtcagattagccaatgcttttgatgaagatgacaactggcataagtgttcctttgttggtcagattgtacttatggtgtttagcatcgggtgctgtcttcgttctgtcc

SEQ ID NO: 31182 - DNA, 909 bp, Zea mays
  Clone ID: UC-ZMFLB73139F04_FLI
gttgccaggagcatgccaacatctgctgcccttgatgttgttgcaaagaatttgaaccttaagttctttgaggtgcctactggatggaagttttttgggaatttgatggatgctggaatgtgctcaatctgtggtgaagaaagctttggcactgggtctgaccacattcgtgagaaggatggcatctgggctgtgcttgcatggctttcaattattgctttcaagaataaggacaaccttggaggagataagcttgtcactgttgaagatattgtccgtcagcactgggccacatatggtcgccattactacacacgctatgactatgagaatgttgatgcaggggctgctaaggagcttatggcaaacctagtaagcatgcagtcatcactttctgatgttaacaagttggtcaaggagatccggtctgatgtttctgaagtagttgcagctgacgagtttgagtacaaggatcctgttgatggctctgtgtccaagcaccagggcatccgatacctctttggagatggttcacgactggtgttccgcctctctggaaccggttctgttggtgccaccatccgtgtctacatcgagcagtacgagagggactcctctaagaccggcagggattcacaggacgcccttgctccgctggttgatgttgcgctcaagctctccaagatgcaagagtacactggacgctctgcccccaccgtcatcacataaattttgaagagtgttttagaatgagttgaggcgcttacacaaactttcattccggcctcttgttccatagtttttcttgcatgttacatctcaccgatgaataaaatgtatgtatcagacttgtctcgtttttttgcccatccaagcagcaaattagccgctggcacagcatgcggtaat

SEQ ID NO: 31183 - DNA, 797 bp, Zea mays
  Clone ID: UC-ZMFLB73139F08_FLI
ggaggaacagcggattgaaatgcttcgtgaggaagaggaagctagaaaacgtgaagcggaagagaggaggaagagagaggaggctgaaaggaaagctaaacttgatgccatcgctgaaaagcagcgattgagagagatagagctggaggagaaggcaaaggcaacaagggagaagctcttaaagggatccgaggctgtgcgcgctccagattctgcacctgttgcacagccacctcgagagtcagcagcagcgcctgcagctgctgctgcggcggctgctcctgctcctagtaaatatattcccaagtttaaacgcggtggtgatagcagcagcatcccttctggcagccgcgatgaagatcgctggggttcacgtggtccgctcaggcaagatggtcctcctgcacgactggatgcaccctcatcacggcaagatactgatcgctggcgtggatcaagatttccttctaactcaacgtcctcttcatcaacctggagccgttcacggaactgatcctatgctgcaggacttttttctagccatgtgtcgacctccgtgcacaatgtctaatcgtacctttccaggcactgcactccatgcatattgtcgctgttttgtacttttgtagtaacactctacaatccatgattattatccctgtttgttagtaatgctgttttatctgtgcatgaaacactctatacctacatatatccaagaattgcaggactgtatggatgtaaaactcttgcaaggttatcaattttcatgagctataaaattaatatctatgggc

SEQ ID NO: 31184 - DNA, 1225 bp, Zea mays
  Clone ID: UC-ZMFLB73139H12_FLI
ctcctgcgttggctgataatcatggctagagctccgctgctcctcgcgctgctgtgcgcgtgcgccgccgccgccggctccgccaatgcggcggggaggaagatggtcggcgtgtacgagctcaaggcgggcgatttctccgtcggcgtcaccaactggggcgccaccatcacctccgttgtgctgccggactccaaaggggattttgctgacgtcgtgcttggctacgacaccattggaggatacgtgagtggtaaaagctacttcggagcgcttgtcggacgagtggccaacaggatcgccaacgcgcgcttcgtgctcgacggaaaggcttaccatcttttcaagaacgatggcaacaacacgcttcatggtggccatagggggttcagtcaggttgtatggacggttaaagagttcgtcggtggcggtgactcgccctacatcacgttgtactaccacagcttcgatggagaacaaggtttcccaggcgacctggacgtgtacgtgacgtaccagctggcggccccctacgtgctgcgggtgcacatgaacgcgacggccgtgaacaaggcgaccccggtgaacctggcgcagcacacgtactggaacctgggcgggcagggcagcggcgacgtcctccgcaacacggtgcagctgttcgcgtcccggtacacgcccgtgggcggcggcctcatcccgacgggcgcggtggcgcccgtggccggcacgccctacgacttcctcgcgccggccgcggtgggctcgcgcatccgccaggtctccggcggcaaggccggcgtctacggctacgacaccaactacgccgtggacggggagcccggggcgctgcggaaggtggccgtcgtccgggacggcgcgtccggccgggcgctggagctgtgggccaaccagcctggggtgcagttctacacgggcaacttcctccaggacgtcaaggggaagggcggcaaggtgtaccagcagtacggcgcgctgtgcctcgagacgcaggggttcccggacgccgtcaaccaccccaatttcccctcccagatcgtcaggccggggcaggtgtacaagcacgacatggtgttcaagttctccttctagccgctctctgtataggcaacaacaccctggtccctggctaatcaatctactagtacctgttatgattgtcactggcaaagtggcaactgggccttattgggactggagacac

SEQ ID NO: 31185 - DNA, 1568 bp, Zea mays
  Clone ID: UC-ZMFLB73140B02_FLI
cccgcggtgccggtggtggtggtggacacgcaggaggccgggatccggctcgtgcacgcgctgctggcgtgcgcggaggccgtgcagcaggagaacttctctgcggcggaggcgctggtcaagcagatccccatgctggcctcgtcgcagggcggtgccatgcgcaaggtcgccgcctacttcggcgaggcgcttgcccgccgcgtgtatcgcttccgcccgccaccggacagctccctcctcgacgccgccttcgccgacctcttgcacgcgcacttctacgagtcctgcccctacctgaagttcgcccacttcaccgcgaaccaggccatcctcgaggccttcgccggctgccgccgcgtccacgtcgtcgacttcggcatcaagcaggggatgcagtggccggctcttctccaggccctcgccctccgccctggcggccccccgtcgttccggctcaccggcgtcgggccgccgcagcccgacgagaccgacgccttgcagcaggtgggctggaaacttgcccagttcgcgcacaccatccgcgtggacttccagtaccgtggcctcgtcgcggccacgctcgccgacctggagccgttcatgctgcaaccggagggcgatgacacggatgacgagcccgaggtgatcgccgtgaactccgtgttcgagctgcaccggcttcttgcgcagcccggtgccctcgagaaggtcctgggcacggtgcgcgcggtgcggccgaggatcgtgaccgtggtcgagcaggaggccaaccacaactccggcacgttcctcgaccgcttcaccgagtcgctgcactactactccaccatgttcgattctctcgagggcgccggcgccggctccggccagtccaccgacgcctccccggccgcggccggcggcacggaccaggtcatgtcggaggtgtacctcggccggcagatctgcaacgtggtggcgtgcgagggcgcggagcgcacggagcgccacgagacgctgggccagtggcgcagccgcctcggcggctccgggttcgcgcccgtgcacctgggctccaatgcctacaagcaggcgagcacgctgctggcgctcttcgccggcggcgacgggtacagggtggaggagaaggacgggtgcctgaccctggggtggcatacgcgcccgctcatcgccacctcggcgtggcgcgtcgccgccgccgccgctccgtgatcagggaggggtggttggggcttctggacgccgatcaaggcacacgtacgtcccctggcatggcgcaccctccctcgagctcgccggcacgggtgaagctagacgtcattgagcgctgaatcgcagttagcgaccgggccaaggttctcgccggcgtgatgagatggaacactttgactcccgcggccggatcggcctgtgttcgttcttgtttccgatctcccttctctttcccgttgcttcgatcccgtcaagtatggtagaccgtagcctattgttatgtttaaatgtcaattattatgtgtaattcctccaagcgccgatatccaataaggacgaaccggattttcgtt

SEQ ID NO: 31186 - DNA, 2303 bp, Zea mays
  Clone ID: UC-ZMFLB73140E06_FLI
gctccccaccttcctgcgcaagcgcttcaaccgcatcaagctcggcttcttcctgcactcgccgttcccctcgtccgagatctacaagacgctccccgtgcgcgaggagcttctgcgcgccctgctcaactccgacctcatcggcttccacaccttcgactacgcgcgccacttcctctcctgctgcggccggatgctcgggctctcgtacgagtccaagcgggggcacatttgcctcgagtactacggccgtacggtgagcatcaagatcctgcctgtgggggtgcacatggagcagctcaagacggtgctcgggttgccggagaccgaggccaaggtgtccgagctgatggagatgtactctggaaaggggagagtggtcatgctgggcgtcgacgacatggacatcttcaaggggatcagcctcaagctgcttgccatggaggagctgctgcggcagcaccccgagtggcgggggaagctggtgctggtgcaggtcgccaacccggcgcgagggagggggaaggacgtcgccgaggtgcagaccgagacgtacgccatggtgcggcgcatcaacgaggcgtacggtgagccggggtacgagccggtggtcctgatcgatgagcctctgcagttctacgagcgcgtggcctactacgtcatagccgaggtgtgcctggtgaccgcggtcagggacggcatgaacctgattccctatgagtacatcgtctcccggcaggggaacgagaagctggacaggatgctgcggcaggggaagccagaggagaagaagagcatgctggtggtgtccgagttcatcggatgctcgccgtctctaagcggcgccatcagggtgaacccgtggaacatcgaggccgtggctgacgccatggagaccgcccttgtgctgcctgagaacgagaagaggctgcgccacgataagcacttccgctacgtgagcacccacgacgtcgggtactgggctaacagcttcctcctggaccttgagaggacctgcaagtatcattctcagaagaggtgctggggcattggcttcggcctgcggttcagagtggtctcgcttgacctgaccttcaggaagctttccttggagaacatccttatggcataccggagagccaagacacgggcaattctgctggactacgatggcacgctgatgccacaggcgattaacaagagcccgtccactgaatctgtgcggatcctcaacagcctgtgccgggacaaggacaatgtggtgtacctatgcagcgggtatgaccggcgcacccttcatgagtggttcccttgtgagaaccttggcatagccgcggagcatggctacttcctgaggtgtaagagggacgcggaatggaagacctgtgtcgctgccacagactgcagctggaagcagatcgcggagccggtgatgtgcctgtacagggagacgacggacggctcaaccatcgaggacagggagacggtgctcgtgtggaactacgaggacgcggaccccgacttcgggtcgtgccaggccaaggagctcgtcgaccaccttgagagcgtgctcgcgaacgagcctgtgtcggtgaagaccacgcctcactcagttgaagtgaaaccgcaggtgaagcctcgatcctccatctccccatcttctttgcattgggcaaatagacctgacgacgagctgattgttcgcttttgcagggcgtgagcaagggcttggtggctcggcgcatgcttgtgtcgatgaaggagcggggccagtgcccggacttcgtcctgtgcatcggcgacgacaagtccgacgaggacatgttccagctgatcgccaccgctgcctgcggggactcgctggcgtccaaggcggaggtgttcgcgtgcaccgtcggccgcaagcccagcaaggccaagtactacctcgacgacgcggcggaggtggtgaggctgatgcaggggctctcctacgtctccgaggagctggcgctggcgaaccagcgggatgaagacgaggactcctctttggacgacgtgtgggaataggaaggagcgttcccttcccgtgctgctcctgcggtaatgtctgtttgtgttgttggctcggctggagctttcgccgagtagtttaggtgtgtaaatgaggtatgcttttcagcgtaatgtattgccagtggtctagtctcgagagctggcttgaatctagtgatgctctagtactttggtttgtggtgctatttacctgatccgtggaaggcagtactatgagctatacaagatgcagacctgaaatctcattc

SEQ ID NO: 31187 - DNA, 1785 bp, Zea mays
  Clone ID: UC-ZMFLB73140E10_FLI
tttcactctagaccgaaatcggagcgcccgataccataccaatagcagcagagcagtagcagcacagctccctcccccgtcctctccaaatctcgccggattccgtccaccgccaagccctcgcatctgccgcaggttcgcgtctgtgcccgagcgtgttgcactgccggtggtgttggtggtggttggcggagttgccgccgagggtcggtcatggactacgggccctctgacaccagcggaactgatgatgatcttccacaacttccacataggagtatcagaggcagcggacgtgttagtggtaatgggagaactattgttcctgccggttcatatgctagagcaccaactgacatggaagcacaaattcaacaacttgagcaagaagcatattgttcagtccttcgtgcattcaaagcccagtctgatgccattacatgggagaaggaaggtctcatgactgaacttaggaaggaactaagagtatctgacaaagcacacagggagctgttaaataaagtcaacaacgataatattatatgtagcataagggaatggagatcaacaggagggcttcaagcaagcatgtccaataacccacaaccgattcatgaccctgttccaagtcctaccacctctggccgtaagaggcaaaagacatctcaatctgttcctgctttacctgcacctcctgcaatgcattcacaacagctggctacaccaacacagccatcgtcttcaactgctaggaaagcagtacccccagtccctaaaggcaaaaagacgaaaccaggtcagaaggtaccaggtggctctgcagccaagcctatgccatcttcagcaggtcctagtggaagaggaccacacatgaataggaattttccaggtggttctgctcctgaagctcaagctcagaatgtcgatccattggttggtcgtaaagtgatgagccggtggcctgaagataatagtttttatgaagcagtcatatctgattataatgctgaaacgggcctttatgtgctggtttatgacattaatacggcaaatgaaacctgggagtgggttgatcttaaagagatgggacctgaagacataagatggaaagaggatgactctgggatagaccctgtggtgtatctgcgcagccgaggtgccccaagtagtggggtcaggaagccaacaggtcgcggtgggcccatgccaggttctggaagaggaagaggattaccgaagaacatgtctaggaaagattttccacctccacaaaatggtgttggcaagagaagttccgatgacattgatatccttcatactgagagcctaataaaagaggttgaatgtttattattacaatgaactgcagatcttgtgcacttcatttcacttctcttctgctatatctgctcatgtaggtggagaaagtttttagcgttagcaatcctgatccacaggaagtagaaaaggcaaagaaagcactgaaggagcaagaacagtcattgattgacgccatagcaaggcttgctgaggcatcagatggtgaaagtgatgggctcaatcgtgggcgaaggaacttgtatgctggtaaccagcatcaagcaaactatgttgatgacatgcccgttggtgaccaagctgatgccatgtaaacactgcatgaacatgtatacacaacataatataactgtctgttgtacaatccattgcaaatatttgttctggatttaggtctctgtaagctaagtatcgttcgtttcgggaaactaatttttttagaacagt

SEQ ID NO: 31188 - DNA, 1096 bp, Zea mays
  Clone ID: UC-ZMFLB73140H05_FLI
gttcacagtcaagtgactcgatgaaatcatcctcagatgaagacggggatttgatgcccaaacagttttggaagcggaaacaacattctgtgagggaaagtggtgcatcaagtcattccgacaagaagaccaacatgagaaatgataacaatctttgcttgacgcctctccagtcatcgccaatagcaaaaacaagagatgctaagcggcggcgacagtaccatgcttactcaaagcaggcttctcatgcaccattatcattttggcctcggtgggtatatgaaatgtatgattcatatacacttgctcgcagtgctgcagagttatggagacagataattgcaaacccaagcatggacgatcatgtaagaaagccagatattttgtcatttcacatcggaagcaaacttccagtctcagaatctgtgagacaaaaacttctggagattgatggagtttcatatcgcctacagaaagaaattcagcttctcaaggccttcaatcatattaaatgtagaaattgccagtctcatatagcaaaacgtagtgacatggtggtgatgtctaccgacgggcctcttggtgcctatgtcaaccctcacggttgtgtccacgagacgattacagtcagcaatgcaactgggctagcactcattggcaatccttcgaaagtccacagctggtttcctgggtactcgtggacgattgcagcatgcatggcctgcgagtcccacataggctggctattcagagccaccaagaagaatctgcggcctaggtccttctgggggatccgcagctcacaaatcgcagacgacacacaagtagatcagggtgactgatgctccaaacttccatgcgtataaggccatagtagcagtggactactaagtcatatatgacctggtgttcccaatcctccagtcgtgtctggttcatacgcactgcctgccttttttgtgttggcatagtagggacggtggagttccctgtaaaacaatcactctttttctactgttgtagtagtgctctgcactgaagggatttactgaatctctctttttttggtctaaataagatatctgttttcaatagt

SEQ ID NO: 31189 - DNA, 1434 bp, Zea mays
  Clone ID: UC-ZMFLB73141C12_FLI
ccaatccctcgctgcccccacactccagaagtccagaccaaagctctaaagtccaatccctcgctagccacttgccatctgatcaaccagccagccgatctcagcgatccgccatggccaccgcgtattacgagaggccccgtggcggcgccgtcgaggaggcggacgacttcgatgagttcgaccccacgccgtacggcggtgggtacgacctcgccgtcaccttcggtcgcccgctgccaccgtccgaggaaacctgctacccgtgctcggcgccctcgacctcctacgacgcaccgcactacgccgcctccgagccgtccccctacggtcaccacgccaagccaaagcccaactatgggttccgcccccagcaggagcaacagccgtcttacggcagcggctacggatccaggcccgagcccgctgcggaggagggcggtggctatggatctggcttcggatccgggtatgggaggaagaagcaggaggaggagagctacggctctggatatgggaggaaaccgcaggcggaggagagctacgggtccggcgggtacggctctggctacggcggtcagacccggccggaggagagctatgggtcagcagggtatggatctgccaatccgcaggctgagacatacggctctggctacgggaggaagccacaggtagaggagagctacggatcggagtatgggtctgggttcgggaggaagccgcagattgaggagagctatggatcggggtacgggaggacgccgcaggttgaggagagctatggatctggttacgggaggaagcctcaggttgaggagagctatggatctgggtacggcagcaggccgcagggtggggaggagtatggcagtggtggtggtgggtatgggaggaaggcacaggaggagacctatggctcctcggggtatggctatggcaggaagaacgaggagcagagctatggtggttctggctatggttatgagaagaaggcatctgaggaggacgaaggtgcctttggctctggtggttaccggaagccaaaaccctatgacgaggagacacagggttcatacggttatggagaggagcagcccaagtatcagagtggcgggtatgagaggccgagctatggtgggggagaggggtactatggccgcaagaaagatgatgacgactcggatgatgagaagaagcggcgtcattctaagcaccaccaccatggccaccactacgatgactaagcaccagtgccttctgctgggcgttgccctggttcaccgctactgctactatatccattcgcttgcataaataaagacggctgtgtaccttctggacactggaccaccgttgcgacgttgcctctgcattgttacagccgagccgtgagtgtgctgtttattatctaatgttcaaatcgttgtgatg

SEQ ID NO: 31190 - DNA, 896 bp, Zea mays
  Clone ID: UC-ZMFLB73141E02_FLI
cattttttaaccataaatacagcaggggaaacccccactgtagggttttttttattaaagggaaatgtacttattcagcggcatatggatgattgcttctctaaagaaaacttagagctttgataatgattgccaagaacttacttgcatttatgtttcttatggttcacaggaactggagcgaaagtatcacaaaattgtgttttgcttcatactcctttggaatcccatgatatacaagcgtgcttgagcaaaaatggtttcaatgggaataggatcagcttgtgggtactgcagggattacctctgtccacaaccacaagtttggaacatctcttgcttctcataagcaatctagcaatgaaaggaagtatcgtcataggagagctgccccattttacagactgtacagcaccaatggacatgggcttggaacaggacaaactagaaaagcttttctttactcatggctttcgagtcagctttgtgcaatatgatactgttgcagaggatattggcttagatctagctattacattggaacaatgtggcacaatgctttttgttgcagaacagctgcggttttcagatgcacagatggaaagcttccggattcattttggaagaatagaggaaggcgcggacgaagaaggattcgaggaactctagtcagttctatgacgaccattgatgtaactaaggtttgatcgcggtttgggctagaatccctgccagtttttattgttggaacgtagaacaatcgcctatcgtttatttttcatttagcttgttctgtaacgtttttttttggccttttgtttatgttggagcaaatgggtgaccgaactgaacatacgcatggtgctttactgcttattgtatttgtattcattgac

SEQ ID NO: 31191 - DNA, 1880 bp, Zea mays
  Clone ID: UC-ZMFLB73141F11_FLI
ctctctctttcctcaacctcatccgagtggctctccgtgtgctgtggcggcggcggcgcccggctctgctcggacggactccaccgaaggctcggctcccctcggactccacctgcgacggccggccctctgcctgcaccgacggtgcccggctccctcggcatccaccagcggtgcccgactccaagaaatgtacaagtcacggctgcaggagctgtgccagaagcggcgatgggcgccgccgttgtacgagcctacccgagagggtcctgcccacgcgcccctcttccgcgccactgtcgtcgtgaatggcgagaggttcagttcccgggatgaaggggagaagtcactcaaggaggcgtacaacctcgcggcgatggccgccttcgacaacctcatcgcgctcccggccgcggcccttgcccctgccccggctgctccagcgccgccctcatccgagacccagcttccttacaagagtcagttacaaatttatgctcagaagcgaggcaaactcctgccttcatatcgtcccattcatggaggttctcttcatgcacctctatttaagtcagaagtaaccatagatggtcaaacatttgagagcccagagtactgtcacacaatgaaggaagctgaaacagttgctgcaaaagttgctctgatgtccttacctcaagaagcaaacccaacacagcaattactgcttccatctgtaaactataagaatcttctacaagaactagttcagaaggaaggctttcccttgcctatctataatacagcctcggatgtctcgaactattctgctgccttcgtatcaactgtggaaatccatggtgtaacttttcatggaaagccagggaacaccaaaaagcaagcagagatgaatgctgcaaagtctgcttttgaacatttcaaaaacataaatcatgatgctggatcatctggctctgctaacccacttcctgttgccgctacaaaacagtctgttgatggaaacactctacgtgcaaagctggaagttaacaaatcacaccttgcagagccaagcacagaagttgaagcaatatattcatctacagaagttgacaaactgccacttccagggccaagcatggatatcgaagtaatggactcaactcttgaagttgacaaactgccccttccagagcgaagcatggatgttaaagttgtgaattcgtctctgaaagttgacaaactgcactttgcagagccaatcacagaagctgaagtgatccactcatctctgcaagttgatgaaccgctcattccaaagccaggcatgagctcatctctagagaacacacctgctgtgaatggccactcagcccccatatccccaaccattactcctactctaataagcgtgccaacagcaaccatgcctgtcagcaatgacagatgcggttgctacatgtcaaccaacagaatccaagtctaccctcgccacactgatatggttatcccggaaggcgcggccgtgcttcccatcagcgataatcagtgggtagctgtcagcctaccttattccatggaacaaagggatttctgttgccgtaatccggactgccacttaggaagataaaagcagacaaaaggatggatgctttgtgatgattatatagcttgtgatgctgagcattgcccgtgatgtactaaaatctagtgtaacaagactgccttgcgctggactacgattagtgtccctaatgcggagacttgtgtgactcctattgtatctagattaagctgtacttgtttgactatgtgcggaagtcttgagttacactcctatagtagaggacttgaactctggatggaccatccgcaacatttatcatgatcagacttttttc

SEQ ID NO: 31192 - DNA, 1185 bp, Zea mays
  Clone ID: UC-ZMFLB73142A04_FLI
gaaccagccgctgctgataagcggcgtggatgacgcccgcgaaggggcgcgcagtgcgacccgcagcgcagatggaaatcaagaggaggtggtagccgctgagattcagcaggagagtaattctgtgtttagccgcggtgaattgcgcccggtgctgcagccggcgtatcatggcgtgggagaaactctggattctgatgcagctacacgtacaggtgcctcgctccagggtgaggtatcggagagttcccttgtgcgattggatggaggaattggtactggtgtagaaagatcgtgccttgaagatgctgtgtcaagtgatgagatccatggtgaacaagaagagcaggaacaagggagcaaggttaatgctgccactggttgcgatgaaccagatggagaggtcaaggatggtgctctgcctctggctcacacggcaggtactgaagagggggagaagcaatttgttgtctggtggaagctgccgttcaagctgctgcactactgtgcttggaaggtgaagccggtatggtccttctccatcgccgcagcacttcttggcctggtcgtgctggggaggaggatgtacagaatgaagcgcaaggcaaggggcttgccccagattaagattgcgtttgatgataagagggcctcccaatttgctgatcgcgcggcatatctcaaggaagccttcctggtagctagacgtgtacctatgctgagaacatcatctggtgctacgcttccatggtcaatggttcaggagagatgagtgaagctgctcaaagctccattctggatggtgtacatcagtacgagcatctgatttggctttgtctataaccttttgttttagatgacgcgtcaaggaggattccaatgttgatgtcagtggtctctctttctcgatcttctccatttttactttaccttatctttcttttttaaggaaccacttcttgtgctcctgatttccttttttttctttgcccttactctgtttagtccgtggttagtagtggtgtcctaaatttatcgttcgtacagacgggctcttttctttatcttgttaatttaaatgctagttgttgacgctgaattggattggatgacatatcagtaaggctagattgcgcggatcgtcacagaccgaaaaacacgtggtaaagagcaggtttacgaatg

SEQ ID NO: 31193 - DNA, 818 bp, Zea mays
  Clone ID: UC-ZMFLB73142B12_FLI
gggagaagttggcgtgttggcaactaccgccagcgcatcgagcgctggatggagatgcagaaggagaaaagaatctacgagcttggctccttgccccccttcctgctcgtcttcgccggcgagatagaggccgtcgaccaccggtggaaccaacgtcttcggcagctgccgccctctccataacgggcccgtcagcctgatgcactggtccgggaagggcaagccatgggaccgtctcgacgccggcaagccttgccccctcgaccacacctggaagtcgtacgacctctacattggcgagaatgattcttcaccagcatcagggccgtcccggtcagccttgtcatcgttggtggcatggtagaagttcatatacacaataattctttgatctcgggtgcccgtggttcttggccggtaatggaattgccttgcgatgcattcccactgccggctgccgccacagctgctgccgcaagccagctgccgccttcggctgtacaggacagtgaggggaggggcggtatacagattgcagcaggagcagcagcagcagcaagggggtgaagacagtgaatagcgggggggagcaaattcttgttcgttttgcactatgattgagattgattcattaggctctggtttggaggctgtgactatcatgggatggaaggaattacttggttggtggtgtacaattcttggataggacaaaggtttcggttttttggtgtattagttcagaattgtttcatttacatgtctattcagtacactcgtgtaatacggattaaattgatttgaaacaaattgagtgc

SEQ ID NO: 31194 - DNA, 1924 bp, Zea mays
  Clone ID: UC-ZMFLB73142E06_FLI
cgttctggacgaaccgatggcttgtgttcgttggggccatgtggatgcagtccatggccggcaccacttacatcttcggcgccatctcgccggtggtcaaggccaggctgggctacgaccagccgcaggtggccgcgctgggtgtcgccaagaacgttggcggctgcctcggcctcctcgccggcgcgctctcggcgacgtggccgccgtgggcgctgctggccatcggcgccgcgcagaacttcctcggctacggctggctctggctcgtcgtctccgggaacgcgccggcgctgcccctctggctgatgtgtgttgttatctttattggaacaaatggccagacgtatttcatcacggcttcacttgttacaagcatccagaatttcccaaagagcaggggcccaacagtgggcatcctcaaaggatttatgggcctaactagcgccattctgacacaagtttatacagtgatgcacacaccagaccatgctgcgcttatcttcatggttgctgttggtccgtcgctggttgccattggcttgatgtttgttattaggcctgttggtggtcacaggcagatacggccatctgacaagaacagcttcatgttcatctacactgtatgcttgctcctcgcctcataccttgtcggtgctatgcttgtccaagatttcctgcaaccaagctatgatgtggttgtttttctgactgtgattctgttcgtcctccttatttcaccaatcgcaatccctgtgattgtgtcgttcatgccggaaaaagctcaacatctcatggaagatgctctcctatctgaaccattgacaggagaggcaagcagttcacgacaaaaggaggatcaaccagaggtcattttaagtgaggtagaagaggagaagtctaaggaaactgattcattgccgccatctgaaaggagaaagaggattgcggaattgcaggccaagctagtggaagcagcggcaagaggtggggttagaatcaaaagaaggccacaccgaggggataacttcaccctgatgcaggcattggtgaaggctgatttttggcttatttggctatcacttttgcttgggtcgggatcagggctgacagtgattgataacctgggtcagatgagccaggctattggttataaaaatgcacatatctttgtgtcactggtgagcatatggaactttcttggtcgtgttggaggtggctacttctctgagatcattgtcagggaacgtacatacccaaggcacatagcattggcagttgctcagatcgtgatggctgctgggcatttcctctttgctatggcttggcctggaactatgtacattgcgagcttgctggttggacttggatatggagctcactgggctattgtgccagctgctgtctccgagctttttggtgtaaaacactttggtgcgatgtacaattttctcatactagcgaaccccgcaggatccctcatcttctcagagctaattgtcagcaacctctatgaacatgaagctgagaaacaagctagccaacaccagatgtcagcattgctgtctccacgattgcttcgtgatactggctttcttgcagatgatgcactcaagtgtgaagggcctgcttgtttctttttcagctctctgattatgtcggtgttctgtgctgttgccgctgggttgagcctcctcgtcgttcaaaggaccagacaagtttatcctcgcctctacagttctgtccggacttgagattctccaattctgcatggatgggaagctcaaatcctcgtattctatgtccgtttattcttgcatacatatgcacaaagataagtatgtgaataaattctcaaatcttttcctaagctggtattgtaaaaacagatattcttgaatggattgtcccttgtgacttgcgt

SEQ ID NO: 31195 - DNA, 1870 bp, Zea mays
  Clone ID: UC-ZMFLB73143A04_FLI
aagattggctatgctttactatcctcgcagtcacagcagtttttcaccatctaagaggctcaacccatccttatttctctgggatacactaagatactctctggtatctacagaaattgcttctcgtggtaggatgtcaagccactctgctgaatcgaagtcctgcttggagtctttgcgtggcgaacttaattcatcaagtgggttcatattgtctctcctgttccatgctgcccactctgcacggaatttgaatcgtctcgaggttcttctgaggtttgaaggtatccaactattagcaggctctatttgctcttgtatttcgggttataaagacattctgaatgccactaagcgaaaaggctctttgccatcgatggttgatccagccagtgagggggccctctttcctgatgtacaattttggaaacaatgtgctgatccagttcttgctcaagatccattttcttctttgatgtcagcacttttctgtctgcccgttcagtttctgtcatctgctgaattcttcatcccttttgtccatctgttctatgttgtttgtgccattcaggccctggtaacatgctacggagaggaaacttttgatcgatcaaacttcaatgactgccttcttaatgatgtttgcaagacaatgtcaggatatgatatcgccagagactattttgtatccaaatatatcgatccctcttgtcatccaaaagacatggtccgcagattaacatatccatatcttcggagatgtgcattgctttgggagctgctaagatcttctgccacatcacccttgtatgacggttccaatatttgggaaggatcacatctttacttgagtaatagcacacaagacgacagttcttcactggcaatggaactggccgggttacgagaattggaagacctgtttcagattcagtcgctggatctgattctccaagatgaatctgtacatatgcttgccttaaaatggtctcaacatttctgtgaagagtacaatccccgtaaatatagaggcactctcttttctacccctgcagttccatttaggctgatgcaactaccagatgtgtaccaggttctcctagaaagatatatcaagatgcaatgccctgattgtggctcagtgcctgatgaaccggcactatgtttgctatgtggcaaactatgttcgcctagttggaaaccatgctgcaggactgggaaatgccagaatcatgcattgcaatgtggtgctggtattggcatatttcttctagtgaggaaaacaacaatcctgttgcagcgatctgctcgtctaacattttggccgtctctataccttgatgcttttggagaggaggataatgaaatgcacagagaaaaacctttatatctaagtcaagaaagatacacatccctgacgtatctggtggcatctcatagccttgaccgaacttctgaagttcttcggcaaacaacgattggcttttatggatctgattgagcccatttttcaaggaacaatgtgttcaaaggatcttgcggatgtgcatattttgggaactgtactgcaacttggtgtttgatcttctccggtggtaacgagagcgttacctcaaccaaggtggtgtagattctgcaggctcgccacccgtcgttgctctatggcgcactggccctctgctgccctcttgtgcctaatgtacagtctacattcttttctttctttattatggacggtgctcacaaaatggatgaccttggaagttgtaacgctgtacgatcgactgcatgatctgtatgcacagacatagcgtcggactggtgtagtttgtcagtatgaaatgcaggcatcaggtgccatttcgtcgtc

SEQ ID NO: 31196 - DNA, 1158 bp, Zea mays
  Clone ID: UC-ZMFLB73143A09_FLI
caacagcgcattagctggtgaagaggcagaaaaggcttcattcggcttctttgaccgcaatgagaaatatgtcgaatgccttctgtcggtgaacaggaaagtaaatgcagatggtgttgtcactggagtgttctgtttcatccatgttcctagtgatgacctgcagcatgcgctacatgtgcagcaagcctctgagcagacagcacaaagaaagttgaaggctttctcgtacatgcgacatgccatcaacaaacctctctcaggtatgctttattctagggaaacactcaagagcacaggtctgaatgaagagcagatgaggcaggttcgcgtcggagacaattgccatcgccagctaaacaagatacttgccgacttggatcaagataacatcactgacaagtcaagctgcttggatttggatatggctgaatttgtgttgcaagatgtggtggtgtctgctgtaagtcaagtgctgataggttgccaggctaaaggtatcagagttgcttgcaacctgccagagagatccatgaagcaaaaggtttacggggatggtatccgactccagcagatcgtctctgacttcctatttgtttcggtgaagttctctcctgctggtggctctgttgacatctcttccaagctgactaagaacagcattggggaaaaccttcacctcatagacttcgaacttaggatcaagcaccgaggagcaggagtcccagcggaaatattgtcgcaaatgtatgaggaggacaataaagagcagtcagaggagggcttcagccttgctgtttctagaaaccttctgaggctcatgaatggtgacattcgtcacctcagggaagctggcatgtcaaccttcattctcactgctgaacttgctgctgctccttcagcagttggacgatgagggcaaactgcaacaagtgtcaaatgctctctcagagttcattcggaaagccacggtggtttgcggagaatgagaaatgttggagcggcgtgtaggatcaccgaatgcatagtacggctccatacttctgctctgtttctgcctgtaactcaactgtgaaaagttttaaactttcagaaagaaaaaccgtgtgaggtgcaggttcaagttaatatgaataataaagtgttttttattaaaat

SEQ ID NO: 31197 - DNA, 2417 bp, Zea mays
  Clone ID: UC-ZMFLB73143B02_FLI
cctcctgccaccgcgcggccccaaccaaccacaccgcagcgcagcaatggcgggcaacggcgccatcgtggagagcgacccgctgaactggggcgcggcggcggcggagctggccgggagccacctggacgaggtgaagcgcatggtggcgcaggcccggcagcccgtggtcaagatcgagggttccaccctccgcgtcggccaggtggccgccgtcgcctccgccaaggacgcgtccggcgtcgccgtcgagctcgacgaggaggcccgcccccgcgtcaaggccagcagcgagtggatcctcgactgcatcgcccacggcggcgacatctacggcgtcaccaccggcttcggcggcacctcccaccgccgcaccaaggacgggcccgcgctccaggtcgagctgctcaggcatctcaacgccggaatcttcggcaccggcagcgacgggcacacgctgccgtcggaggtcacccgcgcggcgatgctggtgcgcatcaacaccctcctccagggctactccggcatccgcttcgagatcctcgaggccatcacgaagctgctcaacaccggtgtcagcccctgcctgccgctccggggcaccatcaccgcgtcgggcgacctggtcccgctctcctacatcgccggcctcatcacgggccgccccaacgcgcaggccgtcaccgtcgacgggaggaaggtggacgccgccgaggcgttcaagatcgccggcatcgagggcggcttcttcaagctcaaccccaaggagggcctcgccatcgtcaacggcacgtccgtgggctccgcgctcgcggccaccgtgatgtacgacgccaacgtcctggccgtcctgtcggaggtcctgtccgccgtcttctgcgaggtcatgaacggcaagcccgagtacacggaccacctgacccacaagctgaagcaccacccggggtccatcgaggccgcggccatcatggagcacatcctggatggcagctccttcatgaagcaggccaagaagttgaacgagctggacccgctgctgaagcccaagcaggacaggtacgcgctccgcacgtcgccgcagtggctgggcccccagatcgaggtcatccgcgccgccaccaagtccatcgagcgcgaggtcaactccgtgaacgacaacccggtcatcgacgtccaccgcggcaaggcgctgcacggcggcaacttccagggcacccccatcggcgtgtccatggacaacgcccgcctcgccatcgccaacatcggcaagctcatgttcgcgcagttctccgagctcgtcaacgagttctacaacaacgggctcacctccaacctggccggcagccgcaaccccagcctggactacggcttcaagggcaccgagatcgccatggcctcctactgctccgagctccagtacctgggcaaccccatcaccaaccacgtgcagagcgcggagcagcacaaccaggacgtgaactccctgggcctcgtctcggccaggaagaccgccgaggcgatcgacatcctgaagctcatgtcgtccacctacatcgtggcgctgtgccaggccgtggacctgcgccacctcgaggagaacatcaaggcgtcggtgaagaacaccgtgacccaggtggccaagaaggtgctgaccatgaacccctcgggcgagctctccagcgcccgcttcagcgagaaggagctgatcagcgccatcgaccgcgaggccgtgttcacgtacgcggaggacgcggccagcggcagcctgccgctgatgcagaagctgcgcgccgtgctggtggaccacgccctcagcagcggcgacgcggagcgggagccctccgtgttctccaagatcaccaggttcgaggaggagctccgcgcggtgctgccccaggaggtggaggccgcccgcgtggcggtcgccgagggcaccgcccccgtggcgaaccggatcgcggacagccggtcgttcccgctgtaccgcttcgtgcgcgaggagctcggctgcgtgttcctgaccggcgagaggctcaagtcccccggcgaggagtgcaacaaggtgttcgtcggcatcagccagggcaagctcgtggaccccatgctcgagtgcctcaaggagtgggacggcaagccgctgcccatcaacgtcaagtaaagaacgccaaggagaagaggagggaggggaggaaatacgtggaaaaaaaaataaaacctgtacacgtgtatgtccagatcgcgtgccgtcgatcgttcttcgttgttgatttttggttgtattgatcgatccgtatgtgtgcgtgcgtgtgtggcgttgctctttcttcttttgtgtagctgccctgccaccggccgacgtgcatgccatggtggcggacagcgttttctaaggtcatatactgttgttgtgtttaagt

SEQ ID NO: 31198 - DNA, 1074 bp, Zea mays
  Clone ID: UC-ZMFLB73143B08_FLI
atatgttcaagtatgattccactcatggcccgtttaaaggttctattcgtgtcgtggatgattcaaccctcgagatcaatgggaagaaggtcacaattacaagcaaaagagatcctgcagagattccatggggtaactttggggctgaatatgttgttgaatcttctggtgtcttcacgacgactgataaagcatcagcacacttaaagggtggtgcaaagaaagtggtgatatctgcaccatcagctgatgctcccatgtttgtagttggagttaatgagaatagctatgatccaaagatgaatgttgtttctaatgcaagttgcactaccaactgccttgctccacttgccaaggttgtccatgaggaatttggcatcgtggagggccttatgacaactgttcatgcaacaacagctacccagaagaccgtcgatggtccttcgatgaaggattggagaggaggacgtggtgctgcccaaaacataattcccagctccactggtgcagcaaaggctgttggaaaagtcctgcctgagctgaatggaaaactcactggtatggccttccgagttccaacaccaaatgtctctgttgtggatttgacatgccggattgagaaaagcgcctcctatgatgatgtgaaagcagccatcaagacggcatcagagggtgcactcaaaggtattcttggctacacagacgaggatgttgtttccaatgattttgttggtgattcaaggtcaagcatctttgatgccaaggctggtattggactgagctcttccttcatgaagctcgtgtcttggtatgacaacgagtggggctacagcaaccgggttctggatctgatcgctcacatggctcttgtgagcgccaagcactgatgttcgtactcgttcctccagtaccagtagtagcctagataagaggctgcagttttgacggccattttcttttagctgttgtttggaataaaagaccaaatgttggaacacttggaactcgcgcaaaactggaatccgattcatgacctgtgttttagttgtagagggggcaaatttgcatcgtact

SEQ ID NO: 31199 - DNA, 1681 bp, Zea mays
  Clone ID: UC-ZMFLB73143C03_FLI
cgcagagataggcgtcttcgtactcgcctacctccgcggctcaaacctttcccccttctcccaattccttccgccggccgccgctccacccgtacgacgacaccatgagggagtgcatttcgatccacatcggccaggccggtatccaggtcggaaacgcgtgctgggagctgtactgccttgagcatggcattcaggctgacggtcagatgcccggtgacaagaccattgggggaggtgatgatgctttcaacaccttcttcagtgagactggtgctgggaagcacgtgccccgtgctgtttttgttgaccttgaacccactgtcatcgatgaggtgagaactggcacctaccgccagctcttccaccctgagcagctcatcagtgggaaggaggatgcagccaacaactttgcccgtggtcactacaccattggcaaggagattgttgacctgtgccttgatcgcatcaggaagcttgccgacaactgcactggtctccagggcttcctcgtcttcaacgctgttggtggaggaacgggctctggccttggttccctcctcctagagcgcctgtctgttgactacggcaagaaatccaagcttgggttcactgtgtacccttccccccaagtttctacttcggtagttgagccatacaacagtgtactgtccacccactccctcctcgagcacactgatgtggctatactgctggacaatgaggccatctacgacatctgccgccgatcccttgacattgagcgcccaacctacaccaacctcaacaggcttgtgtcccaggtcatctcatcccttactgcctccctgaggttcgatggtgctctgaacgtggatgttaacgagttccagaccaacctggtaccctacccgaggatccacttcatgctttcttcgtacgctccagtcatctctgctgagaaggcctaccacgagcagctctctgtggctgagatcaccaacagtgccttcgagccatcttccatgatggccaagtgcgacccacgccatggcaagtacatggcctgctgcctcatgtaccgtggtgatgtggtccccaaggatgtgaatgctgctgtggccaccatcaagaccaaacgcaccatccagttcgtggattggtgcccgactggcttcaagtgcggcatcaactaccagcctcctagcgttgtgcctggtggcgacctggccaaggtgcagcgtgccgtgtgcatgatctccaactccaccagtgttgtggaggtgttctcccgcatcgaccacaagttcgacctcatgtacgccaagcgtgccttcgtgcactggtacgtcggtgagggtatggaggaaggtgagttctctgaggcccgtgaggacctggcggcgctcgagaaggactacgaggaggtcggtgctgagttcgatgagggcgaggatggcgacgagggtgacgagtactagagaagtttgctgatgacgcagcatcaggccagtgtgctgcccttatcccgtgatctgccgagagttgctcctgctatcgtgttatgtgtgtctgttctgaagtattgtgtggtttacaacacctgatgttgtaagagttgttaattcccctgcattgctaccgggttattgagaataattatggctgtttacgttgttgcttcatctcggagatgctttac

SEQ ID NO: 31200 - DNA, 937 bp, Zea mays
  Clone ID: UC-ZMFLB73143C09_FLI
cttcgccttgcgagggggcggaggggaggtggtagtggtagggtatacaggagtgctctgcccatggagaaggcggggcaacaacgccatgttatcggcggcggcggcaagaaggcgcccgcgctggggctgcagaagcagaactcgtggtcgccggacatcgagcgcgacgaggcgtgggagcgccggcgcaggggcatgcgccgcgggggcacggcgctgcgccgcgcccgcagcgtcacggacgacgacctcgacgagctccgcggctgcatcgacctgggcttcggcttcgagccggcgcccgccgccgcgtgcgcctgcgcctgcgccgggaggaaccgcctcctggagacgctgcccgcgctcgacctctactacgccgtccacggcggggcggcggaggcgccgccgtgctcgtgcggcgccgcgtcggaggcgtcctcgtccgaggagtcgccgctcggcagccccatgtccatactctctccaggcgacacgccggagacggtgaagatgcggctgaagcagtgggcgcaggtggttgcgctgtccatgctgagccgccactgagctctccgggccacggccgccgctaccttgtcgcattgggaggagagagaaaaaaccattcgagatgcacacaacagcagaaggaaggaatctccggcggtcgcctcaagcagaaaaaagaggaagagaaaaaaaatctgttagggtttggtcatttggtgggccgccgccgccttccaccttgctcgtcctatcttggactgctagctaatcatctttcttccaccatgattgtatgattccgttggagacaaaacatcatgcctaattactttgcttgcttattaatcctcttgcttcccccctaatccatattagtttctcatcttcgtgtatgtacatgattcctttcaagaggcagatt

SEQ ID NO: 31201 - DNA, 1159 bp, Zea mays
  Clone ID: UC-ZMFLB73143E02_FLI
gaccaccatcaccatggggaggactccgtgctgcgacagcaagggcatcaagaaggggccatgggcgccggaggaggacaagctgctcgtcgactacgtccaggccaacggacccggcaactggcgcattctccccaagctcgcggggctgaaccggtgcggcaagagctgccggctgcggtggaccaactacctgcgcccggacatcaagcgcgggcccttcacccccgaggagcacaattccatccttcagctccacgccgtagtcggcaacaagtggtccatgatcgcggcacagatgccgggccggacggacaacgagatcaagaactactggaacacgcacatgaagaagcctcctgccccgccgcccgccacacggcccagtgggagaccgccaggctcgaggccgaggcgcgcctctccctgctctcgtcctcggccgccacgacggtcacctccgccaccgcctcctcctcgtcgtccaccgtcgccgccgagcatgcggcgccacccgacatcttcctgcgcctctggaactccgaggtcggggattctttccgcggcgcagccgcgcagcaggggcacggtccggaggcgagcgcggcgggcgctggcgtgccggcgctgctgcctgagctcggcggtggcggtgacgattcctcggccgcgtcgacctacgaggctgaggccgcggcggacgacggctaccaggcgttcctggacctggcgatggaggagttcgcgctgctgcacggccggctcggcgcgttctcggcgttcccgcaggccgacgtgttcgctgaggcgcactgctgccttttcgctccgtttgaggagtagctttgctcgatctcattgccagtcatcagacatcagagtagtagactagacgtacgtacgtgaccacgtgcatgtaccctgcatgcgtccgtctgcgtacgcgtacgtacatacatacgtacacatgccgcttgtcttggggacgatggcgtatgtacgtgcctgtacgcaacgagcggatgggtggcgcgtgtgacagttcgttattagtctgtgccctagagcaagaggtttttgcgactgctccaaactagccttggcattgctctggtgaacgatgtcaactttcaagtattctgcctctgcgtgtttgtgt

SEQ ID NO: 31202 - DNA, 1348 bp, Zea mays
  Clone ID: UC-ZMFLB73143F01_FLI
cagaggtacaggttcttctgctgcgggtgtggcgccaatgcggcggccgacggccgggaacgcgacgaggacgggggcttcggggtgtccgacggcaaggccgagaagggggtcgaggccggcccgcgggggctgtcgtgggcgcaggttgaggcgatgacgggcgggttcacctcggccgtggtcggcgagggcgggttcagcaccgtgtacctggcgcgcctctccggcgcgctcgccgccgtcaaggtccaccgcagcagcgagcgcctccaccgcgtgttccgccaggagctcgacgcgctccagcgcgtccggcacccgcacatcgtccgcctcctagccttctgcgaccagcaagacgaaggcgtgctggtgctcgagttcgcggcgaacgggaacctgcacgagcggctccacggcgggggcaaggccgcggggacgatgccgtgggcgcggcgggtgtcggtggcgctgcaggtggcgcgcgcgctcgagcacctgcacgaccgctgcgagccgcaggtggtgcacggcgacgtgaaggcgtccaacgtgctcctggacgcgtccatgtccgccaagctgtgcgacttcgggtcggcgcggatggggttctcggccgccgtccgcccgcgctcgtccgcgcgcaccatgctgggctcgccaggctacgtcgacccgcactacatccgctccggcgtggtcaccaagaagagcgacgtgtacagcttcggcgtcctgctcctggagctgctcacggggatggaggccttctgcgcggaggaaggccggctcctcactgccgtcgtcgcgccgcggctcagggcaggcgacccgccctgcgacgcgcgcgggttggtcgacgagaggctcggcaccgcctacgacgccgccgaggccgccgcggtggcggcgctggccgcggcctgtgtcggcgacaaccccagcctccggccgtccatggccgacgtggtgcgcaccctggagcagcgcgcgcagggatccatctccgccgtggagaggagatcggacggccagaggaaggtgtgagccacgagggcggggtcgtcgcgtcctccgaggcgcccagatctggcttgccgacttgttaacttgcggtgctgacgtgcgtgcatcgcacacgtggcgcgcgaacattggttgctaggagaacaaagcgttgctggtgtgcgagcacatcaaaaggacgaatcaaaaaagaagtggagaaaagcgtggtgaaaattgaagagagagagagagagagagttgattaggggaaaggtttggaggaggtaaaaaggcagggctaatctgtgtgctgatggggggtttgcatcatatg

SEQ ID NO: 31203 - DNA, 892 bp, Zea mays
  Clone ID: UC-ZMFLB73143F04_FLI
tggagaggcttggcctgttcatgaagaacgatctcgaggatgaggtggaacaggaagtcgaggacagcgcatcaccctcgatggacgttgacatgaggaaagatttagcagggcatgaaatgcaagacagcatatcacccgtgaaggtcattggcacgaaggatgacttccagggagcggacattaacacgaggaaagatttccaggaagacgcagcagggcatgaaatgcaagactgcatatcagccgtgaaggttattggcacgaaggatgacttccagggagctgtagggcatgaaatggcgaacagcctatcaccatccactttcgttgacacaaagaaatattccgaagggacagaacatgagatggtggatagcatatcgcctttgatggatcctaacaccgaggaaggggagatcagctgctgacgttagctacacttgtcatccacatcatttgttgagttcgtgaggcagacatccttgctgggttgttggattaggcgacatcataagcagagtgacgaagaaacgctattcccctctggttgtgtcgtagaacaatgtggagaacatgtgtcagccgaactgagtagtggttttggctttgttgcggttttttttcctgtcgtggtcttgtcagtcgggcactccgctgtatgctgggttacctgagctcgtcagctggatgacctgtataaaaacatgatgaaattagggaggggttaatttagtgctagtatatattgtaggtgtaggactgtaggagcttatggtggagccggctgcagcacacaagctatagcattgttctcagatttggtcagcgcgccgtagtaccttgttactgtattcattctaaaacttgaataaaatgatgccagtcgcac

SEQ ID NO: 31204 - DNA, 1012 bp, Zea mays
  Clone ID: UC-ZMFLB73143H07_FLI
aatattcttggcatggtggctgacacggaaagctcagattcactgcctggcagttcaaatgctgcttctgagatgcctgctaatggatcttgatcgacaaaacactggaaaggctacagtgctaggtgatgctgcgcgagtactgcgagatctaatcactcaagtggaatctctcaggcaggaacaatctgctcttgtatcggagcgccaatatgtcagttccgagaagaatgagctgcaagaggagaacagttcgctcaagtcccaaatatcggaactacaaaccgagctctgcgcaaggatgaggagcagcagcctgagccaaaccagcatcgggatgtcggatccggcaactcaccagcagatgcagatgtggagcagcattccccacttaagctccgtggccatggcggcgcgcccagcaagtgcagcgtccccgttgcacggccaggagggctactctgctgacgccggtcaagcgggctacgcgccgcagccgcaacctcgggagctgcagctctttccggggtcatcggcatcgtcttcaccggagcgtgaacgttcttcccggctcggaagcggccaggccacgcggccgagcctgacagattccttgccgggtcagctctgcctgagcctcctacagccatctcaggaagcaagcggcggcggcggcggcggcgtcatgtcgcgcagcagagaggaacggcgggacgggtagccaactgacagacaacgcacttgaatcggggtgtgtggcggcggcgattgtcctgtaaataccaagaattccgtccctttactggctcgttcatccagaactaatgctggtagctgccctgtgttgagcggcagctctgcttgttctagaagcttctgagaacatgtgtgggctatgttttccatgagattgtaagatgtgaggtggagccgctagaacacttagcgtgcgttttactgacagtgtggagtgctgctccttagttggaatagaaaaatgcaatttgatggc

SEQ ID NO: 31205 - DNA, 900 bp, Zea mays
  Clone ID: UC-ZMFLB73144A10_FLI
gttcggaagaaaccgcatcacctacacagacacgtgtaccggtcaagatctgaagaaataccacaacatggatgccatcaatgacctggtagtgtcaggggtagcgtcaaggagagccaaccacccaagtggacagaccgatgtaatcgtcttctgtagcggcgggttcgagaatccaggcactgcgaaatcagaaggagagctgctttcccagcttgtggactcgctggacttgtcgggagccaaatacacggtcctctatgcgtcccaaccgtctggtttgctggagagcccttccggcctgccgctgggtaggcatctcgcggagaagaagactaacggcacgaaagctgtccagggcgaaaaatgcgatggcgagtgcctcgtcaagtcgagtctcctcgaaggaactttcgttgggatagtgcttctcatcatcctgatatcaggactcatgtgcatgatgggcatcgatactccctcgaggtttgaagctccccaggagtcttgatctctcccttggactgcagaatccgcgggggggttgtgacgagggcacgcggcggcgttgaggggggccggtgttctgttggtgtgcactgtggatatatattgtttagcttcccatttggaagggagtacgccttgtgtattttttttaccgagccaactgtcactcacgatgtgctagaattttttggtgtaatatttgcgtttcgcgcctatggacaactaataagctgaggcattgcagcagataaattcatgtgctgcgtgaggcaggcttgtgttgtgtaccagacgcacagcattgttgcctccagctagtgctttctgtgtgaaataaacctgaaacccagtcccaggccaccgcaccaataaagatgggtactatgcatc

SEQ ID NO: 31206 - DNA, 1363 bp, Zea mays
  Clone ID: UC-ZMFLB73144A11_FLI
gagacgagagccagctctcccagcacacgagcacatggcgtccaccaccctcctcgctgtcttgctgctcgtggctgcgtccgcagcgccggcgcggtcttgctcacctcgcgacctgcaggcgctgttgagcgtgaagcaggcgctagggaacccgtcaacgctgtcgacgtggaccccagcgtcgcccgactgctgctcgtgggaccacctccggtgtaacgacgccggacgcgtgaacaacgtgttcatcgacggcgcggacgacgtgcgcgggcaaatcccgtcggcggtgggcgggctgacggagctcatgtcgctgaccctgttccggctggcggggctgacgggccccatcccggcctgcctggccgcgctgtccaacctgcagttcctgaccgtctcccacaccaacgtgtccggcgccatcccggagtccctggcgcggctgcgcggcctcgactcggtggacctctccagcaaccagctgacgggcggcatcccggcgtcgttcgccgacctgcccagcctccggtcgctggacctcgggcacaaccagctgacgggcagcatcccggcggggctggtgcaggggcagttccggtcgctggtcctgtcgtacaaccagctgacgggcccgatcccgcgcgacgacgcgcgcgacgagatcaacaccgtggacctctcccacaacaagctgacgggcgacccctcccacctgttcgccgccggccggcccatcggcaaggtggacctgtcgtggaactacctcgacttcgacctgagccagctggtgttcccgccggagatgacgtacctggacctgtcccacaacctcatccggggcaccgtgccgctgtcgctggagcggctgtccacgctgcagaagctggacctgagctacaaccgcctgtgcggcccgctccccaagggacacggcgtcatcaagcacgggtgcaagccgtacgcgcacaaccagtgccgcaaagggaccccgctcgcgggctgccaggacctggagtggagtgagtgagccggccggtatggttttctatactctgctctgctctccctcgccggcgtgcttcccgatcgtggtgtgtgtaaggaactaaggacgacggtgcctggtttaggcgtttagctatagacgaaagcacgtacggccgcgtgcctggtctagctacgcggccggttgatcttgagcagttaagcgtgtacgaaacgacagcgctgtgtacgtgtactgtctgctgaagtgtgagatgtactgtctgtgtgtatttggtatggatccgatcggcctgatgtatgaaaaggatgtttacgtactatataaagatggaaaatcgtatttgcctcc

SEQ ID NO: 31207 - DNA, 441 bp, Zea mays
  Clone ID: UC-ZMFLB73144B01_FLI
gaaggtggggaggaagggtgtcctggagttcgacactgaaatatttgagatcacggcatcctaccacctcatcgagatgaaacaaacgggcggtgattcacttgagtacaagaaactgttggaagaggacatccggccagcactgaaggacatagtctgggcctggcatggagatgaccagcaacaaaagtagtagctttggatctctcttttttgttccataaaattgttagatctttcacttcagattgattttgttcgacatgtgcgtgttcttcttactagttacattctttctgtttctgtggaccattggactgtattctgtcgtgcaataattgttgggaggcctgagtttgttagtcgttccattctgaaaactggtatctgttctgtaatggttgtccctatcaataatgaaataattgcgtttgatccttg

SEQ ID NO: 31208 - DNA, 1390 bp, Zea mays
  Clone ID: UC-ZMFLB73144B09_FLI
cttcctcatcgactccattccgattgctgagttccaagggcgcccgcttgctgatcaccctggtgtcaagaacggccgccctcccggtgctctcactgtcccccgtgaccttctggatgcatccacagtcgctgaggccgtcagtgtcatctcatgctggtacgaagacaagaccgagtggggccaccgtgttggttggatctatggctcggtgacggaggatgtggtcactgggtaccggatgcacaaccggggttggaagtcggtgtactgtgtcaccaagcgtgacgccttccgcggcaccgcgcccatcaacctgaccgaccgtctccaccaggtgctccggtgggctactggatcagtggagatcttcttctcccgcaacaacgcgctgctggcgagccgcagaatgaagttcttgcagaggatcgcgtacctgaacgtgggtatctacccgttcacgtccatcttcctgatcgtctactgcttcctgccggcgctgtcgctgttctcggggcagttcatcgtgaagacgctgaacgtgacgttcctgacgtacctgctggtgatcacgctgacgctgtgcctgctggcggtgctggagatcaagtggtcggggatcagcctggaggagtggtggcggaacgagcagttctggctgatcggcggcacgagcgcgcacctggcggccgtgctgcagggcctgctgaaggtggtggcgggcatcgagatctccttcactctgacgtccaagtcgggcggcgacgacgtggacgacgagttcgcggacctgtacatcgtcaagtggacgtcgctgatgatcccgcccatcgtgatcatgatggtgaacctgatcggcatcgcggtcgggttcagccgcaccatctacagcgagatcccgcagtggagcaagctgctgggcggcgtcttcttcagcttctgggtgctggcgcacctgtacccgttcgccaagggcctgatggggcggaggggccgcacgccgaccatcgtcttcgtctgggcgggcctcctctccatcaccatctcgctgctgtgggtggccatcaacccgccgtcccagaaccagcagattggtgggtcgttcacattcccctgaaagctctctgggccaatggcggattcatgcatgcttcgtcgcagtgggatccttgcgttgctctgcatcagttcctggttgcagcggttcactatctgaggacgaagctgctggggggaatgtgggatcctgactgtcgaactggctacttttttgttgtcgaagctgataatactcttatgatgagctatagtagtagttcttttgttcttttgtttttgctatatataaaatacatgttctggtcccataatttggttatgttggacaatt

SEQ ID NO: 31209 - DNA, 1738 bp, Zea mays
  Clone ID: UC-ZMFLB73144C05_FLI
tcgactcgtccgcgccggtgccggccgccgtccccgtcctgtgcgacggcgagctcgtcggcgtgggctcccgcccctatgcgcaccagctgcgcactcccccctgctcgacccctcagttcctggtggtcgccctcgggcccctccgctggtgtggctgctgggattgctgctacggacgctggtgctgtagctgctcccaaggaagaagagaaggccgagtacctcaaggaccgagcaagtttgctgttgctgctcctgcagctgagaaagggggaagaggaggaagcctctactgctgcggtgagcgtggagttggggagagtgaggtggtgctgctcctgcagctgagaaagggggaagaggaggaagtccctactgctgccctcgtagctgttgtggcctgtgtagctgtggaggccggtaggagctggtatggggttctgaagcgagttctgaactgtcctgtctgcttgaagccggagctactgctctgcttgttgtggtgaaggagtagatgtgcgagctcatggaggagctgctggagcatagcctggaggcgtctgctaatcccatgaaggtggtggagtacgtgcagaaggagtcgccgctgatcgccgtggtgctgaaggcacacatgcactgcgaggcctgcgccgaggggatcaggaagaggatcctcaatatgaaaggcgtccagtccgtagaaccagacctcaaggcatcggaggtggctgtcatgtccaaaaaggtccggagagtggaggcggtggtggcggaactggagtgtaggaactctgagctgtttggcgagaagggtgaactggaggagaaattggtggctgccaaggaggtgttggcgaggctgacggcgatgacgagggaacaggaggctagggtgtttgctagaaggagagagtctgatttggtgaaggagaaagaggctgttgctaaggctcttgatgctgagaaggctgaagtagcaaggttgaggttgaaaattgaggagctagagaaatgtagcggtgagaaggatggtgacatcaggaagatgaaaccagcctactttgccaactatgcccacatgggtgaaggtactcaggaacaagctcttacatactcatgtaggcatcaaaaggagtgggtcatagattcaggagcatctaagcatgtcatgggcatatccagctctttcaaagcttacatcccacatacacattatgagtttgttcaaattgctgatggctcatcccaacgaatccatggtgtagggtccatagagtgtacaccatctcttagctcatcctcagtcctacatgtcccatcttttccggtcaatctcatttctgtaagttcaatcattgatcagttcaagtgtacagtaacgtttgatgaaaacacttgtgtctttcaagagaaggggactgggagaaggattgggactggagtcagacgtgatggtttgtggttcatcggtcatgaagaatcagcattgagagcagttgctgaaagggatgtgaaggaaattctgctacttcattgtcggttaggacatatatcttttgagaccttaagacggctgcaccctgctatgtttaagggagtggacaaaagtaggcttgtatgtgatgcatgtgagcttggcaagcatactagatccatctatcccagtattggtcttcgcagttgtgaaccatttactatgatacactcagatgtttggggtccttgctctgtt

SEQ ID NO: 31210 - DNA, 411 bp, Zea mays
  Clone ID: UC-ZMFLB73144E02_FLI
cacttggcctctcaaccaacggggcgcgcacacgcacactgccaacgaggcaccaagaaggcaggaagggatggagtactgctaccagtacaacagcgtcagcaacgcggagaaggagaagaggccgccgctgaggaggggcggcgtcaagctccagatcgtgaagaccctcagcaacctcgtcgtggcgcccagcaacggcagcgactccaagcaagcggaccgcaacagcttcacaagggagcgaagctacaactgaaacgaactgtatcttcagtatttggatacagatgtcgaccttgtgtctgaagaactccgctttgggactcgagaggttttcttagcttgttggacttccttgtttgcttggtccactagtgatgaaatggaactgtatgataagttcgttct

SEQ ID NO: 31211 - DNA, 288 bp, Zea mays
  Clone ID: UC-ZMFLB73144E07_FLI
ggggtagatgggttggttgcccgaccgacatgctgtgctctctgttccagctgagcaacctgcctctgcctgatgaaccaaccatccgagtgtgcagcagccatctccagtggaaataaactattgtaattgtactgctagcagtagtgatcaaaataatgcgcagagtaattagtactgcaagcaaatcggggaatcattgtgaatacataaatctgtggatctcattactatactgttatcttaatcattagctggtgtacctgctacctactgcagctgtttggt

SEQ ID NO: 31212 - DNA, 1757 bp, Zea mays
  Clone ID: UC-ZMFLB73144G02_FLI
cgagacaccgagcacgtactaccagcaagatggtggcgtctcccagattcaagcccatcgaggagtgctgctcggaggggcggtcggagcagacggtggccgccgacctggacggcacgctgctcatctccaggagcgcgttcccctactacctcctcgtggctctcgaggccggcagcgtcctccgcgccgcgctgctgctcctgtccgtgccgttcgtctacgtcacctacgccttcttctccgagtcgctggccatcagcacgctggtgtacatctccgtggcggggctcaaggtgcgcagcatcgagatggtggcgcgctccgtgctccccaggttctacgcgggcgacgtgcacccggagagctggagggtgttcagctccttcggcaggcgctacgtcgtcacggccagccccagggtcatggtcgagcccttcgccagggccttcctcggcgccgacaaggtcgtcgggaccgagctggaggtcggcagggacggcaaggccacgggcttcatggccaggccaggcgtgctcgtcggcgaccacaagaagaaggccgtcgtcaaggagctcggcgacgcgctgcccgacgtcggcatgggggatagggagaccgacttcgacttcatgtccatctgcaaggaggcctacctggtgacgtcaaggaagtacagcccggtgcccaggaaccagctgctgagcccgctgatcgtgcacgacggccgcctcgtgcagcgcccgacgccgctcgtcgcgctcgtcaccttcctctggatgccgttcggcttcgcgctggcgctcatgcgcgtgtacatcaacctgccgctgcccgagcgcatcgtctactacacctacaagctcatgggcatcaggctcgtcgtcaagggcaccccgccgccgccgcccaagaagggccacccgggcgtcctcttcgtctgcaaccaccgcaccgtgctcgaccccgtcgaggtggccgtggcgctgcgccgcaaggtcagctgcgtcacctacagcatctccaagttctccgagctcatctcgcccatcaaggccgtcgcgctgtcgcgggagcgcgacaaggacgccgagaacatccgccgcctgctggaggagggcgacctggtcatctgccccgagggcaccacctgccgcgagcccttcctgctgcgcttcagcgcgctcttcgccgagctcaccgaccgcatcgtgcccgtggccatcaacaccaaggagaccatgttccacggctccaccgtgcgcggcttcaagctcatggatccctacttcttcttcatgaacccgcgcccgacgtacgagatcacgttcctcacccagctccccaaagacctcacgtgcagcggcggcaagtcgcccatcgaggtggccaactatatccagaagacgctcagcggacagcttggcttcgagtgcacgtccatcacgcgcaaggagaagtacggcatgctcgctggcaccgacggccgtgtcccgtccaagaacaaggagaaggagaaggagaaggataagaactaacggccaacgtcgctctcttgctgctgcccagcagactgccgtttaattactgctcaaatttattccaatttattgttccttgtcgacaagttggccagtgtgatgtgggccgtgtactagtacaagcttgatgatgattagtatatctacaattcttcctttccggaagaagggcggaagagttgttagagccgtcttaatacaaagtttcgtcacatt

SEQ ID NO: 31213 - DNA, 886 bp, Zea mays
  Clone ID: UC-ZMFLB73144G03_FLI
cagcagccttggttttctcaacatcagctcttcaagcctctcaacactttggatgtcaggtctttgttcccttaccaaggcggtcatgaactgcccaaatctgaccgagctatcactggacttccccaaacagaataacgattccaccgacctggctgctctaattgatagtctgggccgcacgtgcccaaacttgagaaacatgcacgtctcgtcgatccgcttatgcaacgaagccgtgtttgctctagaaagcgccaatctcaggggcctatgcatgctgtctttggttctaggttcaaaaataacagatgcagctgttgcatctattgttcgttcatactcaagcttggagctgcttgatttaagtggatctggcattaccgacaacgggcttgggatgatcagcaaagcattccctgacaccctaacacgcctgctcctggctctgtgccccaacatcacgtcgtctggtgtccaggtggctgcagcacagttgccgctcctccgtctcatggactgcggcaacagcatatgcgccaacccccagcctgaagctgggagatcctacttcggcgacctgaccggcgggatcaagttctgctctaagttacctgtccagaagaagcagcagcagcagcaggctgcctgccagaagctgatcataaagcacggcgccctgaagaagctcagcctgtggggctgttcagcgatcgacgccttgtacgtgaactgcccggagctggtcgatctgaacctcaacgcgtgcacgaaccttcatccagagcggctgctgatccagtgccccaagctgaaggacgtgcacgtcagcgggtgccgcgacatgctgatcggcgccgtcaggaaccaggtcctgaacgagttc

SEQ ID NO: 31214 - DNA, 309 bp, Zea mays
  Clone ID: UC-ZMFLB73144G11_FLI
ggaacgctaccgaagctcctcaggaccctgtcgacgattgatgcttccaagccaagccatgccatgtcactggagaatgagatgttcttcttcactgcttttataatgggttgatgtacaaaatacgatatggaagtggtgcctggaactagttcgcggagggttccaactcttgcacactgcgcccccaaaaactagagttgaagatgtaaaacgccgtcgtccgccgagggacgacgagagattgtacgtgatacatcgatcgagtctcgtgaacctaaaaagctgccgctacattattgttcgctc

SEQ ID NO: 31215 - DNA, 859 bp, Zea mays
  Clone ID: UC-ZMFLB73145A06_FLI
gtgccgtggtggtatctagccgccaacaagatgatgagcccgttcctcacacagcgcaccaagagcaagttcgtctttgctagcccagccaaatcagcagcgactctattcagatacatcgcaccggaacaagttcctgtccaatttggaggcctcttcaaggaggatgatcctgagttcaccacctctgacactgtctccgagctcactatcaaaccatcctcaaaagaaaccgttgagatccctgtcaccgagaactccacaattgtatgggaactccgggtgctgagttgggaagtgagctatggcgccgagttcacccccgacgcggagggtgggtacaccgtcattgtacagaagacaaggaaggtgcctgctaacgaggaaccgatcatgaagggaagcttcaaggcaggcgagcctggcaaacttgtgctaactgtgaacaaccctgcatccaagaagaagacgctcctttacagatcgaaggtgaagagcaccagcgagtgagtgtgaggtcacgccgctagctgcctgggccctacagttaaaacgatctacagcatgatagaagagagaaggaaccttttggtttggttcgttaatttactgggtttttttttgggttcgcattctacattttgtttggttgaaaccaaagtgagcttgtttttgtgacagtagatgggagaagtataatggcattgtgtgatggatggttgttgatgagggcagggaggacgaaaatgtgggggaatgaaaggttggagaatgtctgttcctctgtagatgtgttctgtacattgcatctcttggattctcattgatatgttaaaatttaggagtacttggtcacatc

SEQ ID NO: 31216 - DNA, 1493 bp, Zea mays
  Clone ID: UC-ZMFLB73145B12_FLI
cgagcagccgaacacgcccgccgccattctacgccctgctgcccaggtcggacggaccctttgccggagacgagcacacgccacagcaggaattatcgggcgtagagcagcgcgaagcgagagatccaatggcggcggcggaggggcagtgggtgctcatggcaacggggcggacgccgactaacattgcggtgatcaagtactgggggaagcgggacgaggcgctcatcctccccatcaacgacagcatcagcgtaacgctcgaccctgaccatctctccgccaccaccactgtcgccgtcagcccctcattcccttccgaccgcatgtggctcaatggcaaggagatctcgctattaggaggaaggtttcagagctgcctcagagaaatcagaaagcgtgctcgtgactttgaggacaaggagaagggcgtcaagatcaagaaagaggactgggacaagttgcatgttcacatagcctcgtacaacaacttccccactgctgctggtttggcctcttcggctgctggccttgcctgtttcgttttcacccttggaaagctgatgaatgtgaaagaagattatggagaactttcttcaatagcaaggcagggatctgggagtgcatgccgcagtatatatggtggttttgtgaaatggtgcatgggagaaaaagatgatggaagtgacagtattgccgtgcagcttgctgacgaaacacactggaatgatcttgtaattattattgcagtggtcagttcaaagcagaaggaaaccagtagcaccagtgggatgcgagatagtgttgaaacaagtcctctcttgcagtacagggcccagacagtggtgccaggtcgggtgttgaaaatggaagaagctatcaagaaccgtgactttgaatcatttgccaaattaacttgtgcagatagcaaccagtttcatgctgtatgcttagacacgagccctcccatcttctatatgaatgacacgtcacaccggataattagccttgtggaaaaatggaaccactcagaaggaaccccacaggtcgcttacaccttcgatgctgggccaaacgctgttctaatcgcccaaaaccgtaaaactgcagcacatttcctccagaagctcctatactatttccctccacaggataatgatttgagcagctatctggttggcgataaatcaattctaggtgacgccggattgcattccatgaaagacgtcgaggctcttccagcacctccagatacgaagataccggatcagaaattcaagggcgatgttagctacttcatctgcagcaggcttggggcaggtccaaaggttgttgttgacgaaggtcaagcactgatcgattcagtcaccggacttccaaaaggcgtgtagttctagatttaggttggaataatggtttaagctggggattaaagacaatggtatcatacaagcaacctgggccggccaataaagatagaacacgttctcgcc

SEQ ID NO: 31217 - DNA, 1936 bp, Zea mays
  Clone ID: UC-ZMFLB73145E09_FLI
ctagcctctgctcctctgaaatggcggcggcgacttcctcttccacctacctcgccatcggccgcaaaaccctaaaccccgccccctccgtagccacagccgccacctccgtctccttccccgccacgcagcacccatgcctcgtcgccgcctccgcggaccgccgccgcgccgtggctgcgaaggtctcgtcgccgtcggtcatcggcaccgccatgccgtcgctcgacttcgagacctccgtcttcaagaaggaaaaggtgtccctggccggccatgaggagtatattgtgaggggtgggagggatctgttcccgctgttaccggaggccttcaagggaatcaaacagatcggtgtaatcggctggggctcgcagggtcctgcgcaagctcagaacttgagagactcacttgttgaggcaaagtcagatattgttgttaagattggtctccggaaaggttctaaatcttttgaagaagcccgagcagcaggattcaccgaagagagtgggacgctgggtgatatatgggagactgtatcaaacagtgatcttgttttgctactgatatctgattctgctcaggctgataactacgagaaaattttctcgcacatgaaaccaaacagtattcttggtttgtcacatggatttctccttggacatttgcaatctctgggttttgatttccctaaaagcatcagtgtgattgctgtatgccccaagggaatgggcccatcagtcagaagactttatgttcagggcaaagagatcaatggtgctggtatcaatgctagctttgctgttcaccaggatgttgatggaagggcaacagatgtagctctagggtggtcagtagctttaggttctcctttcacatttgctactactctagagcaggagtaccggagtgacatttttggcgagcgaggtattttgcttggtgctgtccatggcatggtggaggctcttttcaggagatacacagaacaaggaatggacgaggactcagcatataagaatactgtagagagcatcactggaattatatcgaaaactatttcaaagaagggtatgcttgaagtgtataactccttgactgaagaaggaaagaagcagtttattgaggcctatagtgcagcatattacccatgcatggacatattgtatgagtgctatgaagacgtctcttctggaagtgagattagaagtgtggtgttggctgggaggagattttatgagaaggaagggctccctgctttccctatgggaaaaattgatcaaacacgtatgtggaaggtgggtgaaagggtccgttcaaccaggccacaaggtgatcttggcccactgcatcccttcactgctggagtgtatgttgcactaatgatggctcagattgaggtccttaggaagaagggccactcttactcagagataattaatgagagcctgatcgagtccgtggactcgttgaacccgttcatgcatgctcgcggtgtggccttcatggtcgataactgctccacaactgctcgtttgggatctaggaagtgggcaccacgcttcgattacatcttgacccaacaggcgtttgtgactgttgacaagaaagcaccgatcaaccaagacctcatcagcaacttcatgtctgaccctgtccacggtgccatcgaagtctgcgctcagctgaggcccactgttgacatctcagtgaccgctgatgctgatttcgtgcgtccagagcttcgacagtcttcataagcttgtatggatccgcagtgtgactgcaatggctagtttgtaagaacttaatatgcctgggcttttgaactcttagattgtgcctgtattgctcgtgcttgaggaccagaaaagtaaactcttggcggtgtggtactgttgtgatttgcaagaataaaaataaatttctgttgatc

SEQ ID NO: 31218 - DNA, 992 bp, Zea mays
  Clone ID: UC-ZMFLB73145E12_FLI
cgccccggctgcacatgcatcgtgtgcatccagccacccagtggcaagggcccgaagcacaaccctgcgtgcacctgcaacgtgtgcatgacggtgaggcgccggttcaagacactgatgatgaggaagaagcagcggcagtcggagcgagaggaggcggaggcaagcaagaagatcgcgtgggtgaacagagacgagcccgaggggagcagcctgtcgagatccccgcagacgctggacacgacccgagacagcagcgatgtcaccatgttcgacaaggtggccgccgacgtgaacaaggggcacatcgacctcaacttccaccctgcagcccctgccgtccgtggcgctggcgaccagggacagaatggcgcgcagcagccccgggcggtgagcatgatgggcctcctggaagtggcgagccggccccttgataactacatgaagcagaacggcctgacgagcctggcgggggagcaaggaggtggcagctccagcacggccacggtcccgccggctccagtggagagtgaggaccggacgtccgatgagggccgtgtcgcgtcagcagagcgggaagcagacgccatggccatcgacgaggccggcgagaaccagcaggacaagcctgccgactctgccgctgccgctgctacttgacggcgtgcgtctgttgtgaaagtgactgatgggtgttgtcagcgtgctttgatgtgcgtatcttatcggctcctcttggtttttttttcttttctttcaggaatagctggtgagtttttgatgtgaaagttctaaactaaatttctgtagggtttcaaggtgttgctcctggaggctggagttacttacgtgtacgtatgaggctgtgcaaccaacccccaggttgtatgttgtagaagttctgtaaaccacgatgctcttgtgttggttgctgctgtaatctaaaaacgcttagacctttggattcaataactcaccacatacttgatctg

SEQ ID NO: 31219 - DNA, 1384 bp, Zea mays
  Clone ID: UC-ZMFLB73145F02_FLI
agaaagcaaacatagaagctgaaatgaagaagattgaggaacaactggaaaagaagaaagctgaatatgctgagaagatgaaaaacaaggttgcaatgatccacagggaagccgaagagaagcgagcgatggtggaggcaaagcgcggcgaggaggtcctgaaggccgaggagatggctgccaagtatcgggccaccggccacgcccctaagaagcccattgggtgcttcggagcctaagaaatgttccaagtcacaccgagcagaaagtgagaaacctcaaccagtgattgcttggtcacctcacacccaaacagaaagacattatttataagttggaagcacatgatcggttcaaaagaaatgcagtagggagtgcactgtacattcatccatgtctttcagaactttcagaggttaatgctgagcatagggctaacacctttagagatgatttagttgatagtctggtagattctatcactgtgagagatggcgtgaaggccaattttttcatgaatatcctgtcacttgctaattctgcaggagagaaagtgctagctttcagtcaatatatatctcccatgattttctttgaaaggctgctggtgaagaagaaaggctggcatgtggggaaagagatctttatgatctctggtgatactagccaagaagacagagaattggcaacggaccattttaacaactctgctgacgcaaaaattatgtttggttctatcaaggcatgtggggagggtatctccctcgttggtgcgtcgagagttgtcattctggacgtacacctgaacccatctgtcacccgtcaagcgattgggcgtgcattcaggcccggacagcagaagaaggtgtttgtgtacaggcttgtagctgccgattctgacgaggtaaaggtccatgagacagcattcaagaaagaagtcataccgaagctgtggttcgaatggagcgagcactgtactacggaagacttcaaacttggtcaaattgatattgatgactctggtgacgaactgttggatactaaagcaatccgcaaggatatcaaagcgctgtatagaaggtaggtaacaagctttgtggccactggacaccatgtacatattgcagtgctgaccgtcgagctgatccttaaactgaagaaagaggtgacgggtgttgcggtggctacattgcgcggtcattcccagctatatccgtggaatggcggcttcttttgttcgtagtatgtgccaacttggggcagcagtcagctgatccccagacacatttctagactcttttttaggctcaagtttctgagaattaacctgctatggcgtttagccttaagtaaatatttcgttcgcaacaataataaccccgtt

SEQ ID NO: 31220 - DNA, 855 bp, Zea mays
  Clone ID: UC-ZMFLB73145F04_FLI
catagcagcgggcagcggcatgggcaccagccccgtcatccctgcgacgatgctcttcgtcgctcttcttgtcgctgtctgcttcggcgccaccgccgccaggtccagccacgcccgccacaccgacgccgacgacgcgattcgtctccccagcagctttggcgctggtggtcgaccgtggaattgctgcgactccgctatcaaggacgcctccctgccggcgtggcgctgcaacgacgtggtggacaagtgctccgccgactgccaggactgcgaggcgtcgccggccggcgacggcttcgtctgcggtgactttatcttaagcctgaccgagcccccggtctgcacaccgaggccgtgggactgctgcgacagcgtggcctgcacaagggactacatccccaactgcatgtgcctggacaaggtggagtcgtgctcgagcaactgcgaacggtgcgagtttctgtatcattcggaccctcctcgcttccaatgccgagacatcttccacggctatcctggtcccaagtgcaggacatggatcagtacgagcaactagctcagctcagctacttgctaaaagtagcgtagcgcagcgcgcgcggctacttgctagtatacgtacgtccacaaataaaaataaaagtggctagcgtacaaagctaacatctggttgttcgtcccgacatggacgattagcctagctcgatcgctagctgctgccactctcgttcgatttaatttcatccccatgtgtggcggtgtagggagtgtggatatgatcatccaataaagtagtctactgaaaatgaatagtcgttgatcatattaatatacatccatctcattttgttc

SEQ ID NO: 31221 - DNA, 1481 bp, Zea mays
  Clone ID: UC-ZMFLB73145G01_FLI
cgagctgctgccatggcaggcgccggtgcgcccgcagttccccaggccggtcgcccagcccccaacttcgacgtcatcgtggtgggcgccggcatcatgggcagctgcacggcgcacgcggcggcgtctcgcggcgcccgcgtcctgctgctggagcgcttcgacctgctccacccgctgggctcctcgcacggcgactcccgcatcatccgggacgcctacgcgcagccgcggtacctccgcatggtgcgcctcgcccgctgcctctgggccgccgccgaggcggaggccggctaccgcgtgctcaccccgacgccgcacctctccatgggcccgcggagcagcgcctcgctcgccgccgccatcgctaacatcggtgccgaggaggtggacgtggacgaccttcaccgcaggtggggcggcgccttcgccctcaccgtcccgggcccggtggacgcgtgggtcaccgcgctcagcgaccacggcggcgtgctcagcgccaccaaggccgtggccatgttccagtcgctcgccgtcgcgaaaggcgccgtggtcagggacaacaccgaggtcgtcggcatcgacagggcgcccgagcccgacggcggcggcgtcgtggtgagggccgccggcggcgaggcgttccgcggcgccaggtgcgtcgtcacggtgggcgcgtgggcggccaagctgctcggctcctggggcgtggacctccccatcaggccgctgcacacgctacacctctactggcgcgtgaagcccggccaggagcagactgtctcggcgagcgccgggttcccgaccttctccagctacggcgacccgcccgtgtacggcgcgccgtcgctggagctcccggggctcatcaagatcagctgcgacggcggcccgccgtgcgacccggacgcccgcgactggctcgcgggcgacgcggaggtcacgcaccgggtggccaggtggatccaggaggccatgccggaccacgtggacgccgcgggagggccggtcgtccggcagtcgtgcatctgctccatgacccccgacgccgacttcgtcatggacttcctgggcggcggccgggacgtggtggtcggggccggcttctcgggccacggcttcaagatgggccccgccgtggggaagatcctggcggagatggccattgatggcggctccgagacggcggcggaggccggcctggacctcggcttcttccggatcgggcgcttcgatggcaaccccatgggaaatgccaagtagtgagctatgctgctgctgccatgcatgtagtactaaatatggatcgatggtggtcaataatgaaagtaataaaacattcatattctagcatcataggctgagaatactttcttgatgtatggcacctgagaaactatcctctttcagattttgtatggtcagtcactctaataaacgatttgctgtattttaacccccaaaaataataaacaaaaatg

SEQ ID NO: 31222 - DNA, 1410 bp, Zea mays
  Clone ID: UC-ZMFLB73145G09_FLI
cgggcgccttttgctccccgatctcagttcccgcccatctctaagctcccaaggcgacgctgcggcggcggggcaagcgggaggacaagaagcggacttgtctccctgcccccaccccctccctcgcttcgcgcgtacccccttcagttcagccgggcggtaccgtcgacggcgccggcattgtacttctgctgcgcagctatcactgctctgagaaaatggttgcatcagcctttactgttgatttggacaagcctctagtattccaggttggccatctagaggagcagtatcaggagtgggttcaccagccgattgtttgcaaggaagggccacgattttttgaaaatgatatattggagttcttaacacgcacgaaatggtgggcagttcctcttatctggttgcctattgtatgttggtgcctgagtacttctatcaagatgggcaatactatcacagatgtagctatgatgattgggtttggaatatttctgtggacactgatcgaatatgtgttacaccgattcttgttccacataaaaaccaaaagttactggggaaacacagcacattatcttcttcatggatgtcatcacaagcatccgatggatggacttcgacttgtctttccaccagctgccgcagctattttgtgctttccgttctggaacatgatcaagctattttcgaccccgtctacaactcctggtctgtttggaggcggcctgttgggctacgtgatctatgattgcacacactactacctgcatcatggccagccatcatcagatcctgcaaagtatctcaagaagtaccatctcaaccatcacttcagaattcaaacaaagggctttggaataacttcgaccctgtgggatcacgtatttggcacgctgccttctacgaaaactgtcgacaagagcatttgattttgactggatcttctgctttgcgaagctcttatagtgatgttaggctttgctcgcattgcctgtgtccactttttgaggccagcttccctgttccatcatgtagatttggctttggcagtgtctctatttttttttatctctagcagaggactttaaaatcatcaattacagattggtcatcatcggtggaggttctgttggacaaatttctatccagtttctgattcttctccatggaccaactgtatgaaggcgatcaccagttgctggctcacagacgcgactgaagcgatcaccagtttggtttcaagtcaatgccatcagcggtcgtgttcacattatgtctagctagtgccagctgttagatcagcatgtaatgtatgtacagtgttttcttctctagtagcgtagcctctctgcaagggctgtttggtagcctgtgtctgcttaattttgctacaagtaattgcttgac

SEQ ID NO: 31223 - DNA, 1243 bp, Zea mays
  Clone ID: UC-ZMFLB73145G12_FLI
gacgaatcccagatttggtggaattcgttaggggtggaatcggctccagcacttgttttcttgaaggggccaggcacaacgccttttgtacaccatggattttttagcaagtcagagttcatagagatgatggaggagcacaagcaccatgaactgcgacagctaagaagtgacacatctttggaactgggttgtgatgctagaggtcattcacgtgctggcaatgatgcagcaatttggtattgtgtaattgttgctggtcgtccaggtgcagaattaagcaagaagagacaaattttgcggaaggctcaagacaaattgttaggtgatgttgacagaagtgctgggaacgttgacaattcagtagagacatcaagtgctgcaactgccttcaaagatgataggttaacctttgtttggttagatggagaagtacaaaagcaaatttgtgccttctaccttgccactgattatactggagcctgtggccctcgagactttggagatgacaatgataaacctgaaatttttattgttcgattccaaagaaatgcaacatatgaggcactgaaagctgaaaaaaagaacaatcttgtggatgttctccagggacagcatgctgatgcgtcccagttagtggcaaggtacaagggcccagttgaaattgaagagataaataggtggatctctcagattatcaaagatggagatactagagaaattccttactttacttcaaaggtgccagatcttgtaccagaggaaacaagcaaagcatggaattctaaaagtatccgctcagcagggaaaagtctaaaagagaacatcggtttccatttccaagattacctaacccacccaatgattggttcaactttgcttatgtgcggatgtatttctatgggaatattatggttcaggaacaacacacccactcaaagtactcgacaggagaaagctcggaaagacaaggcaaagaggccccgtccgaagcttagcacgtcgctcttcggtgaaccttctgtcccagacgtcgacccaaaagatgctcatcagtgggaaatgtcaggctcggattcagactaatgactcgcttcttacatttggacctgacgtactgcaaagacgttttaaaattaagtaaactacatagtagtgcggtggccttagttttgggaaatggaacagagtataaccgatatagtgaaaacagttggaccactgaagtaatccagttgccatc

SEQ ID NO: 31224 - DNA, 362 bp, Zea mays
  Clone ID: UC-ZMFLB73145H05_FLI
aagcgaattgagcattggccaaggccaactgaaggatgccgggtgggaaaagaaagaaccccaatcttttgccgtatatatatattatcagacaggttgtaggatagcagcaacagcagtagggcgggcgagggaccccgttggccccgcgcgatttgagttgttttcgccggataccgtaaccttagctggagtctgtcgtcgtcttggtgtcgtgcctgcctgcctagtgttgatgaggcgtcttggtagcgtcccttggaacgccctctcggagccggaggtgcttcttttgcttcttttgtctatatagataattatatgtgcatgggaacctgcgtagtactgcagttattattatt

SEQ ID NO: 31225 - DNA, 1230 bp, Zea mays
  Clone ID: UC-ZMFLB73145H07_FLI
ggggaacaactaaggtggctatcaagcgtggcaaccccttgtctgagcagggtgtgcatgagttccagactgagattgaaatgctgtccaagctccgccaccgccatctggtgtcactgattgggtactgcgaggagaagaatgaaatgatcctggtctacgattacatggcccatggtactctccgtgagcacctgtacaagacccagaagccacctcttacctggaggcagcgtttggatatctgtattggtgcagctcgtgggcttcactaccttcacactggtgcaaagcacaccatcatccaccgtgatgtgaagacaacaaacatcctgctggatgagaaatgggttgccaaggtttcagattttggtctgtccaagactggcccatctatggaccatactcatgtgagcacagttgtcaaaggcagttttggttaccttgatcccgaatacttccgcaggcagcagctcacagagaaatccgatgtctactcatttggtgttgtgctgtttgaggtcctctgcgcacggcctgccttgaaccctactcttccaaaagaagaagtcagcttggcggagtgggcgttgcactgccagaagaagggcatccttgaccagattgtcgacccctacctgaagggaaagatagccccacagtgcttcaagaagttcgccgagacagccgagaagtgtgtttctgatcagggaatcgaccgcccttcgatgggtgatgtgctctggaacctggagttcgcccttcagatgcaggaaggcgcagaagagagcggaagccttggctgcgggatgtcagacgagggcgccccattgatggtcgggaagaaggacccgaacgacccatcgatcgagtcaagcaccaccaccacaaccaccacttctataagcatgggcgaccaaagcgtcgcgagtatagactcggatgggctgacgcctagcgccgtcttctcgcagatcatgaaccccaaggggcggtgaggtaaagctggccccattcgttaccttgcaggcgtaatttattcattcagaataaatttttttcttcaatgttctctcaagttaaggcttaagaaccagaagtgtgaggattgtttcgtactagatattctgccttgccttgtactacttccttctccgagtattgtaatgactatacaatctgttggcttgtattgtaccgctgctattgacccagccagtattttactgc

SEQ ID NO: 31226 - DNA, 1553 bp, Zea mays
  Clone ID: UC-ZMFLB73145H08_FLI
aatttcccctcattcatctcacagtcccaggcctccctccctcctccccgtcgccaaccaacctccaacccccagccgatcgcgtcggagatgctgggcgtcgcgcggaggcggctcggatccggatgcgtgctcgcccagctggcgcaggccctccgccccgccgccgctcccgccaggacctactccgccgcggccaaggagataactgtacgggaagcattgaataccgcattagatgaagaaatgtcggcagacccttctgttttcttgatgggagaagaggttggcgagtaccaaggtgcatacaagatatccaagggtttgcttgacaagtatggccccgatagggttctcgatactccgatcactgaggcgggcttcactggcattggtgttggtgccgcttaccatggtcttcgacctattgtagagttcatgacatttaacttttcgatgcaggcaattgatcacataattaattcagctgccaagtcgaactacatgtctgctgggcagatatctgttcctattgtctttaggggtccaaatggtgctgctgctggagttggtgcccaacactcacagtgctatgcagcttggtatgcacatgttcccggattgaaagttctagctccatattctgcagaagatgctcgaggtttgctgaaagcagcaatcagggatccagatcctgttgtgttccttgaaaatgaacttctttatggtgaatcatttcctgtatctgctgaggtacttgattctagcttctgccttccgattggaaaggctaagatagagcgacaagggaaagatgtcactatcactgcattctccaaaatggtgggatatgcccttcaggccgctgatatactggccaaggaaggtatcagtgccgaggtaatcaatcttcgctcaattagaccgctggatagagctactattaatgcatctgtgaggaaaaccaatagattggtaaccgtagaagaaggcttccctcaacatgggattggtgcggaaatatgcatgtctgttgtagaggacagctttgagtatcttgatgcaccagtcgagaggattgctggagctgatgtgcccatgccgtacgctgccaaccttgagaggatggctgttccacaggtcgatgacatcgtccgggcagccaagcgtgcttgctacagggcagcagtaccgatggcagcaaccgcctagtccagcagaaccctgcatgttgcatttctttgtctaattttaatgtccgtgctgcagaaagacgtgtcacataatggtgtgacgagtacccactgccgctgcaactcaactatagcatgagctgagtttttgtagagccaccgagaggtgttcagtactccagttccagttccgcttatcttcgccgccgcagccggaaggctgcgcatgactctgcgtctgttttatggttcacgaatgattgcagatttgcagcagagcctctggagatgagaattttacttgtggcgagatgttgtgagtaacttgtattcagaagggggaactctcaagagatcctc

SEQ ID NO: 31227 - DNA, 731 bp, Zea mays
  Clone ID: UC-ZMFLB73146A11_FLI
caaaggccagacaagctaaagaagaccaagtacgggatgaggcatggccaggtatctctttccgctgcaatgacgcaggtgaaggtggcggcatctctgggggcgacactcgtctggctatccggcggcacggctctcgtccagtccctgatccaggagatgctgccgtcttggttcctgtccgcgcagaacctggatcagggcggggctagcggaggcgtggtgtacaagctaggcgggcacgcgttggcctacttcgcggtgtactcggggatgttggcctggggcatcgaccagacgcccgtgtcccggcgccgcgagagggtcatgcggtcgcacctggggttcctggcgagcgcgctggccgggaagatcttcctcggctgcgacctctccctgtggcgagcctacgtctctgggttcctaggactggtggttgaatgcaccccgtgctgggtgcaggaggtggacctgagggtgctcaagcgcctgagcagcggcctccggcactggggcgaggatgagctcgcggtggcgctcctccgccgcgccggtcccgaggctatgggcacagccgcggagatgatcttgggcagggagttgtgacgccgatgcgcgcgcgcgccgcgcggcgtatgctgttcgtcagcgatgatgcagtttttgtatataatcggttaaaatctggccatgtgtatgctcacgggtaatatttgaatgattttatctgt

SEQ ID NO: 31228 - DNA, 1177 bp, Zea mays
  Clone ID: UC-ZMFLB73146B03_FLI
ctagatcatatcgatcgccatatatatagtagggagcggctcgcagggcaagaacgaagcagatggcggtgatgagccgccgccgcgtcatccagctcgtcctcgttggcgtcgtcgtcttcctggtggccccgcggctgtcgtggaaccttccgggcggcctcgagaagctggggctgcagcagagcccggcggcggtggcggtggcctgctgggcggctgcggtggcggcgtgggcgtacgcggtgtcccggccccggcccgtgtacctggtggacctgtccgggtacgtggcgggcgcgtcgcacgaggcgtcccgcgccaagacgatcgcccacttcgggcggtgcgggcggttcagcgacgagagcatggcgttccagaagcggatgctggagcggtcggggctcggggagcagacccacttcccggcgtcgctgatcagcgtgcccgtggacatgtgcctccgcacggcgcgggaggagtcccacgccgtcatcttcggcgtcgtggacgacctcctccgcagggcgcgcgtggcgggcggcgacgtcggcgtgctcatcttcaactccagcctgctcagccccacgccgtccttcacgtcgctcatcgccaaccgctacgggatgcggcgcgacgtcgtcagccacaacctcagcggaatgggatgcagcgccggcatcatcgccatcgacctcgccaagcgcctgctacaggtgcactcggacacgtacgcgctggtggtgagcacggagaacatcactctcaacgcctacatgggcaacaaccgccccatgctggtcaccaacacgctcttccgcgtcggcggcgcggccatcctgctgtccaaccgccgcgccgaccgccgccgcgccaagtaccagctcatccacacggtgcgcacgcaccgcggcgcgcacgaccagagcttcggctgcgtcacgcaggaggaggacgacgcggggtgcgtcggcgtctccctggccaaggagctcatggtggtcgccggcgaggccctgcgcaccaacatcaccacgctgggcccgctcgtcctgcccatgtccgagcagctccgcttcctggccaccgtcgtcctcaaccgcgtcttccgcgccagagtgcgcgcctacctgccggacttcaagctcgccttcgaccacttctgcatccacgc

SEQ ID NO: 31229 - DNA, 2512 bp, Zea mays
  Clone ID: UC-ZMFLB73146C02_FLI
gcggcggaccgccgatggaaaactttggaggctcctaacttccaagataccaactagctcccagcctcccaccgtcttctttccacccttggctgatgctagggagatgggatttttggagctctaagacaaatagttctgctccttgcgccctgcgtgttcttgatctggcctctaagtttgttggctgttttctcgtgtttgaggtgatatctcgattctaaaaagctaccagatttcttctccctgtttgtatggacaaatttgggaatgaaccctagtctgtgtgcaaagcagccaaattggtgttcttgcggatcaaagctaaagctgcagcagttggtgaggatacaagagatgcagggagaaacaagagaagggcttgttagattctgcagagacactcttattggttgatattttttccatcaactccggccagatttgcggaacctcgcaattttaggagccatttgatcttggacatggagaagcaacccagcgtgcgacatggtgccctagagaaactgaagagcttccgggggatggagaagcagagaagcttcaagttcttgtccatggagaagcagcagagcttcaaaaggaacaaggacagccctgggaagcggggtgacaccgcgctccacctcgcggcgagagctggcagtgtcgcacatgttcagaagatccttgcggagtgtgatccagaactggtggtggagttagctggccgcacgaatcaagacggcgagactgcgttgtatgtgtctgctgagaaagggcatgttgaggttgtgtgtgagattttgaaggcttcggatgtgcagtcagccgggatcaaggccagtaacagcttcgatgcattccatattgcggcaaagcagggccatttggatgtcttgaaggagctgttacaggcctttccctcattagcaatgacaacaaattctgtaaatgccacagctttggacactgctgcaactcagggccacgttgacattgttaatcttctgctagaaacagatgcaagccttgctaggattgcaagaaataatggcaagacagttttgcattcagcagcaagaatgggccatgtggaggtggtcactgcactgttaaataaggacccggggattgggtttagaacagataagaagggacaaacagctctacacatggcttcgaaaggccaaaatgcagaaattctgcttgagttgttgaagcctgatatctcagttatccatgtggaggacagcaaggggaatagaccattgcatgttgcaactcggaagggaaacaccattatggttcagaccctaatatcagttgaggggattgaaatcaatgcggttaatagagctggagagactgcttttgctattgcagataaacaaggtaatgaagagctcgtcaacatcctgagagaggtcggtggaggaactgcaaaagagcaagtaaatcctcctaatccagcaaagcagcttaagcagacagtcagcgatatcaggcatgatgttcaatcacagatgaagcaaacacgccagaccaagatgcaattccaaaaaatcaagaagaggattcagaagctccacattggtgggctaaacaatgccatcaactccaacactgttgttgcggtgcttattgccaccgttgcctttgctgccatattccaactccccggtaattttctggaggacatgactcaagcacctgacccagacatgaccttggggcaagcattgatagccagtgatccagcctttataatcttcttggttttcgatgctttggctctctttatctcgcttgctgtcgtagtagtccagacatctctaattgttgttgaacagaaggccaagaagaagatggtctttgtgataaacaagttgatgtggctcgcatgcctctgcatctcggcagccttcatagcgctaacctacgttgtcgtgggtcgagacgacgagtggctggcctggtgtactatggcaattggcactgttaccatggtggccactgtcggttccatgtgctactgcgttgtcgctcacaggatggaagagaagagcttgaggaagatcaggaggacctccatgagccagtcatggtccatatcaattgactcggaagcagagctgatgaacagtgagtacaagaagatgtatgccctttaggatgatgtctgttcttgtcggctgagtcttgtatatattggtacccatttgcctgagaccagtccatggcattgagtgggattgactcaatcagaactatatttagtcctagaacatggcacctgtatgtaactgtagtcttgcagcctccagacatgaacataggggtgaagtctaggtgataggtgtagtcactttttttgttggcaaaatacaaatattgccaagcatgatgtccctatatcatgttttgtgtgggtgtggatggcagtgaaaaatgaaaatcattagattgtatctgtatggtagaatagtatggaataagttgtctttatgtc

SEQ ID NO: 31230 - DNA, 2151 bp, Zea mays
  Clone ID: UC-ZMFLB73146F06_FLI
gcaatctggaggcggccacgcacgacgtggtgataggggttcttgacaccggcgtatggccagagtcgccgagcttcgcgggcggcaacctgccgccaccgcccgctcgctggaagggggtgtgcgaggctggcgtggatttcccgccgagcttgtgcgggaggaagctggtgggcgcgcgcagcttctcgcgcggcctccgtgcggcaaacggcggcgcaataggcgtggggaagaggacgttcaggtcggcccgggacagggacgggcacggcacgcacacggcgaccacggcggccggcgcggtggtggcgaacgcaagcctgctcgggtacgccacggggacggcgcgcgggatggcgcccggggcgcgcgtggccgcgtacaaggtgtgctggccggaggggtgcctcgggtccgacatcctggccggcattgacgccgctgttgctgatggggtgggcgtgctgtcgctgtccctcggcggcggctcagcgccgtacttccgggacaccgtagcggtgggcgcctttggtgcggcggcggccggagtgttcgtctcttgctccgccgggaactccggcccatccggatccaccgtctcaaactccgctccgtgggtcgccaccgtcggcgccgggacactggaccgcgacttcccggcatacgtgatgctccccacgggtgcgcgcctggcgcgcgtgtccctctacgcggggccttctccctccccacgccccgccatgctcccgctcctctacggcagcgggcgtgacaacgccagcaagctctgcctctccgggacgctcgacccggccgccgtgcgcggcaaaatagttgtgtgcgaccgcggcgtcaacgcgcgcgtggagaagggcgccgtcgtgaaggcggccggcggcgccggcatgatactggcgaacacggcagccagcggagaggagctcgtggcggacagccacctgctccccgcggtggcggtggggcgcgcggtgggcgacaagatacgggagtacgcggcgcgcggtggcggtaggcccatggcgatgctgagcttcggcggcacggttctgggcgtccggccgtctccggtcgtggcggcgttcagctcccgcggccccaacaccgtggtgccggagatcttgaagccggacatgattgggccgggggtaaacatcctggccgcctggacgggcgtcgctggaccgaccggactcgccaaagacggccgtcggactcgcttcaacatcatctcagggacttcgatgtcatgccctcacatcagcggggtggcggcgctcatgaaggcggcacacccagactggagcccatccgccatcaagtctgcgctgatgaccaccgcctacaccgtggacaacacgaactcctcgctccgggacgcggcggacggctccgtcgccaacgcgttcgcgtacggcgccggccacgtggacccgcagagggcgctttcgccgggcctcgtgtacgacatctccacgcacgactacgccgccttcctctgctccctcaactacagcgccccgcacgtccaagtgatcaccaaggcgtccaacgtctcgtgcggcgccccgaacaagtcccgccccggggacctcaactacccgtccttctcggtggtgttcggccagaagcggaagacgaagccggcggcggccctgcgtttcaggagggagctgaccaacgtcggccccgcggcgtcggtctacgacgtgaaggtggtcggccccgagtccgtcgccgtcacggtgacgccggcgaggctcacgttcaggcaggccggccagaagctcaggtactatgtcacctttgcgtccagggctcggcaaggccacgcgaagccggacttcgggtggatttcctgggtcaacgatgagcacgtcgtccgcagccccgtcgcgtatacgtggaagatgtgatgtgaggttccctgcctgcctaaaatctagctcgatgacgaaggaataggataggttggtgtagtttgctcaccgcttcgcaaagagaatcggcgtgaagctctctatctctctctctcggctgcagtgcagacctgtacttgtttcctatctttcttttcggacatcaagtaaccctgaatctgaatgacgaatccgccgtttggtgtttgcc

SEQ ID NO: 31231 - DNA, 695 bp, Zea mays
  Clone ID: UC-ZMFLB73146G03_FLI
gtccaaactgtattattgcatccgtttgtgaatgcacgaattcatttgcaaggaggaacaaaactgtgatcaaagaacaaagaatcaaagagaacgaccgacctatgtacagttgtacacacacacacaaaaatggcgcgcgatccccgcaactgggggatcgagcaggcggcggattcgttcggccgccggccggtcagccctcgaagctggacgagcggctccatctccccctgaggtactcctccaacgacacggcggcggcggcggcgaagatgatcataccggtgcgctgcttcacctgcggcaaggtgattgggaacaagtgggacctctacctcgacctcctccaggccgactactcggaaggggatgctctggatgctctggaactgttccgctactgctgcaggcgaatgctcatgacccatgttgacctcattgagaagttgctcaactacaacacactggagaagaccgagacaagttaagtgagcaagcatatcatgctctgaaagcactactgtttcgtagtatcatatatattgtaggcggtatgttgtttcttctctatcaggagaggattgttgtgagtgtgaacttgcttttgctctcgagcattcaaggactgacaagggcatgttgcatctatgttacgatgttggagattttaatcgatataacggctaactaat

SEQ ID NO: 31232 - DNA, 677 bp, Zea mays
  Clone ID: UC-ZMFLB73146H06_FLI
ccaccgctttaaaatccccgcagccaccgaacggatacaagagctccgtcacctcgccccccccccccccccatccagctccgaccctagggtttccatccggctcttccggaagcttccgaaaatggccaccgacgagctcgcccacgccgtcgcccccgccccggccgggggagaccactccccggccttctcgttcagcatctggccgccgacgcagcgcacgcgggacgcggtggtgcggcgcctcgtggagacgctcgcgggagacaccatcctctgcaagcgctacggtgcggtgccggccgccgacgccgagcccgcggcgcgcgccatcgaggccgaggccttcgacgccgcggcctccacgggaggcgccgccgccgcctccgtggaggaggggatcgaggcgctgcagttctactccaaggaggtgagccgccgcctcctcgacttcgtcaagtcccgctccgcggacgccaaggccggtgacacgccgtcggaggaggcccgggctcctggcgcgcccgaggccgaggccgcccagcccgcggcgtgagcgccggacagccattcgttccgtttttgtatttcctgcagcctgtgtgtggcttgggtctgagtttgtatgacttgaacgttagctgtttgcacatctatgcaattcttgttcttcc

SEQ ID NO: 31233 - DNA, 806 bp, Zea mays
  Clone ID: UC-ZMFLB73146H09_FLI
ggcggcgccaccaacggcacctgggacggcatcgtcccgccggagtgcgcgccctcggaccgcatcgtccgtctctccccggcgcttcgctgggaggaggcgcgcgagccgctgcacgccggcgtcgacgtgggcaacgttctcggcgtcgggcccggcatgcccttcgcgcacgccgtgctcgccagcgagggcgcagccgcagagccccccgtcgtcgtcggactcgtgccgtgcgcgcagggcggcacgccgatcgccaactggtcccgggggacggagctgtacgagcggatggtgacgcgcgccagggcggccgtggccgagtgcagcggacgcggtcacctggccgccttgctttggtaccagggggaggcggacaccatgaggcgccaggatgctgagctctaccagcggcggatggagactctcgtgcgtgacgttcgctgcgacctcggccggcccgacctcctcgtcatccaggtgggcattgcaactgcgcagtacaatggcaagttcctcggcgtggtgagggaagctcagaaggcagtgaagctcccaaatgtcaagtacgttgatgccatggggctgcccatcgcgagcgaccacacgcatctcaccacggaggctcaagtccagctcggcaacaaactagccgagtcgtatttagaaacgctgtaattttcaaataccggtatgcctaccaaaaacaaggcattcccccacgatttggaaacggacagagcaagcaatatgtacactcaaattacgatgctgcgttgagattaatattttccgtgctattg

SEQ ID NO: 31234 - DNA, 1597 bp, Zea mays
  Clone ID: UC-ZMFLB73146H12_FLI
gcggggtgccggcgcggcgacctggtggtgcggcagcgcgcgacggggcgcgtggtggaggggaagcccgagtacgcggtggaggtgcggaacgcgtgccggtgcgcgcagtcccgcgtgctgctgcgctgctacgggctcagcagcgtggaggccgtggacccgcgcgccatccgcgccgtcgacggcgagcgctgcctgctccgcggcggccgggcgctggcgccgcgcgggggcgccgtgcgcttcacctacgcctggatgacgccgcaggacttcccgctcctcagctcgcgcccgcactgctagccgttccagtaccttactttagctctggcctgggctgttcctgtattacaattgttgttgttgggacgggtcgggagcgagcaaggaccgtcatctacgcaggcagccagcagggaggcaacgagccgacgacacgccgcgacgcaccttggaatcttggatcacgtgccctgtccgtgtcctcggtcctgcccagctttttttgtcaactccattattttactaggtatatgcccgtgcgttgccacgggagttaaaacaatgaacctgcactttataaatacaacatcaacgaccacacaaagtaaacttaaaagaatatgtgatgtagccaacaaacatccaattgataggtccaaccaaacacattcataaaccaatcacaactgcagagctagttactattaaattcacgatgactacacactacatgtgccgcccccatagccacaatggactgtaacgcaaaaacacactacatcgattaaaaaacaaaaaatgttctacatccagttgttacaagccattggtgaaacccttgacgaaagagaaagagctattctcgatgacaaaccagagaacaccataacatttcctgaaaatcaaacgagccaatttagtataagattaaataccaaagataaacaaaagacacaaaatcctattaggctaccaaagagaaggctcgtacaagaccacagttggcacagagaacaactgaagaagagtataaacaccaagacaatcaacacagtgaagtaataaaaataatagaaaaggacactgttctaaaagattagtaaagaagagtagagaagttaaaaaacattcattatagtaactacagtattcaaattcattaccacggctgaagaaaagatgtatgttagccgaccgttatcctattccattcctcccaaacttttagaacactgcctagatgtagtatgaaccaagcactaaacaacaatactaattataatcgacactaaataatataggcaaacagcaatatgctatcttgagactaagacttcactcctaacaatcctaaaaattgaataaagcacgcattataatagtagataaatgtttgggaagaatggtgccaaacatctttatggtgcccaacataaaaattgaatctttatggctgcattataatagcagagaaatgtggtcaaaacttagaacgtcatgtgctctaatacaatgtttataataggctactcttttttttgtgggaagcacacagaataaagcacgcctcatactctgatgatggatt

SEQ ID NO: 31235 - DNA, 1328 bp, Zea mays
  Clone ID: UC-ZMFLB73147A02_FLI
acctgaagattggcagagtcaaacaggacatggtcagttaagtggacgtttctcaattgttgaaggagagccttttacagtaacactgtgggctggtgtagaggggttccatatgacagtaaatgggcggcatgagacatcatttgcctatagagagaggtcagagccatggttggtagcagaagtcatgttttctggtgatttggagctcttgtcattcttggctaatgagttaccagtatcagaagatatagacatggaaaatgttgcagttttgaaggccccacctctgccaaagaagcaaacttttctgctggttggtgttttctctactggaaacaacttcaagcggcggatggctttgaggcgaacatggatgcaatatgaggctgttcgctcaggcgatgtagtagtccgttttttcactggtcttcacaagaatgagcaagtcaatatggagttatggagagaggctcaattatatggtgatatccaattgatgcccttcgttgactactatactttgatcactttgaagaccatatcaatttgcattttcggaacaaaaattgttcctgcaaagtacatcatgaaaacggatgacgatgcttttgttaggatcgatgaagtgatctcgagcctaaagaagagcaattccaatggccttctttatggtctcatttctttccaatcttccccccacagagacaagggtagcaaatggttcatcagtcggaaggaatggcccttcgacatgtacccgccatgggctcatggccctggatacgtaatctcacgtgacatcgctaagtttgtagtccaaggccaccaggaactgactcttcagcttttcaaacttgaagacgtggcaatgggtatttggatccaacagtacaagaacagtgggcagcaagtaaacattgtgactgatgaccggttctacaatgaaggatgcgaagctgactacgtccttgcccactaccagaccccgaggcttatgatgtgtctgtgggagaagctgaagacggaatatcatgctatatgctgtgaatagcatccgaattgcaagtaggaggcgatagaggaatggatagatagaggaatggataggttagccttggttttgaagaagacatttgctccgattttgacgctgtgtggaaaattgttgggactatgcgcaaaaagcctgtaacattgggttctcacttctgttctgtggcctgtgggttcatgttctttgtttttgggtagaaaatgttaatccgtgcaacttgatggatgttgtaaaaagagtgttgtaggacatttgagagagtttatctggc

SEQ ID NO: 31236 - DNA, 2244 bp, Zea mays
  Clone ID: UC-ZMFLB73147A05_FLI
cttgcttccctagtactgtcggcccttttctcccttcccaatccatccaccccctccctccccagcaagaaagcattgcatcccctctccccggagcggagagccggcgggccggcctcccatcgcatggccaccgcactgacgtgacgccgccgagggattgaggacccaagacctccagctggaggaatcgggagaggaaggagcggtcgcgcgcccttcgccacgtcttgcgtcgtcggggggcccggcccttcgccgacgacgacgagcacccaccacgtacgcccgccacctctccctccccttcatgccgcaccccaaaccctaatgttgctgaggaacagagatgtcgacgacaggcgaaatcctgaggtcggagctatcttccaggacgccgccgttcggcctgaggctatggattgtcattggcatctgcatctgggtggcgatcctcttcatcataggcttcatgtgcttctggtccatataccggaggaagcccaccaagtcgtccttcgacagtaccaatgacatcccggtgtcccagatcccggacgtctccaaggagattgcggtggacgaggtgcgtgagcacgctgccgtgcagaccttccatgtgcacgagagctgccgcgcgctggccgtgcaggagaagccctgcgagaaggattccgggagaatgctggggcacctggtcaggagcaagtcgagcgacgctgataatctcagccagtgcagctctgcggcgtaccagtgcgagagggctgcaagctcgtactctggcgacgagggcagctcgggcaacgccaggaggcagtatcccactgtctccgcgtctccgctggttggtctccccgagttttcgcatctcggatggggccattggtttactctcagggatttggagcatgcgaccaatcgcttctccaaggagaatgtcattggggaaggtggatatgggattgtttaccgaggtcgcctcgttaatgggaccgatgtcgcaattaaaaagctccttaataacatgggtcaggcagaaaaggagttcagggttgaggttgaggcaattgggcacgtcaggcataagaatcttgtacgccttctaggatactgtgtcgagggtatccacaggatgcttgtgtacgagtatgtgaataatgggaacttagaacagtggcttcatggtgcaatgcgtcagcacggtgttcttacttgggaggcccggatgaaagtcgttcttggaattgccaaggcgcttgcttatttacatgaagccatagaaccaaaagttgtacaccgtgatatcaaatcgagcaatatcttaattgatgaagaattcaatggcaagctttctgattttggactggccaagctcttgggtgctgggaagagccatatcacaacgcgagttatgggcacattcgggtatgtggctcccgagtatgccaatacaggtctgttaaatgagaagagcgatgtctacagttttggggtgctactactggaagcagtgactgggagggatccagttgactatggtcggcctgctaatgaggttcatctggtggagtggctgaaaatgatggttggcactagaagagccgaggaggtggtggatcctgacatggagttgaaaccagcgattcgtgctctgaagcgtgctcttctagtggcactgcgatgtgtagacccagatgctgagaaaaggcccactatgggtcaggttgttcggatgctcgaggcagaagacgtgccttcacgggaggaccgccggagccggagaggccacagcagccacgcagacaacgagtccaaggcaagttcaagcgagtttgagataagcagtgaccgaagagagtcggggccgtcatcgaggttccaggcctaactcccagtgagagcacggcagattaccatctccaagaacccggtttcagttcagtacgccgggttatcccttaccttgcctgctcgatcatggactcaggccgttcgaaatatttgggaatccttgcggggtggggctttattggatggttggtactgatagagataggggaaggcttgcatcttgtgctggagtaggtattttactcccatttccttggtggtgggcggagtcggatcgattccgtgggaggggaggttgagacttgtggatgtggatcctattcgtgttctgtttgcccagcagcatgtacagaaactttattattattccctggttcttggtttaggact

SEQ ID NO: 31237 - DNA, 908 bp, Zea mays
  Clone ID: UC-ZMFLB73147A09_FLI
gcgaacctgctgttcctggaagcgccggtgggcgtggggttctcgtacgcgaaccggacgtcggacctgcggcggctgggcgaccgcgtcacggcgcaggactcgtacgccttcctcctcggctggctggacaggttccccgagttcaagggccgcgacttgtacatcgccggagagagctacgccgggcactacgtcccacagctcgcggagctcatctacgaagggaacaaaggggcgagcagggacagagccatcagcatcaaaggtttcatgatcgggaacgcggtgctgaacgacgcgacggaccagctgggcatggtggagtacgcgtggagccacgccatcatctcggacgagctctactcggcggtgcggcgggactgcgactccttcaaggaggaggccgacggcgggcggcccggcaagggctgctccccggcgctccgcgcgttcctgggcgcctacgacgacatcgacatctacagcatctacacgccgacgtgcctgctgagcaacctctcctccgctagcgccgcggccggcagcgctaggccgcggccggcgaggctcgtcgcggcgccgcgcctcctctccaagcatgaggagtggcataggctgatgaagcgtgtgccggcaggatacgacccgtgcacggaggcgtacgtgaccaagtacttcaaccgcggggacgtgcagcgcgcgctgcacgccaaccggacaggcctgccctacccgtactcgccctgcagcgaggtcataaggaaatggaacgactcgccggctaccgtgctgcccatcctcaagaagctcatgggcgccgggctgcgcgtctgggtctacagcggcgacacggacgggcgggtgccggtgacgtcgacgcggtacagcatcaacacgatggggct

SEQ ID NO: 31238 - DNA, 1502 bp, Zea mays
  Clone ID: UC-ZMFLB73147B05_FLI
cgcgccgccatgtcggagaccgaatcggcggcacggcgccggtggctgcggctgaatcgaagcctcggcgactgcgggggcacaagaagggcgccgtcacctgctgcgtcgcctcctccgcccgccccggcgtcgtcgcgtcctccggcgaggatggatgtctttgctggtttgatctgcgcaccaaagatgcacttttgaccatggaggcagcaaataaaccaatttcttcaatttgctttaaaccaggaaatgaagattttgtgtatatctctgctggaaatgaaatattgtcctttgatgttcgtatgggaactcaatcaaagccattagagacatataactacaatagagatgaaatcaatcagattgctgtcagctctaaaggttttctcgctgctgcagatgatagtggggatgttaagattgtcaataccattcagaaatgcctgtataaaagattaagggaagcccacacaagtatttgcagcagcgtgcaattcattccttggagaccttggacagcaattactgggggccttgactcaaagctcgctgcatgggatttctccaaaggacgaacactgttttctattgattatggatcacctgaattgcaaaacggcagttcttccggtagtgcagggcaatgtttcaaccctgcttttgttcattcagtagcagtttctgaagagggtattttgggagggctctacaaggtttgtgctgttgcaaggggggatggtgctgttgatgtggttgatcttgagtatgaactggcccctgcgaaatcgaagggacctcctcgggcagctattttgacaacgagatcaaaaggcgctgaacttggagatgggagctgcaatcaaagtcgagcgaaaagaatccatcttgactacaccatgggcggccatactgcagctgtgtcttgtgtagcattttcagcatttggtgagaaggggaagttcctcatttcaggtggcaatgatgcatcagtgaagctgtgggattggtcgaaaggattttactctgaaacaaacagcaaagttgatttggttttggatattgatgtaaagaaaaaggtaaattggctgtgtactgctccaactgattcagataacttgattgtgtgtgacacatccaaggtggtcaaagtatatagtttccggtagatggatcaaggtgtagcctcagtttgtcaggcagttatctgagggagtgaagcttgtctgaccgttggaaccaatctggtcctgactctggtatccagatattacaagcctgccgcagacagttcctgaattgtgaggtcattggttagcaatttgcaatgtcagttgtggcgcagaacagatctgataaagtatatattattttgttactgtcagaactttttgtacaacttccagtctgctagcttagctggactcggcatgtatatctctgttgtacggtgaaatgaatttatgtgtttggagaaaataaggcttgtttgtgcctgg

SEQ ID NO: 31239 - DNA, 1942 bp, Zea mays
  Clone ID: UC-ZMFLB73147F01_FLI
aatattctgcataaaaacattttaatgttaatagatgtcacaaactcacaatggcatacaaagtttttagtatagttgacagcaacagtgtacatctaatttacaaacaaaagcaaatatgctaaaaactttgtatgccattgtgagtttggacaccatttacattaaaatattctgcataaaaacatttgcccttttgtttatgatggcaccatcaaacatgggaagcacttctaattatccaggagttttgatacaacacagcacatattccacatgcaattcatgatcttatgttttatacgtgtacctgaaagaatataatcatcttattgtttagtccttgtttagcactttggaaattaataactactgtataaatctactttctttgaaggaactttgcttgctcttgtagttcttgcagttccctcaacggagactacaattcaaatttgacattactattaaaaacaatagttggattgtcagattggcatcatcatgtttgttgtattcttatacctgcttctaacatctcatttcattccaggtattttctctgaccttgtctgaagctcacaggtggcaatagatatacatgtgggtttttcacaggcttgtaacaaatcggagtttgcattggctgtggagtgtaactgacaagatgcagagctcttcaaatatcttgttacttttttcagcaaatagaaatttaacctttgtgttttatctgtttctgtttgcttacagagttcactgatgttgattaacattgctagcatgccttaagttttgaaattggttggttggtatagtcttgttattagttgttgttagtaggttttgatacattttatttctttccactctttagagaaagttttgcatttgcaaaatcttcacattcagtggaagctccaagcaatataaatatacaaattacacaaggtccttccatatgaaacttcacttagttaagcagactcgactcatctttgttatgttattatagactctcccaatatgaaaattatatttacagcgcatctgcttctatattaagataacattctgaacttgtcaagggtcatgctaactagtattgtgcttccatgtgagatatgcttatatttgttctgtgtgcaaaattgtttctgatttcattcttatgcatgccattgcgttacctactctataacacaagaatttgatggatgaatcttcttgttttctttcatctttccagaactcacaacaggggtccaaatttgttaagacaggtttagatagttcaggtaacattgggagctcatcaattgcacctccgaagaaagttcaccctggatcaaatggaatgcttccgcaagaagaagcggatatgccatcacatctctctatatccactaagatgctaccaccacccctgaagagcatgctgccactgccacccagaagcatgcccccaccaccacctaagagcatgcctccaccgccaccaaaatttccttcagatgagtttttgtcaagaaacgagaacaagttttttcctttaaaggagccaacagcacctccaaggtcctttgatgcaatatcagtcttgccatctgaacgacgaccaagggagcctaaggaggaaaaaacaaaaggcacacctgtgtctgatactttgctgaaacttattgattatggagatgacgacgatgacggcgatattgatgtgacagacaacacacctaagggcaatccaactcctggttcagagcagaaaccattttgggctgtttaaaactgggtctgctaacgtagtctagtgtgaattcttgttgataaggatgcttgctgccttggtgcatcttctgaattgaagaggcaatcgagctccttgttcgtgtactgtagtaattctaacaggcaatgagatttctttgaacttgtattc

SEQ ID NO: 31240 - DNA, 1896 bp, Zea mays
  Clone ID: UC-ZMFLB73147F05_FLI
atcggcggcgccatgtcgcacgacgagctcgccgacaaggagccgtcgtcctccgaggagtttcagctcgcgccgacgggttccaagttccggagcctcagccctgcaccgattccgatcccagcttctccgggcatcagatcattggtcgactcggtctctgatgagacagtaaatgtagatgtcatggcctcacatcaaagtgaaaatggatcaatctctacagctagttctaccgttagtttactggaatcagagaaggcagcatatgaatttcttgctcaaactcctgtcagatcaaccgatgcacatcttattgagttttcagaggccttgagaactgtcgcaaaagccttacgacaagtggctgaagggaaggctgctgctcaagcagaggcagcagagtggaaacgtaagtatgaattagagacagcgcagaagcagcaaagtaaaatcagaggctacagcagttgtatcagtaataacttggacaaactggccagccaactaaccctggagacacctgcacctgatcaattaggctgttgtggtaagcatggtatatgtgcacaccaggttctccaggatgaagttcctggacctatcccaagatctaatcacaaggtgggagggagaaaggcaccatttaaactttcatggggatgtaacggggataaaaatggccagcataagcatgattttgtgtccttcgaaaaaggtgatataacaacagcagaacggagcaataagcagatcttactgaaatgggaatcaccaccacaaacagtgcttttcataaccaaaccgaattccagctctgtgcgtgttctttgtgctgaaatggtcagatggcttagagagtataaaaatgtaaacatctttgttgatccacgtgttagcaaggaacttctaacagaggattcctactacaacttcgtccaaacgtgggataatgatgatgatataaagatgctgcacacgaaggtcgatctaattgtaactctgggcggtgatggaactgttctgtgggctgcatcattgttcaaaggaccagttcctccagttgtcgcattcgcccttggatcactgggcttcatgacacccttcccgagcgagcactaccgtgagttgttggacaacgtgctgaatgggccatttagcatcacgctgagaaatcgcatacagtgtcatgtaatacgagacgcggcgaaggatgaaatcgtgaccgaggagccgttcttagtgctaaatgaagttacgatcgaccgagggatatcgtcttaccttaccaacctggaagtctactgcgacagctcttttgttacttgtgtgcaaggagacggactgatcatatcaaccacatctggaagtacggcatattccctagcagctggagggtccatggtccatcctcaggtccctgggatccttttcaccccaatctgcccgcattccttgtcgttcagacctttgatcctgcccgagtacgtgactctccgcgtccaggtgccgtacaacagcagggggcacgcctgggcgtccttcgacggcaaggaccggaagcagctgtcacccggtgacgccctgatctgcagcatttctccctggcccgtgcccacagcctgcctagtggattcgaccaccgacttcttccgcagcatccatgagggtctccactggaacttgaggaaatcccagtcgtttgacggcccgcgtgattgattcaacagtttctttaccgttccatacttatatacaaaggttgcgtgcgtttagatgtgaggtagtatagacgtatagttgagaatccaaatatatagccatgaccatgcgtgtgtgtacatgattctgtgcttcagtgctccccagatctgaatggaataattggcgagccat

SEQ ID NO: 31241 - DNA, 765 bp, Zea mays
  Clone ID: UC-ZMFLB73147H04_FLI
taggtgttgacttcaaggtgaagatggttaccattggtggcaaaaaactcaagcttgccatctgggacacagccggacaagagagatttaggaccttgaccagctcttactacagaggggcacagggggttattatggtgtatgatgtcactcggcgggaaacgtttactaatctttctgatatatgggcgaaggaaattgacctgtattcaaccaaccaggactgtataaagatgcttgttggaaataaagtagataaggtaatcaattctaaactctgtctgcaccttttatctcttgtttctgatcgagcagcccctgtcgtgttttaccggccgtttcattttggcaggaaagtgagagagctgtgacaaaaaaggaggggattgaatttgctagggaatacggttgtttgtttctagaatgcagtgcgaaaacaaaagtaaatgtagaacagtgctttgaggaacttgtgctaaagatattagacacgccaagcctcctcgctgatgcttcgtctggggccaagaagaacatcttcaagcagaagcctccggaagccgatgccgctgcaagcagctgctgttaacatgcttttgccatgctaattccgcgtcctcccgtggatgatgacgatgatatctttgtttggtgtgtcggtttattgtttcttcttcttttggtcctgtatatgctgaatttattacacccacacataactgtacgttggcagcagctatataatatatcgttttttgttgtttc

SEQ ID NO: 31242 - DNA, 938 bp, Zea mays
  Clone ID: UC-ZMFLB73148C09_FLI
gcgcaatcacccgcgggccttgggcttgggccttggaatagggtaccaccaaccaatcaatcgaagaagaggcccgccggccgccgcggtttgctcgctatcgctcccttgctggctgcggtgcgggtgcgccgccgtcgacgagggagtccctggctccctccctccgggttcgaattcgggttgcttccttagggttcagtggcagtacatagcatggccctaaagctcggctggaggagaggaggaggaggctggcttgcgcttccattggggaatcggaccaccgcgtcttcctccgcatgcagcagctccaacttgttcgtcggcggtatggtaacagctttcaattacagtagaagaagaattggcaacggatgatgcagccttcctttttattttctctgcaggtctttcctacgacactaacgagacagctctcaaggatgttttctctcaatgtggtgatgttattgcggcgaaggttatatgccatcccacaagcggcaagtcgaaaggatttggttttgtcaagttttcttcgcaaaaccaagctgacgcagcattgcaaaagatgaacggtcaggtgcttgatggaaggaaaattcgggtgcactatgcaaacgggactggatgacttgtgatttagaaacagatagaaaatgagatgagcaggtgatgattgatgagcatccagcggctggatcttaaaaatccgcattcgccattgaagttttgttgagatctcgaagctgtaaaaactcggacgaactcaagcgagacaaagatttctcttggtgacacggactgttataagatgttttctgtgaggaaaaagttagtctatcatatttttacttgccactatttttatttggtttgtaaaataaaatgagttgatccactcatagttagttaatactaaggttatcttcagt

SEQ ID NO: 31243 - DNA, 440 bp, Zea mays
  Clone ID: UC-ZMFLB73148E11_FLI
cggagggctggtggatcatgacccgcgcgaccggctcaataagatctatgccaagcacacgggccaggccatcgaccgcatcgagcagtgtatggagagggacatgttcatggacccggaggaggcacatgaatgggggctcatcgacgaggtcatcgagcaccgccctgtctctcttgtgtctgatgctgttggcagtgatccgccaaacctcggtggaggcggaactgaggtgaataaagggacggacgagccatctccagcgtgatggcattgggcagtcacaaggtgcaatccttttttgtgttcctgtagctgtcttattggagttataaggtttaattcgtacatgagggtgaataacttaattttatgtctgctgggctaatccactagcaacactgttgttttgctactttattaattgatctgttgctgat

SEQ ID NO: 31244 - DNA, 2793 bp, Zea mays
  Clone ID: UC-ZMFLB73148E12_FLI
ccgcgttttaccctaacaacctaactagctgcggttctccactatcactcgctgctactgcacctacttcctttccgctctggtactgttgctggcttgctgctgctcttggtggtggtggtggtggcaccgaaaccctagcccttgccctcatgtcgcagcaggaggctgtggacccgccttcggcgacggacgagcggctgggaggtctaccgcggagcggctccaccagccgcctcaacgcgcaggcgccggagttcgtgccgcgcgctgccgcagttccccctccccctccgcagcagaaggtggtgcgtttgttcgcgccgcctccccacgcggcgttcttcgtcgcggcaccccggcccccaccgcccccgttcgagtactatgcggcggttgccaccggtgggggtggcaggttcggtccccccgccgctgctgcagagcaggaggccgaggctgagcagccgccgagggacgggagctttgatgaccccgttcccaagatcagaaagcaggtggagtattatttcagtgatataaacctggccaccactgaacatttgatgaggtttatttcaaaggatcctgaaggatatgtgccaatatcagttgttgctggctctaagaaaattaaggctttggttcaaagtaactccatgcttgcttctgctcttcggacttcatcaaagcttgtggtcagtgacgatggtgcaagagtaaaacgtgagcaaccatttacagaatcggatttagaagaactccaggcccgaattgttgttgcagaaaatctcccagatgatcattgttaccagaacctgatgaggctcttttcagttgttggcagtgtcaggacaattagaacttgctatcctcagaccccaaatggcactggtccagctactaacagatctgcaaagctagatatgctttttgccaacaaacttcatgcttttgttgagtatgatactattgaagatgcggctagagcgattgtagaacttaatgatgagaggaactggagaagtgggcttagagttcgattgttgagcacttgcatggtaaccttccattgaacttcattaattgccgatgagatggcttattggtgttcaaccgcttgtacatacatattacaaggaatattccaaaaatcctctggggcctcggaacagctatacaggaatcatattacaaagccctggatgaactctgcagaaatacatttattttgaatctactttttagtgaagcagataccacccaatgaccgaccagatccatagggggtgatggggataacttcttttggaaacttgaaagctctcttgaactgctgtgctatagcattataacacagttttttcttaaaaaatcagggagaagtctatggccatccaacgttcatatttggtgattcagctattttgatgggtggttttggtgacgtggatgacaagtggcagtcagccccgcttgtcatcattgttcaattttttagaatggctcaaaatggagaaatgaccaaaaccaaagttgttatagttgagatctactttgcacttgacttgttcatttgaaattatttacattctcaaaactctgtttgacgttctcatattttgaaatccaaaattttcgaactgttcaaattaacttggatggggaaatgacccaaacagaagatgtagatctcatcgatgagatctacaactttgtagctggcaactttttttagtgaaaatcatttatggtccccaaattttgtttgaagtcaaattttgaagttcaaaattttcaaacctccttggatggagaaacggccagaaacaaagatttacttctccaccagatggagggggaagaagataatgctgacatgtgggcttgctctttccctaatttgtttttgtgtcacaaaacaattttctaatttatttgctgcctgctctttgcaattgagacaaagggaggtaaagggaaaaagggtgggcatgaatctgatgggtatggtgacgaggagaatgtctctacttctgatcaaccatatgataaatatttagaagaaacacctcagatgtcagatgtgcctggagaacacatgactgaggatagcgctggagatatgggacgaggacgtgtccggggacgtggtcgtggtggcaggggccgggggcgtggttaccatcaacagaacaacaatcaacaccaccagcactaccaaaacagcagccaccacagtaacagtagtagtacccgtccagtgggaacctcacctccatctggccacccagtcatgattgagcaacagcaacagcaggcagctcaaccacagcccctcacagcggctaacaaacagcctccaggtcctcgcatgccggatggctcacggggattcagcatgggcagagggaagccgcaaacattgacgcccagagtatccgagtctgaacctgaacaatgaattcgaacctcgcagagagactaatgggttccggtttgccatgttgatacatatggtgagagacttgccttttagaagtctgtcctcgaggttgctttctaatttatgggaccatatacatttctgcatgtgctgtgtgtgtacttccaaagccagcagacactggtttgcgaatagtacggttgcggccattctgtaattccatttttgccccccttatgcagttttgggtgcagtactgaaaatcaaaaactcatgctaaaaaggttgaaaagaatcgagtcgttgtaaaataagattgtttcttcgctgtttgcgggggactgatc

SEQ ID NO: 31245 - DNA, 1306 bp, Zea mays
  Clone ID: UC-ZMFLB73148F03_FLI
gtcctgtcctgtggaccgtatgacgtgtttatttatgggcggcgccttcgtctccactccccaccggaggaaggaagcgagaagaccagaaggtgagaagagagagagagagtgtgtgtgatcggtacaaggatcaccgctgtgcctgcgcgtgctgcttcaccgaatcgagtcagatcctgtccgaatccgagctaagggatggcaaccggtagtgaagcctcgaaggcagctgaggctgtggttgactggcataaacacgacagcaagaggatgctccatgcggtttaccgtgttggggatctggaccgcacaatcaagtactacacggaatgctttgggatgaaactgctgaggaaaagggatgttcctgatgagaagtacaccaatgccttccttggctttgggccagagaacaccaactttgcagttgaattgacatacaactatggcgttgacaagtatgacattggaacgggctttgggcatttcgcaattgctaatgatgatgtgtacaagttagctgagaatatcaaatccaagggtggtaagatcacccgcgaacctggtcctgtcaagggaggatccactgttattgccttcgcacaggatcctgatggctacatgtttgagcttatccagagggctgacacacctgagcctctttgccaggtcatgcttcgtgttggtgaccttgagcgttctatcaagttttatgagaaggccctagggatgaagctcctaaggaagaaggatgtacctgattacaagtataccattgccatgttgggctatgctgatgaggacaagacaactgttctggagctgacgtacaactatggagtcacagaatacagcaagggcaatgcatatgctcaggttgccattggcaccaatgatgtgtacaagagcgccgaggcggttgatctggcgaccaaagaactaggtggcaagattttgcggcagccagggcctctacctgggatcaacactaagatcgcctcttttgttgatccagatggctggaaagtggttctggttgacaacaccgacttcctcaaggaactccactgaaggctcgggatacccaggtgctgtgctaggatgtagtaatgcttgtctgtggtgtaataagatgtgggtggtttgtttctgccctgatgaacttataatactgaatgttgctacagaggttgtgcttctgccagtgaggtttgggatttgctatgtaactgtgcctgcgggctccgattctggcgctgttcgtacactgtagaagccagtgaatcccaataaacccagcttc

SEQ ID NO: 31246 - DNA, 1898 bp, Zea mays
  Clone ID: UC-ZMFLB73148F08_FLI
ccaaaatgactataagagaagtcctcgctactttgaggttggtgataatagatctggaaaaataactccaattcaagggtttgaagacaggaggttttcagagcccagaaagcgagatagtgggtctccagacttccagaaagaagctgatggttctagtcctgttgtacggccagtgagggatatattgggtgacaacgctcctcaacttcgggtcggtgaaccttcaaagccagctactgagcctgcaaagccaactgtagtcagaccaattgatcctccaaagccaagtgtagtcagaccaattgatcctccgaagccaaatggaaccagggcaattgatcctccaccactgacaaagacaatatctagtgccagcagcattggttctgcagaagggacatcggaacagacaaaggtggcaagtgcagtgagtttgattgatttcagtgcagatcctgaacctgagtccacagcaccaccacagccggcccctatgacacaacagcctccagttaatgcagtagcaccacagcctgttcttgaacaaaggaaaagtgctccttctgtcagtggtggtgattgggcatcttttgatgcttttggccaacaacaaacacctcaaacaagcagcagtgtaaatccccttgagtctgcacttgcacagctgtcattctctgaagcaccctctgcaccaaatgtgtcagcttatcctgtttctctggatcccactttgaaagcaaatgatggaggatattcatctgtgctagatcagtcacattccttgtttgatgcaccctttggaatctcaggcaaccaggcctcaacagtaatgtctggccaagaaacatcggttcaacaatcttctatagctgcccctacggctggacttccatctcaagctactgcaaatcaacaaggaaccagtggtattcaaggagcagcttcttctactgacagtaaattcagtggcaggaaagaacttccagcggatatctttactgcactatatccaccatcaactccaatgatgcctggttggcagagagccccccattttggaatgggatacgccatgcaatatccacctggagtgttccagggaatgcaagcatatcctcagcctacatatcagcaacctgtatattcgcaacatgcatattcccacccccaacctgtgaaagcttcaaacccttttgatcttgggaatgggccagctccaactcaagctcacatgcccccatctggaccaccaggagtattagcaggcccagctccccaaaccttaattagcaactctagttttggtgttcctccacagcagcctcaccagctctatcaatcagccgcacatccaagccatttcatgatgcagcaagttccgaacagcatgcccatgcccgagcaacaacctaatagcatgcttgtaacgcaacaaggtttgggatacctccagccaaacacccccccaccttcatacggctccgttgggggtagtaatccattcgggtaaaagaagtgtgggaacacctgctctttcatctctagactaagggtctgcagcactcagcgggacagacatgcatcgaagccctcgagagaatgtgttccatacaaccaggtggtgtattctgtcggctgtgatatgttgtacaacttgtttccaagggcgtcatcatcgaatgtaactctgttttagagggcctaagctgctttcagcctcactccttgtatattgtgtctgcttgaattgcatagtatgtatattttgtgttcctttgttgtcttggacagtatcagctccagttttagtacgagtcagcttctagtgcagttgactattcattttaacgtggatggtaagtactttataatagaccagatgtatgatcgtgatc

SEQ ID NO: 31247 - DNA, 1964 bp, Zea mays
  Clone ID: UC-ZMFLB73148F10_FLI
ccacgttatccgcagccatgagtccaccccccgtccctttccctctcctacctccacctccacgacaacaagcaaatccccatccagttccaaaccctaactcaaatgctcgctttgactgcctcagcctcatccgcttcgtcccatccttatcgccacgcctccgcgcacactcgtcgcccccgcctacgtgcggtcctcgcgatggcgggctccgacgacccccgtgcagcgcccgccagatcggtcgccgtcgtcggcgccggggtcagcgggctcgcggcggcgtacaggctcagacagagcggcgtgaacgtaacggtgttcgaagcggccgacagggcgggaggaaagatacggaccaattccgagggcgggtttgtctgggatgaaggagctaacaccatgacagaaggtgaatgggaggccagtagactgattgatgatcttggtctacaagacaaacagcagtatcctaactcccaacacaagcgttacattgtcaaagatggagcaccagcactgattccttcggatcccatttcgctaatgaaaagcagtgttctttcgacaaaatcaaagtgttgggagcttctgtgaacgccactttggaagagaagttgttgactattttgttgatccatttgtagctggaacaagtgcaggagatccagagtcactatctattcgtcatgcattcccagcattgtggaatttggaaagaaagtatggttcagttattgttggtgccatcttgtctaagctagcagctaaaggtgatccagtaaagacaagacatgattcatcagggaaaagaaggaatagacgagtgtcgttttcatttcatggtggaatgcagtcactaataaatgcacttcacaatgaagttggagatgataatgtgaagcttggtacagaagtgttgtcattggcatgtacatttgatggagttcctgcactaggcaggtggtcaatttctgttgattcgaaggatagcggtgacaaggaccttgctagtaaccaaacctttgatgctgttataatgacagctccattgtcaaatgtccggaggatgaagttcacaaaaggtggagctccggttgttcttgactttcttcctaaggtcagatggattatctaccactatctctcatggtgactgcttttaagaaggatgatgtcaagaaacctctggaaggatttggggtcttaataccttacaaggaacagcaaaaacatggtctgaaaacccttgggactctcttttcctcaatgatgttcccagatcgagctcctgatgaccaatatttatatacaacatttgttgggggtagccacaatagagatcttgctggagctccaacgtctattctgaaacaacttgtgacctctgaccttaaaaaactcttgggcgtagaggggcaaccaacttttgtcaagcatgtatactggggaaatgcttttcctttgtatggccatgattatagttctgtattggaagctatagaaaagatggagaaaaaccttccagggttcttctacgcaggaaataacaaggatgggcttgctgttggaagtgttatagcttcaggaagcaaggctgctgaccttgcaatctcatatcttgaatctcacaccaagcataataattcacattgaaagcgtctgacctatcctctagcagttgtcgacaaatttgtccagttcatgtacagtagaaaccgatgcgttgcagtctcagaacatcttcacttcagatattaacccttcgttgaacatccaccagaaaggtagtcacatgtgtaagtcggaaaatgaggttaaaaactattatggtggccgaaatgctcttttttgttttcctcacaagtggcctacgacacttgatgttggaaatacatttaaatttgttgaattgtttgagaacacatgcgtgacgtgtaatatttgcctattgtgatttt

SEQ ID NO: 31248 - DNA, 2079 bp, Zea mays
  Clone ID: UC-ZMFLB73148G03_FLI
ccgctttcggtgttctactgccgcgtagcagcggcagcggcaccgacggcatcccaaaaggcagcgacgtctgggtcggacttggaggccccggggatcggtggccaggctgagctcctcccagagtcccagtacgcctccggagtccggatccgcggagccaggctgagctgctcccgtggtctactctccagtacgcggctcggcagggaccgggagcgaggacgagcgtcctgcgtcgacgggatcggcgtgccaggggagcgctgaaatctgcgcttccgtctccggacggccgatgccaggccttgctcgggagaggtagcaaacgaaacatggagctgaggcggctgctgctgcttgcgctcatctgcctgcgtgctccccgtttggcttcggctcagcagccggatgaggcgacggtcatagttaagggctccactaggattgcggaaacggatgacaactacgtctgtgctacaattgattggtggccgccggagaagtgcaactacaatcagtgcccatggggccaggcgtcaattcttaatctggatctggatcacccgtttctggctcaggccattcaagcatttgaccatttgaggattaggctgggaggctccttgcaagaccgagttgtttatgatgtgggaacagaaagtccatgctccccatttacaaatgtatccaatgccttgtttggtttctcagttggttgccttggtatggataggtgggacaaactgaatgacctattcgagagaacaggagcaattgtcacatttggtgtgaatgcactctacgggaggtataatgttcgacgttccatctgggcaggcaaatggaattccactaatgcatatgattttgtaaaatacacaatctcaaagggatacccagttggctcttgggaatttggcaatgagctgagtgggcatggaatcggagcaaaagttgatgctaaactttatggaaaagatgtaattgaatttaaatccatccttcggcaattgtataaggcaccactgtcccagccactcctgttagccccgggagggttctttgatcaacagtggtattctcagctacttgagacttcaggtcatggtgttgttaatgccttatctcaccatgtatataatcttggtggagggaatgatgttcatcttataaggaagatcttagacccaaagtacttggatcgtgctgaagatacttacagagacatgcaacttaccatccaaaggcatggaacatgggcttctgcttgggtcagtgaaagtggcggtgtattcaacaatggtggtcaactggtgtcaaatacattcatcaacagtatctggtatctagatcagcttgggatggcatctaagtacaacacaaaagtgttctgcagacagactctcatcggtggcaactatggactgctcgacacgcaaacttttctgccaaatcctgattactacagcgctctactatggcatcggcttatgggcaatggagttctttcagttgatataaacgcaccgcgtcaaatacgcgcttatgctcattgtaggaaacaacagcaaggcatcacgattctgttgatcaacctgagcaacactactggatacaacgtcactctccagaacgacatcaacgtcagcttgggcaaaagacctgaccttgagaagcgcagttctttcacgcacaggctcaggaaagcagtctcatggctggggaggaaaccagcaagcaacaccaggaggcgggaggagtaccatctgaccgccaaggacggcgatctccagagcaaaacgatgctgctcaacggggccccgttggaacttggagacgctggcagcattccagctatggatccggtgctcgtcgccgttgatttgccggtgcagctagcaccaacatccatcgccttcgtagtcctacccaagtttgaggccaaggcttgttcttgacacatgagctcttgaaatcagtttttttttgtgtgtgccttgaaatgttccatagacctatttcgtgaaagaaatcatacaacgcggcacaaaaacggcaaagcgttgttgtgtgagc

SEQ ID NO: 31249 - DNA, 1455 bp, Zea mays
  Clone ID: UC-ZMFLB73148G09_FLI
acgttgagcagagctcgcggcgcaaggaacacgaggccgcgctaaaaactgctcctactccgggttgtagcgtgcttcacgcacgcacgttgctggataggtttgccgcgcgcgcttgcttgccccgtggtccacgcggccggcggcacccgcgcctcgcccgacgctctatttaaaagccacgcctcggcccccttctccctccgatctctctctctctcgttctgctcacatcgacgcggttcggttccagtttcactcccactgccgtctcggcaacctcccctgttccacgcttcgtcctcgcctgccaggctgccatggccgcgacgtcccccttcgactgcgtcctcctagacctcgacgacaccctgtacccgggcgacaccggcatcggcgcggccctgaggcgcaacatcgacgagttcctccaggccaagctcggcgtgtcggccgacgaggccgccgccacgcgcgccgagctcttccgcgcgcacggcagctccctcgccgggctcatcgcgctcggctacgacgtgcacccggacgagtaccacagctacgtgcacggcaggctaccgtacgacaggatcgcgcgcgacccgcagctggcgcggctgctgcagagcatcccgcagcgcaaagtgctgttcaccaactcggaccgcgcgcacatggagcgggcgctggagcggctgggcgtggacgaggccgccttcgacgccgtcgtgtgcttcgagaccatgaacccgcacctgttcggcgacgacggtggcgaccggcgcccggccgtggtgctcaaaccggcggtggacgcaatcgtcgccgggctgcgcgccgctggctccaacccacgccggacgctgttcctggacgacagcgagaggaacatcgccgcggggaaagcgctcggcctccgcaccgccctggttggcaagagggcgaggagcaaggaagcggactacgcggtggagagcatcggcgcgctccggcgggccatcccggagatctggggcgaggccgctgaacgctcctccgacaagctgccggtgccggccgtgagcgtggtgaggtcgacgacgtccgacctggactccatcatcatccagcccacgtccatccacgcctaatatataacctcatcgtccctagctccccacccccaatcagaatcagcgggtgcgtgcgtgcgtgtgtgaatatctctctctctctctctctctctctctctctctctctgcctgcctgcctcacaggctgaaaggcgtgtacatttctgatcagcaccaccggtcgcccgtcggtgcgcgcgtgcatgtaaagcaggcaccaccagctgcagcccaagtgcgtgcatgagcatgacgagtcatgcaatgtgttgtacgtattttacatgatgataagaataacaaaccgtgtttagctgcagagacccgagcagcggttttaacc

SEQ ID NO: 31250 - DNA, 983 bp, Zea mays
  Clone ID: UC-ZMFLB73149A07_FLI
taacgctctgtgctttgtgccgcttgtggcgtcctcaccgaacctccgctccctcaagatactgcggtgctccggcgcctgggacctgccattggaggtcatcgctgcacgtgctcctggccttgttgagcttcaccttgagaagctacaggttggcgaccgtgggcttgcggcgctttccgcctgtgccaatctggaagttctgttccttgtcaagacccctgagtgcactgattcaggcatcatcagtgttgccgagaagtgccacaaactccgcaaactgcatgtggatgggtggcgcacaaacaggattggggatttcggactcatggctgtggcacgaggatgtccagatctgcaggagctcgttttgataggggtcaaccccaccgtgctgagccttcggatgcttggtgagcactgccggttgctggaacggctggcactttgtgggtgtgaaactgtgggtgatgctgagatcatttgcttggctgagcgatgggctgcgctcaagaagctctgcatcaagggttgccctgtgtcagatcgtgggatggaagcactaaatggggggtgccccagtttagtcaaggtgaagctgaagagatgtcgtggagtgtcatacgagtgcattgagaacctgaaggttactaggggggagtcattttccatcagcttggatgttgtattggagcatgatgccgggagcactagtgaaaatggtgcacaagagaatggacagacacaaattacagagctggccggtcaaatgacaggcatggacctcctcaccaatgccgctggcacacaatcatcgattcataccattaacaggatgaggagtgtcatgtcagcgatccggcgtaggtttggcaatcctctgccaccatgatgtgagatggaaactaatgaactgttatttacagcttttatctaatcacacattcatgttccctaagcttatttcattgcaatgtttcttc

SEQ ID NO: 31251 - DNA, 1885 bp, Zea mays
  Clone ID: UC-ZMFLB73149B09_FLI
gcacacaccgcccggtctccgatctccgatccccgatcccctcgtcgatccaagatgcagatcttcgtcaagactctcactggaaagactatcaccctcgaggtggagtcctctgacaccattgacaacgtcaaggccaagatccaggacaaggaaggcattcccccggaccagcagcggctcatcttcgctggcaagcagctcgaggacgggcgcacacttgccgactacaacatccagaaggagagcaccctccaccttgttctccgcctcaggggaggcatgcagatcttcgtcaagaccctcactggaaagactatcaccctcgaggtggagtcttctgacaccatcgacaacgtcaaggccaagatccaggacaaggagggcatccctccggaccagcagcggctcatttttgctggcaagcagctcgaggacgggcgcacgctggccgactacaacattcagaaggagagcaccctccacttggtgttgcgtctcaggggcggcatgcagatcttcgtgaagactctgactggcaagactatcacccttgaggtcgagtcttctgataccattgacaatgtcaaggccaagatccaggacaaggagggcatccctccggaccagcagcggctcatttttgccggcaagcagctcgaggacgggcgcacgcttgccgactacaacattcagaaggagagcaccctccacttggtgctgcgtctcaggggtggcatgcagatcttcgtgaagacacttactggcaagacgatcacccttgaggtggagtcctcggacaccatcgacaatgtcaaggccaagatccaggacaaggagggcattccaccggaccagcagcggctcatctttgctggcaagcagctggaggatggccgtacccttgcagattacaacatccagaaggagagcaccctccacttggtgctgcgtctcaggggtggcatgcagatcttcgtgaagactcttactggcaagacgatcacccttgaggtggagtcctcagacaccattgacaacgtcaaggccaagatccaggacaaggagggcattccaccggaccagcagcggctgatcttcgccggcaagcagctggaggatggtcgcaccttggctgactacaacatccagaaggagagcaccctccacttggtgctccgcctcaggggtggcatgcagatctttgtgaagacattgactggcaagaccatcaccttggaggtggagtcgtctgacacaatcgataatgtcaaagccaagatccaggacaaggagggcattccaccggaccagcagcgcctgatctttgctggcaagcagctggaggatggccgtaccctcgccgactacaacatccagaaggagagcaccctccacctggtgctccgcttgcgaggtggtatgcagatctttgtgaagaccttgactggcaagaccataaccctggaggttgagagctccgacaccatcgacaacgtgaaggcgaagatccaggacaaagagggcatccccccagaccagcagcgtctgatcttcgccggcaagcagctggaggatggccgcaccctagcagactacaacatccagaaggagagcactctccacctggtgctccgcctccgcggtggtcagtaagccatggttcatttaagctgctgctgtacctgggtatctgcgtcgtctggtgccctctggtgtacctctatatggatgtcgtcgtctaataaacatctgtggtttgtgtgtcatgaatcgtggttgtggcttcgttggtttaatggacctgttgtgtcctctgtgttgtacccaaaactcttctgcagcagtatggcttgaatccttatgaagtttgatatttgaactt

SEQ ID NO: 31252 - DNA, 2096 bp, Zea mays
  Clone ID: UC-ZMFLB73149C12_FLI
cacccaattcctcgcaactgggctcccccgcctccacgacactgccccccgcctcaagtccgccgcctccattcttcagctctcctatcctccgtagtctgcctgtacctattggctgaagcagagctgacccccactttatcaagagttgctcaacaatggacactggctgcctgtcatctatgaatattactggagctagccagacaagatcttttgcggggcaacttcctcctcagagatgttttgcgagtagtcactatacaagctttgccgtgaaaaaacttgtctcaaggaataaaggaaggagatcacaccgtagacatcctgccttgcaggttgtctgcaaggattttccaagacctccactagaaagcacaataaactatttggaagctggacagctctcttcattttttagaaacagcgaacgccccagtaagccgttgcaggtcgtggttgctggtgcaggattggctggtctatcaacagcgaagtatctggcagatgctggacataaacccatattgcttgaggcaagagatgttttgggtggaaaggtagctgcttggaaggatgaagatggagattggtacgagactgggcttcatatcttttttggagcttatcccaacatacagaatctgtttggcgagcttaggattgaggatcgtttacagtggaaagaacactctatgatattcgccatgccaaacaagccaggagaattcagccggtttgatttcccagaaactttgccagcacctataaatgggatatgggccatattgagaaacaatgaaatgcttacctggcccgagaaggtgaagtttgcaatcggacttctgccagcaatggttggtggtcaaccttatgttgaagctcaagatggcttaaccgtttcagaatggatgaaaaagcagggtgttcctgatcgggtgaacgatgaggtttttattgcaatgtccaaggcactcaatttcataaatcctgatgagctatctatgcagtgcattttgattgctttgaaccgatttcttcaggagaagcatggttctaaaatggcattcttggatggtaatccgcctgaaaggctatgcatgcctattgttgatcacattcggtctaggggtggagaggtccgcctgaattctcgtattaaaaagatagagctgaatcctgatggaactgtaaaacacttcgcacttagtgatggaactcagataactggagatgcttatgtttgtgcaacaccagtcgatatcttcaagcttcttgtacctcaagagtggagtgaaattacttatttcaagaaactggagaagttggtgggagttcctgttatcaatgttcatatatggtttgacagaaaactgaacaacacatatgaccaccttcttttcagcaggagttcacttttaagtgtctatgcagacatgtcagtaacctgcaaggaatactatgacccaaaccgttcaatgctggagttggtctttgctcctgcagacgaatggattggtcgaagtgacactgaaatcatcgatgcaactatggaagagctagccaagttatttcctgatgaaattgctgctgatcagagtaaagcaaagattcttaagtatcatattgtgaagacaccgagatcggtttacaaaactgtcccaaactgtgagccttgccggcctctccaaaggtcacctatcgaaggtttctatctagctggtgattacacaaagcagaaatacctggcttccatggaaggtgcagtcctatccgggaagctttgcgcccagtccattgtgcaggattatagcaggctcacactcaggagccagaaaagcctacaatcaggagaagttcccgtcccatcttagttgtagttggctttagctatcgtcatccccactgggtgctatcttatctcctatttcaatgggaacccacccaatggtcatgttggagacaacacctgttatggtcctttgaccatctcgtggtgactgtagttgatgtcatattcggatatatatgtaaaaggatctgcatagcaattgttagacctttgggaaagcaaaagcgataaagagatctcagat

SEQ ID NO: 31253 - DNA, 2451 bp, Zea mays
  Clone ID: UC-ZMFLB73149E04_FLI
ctctaatctttcttttgtacatcgatccgttcgttcgttcattcgtacacagcagcagctcacctcacacgatacagggaaagaaagatcctctggccgtatccagatagcacggagagaggcagtgaggagaggggaagtgggagtgaggagtgaatcggcagagaggaggaagacgaacaagacgacgaagacgaagccacagaggaggtcaggagggcagagcagaggagagtaggtctcttcttgccacaccgcttccggccgcgtctccgggatgttggctggttgctccttctcgtcgtcgaggcatcagatgagcaccgcgcagcgattcgacatcctcccctacggcttctccaagcgggcgagcaaccgcggcgatggctccggcgccgcgccgcgcgtcgcggcgcccgacgccaggagcggtggcggcggcggcacctgctccttccgcgcccacccggcgccgccagtcacgcaggccgtttcctggggcgccaagccggagcccggcggcaatggcgctgcgtgggagaggagcagggccgttaagcgggcccatgaggaagacgcaggcgaggagtacggcggccccgtcgttcgcgccaagcggacgaggatgggcggggacggggataaggtatggttccatcgatccattgcagggacagtgcaagcggccgggtccggcgacggacacgaagccgaggaagagaaggccttcctggtgccgagcgccgcggcgttcccccacggcatgtccgccgccgccgcgggcccgtcgctggccgtggccaagaaagaggagttcagcaagtcgccgtccaactcgccggcctcgtcgggcggcacggacggcggctcgtcggctgtcccgtggccggagcagctccacgcgcagaacggcgccgcggcgcgggtggaggccatggagctcgtcgtcgcgctcaccgcctgcgccgactccgtcgccgcctgcaaccacgacgccgccaactactacctggcgcggctgggcgagatggcctcccccgcggggcccacgccgatgcaccgcgtggccgcctacttcgcggaggcgctcacgctgcgcgtggtgcgcatgtggccccaggtgttcgacgttagcccgccgcgcgagctcaccgacggcgccgtcgccgccgacgacgacgcgacggcgctgcgggtgctcaacgccgtcaccccgatcccgcgcttcctgcacttcaccctcaacgagcgggtgctccgcgcgttcgacggccacgaccgcgtccacgtcattgacttcgacatcaagcaggggctgcagtggccgggcctcctccagagcctcgccacgcgcgtggctcccccggcgcacgtgcggatcaccggcgtcggcgagtcaagacaggagctgcaggagaccggcgcgcggctggggcgcgtggccgccgcgctcgggctcgcgttcgagttccacgccgtggtggaccgcctcgaggacgtccgcctgtggatgctccacgtgaagcgcggcgagtgcgtcgccgtgaactgcgtcctcgcggcgcaccgcctgctccgcgacgagaccggcgccgcggtggccgacttcctcgggctcacgcgcagcacgggcgccgccatcctcctcctgggcgagcacgaggacgccctcaactccgggcggtgggaggcgcggttcgcgcgcgcgctgcggtactacgccgcggcgttcgacgccgtggaggcggctgggctggcggacgccagccccgcgagggccaaggcggaggagatgttcgcgcgggagatccgcaacgcggtggcgttcgaggccgcggaccgcttcgagcggcacgagaccttcaccgggtggcggcagcgcatgcaggaaggcgggttccagaacgccggcatcggcgaccgggaggcgttgcaggggcgcatgatcgcgaggatgttcgcgccgggcaactacagcgtgcaggtgcagggcgacggcgaggggctcacgctccggtggatggaccaggccatgtacaccgtgtccgcgtggacgccggtcagcgacgggggcagcacggtgtctgcgtctgtctccaccacagcatcccattctcagcatagctgaatggggggaagacacaaggtgaagtgaagaagaaaagaacatggtttttcagtggttcttttgctgttactgaaaacttagttcattatacagtctgacaattcttttatacaatcagaagaacaaaaaaaaagaagcaaaggagtaagaaagatttgtttgtagctttgtttttataggtgataggataaaagattcaattgttagtagttgtaattctttattctttatgtacacttgtcattctttcaccatgtctgtttagcttgtaatctctgttccgagttagaaggaaatggaataaacaagtatggttttcattc

SEQ ID NO: 31254 - DNA, 1847 bp, Zea mays
  Clone ID: UC-ZMFLB73149E05_FLI
ttgctggtgctcctgccgcttaccctgccctgttcactgttctgttccgcgtatcccacaggaagggaaggggaggaagcagcagcagcacacagctttgctctcgctctcggctccccgtccaccaaaggaggaaacgcgcagcccgcagcgctagccgtcgtctatctcgtctcctagtccaaggaaggaaagaggcgcttggcatgaagcgacctaccaagaatgagacgctgggctacccctggcacaagtagagcaagagccccagcaaccgagccacagtgaggaggactcgagggaagagatgggcaactgcggcacgcgggaggagaatgccgtcgtcgctgcgcacgcacaagttcaacagctccacttgttacaaaatcctgccaagaatgccattggagataggaagcacaaccgcacctcatcagatataagtgatccttccacacctaggaaagctgaagatgccaagaacatttccatatacaacgatgtgattgtcttcacattgtttgagctagagacaatcacaaagagcttccgtgccgattatgttctcggcgaaggaggatttgggaccgtttacaagggctacatagatgaaaatgtcagggtggggctgaagtcactgcctgttgcagtcaaggtgctcaacaaagatggacaccaagggcacagagaatggcttaccgaagttaactgcctggggcagttaaggcatccaaacttggtgaagttgatcggatattgctgcgaagatgaccatcggctgcttgtctacgagttcatgtttcgaggaagcctagaaaaccacctattccgaaagacagctacaccattaccctggggtactaggatgtcaatcgcactgggagctgctaaagggcttgcttgcctccacaatgctcaaaggcctgtcatctacagagatttcaagacatcaaatattctactggactctgattatactgctaagctgtctgactttggcctggcaaaagctggccctgaaggtgatcagacccatgtatcaacacgggtgatgggaacctacggttatgctgcccctgaatatgtgatgaccggccacttgactgctagaagtgatgtctacagcttcggtgtggtccttctggagctcttgacagggcgcaagtcaatcgacaagtcgcggcccagcagggagcagagcctggttgactgggccctccccaagctgaacgacaagaggcggcttctccagatcatcgacccgagactggaggggcagtactcggccagagccgcccacaaagcctgcagccttgcgttctactgcctgagccagaaccccaaggccaggccactcatgagcgacgtcgtcgagaccctcgaaccgttgcagggcagcggtggaggcgatggacgcggccagccttctggccttcctgactataggggtcgccgcaggataaccgggaacagcgtccacttcagggccatcccgaaccccaagtgctcccctgccgtcccggccacggcttgccgagtgcggtgatgggtgctgtgtttcggttggagctgccggggtaggttccgttgtgtatattgcggccgtgggcagtggtgtgtgtgtgggtgcatgtgtgtgcttggcggcggcggggtttcggtttcttctcgggttttggcctgcgttttgatgtgtaaatttgatctgcgtgctgcattgctgctgctgcttttgtaaggccctctaattttcactgtggtcttatgtatccttcgactgagcgagccctgctgaaactggcgggttcgggattaaccctagaaatgaaatgaaaggctgaaccgag

SEQ ID NO: 31255 - DNA, 3201 bp, Zea mays
  Clone ID: UC-ZMFLB73149E06_FLI
gccatgtcgcgtctcctcctccgccaccgcagcttcctcctcccaggggcgcggagcgacgccagccaccccttcacggccgcctcctcctcctcccgctcctcatacacttcccggttctcccctctcgcctaccacgcctccgccgcggccacggccgcaggcgcccaatcagagggtgcggcggccgagtccacacccgcagcgggcgaccagccctcatcgacacctccccccgcggcacgcgggcggtggggcttgctcaagttcggcgccttggcagcagtcgccggggccatcggcggcgtcggatacgtcacctacgcctattcgctgaatgaagtggaggagaagacgagagagttcaggaagaacccaaggctgctcatccctgaggatgcctccacgttcgagaagtataaagctatggtgtactcgacggctatgaaaggtgcaaactaaatgggctcctctttttagtgttcttccttctgttttcttggaattcaagtgttattgttgcaaagtctttcttctctggagatcatttaatgtgcacttctgaacacatgtcctaatggcaatgtggtgatgctcgatgaagtaggctcttttttttgcagcatggacgaactgaatttcgttactcaaaagcaacgaaattacaagagttttgtacaccatagtacatacttagctcgaagtcttgaactaaacaagctgccagttgcactgaacacacagggttcagagagaaggcccccccccccccccccggctaagactagatgagcgatgataagagctcaccaccaaggctatgaagagtccgatttattacaagcctagattggatggagtaggctcatagaatgatagaactacttactgtttcttgtcagttgtcttcgatttgcataatcaataattcatgcaaattactttaggaatagttaaagaattactctgagacagtgtaaacacagattctgttgttattggattatgaagtgggtcaatgcatgcatgttggaaatgaatatatatgaacctctgtaaagcattcatggatttaacattagttaagatagagacatatgctctgaattgtaacatttttctgtgctgaattgctatttgtttccagcttagctttgttggatatgtttttatcttttgtaccttcttgtccttactaagaggtgtacaatcttgggccgcagttcctgtttcagctatagagctgtatttggatattaggagcacaattgaagaccatgtcaggggatttactgaacccacatcagacaaactgctaccagatctacttcctcaagatcagcatgtcttcaccctagttcttgatctgaatgaaactcttgtctactctgattggcaggtatattgtggcatcgtaccctgttctgttgtttatttcattatttgtgccaccttggaatccaaaaacatgatgtcataaactcttaatacataaaagacaaacatctggcactatatttacatatattttgttttagtaaatagtttagtattgtaatattgtaggcccattatccctgccacacaggaaagagattatgactagtggcagtttgaatggttgaatagtagggtgtagtttgtgttccatactaatgtaatatactgtaggctatgatagatgatcttaataatattaatatgtacaatttgtagtgcctgtgcagtttagcgtaacctgaaaaggtgttgcttactaggttacaatgtccttaatcaatatcttgtgctacatgtaacagttgtcctccactatattcttgtacaagtaacatgtggtttctgatgtttcagtgccaaggcgcataaatatggtgcttaattgtgtatacatcagctgaaactgtagtagttatgagttatacatgtggtccaggcttatgcaagtccacaacatgcttttgatattttttcacacattgtgatactcttttcaattgttcccatttttctttgtgtatgcaaataatgcgctaaccactgttcttaaggcgtcgcttaggtgtccaggcggtggtccaatgccttgtctcgccttaccgctttaaaaaccatggcgctaacgatgttcattcctgtctttatatccctttttttgcaaagcgtgagaggggatggagaacttttaagaggccaggagttgatgcgtttctggaacatatgtcaaaattatatgaagttgttgtgtattctgattagccacctatggttagttgaccttttcctttgcatttggactattatttaatgttctaacctgtatgaatattttgttggtgtgcagtatgttgaacctgtgtttgagaggctgaactcaaggggtaccatttcacacaggctatcaagacctgcaactaagtacgtggatggaaaacattaccgggatttgtcaaagttgaacagaaaccctgctcaagtgatctatctcagcgcccatgctcttgaatcttgcctgcagcatgaaaattgtgttgaaatcaaaccttttaaacttgaagataaaaatgatacccaactgctggatctcattccatttctcgagtatgttgccatggctagaccttctgacattaggacagtgctggcatcctatcaaggtcatgatgttgctgctaagtttattgagcgttcaaaggaacaccagcggcgcgtgcaggaacagagcaaacttgggcgcttatggcgacggtgatggatcctggaaggatagtggactttctgatttgtgaatcctagacgtcatgttttcgaaagagcgcatggaacctttttattcttgtccggagtcaaattgttggctgctgttcagggatatcttagttttggcagtttaggtttgggcctttttataaaatttaggcattctagtgagaacatcggttggattggatggtcaatgctgagacttttgagaccatgtgactcaaaggttgctatgatggagctgtcaaaacgtgcttcatgcggaagactgaaaagcgattgttcatgggtcatcgtagcatcttcggtcaatattttcttggattgtttggtttcgcaactactactctcagatttatggacttgaagggcttttgtatttttgtcgacatgtaagagcgcatcacataatactggatttacctgagaattcatgtg

SEQ ID NO: 31256 - DNA, 2366 bp, Zea mays
  Clone ID: UC-ZMFLB73149E12_FLI
tgctctcaaatccagacagttcttcgatttttttcagccttttctccttcttctaacggaacaggaaggagcgagcaagacgccgttgagaaaacacggggtggtattctgcagtaaaaaaaaaaaaaaaacactcgaggcgaaagtgtccaaagccagaggagagaaagagaagacttgtacttggagggcagctgggcaggtgaaaggaagaggaaagagggcgagtgcgacgggaggcgcaatgcggtggagatctcccgccgtgctgcggctgcagctgtggctgctcgccgtctccgcgtcgttggctgccctcggtgttctcgcggctgatcttagcaaagaaccatttactatccgtataagctgtggaagctttgacgatgtccggacggagcctacgaacacattgtggtacagagactttggttatactggaggcaggttcgctaatgccacccggccaagctttatcgttcctcctcttaaaacgcttcgatatttcccgctatctgatggccctgaaaattgctacaacatcaacaatgttcccaatggccactatcaagttagacttttctttgcgttactggacaaccctaatcttgacagtgagccgattttcgatgtttctgttgagggtactctgttcagctctttgcttctgggctggagcagcgacgatgagaagacatttgcagaagctttggtttttgtccaggactcaagcttatcagtttgcttccatagtacagggcatggtgatccatcgattctttctattgaagttctacaaatagatgacgatgcctataactttggtccaccacgggaaaaggggacagtgcttagagcagtcaaaaggctgaaatgtggctcaggaaagcctgcttttgatgaagatctaaatgggattcactggggtggggacagattctggttaggattgcaaactttatcatccagttctgatgatcaatcaatatcatccgagaatgttatagcagagacattgcttgcaccaaatttttaccctcaaggcatataccaatcagctatcgtgggcactgataggcaaccgagtttgtctttcgaaatggatgttaccccaaacaagaactattcagtatggcttcactttgcagagattgataatggggtaactgcagaagaacaaagagtatttgatgtactcatcaatggagacactgcttttaaagatattgatataattcgcatgacaggagagcgttttactgcacttgtcctgaataaaactgttgctgtcagtggaataacactaaaaatcatcttgcaacctgtgaaaggaacccgtgccattattaatgccattgaggtgtttgagataatcccagctgaaaagaagactttgcctcaggaagtgagtgcattgcgaacgttgaagggttcacttggtcttcctcttcgatttggctggaatggtgacccctgtgttcctcagcagcatccatggagtggagttgattgccagtttgacagcaccaaagggaactggatcattgatggattaggtcttgacaaccaaggtttaaaaggggtcatacctagtgacatatctaagttgcaacatctacaaaacataaacttgagtggcaatagcataaaggggaacattccaatctccctgggtaccatctctgtggtgcaagtactggatctgtcatacaatgagcttaatggatctattccagagagcctcggcgagctgacatcattacagatactgaacctgaatggcaatcgtctttctggtcgtgttccagccagtttgggaggaaggcctctgcacagagctagatttaacttcacggacaatgccggactatgtggaatacctgggttacgtgagtgtggccctcatctatccgtggctgcaaagatcggcatggctttcggcgtgcttttagctattctattcctagttgtattcgctgcgtgctggtggaagagacgccagaacattctccgtgctaaaagattagctgcagcaagggaagctccttatgcaaaatcaaggacccagttcacccgcgatgtgcaaatggccaagcatcaacggacacatgaaaatgctcggagcagcaacagtgaaggctcgccacatttgctttcctagctcggtgagaatactgcgacagtgacttggcttccatctattcttcagttcctcctttgtatgctcctctgcagtcttgaaagacgaagctgctgtacatactagctaggtcacgaatggtgtatatacttgtattttttttggtgatctagaactcagtccaggagagggatcagtctatcagatgagagaaattacccatttc

SEQ ID NO: 31257 - DNA, 1296 bp, Zea mays
  Clone ID: UC-ZMFLB73149F07_FLI
cgaaaagtctcctcacctcccggtcccggcctcccttcctctctctccccccctctcaaacatccccgcgccgatggatctccgcctcgcccactaggcctccggcgcgaccgagggtgggcagggggatggggctcctcgggcggaggacgttgctgcggctcctcgccctcgcttccgcggccgtcgccgtcgccgtcaccgtggaagcctacgagggcgacgctgatccgctctacagagcttgtgtggaaggatgccaaaagacaggctccctgaaggagacttctattaaacattgtatggtgccaaccgatggccaacctgttgacaagtcatggtacacgcatgagccactgtacttgcaatggaaggactggaactgcaagagtgaatgcagataccactgtatgatggaaagggagaatgaaagggcaaagcttggcctccagcctgttaagtatcatggaaaatggcctttgaagcgtgcctctgtgtttcaggaacctttatctgcagctctctctgcgcttactcttgttgtgcaatttaatgggtggctatcatttttcctcttgctttattataaacttcctctgcggccagaaactcacaagacatactatgaatacactggcttgtggcacatctatgggctccttgccatgaattcatggttctggagtgccatatatcacagttgtgacacaatttggacagaaaaactatatttttcatcagatgctgcctttctggggtattccctcattttggcgatactgcggactttaaatttaagagacgaagcatctagagttatggttgccgctcctattctagcatttgtgacaacccacattctgtacctcaacttctacgaacttgacaaaggcctgaacatgaaggtttgtactgtgataatcattgctcagtgtctcctatgggcactgtgggctgtcatgactcggcatccttcacggctgaagatcatatttgttgccatcggaggtgcggctgcggtacttctggaagcttctgacattcctccgcgatggggatatgtggatggccgtgctatatgccttgctgtggctatccccctttcgtacctttggtggagctttgccaaggaagatgcggagatgcgaacgtcagcaatcctgaagaaggcacgttaacaagtcgcctgtgtgataatttcatgcctgcgcccagccattgtaaagataaaagtttcacttgtaatcttaggtaactactaacttagcatgtgaattaccgtcttatttttgttcc

SEQ ID NO: 31258 - DNA, 1866 bp, Zea mays
  Clone ID: UC-ZMFLB73149F09_FLI
gtggtggtcgaaatataactgatgctgaattggaaagattacaacaagcgttgaggattctttctgatgctgaaaaacagataagactttcaagcgagcgttcgacatggttcactgctgctttactccagcttggttccggtcacaattcagaaataactcaatcaagaagcagcagtaagcaaagcgctaaggcaaccagcgaaaccatgatggaagcaatgagagaatcttctgcaagcaggagtacagctcatcatttatccacttttcctgattcaaagaaaatagtggatctgaaaacaaccagtgggcactccagtcctcatgcttcactgtcctccaggatgagacacaatgaaaacatgatttatgccgagcatatgtctgttgatagagcattattggattctgctcaaacaagtatttcttctgagcaaaagggtatgcatagtggaatctcagataaccttacccgaatttggatgaagtgcatagagaattgccactccaagacattgcggcaacttctctatgatcatgggaaattaacatctgtcaaagaatgtgaaggtaccattgttgcttttatagcatttgaggacaatgatataaagtttcgagcccaaagatttattagcagcatcagaaattcaatggaaactgtactgaaatgcaatgtggaagtcaggatttgtttgatgcaagaatttcttgctgggggactaaagcatgagacatacccagatgagacagctgaatctgatgtcttgagttgttcaacgaacagtgaacgtcgaaagggtgttctgaatctatcaggtgctggtggagtgcagccaaacaatgttcccatgatcatctctgaggaaacttcaggaatgcatagaacaagagggcaggatgtttctattgaacagttgaaggtatcagcttttgatgaacaaaggttagagagtgcatggctccaggctgctgaaaaacccatgcctggtatgttaaatcaaggtagacctgagagaaatcaaattcttccacaaaatggtggtcagcatcatggtaggtcctcaatggccaccgttgttccgtcaaggcatgttgacaaggatctatctaatgaactgaaagccttaaagatcagtgacagtcatggaccccataatggtcaagatgtacagatggagagtggttatgccatttcaccaagccttttgcatagaaataaccatttggcaaattgtgacaatgagagcgttgtttctgagtccggagcacccggttgccatgggctgttcccatgctggaaaactgaaaaaacgaaaaggagaaagggaaaagggcagacacggttgaggtcatcttaagttggcaattgacgacgataaaaggagcattgtggccctggattgtagaggaacatttgaagagatgcacgtgcctcacgaaactgccttacttcatttcttctagaggatttatgaagaccaattcgttattccatgcatttaatgctgccgctgagggttcagcattctctacgcgtggactcagcagagggtgataaaaagttgcagagatgttggacatgcggattttaacaagccattctgatccatctatgcttcttgtacagacatttggatgctgaggcgtatacgtgaagcggtcagcaaaattaggaaacattggttagcgagttaatgaggcgcaattatttttcagcatttttagtactgtgtttgacagcatttgaatttactttgcatttgttattgtaccaattcctttttttttgttagaacaaaggaagaccttgcgtcgataagctgtggttttatcaagtttgtacaaaaactggttagctcc

SEQ ID NO: 31259 - DNA, 1994 bp, Zea mays
  Clone ID: UC-ZMFLB73149G03_FLI
cgtgattctaaacttacaagattgcttaaagattcatttggaggtactgcaagaacatcattggttgtgacaattggtccatctccaagacatcgtggggaaactaccagtacaataatgtttggacaaagggcaatgaaagttgagaacatggtgaaattgaaggaagagtttgattacaagagcttatgtaggaaacttgatattgaattggataaattaattgcagaaaatgaaaggcaaaggaaacattttgacgatgaagttgagagaataagagctgaagctcaatgccgcattgctgaggctgaaagggaatgcaaaatcacattagagaatgagaaaatgaagtatcatgaagaatacttagactcaataagaatactggaggagaagtggaaagtacatcagcaatcacccaagaaacaaaataaagaggctgagtctacatccaatgatactggagaagtgcataatttactgcagaatgagaaaatgctacgtcaatcggctgaagatgaggccagtgacctcaagaatcaaatatcacactggaaaaagctggaggctacagctacagctgagataataaaactacagaaaatgctagatgctgaagctagccagaaagagaaacttgaagaagaaataggtgttttgagaagccagttattgcagatgagtatggaagccgatgagacaagaagtcttgataaaggagatgggccaggaaaaatatttcctggtttagattcattggtgtctcagactcgaggttcacaacccagagagcaggacaatggacagaagcaaccgattgccaaactctttgaacaagttgggttacaaaagatattgtcattgcttgaatctgaagaacctgatgtccgcgttcatgcagtgaaagttgtcgcaaatctggcagctgaagaggcaaatcaagaaaagattgtagaagcaggtggcctcacttccctgcttatgctacttaggagctctgaggatgagacaattcgtagagtagcagcaggagcaattgctaaccttgcaatgaatgaaacaaaccaagatcttatcatggctcaagggggtgtaaccttgttgtctatgacagcatctgatgcagaggatccacaaactcttagaatggtggccggagcaatagctaacctttgtggcaacgacaaactgcaaacacggttgcgggtagaaggtggaattaaagcgttgcttggaatggttaggtgtgggcaccctgatgtccttgctcaagttgcacgtggcattgcaaattttgcgaaatgtgaatctagagcagctactcaaggaaataagatggggaaatcactattaatcgatgatggagcgcttccctggattgtaaaaaatgctaacaacgaagctgccccaattaggcggcacatcgagcttgcactgtgtcatttggcacaacatgaagtaaattcaaaagacattatcaatgaaggtgccctatgggagcttgttcggatctcaagggactgttctcgagaagatataaggaatttggcataccggacattgacatccagccccactcttgaagcagagatgaggagattaggaataaaaatgtgataacagaacagagtgcagctggggctcacactatgaagttccatttctcgtgcacatacagaggtgtccgttgctatgggcgctggtaatcaagcacatcttcccttgatctacctgattttggcaggcatacacgggcaccgcactgactaatcagaagaggcaatggccttcgcaccaactttctcctcgagagttcatttttctttggtttgagggggcagttgaaaatctcgacagcactagcaattcgtttattttgtaaaataatgctagcatagcagatgttacctacccccaatgcagggtttgtaaattttttgctgtaaaaatatcaaggccaaaaggagtgctttcgcagtttgaagcataactgt

SEQ ID NO: 31260 - DNA, 1659 bp, Zea mays
  Clone ID: UC-ZMFLB73151C06_FLI
cagagacaggcgtcttcgtactcgcctatctccgcgactcaaagctttccccaattcccccccttctcccatttctcaccaccgccgccgctccccccgttcaacaacaccatgagggagtgcatctcgatccacatcggccaggctggtatccaggtcggaaacgcgtgctgggagctgtactgcctcgagcatggcattcaggctgatggccagatgcccggtgacaagaccattgggggaggtgatgatgctttcaacaccttcttcagtgagactggcgctgggaagcacgtcccccgtgctgtttttgttgaccttgagcccactgtcatcgatgaggtgaggactggcacctaccgccagctcttccatcctgagcagctcatcagtggcaaggaggatgcagccaacaacttcgctcgtggtcactacaccattggcaaggagattgttgacctgtgccttgaccgcatcaggaagcttgcagataattgcactggtctccagggcttcctcgtcttcaacgctgttggtggaggaacgggctctgggcttggttctctcctcctggagcgcctgtctgttgactatggcaagaagtccaagctcggtttcaccgtgtacccatccccccaggtgtccacatccgtggttgagccatacaacagtgtcctgtccacccactctctcctcgagcacactgatgttgctgtcctgctcgacaatgaggccatctatgacatctgccgccgctcccttgacattgagcgcccaacctacaccaacctcaacaggcttgtctcccaggtcatctcatccctgacggcttccctgaggttcgatggtgctctgaacgttgatgtgaacgagttccagaccaacctggtgccctacccgaggatccacttcatgctttcgtcctacgctccagtcatttctgctgagaaggcctaccacgagcagctgtccgtggctgaaatcaccaacagcgccttcgagccatcctccatgatggccaagtgcgacccccgccatggcaagtacatggcatgctgcctcatgtaccgtggtgatgtggttcccaaggacgtgaacgctgctgtggccacaatcaagaccaagcgcaccatccagttcgtggactggtgcccgactggcttcaagtgcggaatcaactaccagcctcccagcgtcgtcccaggcggtgatctggccaaggtgcagcgtgccgtgtgtatgatctccaactccaccagtgttgtggaggtcttctcccgcattgaccacaagttcgacctcatgtacgccaagcgcgccttcgtgcactggtacgtcggtgagggtatggaggagggcgagttctccgaggctcgtgaggatctggcggcgcttgagaaggactacgaggaggtcggtgctgagtttgacgagggtgaggacggcgacgagggtgacgagtactagacgctctactggcgcggcgtcgtcgggcttgtgtgccactgctatcctgtgatctgccctgagtggctcctatcgtgttatgtttctgtcggttcttatctatctgtcgttgtgtggtttacaacttacgttgtaagactttattcccccgctttgctactgggttattaagtttggcgttattgttttctt

SEQ ID NO: 31261 - DNA, 700 bp, Zea mays
  Clone ID: UC-ZMFLB73151C08_FLI
gtgggactggctgcgcggcgcgctcgccaccgtcgaccgagactacggcgtcctcaaccgcgtgttccaccacatcacggacacgcacgtcgcgcaccacctcttctccaccatgccgcactaccacgccgtggaggccaccagggcgatcaggcccgtcctcggcgagtactaccagttcgacccgacccctgtcgccaaggccacctggcgcgaggccagggagtgcatctacgtcgagcctgagaaccgcaaccgcaagggcgtcttctggtacaacagcaagttctagccgccgcttgctttttccctaggaatgggaggagaaatcaggatgagaagatggtaatgtctgcatctacctgtctaatggttagtcaccagtctttagacaggaagagagcatttgggcttcagaaaaggaggcttactgcactactgcagtgccatcgctagatttaaggcaaattcagtgtgtctgtgcccatggctgtgagctttgggtactctcaagtagtcaagttctcttgtttttgtttttagtcgtcgctgttgtaggcttgccggcggcggtcgttgcgtggccgcgccttgtcgtgtgcgtcttgccatctcttcgtgctcccttcgtgttgttgtaaaacactagtctggtgtctttggcggaataacagatcgtcgaacgacaacgttttcgtgc

SEQ ID NO: 31262 - DNA, 1407 bp, Zea mays
  Clone ID: UC-ZMFLB73151C11_FLI
aaaaattcaaggatgttgtcaactggctaaggcaaaatcaagcaggttcaatagttgtttcatccccaagctcactgaaggatgataagtccaatctgccagcagcagatgatagcaagctcttagtacagccaagttcagataacaaacagaaggctccaattatggcttctagttcttcatcttttcagaactcaagcttaccgaaccttttttcatcgccttctcagcaaaaaacaccagattacagtggtatgtttgctgacaagaagaacacgtccagtgatagcagtaaaccagctttccagtttggtggaaataatgtcatatttggtggcaagaaggatgcacctgttgacagcagtaaacctttccagtttggtccgaataatggcatatttggtgacaagaaggatactcccagtgacagcagcaaacctttccattttggtgcaaacaagggcatatttggcgacaagaagacgacaagtggtgacagcagtaatccttttcagtttggtgcaaataatggttttccaacatccaatgcaccatctattttttcttcagttgcccaaagttttaacccacagagtccacctctgttttcaatgaatcaacaatcagtcctcccaggaaaccaaaatacttctgaagcttcagctgacgcagatgaagatgctgaacctgagaagccaagcagcccttctgtaaagaaggcagaagagaagggggtagttgtcgttcatgaaaccaaatgcaaggtgtatgtcaagcatgatgatgccactaagggttggaaagacattggtgttggtcagctctctatcagaagtaaagaaggcacagagaaagcttccaaagaatccactcctaccattgttataagaaacgatgttggtaaaatcctcctgaatgctctgatctacaaggggataaaaatgaaccttcagaagaatacggttgcttcgatatttcatacttcagatgcacaatcaagtgaatcagctggtgacacagttgtagctcgaacatacctgttccgattgaaaaatgtagaggaggctacaaaactatcgacagcaatcaaggagaatgcgccctcagactagttcttacggcatggattatcatctcgaatctccgcttttggcacgagctgtaagatctgaaggggacaccaccgatggccactgcggcaggctaaaagatgccttgcagagtttctttatttttttttgttctcctagctgcatcaagatatcttgcttgtaacttgtaaggctgactggctggttatgtattagtactttcatgtaccatcttttgcattgacaagattattgagcatgcttgcagcccatcatgtcaccgcaggcagcaaagcaagtggcaatggttcaagtc

SEQ ID NO: 31263 - DNA, 911 bp, Zea mays
  Clone ID: UC-ZMFLB73174G09_FLI
ctctcggccccgtgcccagcgctccgaaaccctagcgccgccgcgggtgccaggccgcgagcgtcgccatgggcatcgtgtttacgcggctcttctcgtcggtcttcggtaaccgcgaggctcgcatcctcgtcctcggcctggacaatgctggcaagaccaccatactctatagactgcaaatgggagaggtcgtctccacgatcccgacaattggattcaacgttgagacggtgcagtacaacaacatcaagttccaagtatgggatcttggtggtcaaacaagcatcaggccatactggcggtgctactttccaaacacccaggctatcatatatgttgttgattcaagcgatacagataggcttgtaacagcaaaagaagaattccatgccatccttgaggaggatgaacttaaaggtgcagttgtccttgtgtatgcaaataagcaggatcttccaggtgcactcgatgatgctgccattacagagtcattagaactacacaaaattaagagccgccaatgggcgattttcaaaacatctgcaataaagggagaggggctcttcgaaggtttggactggctcagtaacacgctcaaatctggaagcagctaaggagcctccgcctcgtcatgaatcatttgctggatggtaaagaatagccgatgcttgcaagtcagcgcgcaaatcccattctctttgttttaactccagaagttctacaccgccatcaattatctgtaaagtgcgtgttaaattttttggatactacattagatgtacccccaggttgagatcaagaataggtctgtggaaaatgacgagcaaactgtgctactgtctttacccgtaaatctcatggatcatgacaagtttttttttgtaccccaatatgattaaacttactcc

SEQ ID NO: 31264 - DNA, 1329 bp, Zea mays
  Clone ID: UC-ZMFLB73175A10_FLI
tagggagcatcgccgtgctgtttttgatagtggtaatgaacaaaacactgctgcatgtcctttggggattcatcaaattggccgatgcacctgtaattctttctttattgctgaagaatctagcgcccgagcaagtatatcaagaattgtcatgttaactgaggcgctatttgaggtatcgtttccttcgtcttcatttgattatcatcagcattaacattctacgtgattatgacacataattggcaacaacagagaaacctttttaggattgaactccagttccaggctttagtcttataatgctataatctactctggccagtttgaactggtgttactcatctgtgctgtagttttgaagtttcatagttaaaaaaacatatattcatataggaataacatgtcagaacaacaaataaatagtacacccaaaacttagatggttttatgacaattgaaaattttgtgaggccaatgcacatcaataaagtttgcaggcaatcatgggatggttcaggcatgtttgaagcacagtagatagaacgtttttaaaagtaaagttgtactttagttctgaaatttcaaaggaaattgttgcagtgtttggactatgaactccattgctactgtcacattttcagtacattactagttattactctaggtatgtgataatggcctacacgattcttttcaggtgttggatgaaattcaccgtcaacctgcatcactttcactttccatggtctctgttcaggctcctgaatctgtagttgattcgttgccatgtaagagctacaaaaagcttgagacaccccaatgcagtgatgatatggaacagtgccatatctgcctaaccgaatatgaggacggagaccagataagaacccttccgtgcaagcacgagttccacctgcaatgcgttgacaagtggctgaaagaaatacacagggtgtgccctctgtgccgtggagacgtctgcgaagtcgcctcgtgaagaccttggcgctgccatccttccgatgtggcgccggtggatagggcaccaccgccaggcgccagctgttccgtggttgaagctggttcggtcaggcaatggtgatccaacttggacagttgacaccgcaagagcacgtcaactttgactgtctccctgccgaagagaatggccaaaccaaccctgcgaccgatgagtcgctgttcctgtcatcaacttttaagataccgagactttgtatacagtagcttttgtagcctcccgcctcgtgtatgacagcctgtacatatttgtaaattctggaatcaaatgtcacaatcccctgttct

SEQ ID NO: 31265 - DNA, 1777 bp, Zea mays
  Clone ID: UC-ZMFLB73175B05_FLI
gacgcctccttccgtgcccgtccgtcctctataagggcgccgccgaggagagagaacgatgacttcagctctccggcggaaggcggcgcagatggcttccgcggcgacacagtgcttcagctactcctcgttgccggccacgtgggctctgcggcagcggggcggcggtgccagcgtgctccggctctcttcccggcggaccttctcggtctccgcggcggccgggttcgacaaccagaaccgcgagtatgtgatcgtcgggggagggaacgctgcgggttacgccgccaggacgttcgtcgagcatggcatggctgacggccgcctttgcatcgtctccaaggagccagttccaccatacgagcggccagccttgaccaaaggctatctttttcctccggacaagaaaccggctcgcctacctggtttccatacatgcgttggatctggtggacagcgacagactgctgaatggtacaaggagaatggtatagaggtgctgtatgaggatccagttgtagcatttgatggcaaaacgcaaaccttaaagacttcatcggggaaagttctgaaatacggctcacttattatttctactggatgtgaagcatcgagattacctgagaaaattggagggaaattacctggagttcactacatacgggatgttgctgatgctgatgctctagtatcctcattgggaagtgcaaagaaggtggtggttattggtgggggctatattggcatggaggtagctgcagcagcttgtggctggaatcttgacacaactattatattcccagaggaccacattatgccaagattatttacaccctcgcttgctaagaagtatgaggaactgtatcagcaaaatggtgtcaaattcataaagggagctcttatcgaaaaacttggagctggctctgatggaagggtgtcttctgcagtacttaaggatggatctgtagttgaagctgatacagtaattgttggtataggagcaaaaccagttgtcagcccgtttgaagctgttggagttaaccctaaagttggtggaatagaggttgattccttgttcagaactagtgtacctggcatctttgcaattggagatgtagcagcgttccccctgaagatgtacaatagaattgctcgagtggaacatgtggatcatgctcggaagtctgcgcaccactgtgtagagacgctcctaacatcccagacaaaagcgtatgactaccttccatacttctactcgagggtttttgagtacgagggaagttcgaggaaagtctggtggcagttttatggcgacaatgtcggcgaagcagtcgaagtagggaactttgatccaaaggttgcgactttctggatcgactctgatagccggctgaagggtgttttcctcgagagtggaacctcagaggaattctcgcttcttccgcagctcgccaaatctcagcctgttgttgacaagtcaaagctccaggccgcgacttctgttgaagatgcattagagattgcaagaagctcactccggtccagtgccatggtttagctctcagaatctagtactttcttgaacccgaggctgtgcgctgctcgagcggttcatagcgtcgagaccacgtcagcaataacgcacaattacatagaatctattcccactggggttgtaacattcttcagtgcacctgcgtcggctatttccagcttgaaataaacctggttgccctttgaggggttgatgaggatgatagattgaagcctttatgct

SEQ ID NO: 31266 - DNA, 1557 bp, Zea mays
  Clone ID: UC-ZMFLB73177C01_FLI
ggatctgagacgagacgagttaccatctcatcccaactccggaacgaacaagttaccatctcatcccaactccgcctcgaccggatctcgtcggactcggatccgcccgaccaccccgcgccgccgcagatcaaagaagatggcagctgtcgacacattcctcttcacctcggagtctgtgaacgagggacaccctgacaagctctgtgaccaggtctcagatgccgttcttgacgcttgccttgctgaggaccctgacagcaaggttgcttgtgagacctgcaccaagaccaacatggtcatggtctttggtgagatcaccaccaaggccaatgttgactacgagaagattgtcagggagacctgccgcaacattggttttgtgtcaaacgatgttgggcttgacgccgaccactgcaaggtgctcgtgaacattgagcagcagtcccctgatattgctcagggtgtgcatggccacttcaccaagcgccccgaggagattggagctggtgaccagggacacatgttcgggtatgcgaccgatgagacccctgagttgatgcccctcagccatgtccttgccaccaagctaggtgctcgtctcaccgaggtccgcaagaacggaacctgcccctggctcaggcctgatgggaagacccaggtgacagtcgagtaccgcaatgagggtggtgccatggtccccatccgtgtccacaccgtcctcatctccacccagcacgacgagacagtgaccaatgatgagatcgctgctgacctgaaggagcatgtcatcaagcctgtcatccctgagcagtaccttgacgagaagaccatcttccaccttaacccatctggccgctttgtcattggtggacctcacggcgatgctggcctcactggccgcaagatcatcattgacacctacggtggctggggagcccatggtggtggcgctttctccggcaaggacccaaccaaggttgaccgcagcggagcctatgtcgcaaggcaggctgccaagagcatcgtcgccagcggccttgctcgccgcgccatcgtccaggtgtcttacgccatcggcgtgcccgagcctctctccgtgttcgtcgacacgtacggcaccggcgcgatccccgacaaggagatcctcaagattgtcaaggagaacttcgatttcaggcctggcatgatcatcatcaaccttgacctcaagaaaggcggcaacgggcgctacctcaagacggcggcctacggccactttggaagggacgaccctgacttcacctgggaggtggtgaagccactcaagtcggagaaaccttctgcctaaggcggcctttttttcagtaagaagcttttggtggtctgctgtgcttaatcatgcttttatatggcttctacatgttgtggttctttcttgatctgcaccgcgcttatcgtttgtgttgtactgccctaataagtggtgcttatgaggactgtttctggttttgctgcttatgttgtaatgctttgaaacaatgaaagaagctacaggccacagctattttgagaagt

SEQ ID NO: 31267 - DNA, 2233 bp, Zea mays
  Clone ID: UC-ZMFLB73180C08_FLI
ggatgactgactgaccacactagcgcagcgcgcacaggagcaaaggggggcatcctctatcgcgcgcgcgccatggccaccaggccgggccctttgactgaatggccatggcaaaggcttggaaacttcaagtacttggtgatggctcccgtggcggtccacggcgcgcggcgggtggtcgcgcggggctggggcgacatcgacctggccttcgcgctcatcctgccgtcgctgctgctgcggatggtgcacaaccagatctggatcagcgccgcgcgctaccagacggcgcgcagcaagcaccgcatcgtcgaccgcggcatcgagttcgaccaggtcgaccgggagcgcggctgggacgaccagatcatcctcaacggcctgctcttctacgttggctacctggcgatccccagcgcgaggcgcatgccggcgtggaggtcggacggcgccgtggcgatggcgctgctccacgccgggcccgtggagttcctctactactggttccaccgggcgctgcaccaccacttcctctactcgcgctaccactcgcaccaccactcctccatcgtcaccgagcccatcacatccgtgatccatcccttcgctgagcacatggtctactacgtcctgttcgccatccccatgctttcgactctctacatggggaacgcctccgtcctgggcatcgtgctctacatcgcctacatcgacttcatgaacaacatggggcactgcaacttcgagctggtgcccaggtggatgttccagctcttccctcccctcaagtacctcatgtacacgccgtcgttccattctctgcaccacacgcagttccgcacgaactactcgctgttcatgccgctctacgactacgtatacagcaccatggacaagtcgtctgaccagctgtacgagacctcgctcaggggagcggaggagacgcctggcctcgtccacctcacgcacatgaccgacctgcagtcggtctaccacctgcggatcggcttcgcctccgtggcgtccagaccgtctgccaccggcgccatgtggtggtacatgtgggtgctgtggcccgtggcgtggctgtccatggcgctcgcgtgggcctacgggtcctccgcgttcgtcgtcgagaggatcaaactcgggaagctgaggatgcaaacgtgggcagtgccaagatacaacttccagtacggcctgagctgggagagagaatcgatcaacggcctaatcgaaagggcgatactagatgctgatgcgagaggtgtcaaggtgctcagcctaggactgttgaaccaggcgaaacagctgaacggcggcggcgagctgttcaggcacaggtatcccaagctcagagttcgcctcgtcgacggaagtggcctagcgactgctgtggtgctcaggagcattcctcgtgacgcgaagcaggttctcctccacgcaggcccttctaaggtagcgtgcgccacggctgctgcgttgtgcgagaggggcgtccaggtcgtcatgaacccaaacaaggaatatgatatgctcaagtcacagattgcagatagcaaagcaagctatttggaacgacgctccgacaaccaccacacgcctcaggtttggctagtagacagcatcgacgacgaggaacagaagatggcaccgaaaggagccgtattcgtcccaatctcacagttccccatcaagaaaatccgcaaggattgcacctacctgagcactccagcaatgaagatccctgaaaccatgcaaaatatccatgcctgcgagaactggctgccaagacgggtgatgagcgcctggcgcatcggcgggatacttcacgccctggaagggtggaccgtgcacgagtgtggggacgccatggtgcatgctgacaaagcatggtcagctgctattaggcacggattcgttcctttgacgaaagcctgaaagcctgcgaagcccggggttctgtggctggggcctgcgatagatatatgtacgcagatctggacgccattcgacgatggctggaaaactacgtttcagcaatcggtagcacaaattctcccccgctagagaaggcgacttatatggtcggcgtgatgaatgacgaccttgattccaacagcatatagtaactacagttatgttgtggcattgtatgatgcaagtgcgagaaactgctttgtggctgtctgggtgacatatacaattataataaaatgtcgatttggct

SEQ ID NO: 31268 - DNA, 1743 bp, Zea mays
  Clone ID: UC-ZMFLB73194H03_FLI
ctgcagacaccaccgctcgtttttctctccgggacaggagaaaaggggagagagaggtgaggcgcggtgtccgcccgatctgctctgccccgacgcagctgttacgacctcctcagtctcagtcaggagcaagatgggtgccggcggcaggatgaccgagaaggagcgggagaagcaggagcagctcgcccgagctaccggtggcgccgcgatgcagcggtcgccggtggagaagcctccgttcactctgggtcagatcaagaaggccatcccgccacactgcttcgagcgctcggtgctcaagtccttctcgtacgtggtccacgacctggtgatcgccgcggcgctcctctacttcgcgctggccatcataccggcgctcccaagcccgctccgctacgccgcctggccgctgtactggatcgcgcaggggtgcgtgtgcaccggcgtgtgggtcatcgcgcacgagtgcggccaccacgccttctcggactactcgctcctggacgacgtggtcggcctggtgctgcactcgtcgctcatggtgccctacttctcgtggaagtacagccaccggcgccaccactccaacacggggtccctggagcgcgacgaggtgttcgtgcccaagaagaaggaggcgctgccgtggtacaccccgtacgtgtacaacaacccggtcggccgggtggtgcacatcgtggtgcagctcaccctcgggtggccgctgtacctggcgaccaacgcgtcggggcggccgtacccgcgcttcgcctgccacttcgacccctacggccccatctacaacgaccgggagcgcgcccagatcttcgtctcggacgccggcgtcgtggccgtggcgttcgggctgtacaagctggcggcggcgttcggggtctggtgggtggtgcgcgtgtacgccgtgccgctgctgatcgtgaacgcgtggctggtgctcatcacctacctgcagcacacccacccgtcgctcccccactacgactcgagcgagtgggactggctgcgcggcgcgctggccaccatggaccgcgactacggcatcctcaaccgcgtgttccacaacatcacggacacgcacgtcgcgcaccacctcttctccaccatgccgcactaccacgccatggaggccaccaaggcgatcaggcccatcctcggggactactaccacttcgacccgacccctgttgccaaggcgacctggcgcgaggccagggagtgcatctacgtcgagcccgaggaccgcaagggcgtcttctggtacaacaagaagttctagccgccgccgctcgcagagctgagaggacgctaccataggaatgggagcaggaaccaggaggaggagacggtactcgccccaaagtctccgtcaacctatctaatcgttagtcgtcagtcttttagacgggaagagagatcatttgggcacagagacgaaggcttactgcagtgccatcgctagagctgccatcaagtacaagtaggcaaattcgtcaacttagtgtgtcccatgttgtttttcttagtcgtccgctgctgtaggctttccggcggcggtcgtttgtgtggttggcatccgtggccatgcctgtgcgtgcgtggccgcgcttgtcgtgtgcgtctgtcgtcgcgttggcgtcgtctcttcgtgctccccgtgtgttgttgtaaaacaagaagatgttttctggtgtctttggcggaataacagatcgtccgaacgac

SEQ ID NO: 31269 - DNA, 261 bp, Zea mays
  Clone ID: UC-ZMFLB73194H11_FLI
ctggactggctgtccagcaacattgcgagcaaggcttgaggcctaccttgaatgtcaaccgcgaactgactaggagctccggatgtatcatggaaactcaggacagaatcgcagttgcaacctgttagatgtcttctaccggcactatatatattttttgtttgatgtgtaatgatgttactgttcaacgtttattaccctactatactgttggatgttctttggacctgtttcatttcgcacaaggattggacttccaat

SEQ ID NO: 31270 - DNA, 676 bp, Zea mays
  Clone ID: UC-ZMFLB73195A04_FLI
gtgcatttgtgtgtttgcgtctactgtgcggctacaggcaaggaaacaggatctgtcacggaaggcgattcccatttctcagtgatgtcgatgtcctgtactcctgtatatttggattcaacaatatgccattagtgcattggtgccacaacactggatgagtataggaagcatatagagaaagatcctgccttggaaagaaggtttcaaccagttaaggttccagagcctactatggatgaaacaatacagatcttaagaggacttcgtgagagatatgaacttcatcacaaactgagatacacagatgatgctttaattgctgctgcacagctgtcttatcagtatatcagcgatcgttttctgcctgacaaagccattgacttgattgatgaagctggatctcgtgttaggctgaggcatgcgcagctccctgatgaagccaaagagctggacaaagagctgcggcagataagcaagcagaaaaatgaggctgtacgtggccaagattttgagaaggtatactgttgtttggcacagcggtgacaaagccgatccgctcccacctctctagcaacgtcgatatggttaataccaagcattatgttgtttccttttgagataaatattttgttactgattttaccttttgtctcctcttcttgttttttgttct

SEQ ID NO: 31271 - DNA, 1710 bp, Zea mays
  Clone ID: UC-ZMFLB73197B06_FLI
caacaaggaaccccaatcgagtgttcaactgggccatgacgacagggctgctttacaggaagaattgtcaatgttacatggcaaagttgcatttttggaggaggaactttctaaatcgcgtcaagacgcaacaaattaccatcaactgagtgatagggtagcaaaggaattgaaggatctcaaagatcatgaccaacaaatgagatctaagcaaatgaaggtgctgtctgatctgctgatagctgtgtcgaaagcagagaggcaagaagcgcggatgaggataaggcaggaatctttcagacttgggaatgttggtgttatgagagctggaactatcatatctgaaatttgggaagacggacaggcaataaaagatcttaattctcacctgaaatctttactggaaactaaggagactattgaaaggcatcgtaaatcacttaagaaaagacaatctgacaagggtgatggcagtgacgctgagactagcatgtccgaggaggacattgtcttacaggacgaaatatgtaaatctcgtctaaccagtatcaaacgggaggaagaacagtatatgagagagagagatcggtatgagttggaaaaggggaggcttatacgagagatgaagcgtctcagagatgaagatggctcacgctttaacaacttccaaattcttcaccatcgttatgctctgttaaatcttcttggaaagggagggtttagtgaggtttacaaggcttttgatttggtggagtacaagtatgtggcatgcaagcttcatggattgaacgctcaatggagtgaggagaaaaaacagagctacatacgtcatgcgattcgtgaatataacattcacaaaactttggtgcatccaaacattgtcaggctatgggatatatttgagattgatcacaatacattctgcaccgtcctagaatattgcagtggcaaggatcttgatgcagtccttaaagccacaccaattcttccagaaaaagaagcaagaatcataattgttcaaatatttcagggcctggtttatctaaacaagaggggccaaaagatcattcactacgatctaaaacctggcaatgttctctttgatgaggttggtgttgcaaaagttacagactttggcctcagcaagattgtggaggatgatgttgggtctcagggaatggaactcacttctcagggagctggaacctattggtatcttcctccagaatgctttgaccttagcaaaacaccatttatttcatctaaggtggatgtttggtcagctggtgtaatgttttaccaaatgctttatggaaggcgtccttttggtcatgatcagactcaggagagaatacttcgggaagatacaattatcaatgcacgaagagtggagttcccctcaaagccagctgtatcgaatgaggcgaaggatctgatacgccggtgcttgacatacaaccaatcagagaggccagatgtactaaccataactcaagatcattatctctcgtatgcaaagaagtagccactaccccggagaacattttggcgatggtatctgttcaggcattgagattatggatggggatggataatctcgtggaagagctaagtattaaacaagctcaagaagaccacaaagggtgtataattgtaaattttagtctgccctattacggcaatgacctgaaatccagaaggcatcagttc

SEQ ID NO: 31272 - DNA, 1529 bp, Zea mays
  Clone ID: UC-ZMFLB73200D03_FLI
gtcctactcctccacccagctcgccgcttcaggaatccggagagctcgcgtcgcgcgtgcgtgggcgtgggtgcgtgcggcggcgaagcaccagcaccaccctctcgcgtcgcgcgcgcgcgcgcgtctcgatggccgacggcgagccttccctcacgcgctggaccttcgaggatttcgtggtccactacgaggcgcgcttcggcctccggcgaggccgacggcgacgacgcacccccgccgcgcggatccgatcatggggccagccgccccgccactgcccgcgccaacggcggcgcggacctcgccgtcttcgagcagttcgagcggatggagaggaaggtggagataagcaatggagcaatagaggatggtccactgcagaaatctctacttccttcatttgaatctgcagaaatgcgcaacttagctgagacattgttaagggatataattcgtggaagtccagatgttaaatgggaaagcataaaaggtctggagaatgcaaagcgtcttctcaaagaagcagttgtaatgccaattaaatatcccaaatacttcacaggtctattatcaccttggaaaggcatattactgtttggtccacctggaacaggaaagacaatgctagctaaagctgtggctactgagtgcaaaacaacttttttcaatatttctgcctcgtcgattgtaagcaagtggcgcggtgactcggagaaactagtgaaagtgttattcgaacttgcaaggcatcatgcaccatctactattttccttgatgagattgatgctatcattagtcaacgtggtgaagctcgtagtgaacatgaagctagccggcgattgaaaactgagctattaatacagatggatgggttgactaagacagatgagcttgtttttgttctagcagcaacaaatttaccatgggaattggatgcagcaatgctgcgtcggctggagaagcgtattcttgttccattgccagagccggatgctagacatgctatgtttgaagagctcctgccatatacacctggcacaatggagattccctatgatgttcttgtggagaaaactgaagggtattctggctctgatattcgcctggtatgcaaggaagcagcaatgcagcccctaagacgggtaatggcagttcttgaaggcaggaaagaagaggtccctgagggtgagttgcctgaagttggcccagtaactacagaagatattgaacttgctttgaggaatacaagaccgtctgcacatcttcatgcacatagatacgaaaagttcaaccaagattatggcagtcatgtacatggctaaaggggagaagcttgttgtagggtttaatttgtatgctcatgcgtgggccaataggtgactactgaattcatcgacatgctgaggtatccttgtaaacactatgcttatccttgtatgctgtacactatcattcatttgatgagcaataagctgtttggtaactcagtctcacctggataaggagaaactacgattttccctgc

SEQ ID NO: 31273 - DNA, 1640 bp, Zea mays
  Clone ID: UC-ZMFLB73149G09_FLI
cgaattttccttctccccgtctcctcgccgtcgctccttcggcccttcctctctcccatctcggctagggttaggtcgtctcgccaagtcgccatgatgcagcagcccccgccgcagcagccgcagccgggcatggcgccgcctccgcctccgcaggctgctggcgggcagccaccgcagtggggtgggatcccgccgccgatggcgcagcagtacggcgcaccgcctccgcagcagcctccggcgatgtggggccagcctccgccgcaggcgcactacgggcaggcaccaacccctcagcagtactacgccgcgccgccggtgccggtgcaggcgccagccgcccccgctgcggcggacgaggtcaggacgctctggatcggggacctgcaatactggatggacgagaactacgtcttcgggtgcttttcgaacactggggaggttcaaaatgtgaagctcatccgtgacaagaattcagggcagcttcagggttatggttttgttgagtttacaagccgtgcagctgcagaacgagttcttcagacatacaatggacaaatgatgccaaatgttgacttgacatttcggctgaattgggccagtgctggtgaaaagcgcgatgatactcctgaatatactatttttgttggggatttggctgcagatgttacagattacttgttacaagagacattcagggttcattatccctctgtcaagggtgcaaaagttgtgactgataaattgacaatgcgcacaaagggttatggatttgtgaaatttggtgatcctacagagcaagctcgtgcaatgactgaaatgaatggaatgccttgttcttccaggcctatgcgtattggtcctgcagcaagtaggaaaaatacaggaggtgttgttcaagagagagatatttgttggtgggcttgaccccaatgtcactgaagataccctaaaacaagttttttctccttacggtgaagtcgtccatgttaagatccctgttgggaagagatgtggttttgttcagttcgttaccagaccttctgctgaacaagcgctgctaatgctgcaaggggccttgattggtgcacagaatgttcgactttcatggggtagaagcctgtcgaacaagcaggctcagcctcagcaggaatccaatcaatggggtgcggctgctggtgctggtggctactatgggggctatggacaaggttatgaggcttatggcagtgggtatgcacaaccccaggatcctaacatgtatggttatggcgcttatggcggttatcccaattaccaacagcaaccagctgcacagcagcaacagcaacaacagtgatgcctgtttgctcgggtaggtcattgggttgtcgcgacggaattaattaaatattatttcaggacactctcatattgcattcttgtcaattgaggtggttttgaaaggctcctgattttgatggccccatggcacggtttcatctatttattagtatatgacatatatgcgctgtgaacaagtggcgctctactgtgattgctgtgttgagacatgctttcttagtttctttccatgtttctcggatctgttgtgttacctttattactgtgtatttgcatatctactgtgatgctat

SEQ ID NO: 31274 - DNA, 888 bp, Zea mays
  Clone ID: UC-ZMFLB73149H09_FLI
cagcagcatccatggagtggagttgattgccagtttgacagcaccaaagggaactggatcattgatggattaggtcttgacaaccaaggtttaaaaggggtcatacctagtgacatatctaagttgcaacatctacaaaacataaacttgagtggcaatagcataaaggggaacattccaatctccctgggtaccatctctgtggtgcaagtactggatctgtcatacaatgagcttaatggatctattccagagagcctcggcgagctgacatcattacagatactgaacctgaatggcaatcgtctttctggtcgtgttccagccagtttgggaggaaggcctctgcacagagctagatttaacttcacggacaatgccggactatgtggaatacctgggttacgtgagtgtggccctcatctatccgtggctgcaaagatcggcatggctttcggcgtgcttttagctattctattcctagttgtattcgctgcgtgctggtggaagagacgccagaacattctccgtgctaaaagattagctgcagcaagggaagctccttatgcaaaatcaaggacccagttcacccgcgatgtgcaaatggccaagcatcaacggacacatgaaaatgctcggagcagcaacagtgaaggctcgccacatttgctttcctagctcggtgagaatactgcgacagtgacttggcttccatctattcttcagttcctcctttgtatgctcctctgcagtcttgaaagacgaagctgctgtacatactagctaggtcacgaatggtgtatatacttgtattttttttggtgatctagaactcagtccaggagagggatcagtctatcagatgagagaaattacccatttcatcct

SEQ ID NO: 31275 - DNA, 1295 bp, Zea mays
  Clone ID: UC-ZMFLB73149H11_FLI
tgaatatttctccttttccttttaggataacacaatccgcacacgtcgacatgagcttgttagcacccttctgtcttcataccgtaatagtacctgtgcatcactaccaaaacggatcctaaaatggactggaacctgtataagaatttcgaagatggcagatgaacttctgtggcgtatccaggtatgaagatgcagtcaggattctaaagacactacttagcacagttgcttgtgatagacggcgaggatattgggcattgaggctatccattgatttggagcatatgggtcgttcaaatgagagcctatccacagctgaaggaggggcaattgatccatgggtccatgctggttcaaagttcgcgctgcaaaggagagttctgcgtttaagcaaacctccacgacgctggaaagttcccagttacgctgattatgttaagagaaatataagagaggtaagcattgaaggaaggccattgaattgcgagacaggagcaaagaatgtattttacggttacgatggggaactttgtggggtagaacagttggctttacaatattatgctgatgaaggtggtggttggcaaggtacccattcggaaggtagcatttggatgactatctttggccttctaatgtgggatgtgatgttttcagacatacatgatgttttccagtctaaattccagacagatgatttttataaatctagagagaacattgcagaatctcagttgaagaggatacgggacggaatggccgaagagatgctaatcagctcatgggagctacatcaggggacatcctgccagggtgttaactgggcccgttattcgttaactgatctacgggctgttgttgcatgcgttggtggccaccgtttggcatcgctcctccgccatctagccgttgattacaggagctggtcgagtggaatgcccgatctgctgctatggcgtttccttgatgaaagaggtggaggtgaggctaaacttgtggaggtcaaaggacccagggaccagctgtcagagcaacagcgtgcatggattttggatttgacgtggaagtaagtttgcaaagtaagcccggtcaccaagcggagatagctcgcttgctaaatttagtctgattattacgatgcaaaatgtatttggttgattagatagaagggcaaatctgtaacgcataagcaatggcattgttgtcgtgttgcactgaagtaacagtcaagctctacttgacatgctataactttgagagggaaggatgcatttagttgtctgaatcggcac

SEQ ID NO: 31276 - DNA, 1373 bp, Zea mays
  Clone ID: UC-ZMFLB73150B03_FLI
atcggtgaccgctcttgacttgttagctccccgctcccacggtagctaaagctagctaggtgggtggtagcaccaccatggcctcgcccaagcattctcatcgccatcatcgtgcggcggcgacgaagcatcgtcggccgctggcgctgcggcgtgcgatgctgcattcgtgcgtgtgcttcctggtgggtctcgtgaccggcctggccccttccgactggacggacgccgcctcgcgcgcggccgtgcacgcgaacggcgcggccacggcgcaggtgttccgcgcgctgcacgccatgaaccagacggcggcggcgggggcactgggccagctgctggcgctgcagcactaccagcagcagccagtggtggagaaggagaaggagaaggagaagcctctggatctggtggtggtggtgacgactacgacgacgtcgacggggctgtcggagcgcgagcggcggtcggcgggtctgacgcgcacggcgcacgcgctgcgtctggtgtcccctcccctggtgtggctggtggtggaggcggcccgggaggctggtcccacggcacagctgctgcggcgcacgggggtggtgtaccggcacctgacctacgcggagaacttcacatcggaggcctgggaggaggagcggcaccaccagaggaaccaggcgctagcgcacatcgagcggcaccgcctgcgcggcgtcgtcctcttcgcggggctcgccgacgtgtacgacggccgcctcctggagcagctcaggcggcacatcaggacaaggagtgtgggcgcgtgggcagtggcgacagtatgggagcaggagaagagggtggccgtggaagggcccgtcgtcgtctgcaacaccaacaccaccaccaccaccagcgcagcatccacagcatgtgcatggttctccgcctccgactccacattattggcggcagcggcagcagcagcgcccccagtgacggccgacgactccgtccacggctttgccttcgccagcgacctcctctgggacccttccaggtgggaccgcttccccacatccgagcccgaccagtcgcaggattcgatcaagttcgtgcaaaggttggtgatggcggagtacaacaaaacgagggccatcatccctgcagacgacgattactcctccaaccgttctcaaatcatggtgtggcgtgtcgacacaacgctgctctagctagccctcttgccacgctaagagcgatagataaagatgcatgcatgcttaaaataaacattccatgacttattacatagtaatgccatacacgtacgtatgtatatgtaaacttttgctgcatcagaatcatatatatagggaaaagaatggcaagcagcagtctgcatc

SEQ ID NO: 31277 - DNA, 1485 bp, Zea mays
  Clone ID: UC-ZMFLB73150C02_FLI
aaattaaccactccatgtaggtcgaagcacataagaggtcagtgtggtcacgtagaaaaccagaggaaagaggtaaaagtaaaatatccagcagtacaagtggcttctcccacagcaaagtagagagttcatcgacgaatttgcaaactcctatggaacctgtacagactcctcaatatgcactgttccaggatagcaagaagataggagaagttcagcatgctaatcagtttatgtttcctggatatgggtatcctcctgcatatccatttcctaccattccgttagtgtcaaacattcaagctgaaggctatcagacaaaaccagctggcacaagctaccgaacttcggaagattacctaaaacagtcaagttccacagaaatgtcacaagatataccatcaagaccactaacaatgacaccacaagaaaagatagaaaagcttaggcgccggcaacaaatgcaagcactgatagctattcagcaacaacagcaacagtttggtcaacagggtcctggcagtgacacaatggtgtctcaagcatacacccctggtaacaaaaatccggattccttagggagttcaattgtcatagatgaaaacacaaataaggttatttcgcctgagatgattccaactgaccatgaccgggttcacaagagttctgcaatttcagatgatccctttatagaggaaaaaatatattatcagctacaagatgctcttggcaagttggataccaaaactcgactatgcattcgagatagtttgcttcgtttggtccatagtgcaacagagagaaagattgatggtgataggagcactaacaagactaataaagatgaagatgaagcttcggaagacgcatctactaggaaaacaaggtctccaaacaaggaagcagaaacaaccactaatccaattgatcgtatagtggcccatttgctgttccacagacattgctccaaggttgcaaaagcaacaaaagaaataatatcgtcaatccccttgactctagaacctgagccgaaggtacccttgggaactcctagggttccatcaaaagatcaacgagatgagcaagaaattgtgttgcaaccatcacaataatgtgagatgtgctagaagataaggttttactcaatttgagtaaacttatttgcatttagttagcctatgaatctaatgtcgtccttctaacgagtatacacatgctgattaatcaactgttcaggataaaaagttatgcaaatccagtgatgatggcagtcttatgatcgcctgtggccctggagatcgcttgtgtaatatgtagccatttcaacattgtaggatccttttattttcatcctgtaagaacatctcagattgtataggaacctacgattttgtgccgagccgtaaaaagagcaaaccttggctctggacataaggcgtgtttaggagcaagaggattaaagcaaaccttggctcttggctctgg

SEQ ID NO: 31278 - DNA, 293 bp, Zea mays
  Clone ID: UC-ZMFLB73150E08_FLI
gccagaggcagattgattgatgttgtgcctggagcaccccctcccttggcgtggcaatgaatcggagtcgaatctccttgagaacgtacaggatggcttatacccaccccactaatctgtaattcagccagcgctatttttttttgcccccctccgtgtttcatcttgctggatgtatcatgtatgtttgacagatgatgacgatgatacgaccctgttgttgaaaaaaaaatgtgtttgaggggactgtagtgttccctccccctgttgtaatggaagatttaccaatatgc

SEQ ID NO: 31279 - DNA, 2115 bp, Zea mays
  Clone ID: UC-ZMFLB73150F02_FLI
ccgcaacgcagtgaagcgcatcgagtacgaggcgagcgcgggggcgtccgcgtcgtggtcgtcctcgtcctccgcggagcagcagcgctcgccggggctccggccctcgcgctccctggaccttgcccccggcgcggacctccgaatcagcgggagcgtggagggggaggtcgacgagctctgccgcagcctggggctctcggggcccgaggatttcgccgtccccgtcgcggcctgggaggcgcgcaagtcgcggtctaactccgacctcctcccgcgctcccgcctcgacccgtccacacccgccgacgaaacctcgccgattgcgcgggcggtctcggcgcccggtgctcagccgactcgctccttccctgcccccattcccgaggagtcactccactcttcgcctgcttccaccgccaccgagtcggcggaggagcctaccgttgcggcgcccgaggagtcacccaacgctgcccctgcctctgctgtcgtggctcccgtcgggggtttgcccctgccttcgccaaggaggggaggcggggaggtagggatacggggtgcacggccgcctttactctccccgcctccgccaattggtgcactagctcctccgccagttaggaggtccttcgttgacaatgacatgactgggtccgcttgggacattgtgcagtcgtttgctcccagggatcagggaagtgaactgggactgggaggaagtgtcgacagtcgttgcaattcggacaaagaggaagagaatgatgttgaggatggggacgcagcggtggagggcgagctgaaggaattgaggataggagagactttcgaggggttcactggaacttcttcattgtcgacgacgaatgatgatgacgcgtccagtacaaccacggaggccatgttcatcatttcaccgaatggcaagttcaagcggaacattaaatcatggatgcgtggtgctcttctgggaagcggctcatttgggatggtgtacgaggggatcagtgatgagggtgcattttttgctgtgaaggaagtatctttgcttgaccaaggaagcaacgcacaacaatctattgttgcacttgagcaggaaattgcactcctcagtcagtttgaacatgaaaatatagtccagtattatggaactgacaaggaagaatccaaactctatatttttattgagcttgtcacacaagggtctctttcatccctctatcaaaagtataaactacgagaatcacaagtctctgcatacacaaggcagattcttaatggattggtttatctccatgagagaaatgtggtccacagagatatcaaatgcgccaatatattggtccatgcaaatggatctgtaaagcttgcagattttggattggcaaaggagatgtcaaaaattaatatgctaaggtcatgcaaaggaagtgtttactggatggcacctgaggttattaatcctaaaaagatgtatgggccttcagctgatatatggagccttggctgcaccgtgttggaaatgctaacccggcaaataccatttcctaatgtcgagtggacaaatgctttcttcatgattggaagaggggaacagcctactattcccaactacctgtctaaggaggcacaagattttattggccagtgcgtaagagttgatcctgagagccggccttctgcgtcacaacttctggagcacccatttgttaacagaccactgcgagcttcatttgaatcttcgtctccaccagccatctgattctagtattgatataatggggtgtttctcgttgaggccaatgctcaggtcacgtactcacgtgttgatcttcatgatctacactactggttccagaatggaattacgtgggcttgtttaggatgtagtttagtagctgtagtccgtagggttggtgggcagcattgctctgtggttttgtattctttggggtgttcttcattgggcaaagggttttcttcctggttattacgtagatttgtgtaaacttgtaggtaaaagggctgcaattgcctctgggctctggtgtaggtttagccgatgtttgtgaatgtttgacatcgccattctttacgtaaatggttttgttgctc

SEQ ID NO: 31280 - DNA, 1129 bp, Zea mays
  Clone ID: UC-ZMFLB73150F10_FLI
ctggtggagtaccctgaggttccgcagtgggcgccttggtgcatggagcagccgaagagtgttgactgggatgcactgatcaatagcatcttcagtgaggctgagaatgtgccggagattaactggtgcgagcctggggagtcctcagcgatggaggtccttcttgggagtaaggatgggttcttgacgaagaggattaagaactatgacactggccggaatgatcctacaaagccacatgcattgtcgtgcctttcaccgtacttacattttgggcacatttctgcacaaaggtgtgctcttgaagcaaaaaaacgccgtcatcttagtccaaagtcagtggacacgttcttggaggagctgataataaggagggaactagctgacaatttctgctattaccagcctcaatatgattcactggctggtgcatgggagtgggctagaaagacgttaacggatcacactggtgataaaagagagcatatctatacgagggagcagctcgaaaatgccaaaacatctgatccactttggaatgcatctcaattggagatggtgcaccatgggaaaatgcatggatttatgcgaatgtattgggccaaaaagattctagaatggaccagtcaacctgaagaagcactttccatagcaatatatttgaacgacaagtatcatatcgatggcagggatcccaatggctatgttggttgcatgtggtctatttgtggcctccatgaccagggttggaaggaacgtccggtatttggaaagatacgttatatgaattatgctggttgcaagagaaaatttgacgttgatgcttatatttcgtacgttaaaagattggttcctagggccaagaagaggaaaactgaggaaggtgaatccacggtcaaagaatccaatgtctgagttggctcagcagttcaacattgtctaaaacattggtataatttaaatttggcgcagtcaagtgacatacttttcttttgctggtagatgtttatacggctaactgaagagttgctaagtagagatagacattatacaaggttgtgctgagatcagtttgcctcgctgatattataggaaaaacatattaacatatatgttttataatagtttt

SEQ ID NO: 31281 - DNA, 1508 bp, Zea mays
  Clone ID: UC-ZMFLB73150G04_FLI
ctccaccctcgaatcgttccccaccatggcgtcgcagggatcctccgtcttcgccgcactcgagcaggccccggaggaccccatcctcggagtgaccgttggctacaacaaggatcccagccccgtgaaggtcaacctcggggtcggcgcctaccggaccgaggaagggaagcccctagtgctgaacgtggtcaggcgcgccgagcaaatgttgatcaataatccgtcacgtgtcaaggagtacctaccaatcaccggtctggctgaattcaataagctgagcgctaagcttatctttggcgctgacagccctgctattcaggagaatagggttgctaccgtgcagtgcctatcgggtactggttctttaagagtcggaggtgaatttcttgcaaggcactatcacgagcgcactatctacatcccacaaccaacctggggaaatcacccaaaagtcttcaccctatctggcttgaacgttaggagctaccgctattatgatcctgcaacatgcagccttcacttcgaaggactcctggaagacctcggttctgctccttcaggttcaattgtactgctgcatgcctgtgctcacaaccctactggagtagatcctaccatcgaacagtgggaacagattaggcagctgatgagatcaaaatcactgcttccgttctttgacagtgcctatcaaggctttgcaagtggaagtcttgacaaagatgctcagtcagtgcgtatgtttgttgctgatggtggtgaacttctcatggctcagagctacgctaagaacatgggattgtatggagagcgtgttggcgctttgagcattgtatgtaaaagtgccgatgtagctgttagggttgaaagtcaactcaaacttgtcatcaggcctatgtattcaaaccctcctcttcatggtgcctctatcgttgctaccatactcagggacagcgagatgttcaacgaatggactctggaactgaaggccatggctgataggatcattaacatgaggcaacaactatttaatgcgctgaaatccagaggaacccctggtgattggagccatatcattaagcaaattgggatgtttactttcactgggctgaatagcgaacaagtcgcattcatgaggcaggaataccacatttatatgacatctgatgggaggatcagcatggccggtttgagcatgaggactgtgccccatcttgcagatgccatacacgctgcagttactcaactgaaatgaggatagtatcgcagctttcgtgaataaaacctgaatcacccacaacaatgttctaagtactcagccagtggtatttactggttgacctactgtagtttgcgtcggaatagatatgtttttttactcttcgtggggcagttttgtactggtggattcataaggactctgattatggtgcgttcggaacttataataataagcacatgaaattttgcttcaggtgcagtgatgctgtctcattaagttattagtt

SEQ ID NO: 31282 - DNA, 1247 bp, Zea mays
  Clone ID: UC-ZMFLB73150G10_FLI
cgcttccaccgcaacagccgcctggccgcgtacacgggcgtcattgacgactcgggcttcacgtcggacggggccaccgagggctacggctacatgaggacgacgacgcacgcgaccggcgccaccgcgggaaccaaggtcggccgtggcttcccgcagcacgtcaggagcccgagcgcgagctggataccgagcatcggggaggaggacgatgaggaggatgaagaggttgtcgtcgttgaagaggaccgcgtgccgcgggagtggacggcccaggtggagcccggcgtccagatcaccttcgtctccaccgccggcggcgctggcaacgacataaagcgaatccgcttcagccgcgacatgttcaacaagtgggaggcgcagcggtggtggggagagaactacgaccgcgtggtggagctctacaacgtgcagacgttcagccggcagcagggcgtctcgacgccgacgtcctccatcgacgatgccacgcagagagactcgtcgttctactcccgcgccggctcgacgagggacagcccggtgatcctgccgccgacagccgtgggcagggagcagccgatcgcccgcgccacctcgtgcagggccacggccgcggcggcttccacggcccgagccgcgtgcaacccatcgtccagtgcggtgccggacccgtcggaccacgtgtgggcgcaccacttcaacctgctcaactccgcgccggcgccggcaccggccgctccgcacctcgacccgtcgcgcgctaccacgtcgtccctggacgaggcgtccgtgtccgtgagcaacgcgagcgacctggaggccacggagtgggtggagcaggacgagcccggcgtgtccatcaccatccgcgagttcggcgatggcacccgcgagctccgccgcgtccgcttcagccgggagaggttcggcgaggagagggccaaggtgtggtgggaccagaacaggaaccgaatacacgcgcagtacctgtgacgtcggactcggagctagctgttgggtgtgcagtacacgcgttggatggaagccaagccaccaatccatggacaatagtagcgtagggctgagtcagtgatactattgcgactactgtctactagtgctagtttttacagggtgaacagaggtgaaagaggtccacggaatggagcctgtgtaaaacatgtttgctactactactgatctgggtttgtgtgttgatgaccaatgtattttttttcttgatg

SEQ ID NO: 31283 - DNA, 1728 bp, Zea mays
  Clone ID: UC-ZMFLB73150G11_FLI
tctcggacccgcaaacggacctcacccacccgttcctccatctccgccccttgccggcgatggcaccggcgccggcagcggcctcggcggggcggaagtctcatgtcaccgttctcctcctctacgtagtgtgcggcttgatcctgctgcttctcctcgcctcctactcgccccgcctccagccccacgcccacggccgcagcctccaccgccgcctcaagctccacccaaagagctccttaccatccgacgcttcctccggtgggaacggggggcaacagaagacgcagcaccaaaaccaccatgcggcctccttcgacccgaccatcgccgagctggagcgtcggctggacgacaaggagtgggagcgcgagcactacagcctcctccacggcggcgagccggatgaccatatgaaggagtgggaggagttcctcaaggaggaggaggacttcatcaacgacgacgaccgattcaacatcgccgaccgtatccgcgcgctcttccccaagatcgacgtcgccccgcaggacggattcgtctccctcgacgagctcaccgcctggaacctccagcaggccagggctgaccagcaccaccgctccgccagggagatggagctctacaacaagaacggcgatgagatagtctcattcgaagccttcaatgctctgcgccaagaatcccatggagagggcaatatgcttgggttcgaatggtggaaggaggatcatttcaatgcgtcagatgcaaacgctgatggtttccttgataaaactgagttcaatgatttccttaatccaagtgattcggataatcccaaaatcatcaatttgctctgcaaacaagaaataaggcagagggataaagatggtgatggaaagttaaactttgaagaatactttactgggctacatgaccatatacatggttatgatgacgagaatgcagatatttcccaaattgggaacataacagttgcgaaggatcggtttttcaaacttgacaaagataatgatgggtttatttcggagcatgaactagagcctgttcttgataagctctatctttctgaacgctattattctagacagcaagccatccatgctatttcagaggcagacaaagatcatgatgggaggctgactttggaagagatggttgagaacccctatgcattttatggcagtgtttatctcagcagcagcgacaacgacgacgaagactacttccacgacgaatttcgctgagaccaatattgttactatcctgacacacgcaaggaacacagctgacgagcatcaaggtgcgcacagaggttcggaacgtctagcatactatgtgtgatgcccgggctgggctgctgacagaatgggagagcttagagttacggccatggagtgaggaactagtttttagccgcttggttcttcaagttgtttgtgttaaatggaacgacgacagcatcctagtaccggccaggcccagcagtgatggatgttacgcggcaagttgagccacctttatctaggctgagctgcattggtctccatcctgatgttcctgcagcaggggaaatgtagttcaggagaacaatgagtggaggagcgtcatctctgtggcgagcggcttcagaaatctaacgggaacgtgttgtttggtgtccgaaatgtatgtgtgtgtgtgtatgctatgaattcaattatttctggcagaatgtcgcagtct

SEQ ID NO: 31284 - DNA, 1328 bp, Zea mays
  Clone ID: UC-ZMFLB73150H03_FLI
ggcttctgaggttgtccgccctagcgacgccgagctactaaaggcacaagccgacatatggcggctcagcctctcctacctcacgcccctgtcactgaggtgcgccgtggagcttggcatccctacggcgatctaccgccatggcggggctgcctcagccgctgagctggtcacggcgctgtctctcccctccactaagctgccgttcctccgccgcctgctgcggctcctcgccgcgtcgggcgtgttcaccgtcgacaagcagagctcggaggaggagcggtaccgcatcagccccgtgtcctacctcctggtggacggcatccctcacgaggaccacatgaaccacaccgctctggtgctcacctgcacctcgacgcgctacatcgaggcggggatagggctggcggagtggttcaagagggacgtggtcacgtcaccgttcgaggagctgcacggggcgactctgttccacgagagcatggggagcctcgacgcagatttccacgacatggcgagcgaggccttggacgcccacgacaacttcggcatcgagatagctatgcgggagttcagggacttgttcgaggggatccagtccatgacctactgctgcggtaacttcggtgatgacaagggtgccagggccattgtcaaagccttcccacacataaaatgcactgtgctggcccctcccaagatcattgccaccaaaccggccgatggagcgatgataaactatgtcgaaggtgacatgttcagtttcattccacctgctcaaactgtcgtgctaaagcttgtgctgcaccacctgaccgatgaggagtgcgtcaagctcctggctcaatgccggaaggcgattccttcacggaaggatggcgggaaagttataatcggtgatattatgattgaccactctgggcctatgctggaaactcacctcctgatggacatcggcatgatgaccatgacaaaaggacggcagagagatgaaaaagaatggagcgagctcttcaccaaagcagggttcagcgaatacaagatcctgaaggaatttggagctcgtgttgccttcgaagtctatccgtgagattgcacctggactatacatatatatttacatacatatatgtatgtgtgtgggtgccttgcgtggcttggcgtgatgatgtcataaataaagagggtgggtgtgcttgcggtattcatggatggccatggatctgagcacatgacgttggatgctttcttaaggctctcgtggatcttctatatttggaagaagctgtaaaataatatatcgccatctagtgttggcgttggcttgt

SEQ ID NO: 31285 - DNA, 1976 bp, Zea mays
  Clone ID: UC-ZMFLB73151A08_FLI
acggcgaacaacgatggatagaaatatagaatacatctttcggctggctcaacaaatcgaggaagcgtggagaagaatgcaaaggttaaaactcatgctaccagttatcctaaaccctacgccataagctacctatatttcattgttttttttctctcggttagtcgtagcagcaccgtcgtcactcgtctcgtctgagcctctctgctggttgtcgaatcttttatcgctggccccgtcacgccggaaagaggacaaagactcgagccgccgacttcacacggccacgtcgggaacgaagctcagagcagcgcgacggcggcgagggcggcggcggctaggaggagctgtgacgcacgggccgcggcggcgaccgaggtggcgagttgctcgccgccgaggtagaccatcgagccgttcgtgggctgcacgcccgcggcctgcgggttctcgccggagtacttgccgctagaaaaggagtaaaaccaatgttagcacatggtacaaacaaaaacggaattacagtgccacgcggtgggtgaagctctttaacatcgtgacggtagagagaatttaacatgacagtacaagaatcggagaggatttgatgcgagatcttttgtccgggacagtggtggtacatggaacttgaatgtcttgggcagctgcactgcacgcctctctgagcgtgggaacatgggttgcagttgggggtgcaggataggacaagacaggacagggcaagggcctatggttatggtatggggaccgtacggttgaaacggctactagaactagaagccagtagcggcccgttggcctgggtgtgcgggcaggagaagtgaccacacgcaaaccagcagtgtctaggccctggatccatagcccgttggatccgcccgttggccgttgccgcctctcctcctcctcgtctcgtcagagccatcaacggctagacattttttttttctgacaggagtgtagacgatgccgaccagcacagcttcagagggctgtttggtttgcccctgctaaaatttagcccctatcacatcgaatgtttgaacctccgttcggggtattaaatatagtcggattataaaactaatttctcagccgaagattaaaaagtgagacgaatctattacagttggttgagtctatatttcatactcatatttgaaagtcaaacgcttaatgtaacccgagctaaactttagtccacagaaccaaccacccccagtcggagatagcggttagaaaaaggttctcatcggacattgcccacgataacacattagtacttgttaggttattttatcacgtatggattaagtaagattcggaaaaaatatttttttaattgtttggactgaaactcactcaatcccacttaattcacatgaattaaaagtaaaatgaataactctttaaacctagcttggatactctagtattgagctcaattcgtgtgagatgtattaaggtgtattttaaactaatgtaggtcatgtttggtttctttagtctagagactaaatttagttaggagaataaagtttagtacctaacatgtttagtcctatggactaaaattagtaaaaatatactaaatgactcataaaaacactaaaatgacctttaacattctcctgctattagtacaattaaactaaatgaggggcaaatgtggaattaatatggtttagtccattttagcctcctattttagtactaccgtttgacaatttagaaactaaataagattaaaatgaagggactaatctttagtcgatcaaaccaaacatgaccttaaaccctaatacatctcaaccgatatggagtgaggttaataagggcttgttcggttattttcaatccatatggattggaggggattgatacggattggaggggattttgatttgttagggattgaaaccccctcaatccccctcaatccatatggactgggg

SEQ ID NO: 31286 - DNA, 995 bp, Zea mays; identical to SEQ ID NO: 25883
  Clone ID: UC-ZMFLB73151A09_FLI

SEQ ID NO: 31287 - DNA, 758 bp, Zea mays
  Clone ID: UC-ZMFLB73151D09_FLI
ccaccaaaagctaaagatccattgacaatttttaggtctgaggtattaggcaacctgttggccactcaaaagttggatgatcatgacattgaaggggtaattcatctgtactacaacataatttctcagccttgtttagtctgcaaaaacctaactgatgtagagctattgcggaagtacactttcttgcattctcttccgttggacaaaagcctgaagatcgttagggacttcctcatttctgctaccgcaaaggactgtagcctgatgatcagctttcggccaagagagaatggtagtacagattctgagtatgattcagtgtttcttgaatcagtgaagcgaacctatgagtacaaggcatatttccttgatctggatgtgaaacctctggataagatggagcattattttaaactggatcagaggatagtcaatttctacacaagaaatgggggaggtcttgccatctccaaagggcagtaataccaaagacacttcgaggatttatacatctggagaagggtgcatcagggagtgttggttgttgttcctgctgcttggtgctgctgttgtaacttcatgagtacagtcccaaggttgggaggctcgacccttaacgcctggaaagggcacagggagctgtgttgtccgtcagtcgctgttgtaactcaaactagtgcatacaccgtggcttgtcacggtaatttccgaagatgtccaacgttagttgagacaaccgaactgcttaccgtggc

SEQ ID NO: 31288 - DNA, 1835 bp, Zea mays
  Clone ID: UC-ZMFLB73151E06_FLI
ggctttactgtggtggccttttactcagcacaatcttgtccctcaagattctgttacagtaatcgattcacgttatggtgagaatttttctgtgtacaagattaaagacaaaatgctcatccctcaatttgatgcatgcgcaagttggtggactcaagggcctgattctaacttgcagattgaacttgcaagagatatgggctatgctgccgcaagatatggtcatgtgatgtttccagagaatgttcatgagcctgctcttcattctgcggaagttttacttggaggagttggtaaaggatgggcttctcgagtctattattcagacaatggatccactgcaattgaaattgctctgaagatggcatttcgtaaattttctcttgatcatggaattatggccagcagtgaaaatagtacaagaaatgaaagaaacattcagctgaaggtacttgctctaaatggttcctatcatggtgatactctgggtgctatggaagctcaagctccatcggcttatacatcttttcttcagcagccatggtattcaggtcggggactttttctagatcctccaactgtgtatattaaaagtgaggtctacaatatttctttgccccaatcaatgcagcatgatcctcagacatatggtgatacatgctttttttcacaagctgaagtcttttgcaagaccagggacaaaacttttgctgctgatttgtattcgtcctatataaaacagaaactatctgaattttctctatcaagtagttctgaacatcttgcagcactaattatagaaccagtaatacaaggtgcaggtggaatgctcatgatagatcctcttttccagcgagtacttgtcagtgagtgtagaagccgaaaaatacctgtcatatttgatgaggtatttacaggattctggcgtcttggtgtggagtctgcttctgagttacttggttgtttacctgatatcgcctgctatgcaaaattgatgactgggggaattataccattagctgcaaccttagcaacagaggaagtttttgaatccttcgaaagtgactctaagcttacggcgctcttacatggccattcctacactgctcatgctatgggctgtactgcagcactcaaggctatgcagtggtaccggggtccatccaccaattcaaaccttgatactgaccacatgaagctcaaggagttgtgggatggcacacttgttaagcagttgtcgtcactaccgaatgtgaaaagggtggtgtcattaggaactctgtgtgcaattgagctcaaggctgagggagctgatgctgggtacgcttcactctacgcaagttccttggtgcaacagctccgtaaagaggacgatatttacattaggcccctgggtaacgtgatatacctcatgtgcggtccatgcacaccccgagatagctgcactcgacaactcctcaaggtacaccgcaggctttgtgcgcttaattgagccggctgggaatatagttgagggcagtctgtcggagttgaacagccttgtggcaacttaagtttcaggccgtcaattgaccttcagatgttatacaatgttcattaccatcgaatctgagacgtcagacttattctgatgcagagggcgccgttcctaagctctatggtaggatgacagattagttttagacatcattagtgatgataaactatgctttgctgtgtttccaatcgatccgattgtatgtatggctccgtatgtaattttgtaggtgtatattgccgaaggttttgcgacgtttttttgcaacgaaagtttagagttgatgtgcgtttttttt

SEQ ID NO: 31289 - DNA, 776 bp, Zea mays
  Clone ID: UC-ZMFLB73151E12_FLI
gtgactccccaaacacagacggagtcgatccagactccagctccaacgtgtgcatcgaggactcgtacatatccaccggcgacgacctggtggccatcaagagcgggtgggacgagtacgggatcgcgtacgggcggccgagcgccggcgtcacggtccggcgcgtgaggggctcgtcccccttcagcggcatcgccatcggcagcgaggcctccggcggggtgcgcgacgtcctggtggaggactgcgccatcttcgacagcggctacggcatccacatcaagaccaacgtcggccggggcggctacatccgcaacgtcaccgtcgacggcgtgcgcctgaccggcgtgcgcagcggcgtccgcatcgccggcgacgtcggcgaccaccccgacgcgcacttcagccagctcgccgtgcccacggtcgacgccgtgcgcatcagcaacgtgtggggcgtcaacgtccagcagcccgggtcactggaggggatccgggcctcgcccttcacccgcatatgcctctccaacgtcaagctcttcgggtggcggagcgacgccgcctggaagtgcagggacgtgcgcggcgctgcgctcggggtgcagccgtcgccctgcgccgagctcgccaccagcttcgcgtccgcacggtcctcatgcagctagttagtgtagtgatgcctagctaattaatttctgaattctgatgatgggtgtgcttttaagtttgggctttgttttacttattctatggcaccgatgtctgtctgtctgtcc

SEQ ID NO: 31290 - DNA, 1432 bp, Zea mays
  Clone ID: UC-ZMFLB73151F01_FLI
gtagaagctaaggcgcgagtgataggagggttttggttcagagaggagcggggcaatggcgggtggtcgtggctcgtcggcggcgaggctagcgctgctactggtggtggtggtggcggcggtggcgggcggcgccgtggcggggggcaaggtggtgcacgtggaggaggcgcaccggcggagcatgctggccaatggcctcggctcggcccctcccatggggtggaacagctggaaccatttccagtgcgacggcaacggcgaggtggtcatcagggagaccgcggacgcgctcgtgtcgaccggactcgccgctctcggctacagatacgtcaacatcgatgattgctgggcagagccacaacgtgacgctaagggcaacctggtggccaacaccaagacgttcccgcacgggatcaaggcgctggcggactacgtccacggcaaggggctcaagctcgggatctactccgacgccgggttccagacctgcgccaaggcccagcccgggtccctcggacacgaggagctggacgccaagaccttcgcggcatggggggtggattacctcaagtacgacaactgcaacaacggcgacctgaagccgctggagaggtacccggagatgagcagagcactgatgaaggtggggcggccgatctacttctcgctctgcgaatggggcgacatgcacccggcgacgtggggcgcgacctacggcaacagctggaggaccaccaacgacatcgccgacacctgggacagcatgatcgccacggcggaccagaacgaggtgtggtcggagtacgcgcgccccggcggatggaacgatccggacatgctggaggtgggcaacgggggcatgaccaacagcgagtacgtcgtgcacttcagcctctgggcgatctccaaggcgcctctcatcatcggctgcgacgtcaggcacatgtcgcgggagacgtacgccatcctggccaacaaggaggtgatcgccgtcaaccaagatccgctcggcgtgcaggggaagaaggtgcggatggaggggagcagcgagatctgggccgcgccgctctccgagtaccggacggcggtgctgctcctgaaccggcacgccaaggacgaggccaccatcgccgcgcactgggacgacatcggcctccccgccggcacgcccgtcgaggccagggacctgtggctgcacgagacgttggacgccacgttcacggacaagatgagcttcgacgtcgcgccgcactcgtgcaggatgctcgtcctcaagcccaggatccagatccagtgaactacaccaccgctgccgcatgggcgcgcgtacgtgcggccctcacgacgtcaccacgcgtcgattcatttgtactgcaggctactaattgcagacacgtggaatcaaaatcaccaagaatggttcttgttc

SEQ ID NO: 31291 - DNA, 1674 bp, Zea mays
  Clone ID: UC-ZMFLB73151F04_FLI
cgccgtccttgtccccactgggcaccgctggggtggagcggagatcggatccgccgggagctgattccttctctcgcagtctagtttgacgcggattcatttgctggtcggcatagcatgatcctgcggtgattgcggatagcttgtgcaagctggtggcttgggtgttgtctttttaatctggcctaaagatatcctgagacggtagcgtcacatggatgctagtacagaggttactgatgctattggtgcggtgggctttgacaatggggccgcggggaagttgccgcccagtgatagtgtagaggggcacgcagaagaacacgatgtgctggctgatggagcccattcgggcgagagcgaggtgatcaacccatctgaagaagtagaaatggaagccacctcgcagtcccaggacataaagcctcgagttcctgagggggttcaaggccattcaatgaaggttggtactaaatctcagcgacagagccctcgaggcggggataagagtcaaactaggaaaagctcttttagtccttcttatcctaaggcgcccattgcacgggtttctgatccagatctagttgattgctctttgagcaatggtgatgctggttccagtaagaaaaaggccgaaaagagcagtttccgcccagttgccaaggagaccccatcacttgaggactcaaatgagaagaaaaaaactcagaaggcatcaaaccaacattctgtcaaaaaggatattgaagaagaatcaaatgaaagtgtgaaacctcaaagggttggcagcactccttcatatggatttagttttaagtgtgatgagagagctgaaaaacgaagagagttctactcaaagctcgaggagaagattcatgcacaggaactagagaaaagcaacttgcaggcaaaatcaaaggaaactgaagaagctgaactcaaaatgctgagaaagagtttaaatttcaaggcaacaccaatgcccagcttttataaggaaccacctccccccaaggttgagttgaagaagatacctacaacaagagctaggtcaccaaagcttggtcgctccaagaacacatcctcaggagggacagaagggaatccaaatcctccagctcgttcaggtcgactgagtctcgatgaaagggtctcccaaaatggtgtcaagaaagcacctgctgcaaatgcagtgaagaagccccaacggaaatctctacctaaactgccttcagagcaaacaaccaaagttgacattgcaccatctgttccatctgcagaagagctagaaaacaagtcgccgacgaagggtcttgatcgagagccgatccgcgctcaaattacacctgacgaacctggacttactgcataggaacctatcaagccgactcctatgaaaggagggagttgtgccccagcttcctttatcacattttgctatttctgcagtaaactgctggctggtattatgtattagaattagtctcagcaccaggagcttgaagagtggcaagtgacaccgtgtattctttatcttagtttctgttgacataccaggtatttgtagttggcagacaggcagaatttcatattattctccagggctaccagtcaattaagttgccgtccaagtaagatatgtacacgattttgcaaagctttgtgattcagtgc

SEQ ID NO: 31292 - DNA, 1469 bp, Zea mays
  Clone ID: UC-ZMFLB73151F06_FLI
ccagggcctggaggtgaaggtgcccagcctcttccggtgccccatctcgctggacgtgatgcgctcgcccgtgagcctctgcaccggcgtcacctacgagcgcgcctccatccagcgctggctcgactccggaaacaccacgtgcccggccaccatgctctcgctcccctccaccgacctcgtccccaacctcaccctgcgccgcctcatcgcgctctgggcgtccacggccgcgccctcctctccctcctcctcctcatcgcccgccgtcggccccacgccggccgccgcggcggccgagctcctccgccgggtcgctgaccccgccgcggacccctgccccccgctccggaagctcgcggctttcctctccgacgacgacgtggacgagttcgacaagaacgcgctggctcgggccggcggggccgccgagaccgtggcgtccgtgctgcggcgagcgggcagggagcccgcggaggccgccgtgcgggtgctcgcggccatcgcggcgtccgactgcatcgaggaggagagcaagaggcgcgtggccgcggcgctggccgccgacgcgccgtccacggctgcggccctggcgcgcgtgctgcggagcgccacctcgctcgaggcgcgtgtggacgcggcgaggctggtggagtcgctgctccgcaatgcggcgccgggcgcgcgggcgacggtggcggactccgaggagctgctcggcgagctcatccgcctcgtgggccccgcggacgacaagggcggcctcgacaggcaggccgtggcggcggggctgtcgtgcctggcggccatcgcggcgacgcggcgggcccgcgccgagatggtccgcctgggcgccgtgcccgccgcggtgcgcatcctggaggccgacgccggttccccgagccaggcgctccgcgtgctggaggcggcggtcgggtgcgccgagggccgcgccgcggtttgcgagtccgcggggtcggcggtgcccgtggtggtgtccaagatgatgaagggcgggatggccggcgcggaggcggcggtgtcggtgctgtgggcggtgtgccaccggtaccgtgaccggcgcgcggtggcggcggcggcggcgtgcgagagcgggctcaccaagctgctgctgctcatgcagagcggctgctcgccggcggtgcggcagatgacgtcggagctgctcaagatcttcagggtcaacggcaagagctgcgtcgcagggtacgactccaagaccagccacatcatgcccttctgatcctcactgctatcggtgatacaacagtggaaccagcatttgtctgttacccttttccagtttcgaattttttttgattcgttggaagtgcatacagtagggaaaaaaaaaaagaaagaatgagttctcttgtagcaacacaaaacttgtatatgagtagaggattttggtagaaagaaatcaatggatgaaacaaattcagctg

SEQ ID NO: 31293 - DNA, 1717 bp, Zea mays
  Clone ID: UC-ZMFLB73151F07_FLI
agtaatttagtgactaaaatgaataaaattaagggactaattagtccttataaacccaacaacactcggaggaaatatgtgtttagtgaatcattgttcacataggaaagagaagaaacgtacatgtaattcatggcagacaaatatttggcagaagcaagtcgagtatcctgcctccaccgtgagtgatgttcgcaccagaaacactcaccgcatcatcatggctcatggtctggagtctggacgatctcacacagtcacaccattctccgagctcccctttaacagtcgttcgctagactttggctttttatggtgctgctcgcctgattgtacagctccattgaagctcccatcgctgccatcatctctcatgctcaatgcagcttcgttttcgaagccatgtgaaaaaggatctgaatggtagcggagaagctcatccagtaagggcttgttcggttattcccaaaacacatggattgaatgagattggaaaaaaatgagaagaggtttgacttgtttgggtttcaaacccatccaatcccactcaatccacatggattgagagctaaccgaacaagccctaaaatggaaagacatgttaaaatggggacaaaaatctcagcaggttcaacaaattattgaaattatgcactctcaccatcttgcacattggaaatcgtcttcgacatccgactcgctcatcgccaagcaatcgtaccaagcctcctcaatgctcctggacacgtgcgcgatatcggaggttgcagctcagtagctcagtaactgggttgcttggcgtggattacgccttcctcggtgtgggcaccgacggtaaccggagcctgcagcgcaggagcaggcgcaatgcggcgatgaggtcgttggagctgctcgtggacgagggtggtgcggacgtctcttggtggacgcaggcgtggcggtccagtgccacgacgggggagctgggcggggacgcgcgccccagctcctcgccgaccgcgcccccacacaggcttcagatccaccgcgcgccgacgtttgattcatgttggcttttcaatttgccaggctggtaacaaagtatgctcgaggaaagtctggaagctacgcgttcttcttgatgagaccgtccaaagcagatccgacgatcaagattttagtggtgacatggcttaaggagatgcacgttttgcgtcgggctttaatatgtatgtactggtgtctaacgcgcgccctgcgcgcgctgttttttttatggtccactaaaatatgtatgtaaataagatcctatgtagaacacaatagtgatagttttttacataaacaaatggaaggtgcgatgcaatttcttaaaatgaagaaaaaacactaatataagtggtagatctaaaaatgtagaggaaatagtgcaacttaacctgttttgtatgaagctataactctttaatgtgtcactttggtcctcgagatgtccatcaagtttggaacaaatagttttaaaaaagatagtcataatcagctattatatactaatcccgttctcgaatatttgttgtccgttattttatttttgaactataaacaaataaataacggagggagctatctacggaaatcccataaaaagtcattaaagatatagagcacagggcacaatacattggtaaaaaaacgacattattttttttatcatacataggcacatacatacaat

SEQ ID NO: 31294 - DNA, 2446 bp, Zea mays
  Clone ID: UC-ZMFLB73151F09_FLI
gtcgtactggcgctcgcggatggtggacggcgtcacggcggacgacgacaaggtcgcgcccgtctacaagctcgaggagatctgcgagctcctgcgtgcctccgacgccagcatcgtcaaggaggtcgccgacttcgtcctcaagcgcctcgacaacaagagctcccttgttaagcaaaaggctttacggttgatcaaatacgcaattggaaaatctggtactgatttcaagagggagatgcaaaggcactcagcggctatacgccaactagttcattacaaaggccaccctgaccccttaagaggggatgcccttaataaggctgttcgggaaactgcgaatgaggctattgctgcaattttctccacagaggaccctaaacctgctgtcgcaaccgaaagtcttggcaagcgcatacaaggctttggaaatactaattacgagccatctagagatgaaaagaagtctttccttagtgaacttagcgaagtagtgggtattggaagtgcatccatcaagcagggtttgagcaacttcgctgcagcgcatgcaataatgataaatgacaacggcagcacatacaagagccctaatctacgtaggtctttaaccacagaatctgaaaaatatggccggtatgatccaagtgaaattcaaagtgagagccgtgcctcatctgatgcttcaaagaacgtagcttctggttcttggggtccgacttccagttctgcaccatccgatgatactagctcaagtcaaccaggggttaaaactcgtgaagaaagacttctggagacaattgttactgcaagtggtgtgcgattgcaaccaacgcgagatgctctgcgggtttttttaacagaagcttccaaattggatgcagttgccttgagccgcgcacttgaaaacaaactgaattccccattatggcaggttcgcatgaaggctatttgtgtgttggaagccattgtaaggaaacaggatactgatccttattctatcattgcttcatatttcattgagaacacagcttctgttgttaaatgctctgagctgccacaggtttctctcagagagaaggcctcaaaggtcttgaatatgctgattggggaagagcctactggaaccacagcaacaaaatctgcaatggccacacctgttcagatgcctgatttgatcgatacaggtgatcaagatggtctggcaacaagttctggacaggaaagcaatggacaaaaaaatactgggaaagcatatgtttcttcagttgatgatttgcttggtggtgaacctattgctgatacaagtgtcactgctgatagcaatggaagcgatccatttgcagatgtatcgttccatgaggtagaggctaaggagactaatgatctcttctcaggattgatagtagaagaaaaatcatcagctaccatgcacggcagttcttcatcaaacaaaaatgaattaccagatatctttggcagcccccctgattctttcatccaaggtagtgttactgaccaaggaactgtcaatgatttgatgtctggtttgaaccttaatggaacaggtcaggctcatcctccagttaaagcagaacccaatagcaccttcagtggttcacagttctttgatacaaacaatgagatcggccatgtggcaagtgctgcagcattgaatggcattgttggtcaaaactcgttttaccaacagcagcagactcccttgcagtacagcttccctcaacatatgatgctcaatcaatcatttcctgggcaacaattaaattatggtgctatggggattcttcttgctcagcagcagcagttactgcaaaattttggaaatttcaatgctgaacttgggaattcttctttcaattcgatgaacagtggaaatgcatcagtgcttccagatattttcaattcaagtaatcaacctcaaaatcatgttgcagcgatgagcagttcgaagaaagatgacactagagcttttgattttgtttcggatcaccttgcagcggcacgtgcttcaagaaagtgaaccaggaagcgatgagcatgtccatatgctggcaagagctcaagtgcttgatggacacaaaagctgggactccaaaagctgcatctcgtcacagcctcgcagattggctgcatgatcacacacggctggtttggcatgggatcgggcgcatgtttgaacagttgagaaagaagggttgttccatacggttgaaagacgggatgttgtgtcgtactatgtacttagacaaagactgtttttttactctgaaaaataaattgcatcttccgactttccttatgttctgcccttttctctcttccttttttttattaaaaaaatgagtcagacaccatatacgtatttattacctcaggttttatttcttttctgtacaagtacatggaggatgtttttttttgcggc

SEQ ID NO: 31295 - DNA, 1588 bp, Zea mays
  Clone ID: UC-ZMFLB73151F11_FLI
aaacaaataaactaataagctatgaccgtgagccgtcgtcgtcggagaagaagaagaaaggctagtgttgtgctgctgtcgcatcagccgcccgccgagcctcagatccaccaccagcaccgatgccggtcctctgcacccaccacgttcagctccgcctctggtggcgccgtctcggccgacgcagcgccacattcgccctcgcgctcctcgccgtcgccctcgtgctcacgctctcccgctacgccgcaggccctgcgccctccccgcccccgtcctcgtcctacgggcatcgcctcccggccctcgtcgacatcaccctcgtctacggcgccatcgacaagggcgcagtgtgcttggatggtacgccgcctgcctaccacttccttcctggatttggggacggatcccacaactggctcctccacttggagggcggaagctggtgccgcaatttcgaatcatgtgctcgccgtaagaaaacaaatctcggttcctctgcccacatggatactcgtgctgaattcgtcggcatcctaagtgacgatcaatctcaaaatccagatttttacaactggaacaaagtgaaaataagatactgtgatggtgcatcattctctggaaatgtccaagaagaagtcaagaatgatacaggtttcttcttcagaggccagcgtatctgggaagcagtcatggccgaacttctgtctaaggggctagccagagcgaaacaggcttttttgactggatgctcggctggtggcctttctacatacattcattgtgatgatttccgggcacttctaccaaacacacctactgtcaagtgcctcgcggatggtggattctttcttgatgtagaagacatttctggaagaaggtatatgcggggcttttataacgatgttgctcggctgcaggatgtgcgtaaaatattccctcattgcagctcagatatggaaccggggcagtgcttcttcccacaagaagttgcaaaaagcatcaccaccccgatgtttatactcaatccagcatatgatgtttggcaggtagagcatgtgttgtctccagaaggttctgaccgtgaaaatctatggcaaaattgcaggatggatattagcaggtgtagctcaaaacagcttgaagttcttcaaggtttcaggaaagcgctgcttgatgctataaatgaattcaagaagagaagggactggggtatgttcattgactcctgctttatacactgtcagtcaatgaaagctttggcttggcattcgccatcagctgctagagtgaacaacaagacggccgcagaagcggtgggagattggttctttgagcggagggaggtgaaggaaatagattgtgaatatccctgcaacccgacatgctacaatgtggttctcgatcagccctacaaggaagattaactgacttgcagtgttagttgtggtagatttaattcgtaattgactctccatgagttgatatttgtcgagctaaatgtgatcattagcagagttcggactgagacttgtacttgaggcctattaaaatacgaggagaacaatacttacaaagagaattctat

SEQ ID NO: 31296 - DNA, 1663 bp, Zea mays
  Clone ID: UC-ZMFLB73151G03_FLI
cgcagagataggcgtcttcgtactcgcctacctccgcggctcaaacctttcccccttctcccaattccttccgccggccgccgctccacccgtacgacgacaccatgagggagtgcatttcgatccacatcggccaggccggtatccaggtcggaaacgcgtgctgggagctgtactgccttgagcatggcattcaggctgacggtcagatgcccggtgacaagaccattgggggaggtgatgatgctttcaacaccttcttcagtgagactggtgctgggaagcacgtgccccgtgctgtttttgttgaccttgaacccactgtcatcgatgaggtgagaactggcacctaccgccagctcttccaccctgagcagctcatcagtgggaaggaggatgcagccaacaactttgcccgtggtcactacaccattggcaaggagattgttgacctgtgccttgatcgcatcaggaagcttgccgacaactgcactggtctccagggcttcctcgtcttcaacgctgttggtggaggaacgggctctggccttggttccctcctcctagagcgcctgtctgttgactacggcaagaaatccaagcttgggttcactgtgtacccttccccccaagtttctacttcggtagttgagccatacaacagtgtactgtccacccactccctcctcgagcacactgatgtggctatactgctggacaatgaggccatctacgacatctgccgccgatcccttgacattgagcgcccaacctacaccaacctcaacaggcttgtgtcccaggtcatctcatcccttactgcctccctgaggttcgatggtgctctgaacgtggatgttaacgagttccagaccaacctggtaccctacccgaggatccacttcatgctttcttcgtacgctccagtcatctctgctgagaaggcctaccacgagcagctctctgtggctgagatcaccaacagtgccttcgagccatcttccatgatggccaagtgcgacccacgccatggcaagtacatggcctgctgcctcatgtaccgtggtgatgtggtccccaaggatgtgaatgctgctgtggccaccatcaagaccaaacgcaccatccagttcgtggattggtgcccgactggcttcaagtgcggcatcaactaccagcctcctagcgttgtgcctggtggcgacctggccaaggtgcagcgtgccgtgtgcatgatctccaactccaccagtgttgtggaggtgttctcccgcatcgaccacaagttcgacctcatgtacgccaagcgtgccttcgtgcactggtacgtcggtgagggtatggaggaaggtgagttctctgaggcccgtgaggacctggcggcgctcgagaaggactacgaggaggtcggtgctgagttcgatgagggcgaggatggcgacgagggtgacgagtactagagaagtttgctgatgacgcagcatcaggccagtgtgctgcccttatcccgtgatctgccgagagttgctcctgctatcgtgttatgtgtgtctgttctgaagtattgtgtggtttacaacacctgatgttgtaagagttgttaattcccctgcattgctaccgggttattgagaataattatggctgtttacgttgttgcttc

SEQ ID NO: 31297 - DNA, 2140 bp, Zea mays
  Clone ID: UC-ZMFLB73151H07_FLI
caggagccagtagccaatggtgaacaaacgataggtcttgctgagaagccgaaggagctgcctgttgccagtaaggatgagaaagcaactgtgcccccgattttagttgattcaaatgctttcaatctaccaagtgaaggccaaacccaagctggcacatctaacatggatgggggccataatggtgcacacaacttttatgcttctcaggcacaaccattctattaccaaggctccggttctgaaaaccctacacaagcatgggatacatatcctccctacatgagtgttgaaggattggaagtgggtccaccagttgtatacaatgaggacccctcattgatgttccatggtggctatggttacgacccatattattctcctattgcaacacctgtaccaaatgctgttagtggagggtgatacaataatgccgattgacccaacacaaggagcttttatcgctgataccctgagtccaaacagcttcctgtttggcccaagacctgaatggttcagatcttcagaaggaactgggtcatttccatcacctgcagcttcacctcaaccttctaggggtgttccagggtcctatgaccaaaacaactttccaatggcttcaagaatgtcatcacctcaccagaagcccttctatggtttgagatccacaactgactcctatggaaggggtttttctcatggtggaatgttcccacaggccagtaattatgggggatccgtcaccagctttggccttaatggtagaagtttgatctcaaccgagaaagggcgcaggaggggaaggggcaatgcacttatttgcagctgcaatggtcctcttgactttcttaatgagcaaagtcggggtccacgtgcaactaagcctaagaagcaaccagaggttgacagtaaggatgaggtgcctactacaggagttggtcgtgagttatacaacaagcctgactttgttatggagtacacgaatgcgaggtttttcatcataaaatcgtacagcgaagataatgtgcacaagagtgtcaaatatggtgtttgggctagcaccacaaatggaaacaagaaactggactcagcctatcgcgaagctaaggagaaaggagagcactgtcccattttcctgttattttcggtgaatgccagtgcacaattctgtggtgttgctgagatgattggaccagtggactttgagaaaagtgtggattactggcagcaagataagtggactggtcaattccctgtgaagtggcacatagtgaaggatgttcccaataatcttttccgacatataattcttgaaaacaacgacaataaacctgtaacaaacagcagagatacacaggaggtgaaactagagcaaggaatggagatgctgaagatctttaagaaccatgatgatgatgcatcaatccttgacgactttgagttttacgaggagcgtgagaaagcgctgcaggaaaataaggcacgcctgcatcagcaacatctacccagttctattgttattgagcccaagaaacccttgactgcacccagtgacctcgtgggccatatcaccaagagttttgctgaggctgtgcggcttggtgaggccaagactgtaagccatttgactgagaaggtttctgggggtgatccgtctattcctgtgaagcatgttgaagttaagcagagtggtttatcttaggaactcttgatcgatgtgaatgaactgtaccaaaaattcacccatacgcttcctgatcaaaatgtcgggaatgcatatgcagatggatgatgatgaaacccaagacatcggcaaaagcatgcatgcacactagggtaggtctttgccaaccttggaagcatagtttcttgaatagtttctctctttttttcttctttcttcctagtattttctccccttctcttcgcatcatatgatgattccttagtgtctagcctcaaggagagttgctgtttttgtgtaagcctctgtaagtttcctgttccatcacatatgagtaaggcctttttgtttctttttatttaagtaaaagatccatcttttatgtactgtcgtggcagttttattatactatgtctgaacaaggcctattcactatgtaagcaaaacataaacgct

SEQ ID NO: 31298 - DNA, 1211 bp, Zea mays
  Clone ID: UC-ZMFLB73151H11_FLI
gctcgttggccaaggggcatttggcaaagtatatcaggtgagaaagaaaggtacatctgaaatatatgcaatgaaagttatgaggaaggacaagattgtggagaagaatcatgctgagtacatgaaagctgagagagatatacttacaaaggttgaccatccttttgtcgtgcagctgaggtactcctttcagacgaagtaccgactttaccttgtcctggactttataaatgggggccatctcttcttccagctttaccaccagggtttatttagggaggagcttgcacgcatctacactgctgaaattgtatctgcagtcgcccacctccatgccaacggtattatgcatagagatttgaagcctgagaacatcttactggatgctgatggtcatgctatgctgactgactttggtgtggcaaaagaatttgatgaaaacactagatcaaactcaatgtgtggtactgttgaatacatggccccagaaattgttcagggccgaggtcatgataaggctgcagactggtggagtgtgggagtccttctttttgaaatgcttacaggaaagccaccgtttgttggtggaaacagagacaagattcagcagaagatagtaaaggagaagataaagctgccaacatatttatctagtgaagttcactcaatgttgaaaggattattgcacaaagaagctggcagacggctgggaagcggaccaggcggcagtgacgaaatcaagaaccacaagtggttcaagtctgtaaactggaagaggctggaggcccggcagatcgagccaagcttccggccgaatgttgctggcaagacctgcattgcgaactttgacgagtgctggacgaacatgcccgtgcttgattctccggtggccagccctgttgcggccaacagcaactttgtggggttcagttatgtgaggcccgcaccgttcctccagaagccgagtccacttggctaaagaactacttccgtgatctgatatctaacccggagttcaaataactatctttgagtctgaatcctatgtatttcttcaagacattagtgatgggaatctaaccttattgttgtgttgtgggtaggccagccaagcgcctattgcttgagaacaacagcttggcaagtgacaatgtgcaatattgccagaagttcttattgaagcgccataataattctcctacgtcaatttg

SEQ ID NO: 31299 - DNA, 1043 bp, Zea mays
  Clone ID: UC-ZMFLB73152A07_FLI
gccggcctgtgagtctgtgtctgtgaccggctgactctgccagccgcacgcacgccctcgcgcttggagcgttgcgaggatcggctcacaggtcacagctcagtctcagatcggccaccggccggccgggcaccggaccacagctgtctgctgcctgctccgcttgccgccattgctggccagcgcgagcgagctgccgggaccgcacggaggtagcgtctacggggcagcaccgcgcgtcgtggttcgcgctcttgaagctggatctggaccgacggtcgatcgagcgagtgcagctgcctgcgagctcttctcccgccgcgatatgggcgccgtgagctgccggaggcggacgagccggcgccgctgccacgccgccgccctcctcgccgccgcaatcttcgccgcggccttggttgtggcggcagggcggcggcccatccgtctgccagcagcggcgctggcgaggaggcgagtagactcgtcgacggcaattgccgccgccgccgacgaagtcctcccagccgcccggcggcggtggctgctggcggggccggggtcgtcgccgccgacgtgccgcgcgaggtgcgggcggtgcgcgccgtgccgcgccacccgcgtggccatccagcccggcgtcggcccccagtgggagtactacccggaggtgtggcgctgcaagtgcggcaacaagctcttcatgccatgaccagtacgtgatcaccaacggcggaggggctgtcgggccggcatgcaggcgcgcgcgtggtcttccttttgtactacaagacgacgatggattgatcgagacgacggcgaccactcgatggatcgatcgatgcgttaatttaattttgcgagacttaagtgtacgtacgtacctacctgcgtgcgtacaaattgaaaggggaggacggattttggatgctactaagaaagaagctaggggattgcattggtgaggtgattaggcgtgcgtaagtggtggtgctgtgtctgtgatctgtgtatatatatgcaaatcagtagatcttatgttaact

SEQ ID NO: 31300 - DNA, 1136 bp, Zea mays
  Clone ID: UC-ZMFLB73152B05_FLI
ggctgattggttgcatctgcggattcaggcagtggagtgattgacatgaactggtttgagacacttaacagaattaaaaacatcccggtcaagcaaacatccgaagataacttggagactgctgttacgttaatgaagagcacttataacttttatcgggagagcccttgtggaacatttccttcaggtatcaatctctacacggttacaccatcacaagctcctattgaagggctaccgccaaccgctgctgtagttgagacgctcgacttaagtattccaagaaaactccttctgtgggtatacactctggttcatggtcgttactcaaatatatcctccgttgtaaagtattgcgacgagatgaagttaagaagtaaaagaggaaccccagctgcgtctgcttcgtcacaagttgtgcagccagtgtcgcatagtaccgtttcttcccaagttgtatctaaagaaaagagctcccaagttgaacccgctgaagcagcacaaaatccttctgatctagctgccacttgcgttcctgcataccaagaagttggtggtgctagtgcctcgcaaagtgccattgaggcccagaaagctactgctgcggcatctcagctcactcgcagtggttcatcaagggcaatggaaaatgcacaggacggcggggagaggaagtaacgagatagagttcgattttttttatcctctatgctacatcgtatggatgcatatgatcctgcctgacgattctcaggtctcagctctccgtggctccgtgtgcaaatctctgccacgggcgtgttttaacgcctgattggatggttgcccgctggcgcgcccggccagcctcgtacggccacttcggacgcatctgcatcttcggaggtacccgcagatgtagatgaatggccgtaaaatggtttggtctgcgtctctttacatataaccaaataaaaactcagataaagttaactcatgtggtggtctatgttgagatgatgcgggtaaccaatcgaacggttaacaaattcaggtcgtatgtatatcctggtttacagttagtgtttcctaagtgcatttgtagattatagagctgtcaagattgaacgatacatctgtaaggtgttacaaatgct

SEQ ID NO: 31301 - DNA, 1324 bp, Zea mays
  Clone ID: UC-ZMFLB73152D05_FLI
tttgcaattgcatttggtaccgcaattggctgcatcggcctcctcgtcctcgctgccgggtttctgttctggtggaggcatcgtagaaaccggcaggtcctttttgatgtcgatgatcaacacatggagaacgttagcctcgggaacgtgaagaggttccagttcagggagcttcagtctgcgacaggcaacttcagcagcaagaacatactgggaaaaggtggctttggatacgtctacagagggcagttccctgacggaactcttgtggccgtgaagcgactcaaggacggcaacgccgcgggcggcgaggcccggtttcaaaccgaggtcgagatgatcagcctggcactgcacagaaaccttctcaggctctatgggttctgcatgaccgccacagagaggttgctggtctatccatacatgtctaatggaagcgtcgcgtcgcgcctcaaagggaagccacctctggactgggtgacgaggaagaggatagctctcggggcagggagggggctgctgtacctgcacgagcagtgcgaccccaagatcatacacagggacgtcaaggctgccaacatcctgctagacgactgctgcgaggccattgtcggtgacttcgggctcgctaaactcctcgaccatcgggactcccatgtcaccactgcggtgcggggcactgtcggccacatcgcgcccgagtacctctccactggccagtcgtcggagaagaccgacgtcttcgggttcggcatcctgctgctggagctcgtcaccggtcagacggcgctggagtttgggaagacggcaaaccagaagggagccatgctggactgggtgaagaagacgcaccaggagaagaagctggacgtgctggtggaccaggggctgaggggcggctacgacaagatggagctagaggagatggtgcgagtagcgctgctgtgcacgcagtaccttcccggccaccggccgaagatgtcggaggtggtccggatgctggaagcaggggaagggctcgcagagcggtgggaagcctcgcactcgcagtcgcagagcgcggactcgcacgagttcaaggccgtcgagctgtcgggcccgagatgatgatgacgacgacgccgccgccagtttgcactttgtacagcatgcatattaaggaccgagaatcctgtgtggactaccatactagaatagctagctatagatgtgtattagattaactgtacaaaaagaagagcgtgtgaggtttgtactgatttggatatttacagaattagtagtcgagacaataagaccaagtaaaaaagagcttttcattgtt

SEQ ID NO: 31302 - DNA, 1051 bp, Zea mays
  Clone ID: UC-ZMFLB73152D07_FLI
ggaccagcaaaaatctgtgagatcctcaaagacagtaaccatcgagttagaaaagctatcgatgatgaggtttcacgtagtaaccagccttttgtctgggcattcaacctgcaactgcccaaggataacttcagcgcaatattctactttgtgtcgctggaggctatacctgaaggctcccttatggaccagtttttgaaaggagatgatgccttccgaaactccaggcttaagttaatagcgaacattgtcaaggggccctggattgtccggacggctgttggtgaacaggccatctgtatactggggagagccctctcgtgcaagtatgttcaaggatcaaacttcatcgaagtcgatgtggatatcgggtcttctatagttgcaaatgcaatcgttcatttggcatttggctatatcacaacgctaactgtagatttggcctttctcattgagagtcaaaccgagccggagctccctgagaaacttattggagcagtaaggttttctgagttaaatccaggatcagctggtttgtttgaaaggcggtctgaagagcatcaggaaagcactcagtctcggcctgtaggattttggcagggtttctctcaactgttgaacaaccaaggcaatacaagggagccatcccctaatttacagaatactaatggaactttgcgcaaagaagaagcaaatgaggatgccaaatgattcagacccctaccattgtttcggggacaatttatcagtagatcacggcgttacaatttaccagatagtcccagggctttgtttctttgccctcacatctgctgtaaaaattataactttggccacagacaaactgcataactttgtacataaactgaatgcttcctaaatatttgttcccttatatagttatatgtgaattgtatgaagctcaaggaaagatgtttcattccacagaatgtgatagttgaaagcatctgcatttcaaaaagataaaaaagtttaggatatcttattccagtaaagacggagaggaatgcatctggcggtgaagtgtaat

SEQ ID NO: 31303 - DNA, 909 bp, Zea mays
  Clone ID: UC-ZMFLB73152E03_FLI
gaaggtgcaggcggcgtcgctgtcggtgagaacgcgggtggcgacgacggcgcctgtggccacgccggggtccagcacggcggccaaggatgggaagaagaccgtgcggcagggcgtggtggtgatcacgggcgcgtcgtcggggttgggcctggcggcggccaaggcgctggcggagaccggcaagtggcacgtggtgatggcctgccgcgacttcctcaaggcggccaaggcggccaagggcgccggcatggcggacggcagctacaccatcatgcacctggacctggcctccctcgacagcgtgcggcagttcgtggacagcttccggcgcgccggcatgccgctcgactcgctcgtctgcaacgccgccatctaccggcccacggcaaggacgccgacgttcacggcggacggatacgagatgagcgtcggcgtcaaccacctgggccacttcctcctggcgcgcctgctcctggacgacatgcagaagtccgactacccgtcccgccgcctcatcatcctcggctccatcaccggcaacaccaacacgctggccgggaacatcccgcccaaggccgggctgggcgacctccgcggcctcgcggcggggctgcgcggccagaacggctctgccatgatcgacggctccgagagcttcgacggcgccaaggcgtacaaggactcggcgtcgttcgagaaccagctgtcgcaggaggccagcgatccggagaaggccaagaagctctgggagatcagcgagaagctcgtggggcttgcctgagctcgccggcacggcgacggcgacatgatgactctgtcgagcagaggagctttcgcttcgttgtattatgtgtaccattagcatccattttgtttgtttctagaagttggtaatgaccgtcggag

SEQ ID NO: 31304 - DNA, 2542 bp, Zea mays
  Clone ID: UC-ZMFLB73152E05_FLI
cccgttcacccctgtctcgtcgtggcgacgattggggaccctagcctcctacgcccaataccctaaacccttcccttgcagcacctgccactgccagtgcattagatttacagcaacggattggtttggccaacacgttgagttcaggttcaatgtctgaaccagcacaacctagtggaggggaaggtgatgtcaacacgctccgaatacttgtagcaaccgactgccatctaggctacatggagaaagatgagatacgtaggtttgattcctttcaagcatttgaggagatttgcgcattggcagataaaaataaggtggattttatacttctcggtggtgatctattccatgagaacaagccgtcacgctcaaccctggtaaaaacgattgagattctacggcgctactgcctaaatgatcaacctgtgaagttccaggttgtcagtgatcagacagttaactttccaaacaggtttggtaaggtaaattatgaagacccaaactttaacgttggtctgcctgtgttcaccattcatggaaatcatgatgaccctgctggagtggataatctctctgctatcgatattctttcggcttgcaatcttgtaaattattttggaaagatggaccttggtggctctggcgttggtcagatagcagtttatcctgtacttgtaaaaaagggcatgacttcagttgcactgtatggtcttggaaacattagagatgaacgactaaatagaatgtttcagacgcctcattcagtacagtggatgcgacctggaactcaagatggggagtcagcgtctgactggttcaatatattggtacttcatcagaataggataaagacaaaccctaaaagtgccatcaatgagcatttcttaccacgtttcctggattttattgtatggggccatgagcatgaatgtcttattgatcctcaggaggtccctggaatgggtttccacatcacacaaccaggttcatcagtcgcgacgtccctgattgatggtgaagcaaaaccaaagcatgttcttttgttagaaatcaagggaaatcagtacaggccaaccaaaatacctctgagatctgtcagaccttttgaatatgctgaggttgtgttgaaagatgaagcagatgttaactcaaatgatcaggactctgtgcttgaacatttggataaaattgtaagaaatctgattgagaagagtagccaaccaactgccagcagatcagagcccaaacttccattagttagaatcaaggtagattactctgggttttcaacaataaacccacaacgttttggtcagaagtatgttggaaaggtcgcaaaccctcaagatattctcattttctcaaaatcagcaaagaagcgccagactacaggagatcacattgatgattctgagaaacttcgtcctgaggaactaaaccaacaaacaatcgaagctctggtcgcagagagtaacttggcactttcacagcacattatctggatatgcgcatgatgttttgtgaggatcatttcatttttctaggaaaatggagattcttccggttgatgatttggacattgcgttgcatgattttgtgaacaaggatgacaagatggcattttattcatgtttgcagagaaaccttgaagaaaccaggaataagttgagttctgaagcagataaatccaaatttgaggaagaagatataatagtcaaagttggcgagtgcatgcaggaacgcgttaaggaaaggtctctgcactctaaggacggcacacgtttgacaacaggctctcacaacttggatactggaggtaaatcttttacagctcaaagcaaccagaactccttcagtgatgatgaagacaccagggagatgcttcttggtgcaagatcaactgatgttggacgaaaatcatctggatttactagaccctccaaagatactgctgatgttgctaaacgtggtacttccaaaagaggcaggggaagaggcaccagttcaatgaagcagaccactcttagtttcagccagtcaaggtcagctaccgttattcgtagtgaggatgtggcttcctctgaggaggaagcagatgcaaatgaagttgttgaaaattcagaagaggagagtgcgcaacaagttggacgtaaaagagcagctcctaggggtagaggtagaggtagaggcggaggttccactgcaagagggggcgaaaaacagatattgcttccatgcaaaatatgatgagcaaagatgatgatgattcagaagatgaaccgccaaagaaaactcctcgggtcaccaggaactatggcgctgtcaggaggagatgaccctttaaggagttcttgctcatgagagttataggctaggtgttttgtcttgtaaagttggaagagccgacgtgtttttatcaaccttgacgtcgaccagtttgcgttgccgtgaactgactgtaccttgtacacgcccgaatgtaacggatttttgggatttatacatccttgtagctgcttaaattccagcgattgctgtc

SEQ ID NO: 31305 - DNA, 908 bp, Zea mays
  Clone ID: UC-ZMFLB73152E08_FLI
gtcccttcgcgcccctgaaattgtccgaccgcgtggcgactcgggtcggacggatgccggtcgacgtcgaggcggcgatggccccgccccaggcggcatcggcctgcagctcgtcgtcgataggcagggacagcgacgagtgctcgccgccggggaaggaggaggaaggggagggggaggtgcagagcgcgtacgagggaggaggagggggcagcctcgctgggttggaggcattggaggaggcgctgcctattcggctctgcaaaagacattactaagtcagagaatgcatactccagaaaacggaagaatctctttgcctacatcatcatgtatggaaattcacatgaaccacgggcagctcaagtttatgaaactgccgcccctaagaggcatgctagtttgagtagaaactctttggtgactttggctagcagcagttccaggagcagcagcagtatcagcattgaagagcatgaactgcccgagcatcttgattctccgcgttcacctgatggttttatatccgcaccacgatctggctcttgcgtgcctgatgcatctgtgcctaggtcattgtcaatgatggacttgcatcgtctgaataggtcaagttcctcagttcgtctcaaagatgggaaataggaaatacgactggacttggatccagaggattttctatttctttttgtcatcttttgctcgaggtttctagcaccatcttctctaatagaactaaggatggcatggaggtttctggataaataagtgatcacttagtttggcgaggggtatatatgtgtttgtaaaatagttcttcactccattgtaattagcatataatgtactaatatgaatgcctctactcatgtgaccatcttcagctgtaaattaacaaataccttttt

SEQ ID NO: 31306 - DNA, 1717 bp, Zea mays
  Clone ID: UC-ZMFLB73152G03_FLI
gcttgtctttcctttctccctccccttcgagccaccaacccgggatgcagcccactacgcgggaaatgcaggccatggccgccgccggccagcagatctccctcgacgacctccgcgcggcagcaggcggcgtgcacgacgacttcctggaccagatgctcggaggcctgccgccgtcggcatggccggagctgtcgtccgcggcgggagggaaggcgccggatggcggcgcgcaggcggagcagatgcagcaccagccgcagcacttgggtgggggtgggggcctgtacgacgactccgccttgctggcgtcgcggctccggcagcaccaaatcagcggcggcggcggcggggaggccgtgaagcagatggtgctgcagcagctggccgatctgaggcaggaacaccatgtgttgctgcagggcatgggccgctcgacctcgacgggcggcagcagagacggcggcctgctcctcccgctctctctcggcagtggcggatcgggcggcgacgtgcaggcgctactcaaagctgtagccgactccgccggaggagaagccgcaggcgtcttcggcggttccttcgccggatcgctccaccaccaccagcagcagcagcagcattttcaatcacatccgcagcagcaaacggcgccgttgccggggcagggcttcggtggaggcgcgggcgcgtccggcggcgtgtcgcagccgcaggccggcgctgcgtgcggaggcgccgccgcgccgcccaggcagcgggtacgggctcggcgcggccaggccaccgacccccacagcatcgcggagcggctccggagagagaggatcgcggagaggatgaaggcgcttcaggagctggtgcccaacgccaacaagacggacaaggcgtcgatgctggacgagatcgtcgactacgtcaagttccttcagctccaagtcaaggtgctgagcatgagccggctaggtggtgccgctgccgtcgcgccgctggtggccgacatgtcctcggagggtcgaggcggcgtggcggtcgcggccgggagcgatgatgggctggcggtgacggagcagcaggtggcgaagctgatggaggaggacatgggcaccgccatgcagtacctgcaagggaagggcctgtgcctcatgccggtctccctcgcctccgccatatcctccgcgacgtgccacatgcgacctccggtgggaggaccgggcctcggggtcgccgccgccgccgcgcaccacatggccgctatgcggttgccgccccacgccatgaacggcggcgccggagccggagccgacgccgtgccggcctcacccagcatgtccgtgctcacggcgcagtcggccatggcgcccaacggcgccgggggtgggactgatggcgagggctcgcactcgcagcagcagcagcggcatcatcccaaggacgccgcgtccgtgtcgaagccgtgatccgctcgtgaacgtgaaggcaacggccgccgtgacactaacggcgcaaccatgacatgacactcggagctgacaaagtgggctctttggcgggcccacccacgggctttcggcactgcagttggccctccgaccttcccccttttcgcattttattcccagtgtaaccattgttttttttttccttgtttaatattaatcccatgtattatcgattcgcaaatgcaaggctggttctcctctgcttgctttgcgcc

SEQ ID NO: 31307 - DNA, 1676 bp, Zea mays
  Clone ID: UC-ZMFLB73152G04_FLI
ggcccgcacggcatcggcgacctcggggacgaggcgcttgctttcctgcattggctccgcgacgccggctgcacgctctggcaggttctaccacttgttcctccaggtaggacggctggggaggatgggtctccttattctggacaggatgccaactgtggcaatacccttttgctatcccttgaggagcttgtaaaagatggtctactgatgtcagatgaacttcctgatcctgtggatacagagtatgttgaatttgacactgttgcaaatctgaaagaaccacttattgcaaaggcagcagagaggctcctactaagccatggagagctcagaacacaatatgactgcttcaaaaaaaatccaaatatatcaggttggcttgaagatgcagctctttttgctgctattgacaaaagcatcaatgcattctcttggtacgagtggcctgaacctctgaaaaatcgccatcttggagccttggaagatatatatgaaaaacagaaggattttatagagacatttatggctcagcagttcttatttcaaaggcaatggcagcggattcgtaaatatgcacaaaagctgggtatcagcatcatgggtgacatgcctatatatgttggctaccatagcgcagatgtttgggcgaacaggaaatcatttttgctggacaaaaacggtttccccactttcgttagtggcgttccacctgatgcatttagtgaaacgggtcaactatggaacagtccattgtacgactggaaagctatggaagcagattgtttttcatggtggataaagaggattaaacgtgcccttgatttgtatgatgaattccgtattgaccatttccgggggcttgcgggtttttgggcagtcccttctgatgcaaaagtagcactggttggaagctggagggctggaccaaggaatagcttttttgacacgctcttcaaagctgttggtagaatagatataatagcagaagatctgggggtaattactgaagatgtcgttcagctaaggaaatccattggggcccctgggatggcagttctccagtttgctttcggaggtggttctgacaaccctcatttgccacacaaccatgaaatggatcaagttgtgtacactggaacacatgataacgatacagttcttggctggtggcaaaatttaccagaggaagaaaagaaaattgtgatcaagtatctaccagaagccgagaatattgacataacatggacactgattacggctgccctctcttccgtcgcgaggacttccgtggtaaccatgcaggacattcttggccttgacagttctgctagaatgaatactccagctacccagaaaggaaactggaggtggaggataccgagctctgttggcttcgacagcctcagccctgaagcagcaaagctgaaggagctgcttgcgctgtacaatcgacagtgaagtccgctattgccatcgaagttccttcaataaaataggcaacaaaatgtgagcggtttggttgccaagttctatggtacgcggccccgcacagaggttgtgttctggttggctggaaacttgcgtgcactgcaagttaagacttgaacatgaagcactattgtatgtgtgtgtattctcatttttttattaaccatttttttggtcgggtctat

SEQ ID NO: 31308 - DNA, 1278 bp, Zea mays
  Clone ID: UC-ZMFLB73152G12_FLI
aaacaaagactcgaaagtttaagcccatcaaaatcaaggtcggctcgggctggttcaaggtcaccacgacatcataagggaagcaaatcatcgccaactagtgatcgtcattctcgccatagcaggcattcaaggtccagatctcttgacagaaagcatcatcacagtgataaaaaggacagaaagtctgagattcaggacgacagaagatctcatagaggcagcagacgcgacaaagatgaaagttcagtgaaggatgatggggaaagatctcatagaggtagtagacgcgacaaagatgaaagttcagtgaaggatgatggggaaagatctcatagaggtagcagacgcaacaaagatgaaagttcagtgaaggatgatggggaaagatctcatagaggtagcagacgcgacaaagatgaaagttcagtgaaggatgatggggaaagatctcatagaggtagcagacgcggcaaagatgaaagttcagtgaaggatgatggggaaagatctcatagaggtagcagactcgacaaagatgaaagttcagtgaaggatgatggggaaagatctcatagaggtagcagacgcgacaaagatgaaagttcagtgaaggatgatggggaaagatctcatagaggtagcagacgcgacaaagatgaaaattcagtgaaggatgatggggaacgatctcatagaagcagtagaggtgacaacgatggaaggtctgtaaaagatccagtggaagataaaagggtggatagtaatgctgtcgcacataagaggagctctgaagatgaaatcctgaacaacaatagtagtaaccataagaaacatagacatgaagttggtttggaagttgatgaaggaaatgatgtgtgccctgctgtagcagaccctaatgggaaacatgaaactggagtaggtggatctttagggggcgctgcagaatctgctatatgatagctgctgtatcattcagttggctgtttgcagattgattgatgatgatggagaatgctgaactggtgtttattatctccctttctgatttaggagttttatttgcagggcatgaagatcttcggagaactcgagtgctgttcggagcgctcatctgatatattaaaatgtattcctcattagcttgagattcgctccttggagcaaacttttaaatgtaacactggagttgtaaggcgatttcatacagtgaggtagaaaccaaccatgtatttgtcgtttcaggcttatgattccatgaagagttgttggagc

SEQ ID NO: 31309 - DNA, 1278 bp, Zea mays
  Clone ID: UC-ZMFLB73152H10_FLI
ccgggaggggagaaaggcgaactcgaattgggggaagagagcgagagacgaatcgcatcgagccggagaggaagtcagagacagggaggagggcggcggaatcggcgccggcgggaggcaggcatggaggacctgagcgtggaggagctcgcctccaacctctccacctacaaagagcagctacgcgaggtcaagaagcttatcaaggagaagaaggatgatgctggaatttctgaatatattgatatggagaaggagcttcaagaggtcataacgttaaccgaagagattttggcaactgcaaagcaaactgagagtgcccagaatgttgcaggtctatcaccgccaagctattcagctggagtgcagtctgagggactggatgacctttcacattcccataagtttgccgttggtactagagttcaagctgtgtggagtgaagatggagaatggtataatgcaaccgttgaagctttgacaccaaatggatactatgtagcctacgatggctggggaaacagtgaagaggtggacccagataatgtgaggctgcttgaggaagaagcagctgatgccttgggacaagctgaaaaggaagctgaagctacaaaaatggcaataaagaggaaaattgaacaagcagcaacatctgattttcaggcgcgtagcttgccggccaaacttcgtatcgaaccaagtgaccctgaggatgttaaagctgcaaagcgtaagaaaatacatgctttcaaatcaaaatcccgctttgagcagcttgaatttgcccaaaacaaaaggcagaatgcatggcagcagtttcaaaccaaggggaaagccaaaaaggtggggttcttctccggtcgcaagaaggagagcatcttcaagtcaccggacgaccacagaggtaaggtgggtgtcactgggagtggcaagggcctgaccgacttccagaggagggagaagcatctgcaccttaaaggtgggtccggggatgcagcggatgatgacgaggagtaaactgaagaaccgagcctctgtttgtatcccgccgaacagacatttccatacctgttctttagcgccgacatggcctcgaggggactcttgacttaaaccagaaaatttcaatgtttgtcccattctcattgttgaatgtcgctgccgttttggagctgcattctggtggcgaggtcacgctgctagaggagggcgtcctgagcgtacagatcgacttgtcttgctagtctgtagtgaagtattaatccttaaacgtttact

SEQ ID NO: 31310 - DNA, 2543 bp, Zea mays
  Clone ID: UC-ZMFLB73152H12_FLI
ctgccttcttctctcatcttcctgctcaacatcagtagcagctttagctgtagcagcgccaccggccaccgccacgccatggccaccacgttgcacaagccccttggggcgatcaccgttgacgacctcgccgcggcggcgcctgggtcggacgccaccgcgctccacgcagcgctccggcgcgcgctcgactcgcacggacccaccgaagtgtggggcgagctctgccggtccgtgctctgtccgtctgtccccttcgccgtccaccggatgctctactacggttgcttcgccgggttcccgtcccccacgccgccggcctggacgcccgaccccaaggagtctgtcttgaccaatgtcggccgtgtcctcgaggcgcgtggtaggaacttgatcggcgacgcgtacaaggatcccatcaccagcttcccagacctccacaagttctccaacgagaacccagaggcgtactggaagatggtatttgaggatatgggtatccaattcagcgtagagccatcctgcatctggagagagaacactgcatatcctggtggcgagtggctaccaggcgccgagctcaacgctgctgttaattgcttgactgctaaacccgggaggagctccgacggtccggccattgtatggagggatgaagggaaggactctgatcctcttaacttcatgtctttggaggacttgaggaagaaagtttgcctagtggccaatgcaattgatgccctggaactgccgaagggatctgcaattgctattgacatgcctatggatgtcaatgctgttgtgatctaccttgcgatcgtgttggcgggatatgtggttgtctcaattgcagacagttttgctgcacctgcaatatcaatgaggttgaagttatcagaagcgaaggcaatttttactcaggattacatccttcgtgatgacaaagaactaccattgtacagtagagttgtggaggctaaggcccctatggcaattgtgattcctgtaagggggtctttgctaataaagggactacgtgttgatgacctttcctggcaagatttccttggaagggttaattataccgaggctgaaaattacactgctgttaaccaacctgcctatgcattcaccaatattctattttcatcagggaccacaggggagcccaaagcaattccatggacacatataacacccctaaaggcagctgccgatggatggtgtcacatggatattcgtaaaggagatgttgttgcttggccaacgaatcttggttggatgatgggcccttggcttgtttatgcctccttgctgaatggagcttccatggctctgtataatggctccccaaatagttcaggctttgcgaagtttgtacaggatgctaaggtaacaatgcttggactggtacccagcatcgttcgtacttggaagaatacggactgtacagctggactagactggtcctccatccgatgctttagctcctctggggaggcatccagtgtggatgattatttatggctgatgggaagagctggttacaagccagtaatcgagtactgtggaggcacagagattggtggtggatttgttactggatcgatgctacaacctcaagcgttgtctgcattcagcacacctgccatgggttgtaacctgttcattcttgatagcagtgggaatcctttgccacaagactctgtcggcattggtgaacttgcacttgatccaactttatttggatcatcaacaacacttctaaacgctgatcatcaggaggtttacttcaacggaatgccagaatggcacgggaaaatcctccgcaggcatggagatgaatttgagcgtacttctgacgggtattatagagctcatgggcgtgcagatgatacaatgaaccttggtggaattaaggtatgcaatgcgttgtggaaatatgcaactacgtgttgcaatgtggcatttcctgatccacacatggagtttcatgatcactttcaggttagttccattgagatcgagaggatctgcaacagagtacatgacgccatccttgaaacagcagctatcggggttccacctgtagggggtggccccgaacaactaaccatagccgtcgtgttgaaggaccagagctctcaaatagaggacttgaaccagctgaaactagcatgcaacatggctctgaagaaactgaaccctctcttcaaggtttcctccgtcgtcatcgtcccgtccctccctaggaccgcctctaacaaggtcatgaggagagtccttcgcaaggagttcagccaggccgcccaggcaaagcattcaaaaatataggtagttattagaaataattagtgttttctgctgcaaatgcacctgcagaaagagtaaaacaccaaactgggcatatcgggaagtcctgttgtttgccaccaaaacggataaatgagatgtacttagatttcgggaaataagggagctgtattcctgccaacgttcagcactcacttgatgtgctgcactaataaaacactaatgcaatc

SEQ ID NO: 31311 - DNA, 984 bp, Zea mays
  Clone ID: UC-ZMFLB73153A09_FLI
gcttaatgcaacaagtgatattgaagcttgtaaaattattggcatggattgtgagtggagacctaatttcgagaaaaatactaaatctagtaaggtctcaatcatacaaattgcatcagataagatagccttcatttttgatctgattaaactgtatgaagatgacccaaaagcattggacagttgcttgaggcgtgttatgtgttcatctaagatactaaagctgggctatgacattcagtgtgatcttcatcaactaacgcgatcatacggagaattggaatgttttcagtcctatgaaatggtacttgatatgcagaagcttttcaaaggcgttactggtggcctctctggattgtcaaaggaaatattaggagctggtttgaacaagacccggcgaaatagcaactgggagcaacggccactaacccaaaatcagaaagagtacgctgctcttgatgccgtggtccttgtgcatatattccatgaacacatgcggaggcaagcacagttcggtgtctctgagggaagcagagtcgagtggaggtctcacgttgtttcccgagtgagttgcacgcgtacgcccttgcgtttctagtggtggggttggacagcttggagtgaaattacttctagcatctgcatgtgccgtcttctaacatctatgatgacagttctctggcatggcatcataggctcacagttcatccccagaagttagtgctgcgacttcgttgctcttgccttgtgtatatacagtatattgttacctccaccggagtttttcctttcctgctgtatcgcattcagtgctgagtgcattattagatttggaacccgttttctgttatgaattagtgataatggaagtcaggaagtgtcgcgttatgaattagtgcagggggcaagaaagccagaggattatttccgtattatgtatgggacgtgaacttagcttaatagatagattggggttggagatgt

SEQ ID NO: 31312 - DNA, 562 bp, Zea mays
  Clone ID: UC-ZMFLB73153A10_FLI
gaagacgcctcagccaccgcaaaatccccaaatccgcggcggagaggagagagccggagagaggggcgcagccagagagatcggagaaggggaagaagatggtgcgggtggcgacctacttcgcgatgaccttcggggcgttcctcttctggcagtccatggacagggtccacgtctggatcgcccttcaccaggacgagaagaaagaaaggatggaaagggagctggagataaagagaatgcaggcagagttactggcccaagctaaagagaatgaatcatgattgtcatttgtccaatggtttcaggcagttcctttatcgtatttcctctgctgtattttccatgcaatatcttgactgatgtatgctcatgctcagcacctccaataaagcgagacatgctatagcattgttgaatgcaagtgggtatgcagtttgcagtatgcttatgttgaattgatgtaacttagccgaactgaaagaggctgccccagcttgattggaacagaggaatttgctgctgtttttgttcttattacggaacaacacaagtcaactct

SEQ ID NO: 31313 - DNA, 1308 bp, Zea mays
  Clone ID: UC-ZMFLB73153B01_FLI
ctcctgatgggacaggggcctgcatcaacactatggttttatttcaagacaaagtatcaaggtagagaagagaagctgaagatggtaatgatggagcttggcatgatgttcgatctcctctacaccaaagccaacgtgctccagagaaggattggtgtcctattcctgtgtgcttcccaggccttgatggtcgttgccctggttctcttcatgatacgacgtgaggaaggcgcccacaataacaaggttaatgtcgcgattacctacacattattcagtggcgccatttttgtggagacctgctgtgttgctgcggcgattgcgtcgccttggacaagggcacacttgaaggagagcagctgccttcatggtctcagtgactccttgtttgaggctgttcatctgtgcaaatccaccgctaataacatggcacagtttaacttattggatcactgcatctctgtcaactccaaaccaagagttttctcaaaggccctcagtgctattggtctggataagcaatggtacgtccaccacatggataagcaatgctactggtggattatcaaccgtgttttggaacatttggccacattgcccgacgaattctcaggtctagcaactgtacactttacaattaatgcacccactgaacatccagtatggttcaaccagctgagtacatccttcgagcaagtcctctacggcttacacctatacactgacctacatctaagcaggcacttcaacaactgcagcacgggtagcgtcgtacaaccacctccacctgagattatgcgacttaaggaagaatgcgagacactatcaaactacatgatgtacctgatggtggtgcatccttccatgttgccagtcaacacagttgcggcaggagatcttgttcaacaacttattggctgggttactaaccaccctggacatggggcgacgacgaccaagctagcaattctgcgagggtactcaaggaccttttacattctgggcatagacgaaccaggccaacacagatcattttattatttgcatcacttacttacgcagatcaaggagatgtgggtgaggcttctcatgtatgctgctggcaaatgcagcggagaggtgcacgcacgccaacttggtgaaggacgtgagctcatcacctttgtctggctactcatgctgcatcatggacttggagacatggcagctgagttcaagcttttaagatctaatgatccaaatgtagccgagcggggggcgtggattgtttcacctccaggaaattatcaagagccgacttgtgccttc

SEQ ID NO: 31314 - DNA, 3101 bp, Zea mays
  Clone ID: UC-ZMFLB73153H09_FLI
ccgacgtgccagtcaccgccgcgggcgcgctcaagtcgtacaagctcgctgccaaggccatctccaggctgcagtcgctgcccagcgggaacctgtcgttgctgtgcgatgtgcttgtccgtgaggtgagcgaactcacgggctatgaccgggtcatggcctacaagttctatgaggatgagcatggcgaggtcatttccgaatgcaggaggtccgatctggagccgtatcttggactgcactacccagccaccgacatcccgcaggcgtccaggttcctgtttatgaagaacaaagtgcggatgatatgtgattgctgtgccactccagtgaaggtcattcaggatgatagcctagcacaacctctcagcctctgtggttccacactcagggcttcccatggttgccatgcacagtacatggcaaacatgggttctgttgcatcacttgcgatgtcagtcactataaacgaggatgaggaggaagatggggataccgggagtgaccaacaaccgaaaggcaggaagctgtgggggcttgtcgtctgccatcatacaagcccgaggttcgtccctttcccactaaggtatgcttgtgagtttctcttgcaagtatttggcatacagctcaacaaggaggtggaattggctgctcaggcaaaggagaggcacatcctcagaacgcaaacccttctttgtgatatgctcctgcgggatgctcctgttgggatatttactcggtcacctaatgtgatggatctagtaaagtgcgatggagctgcattgtattaccagaaccagcttttggtgcttggatcaacaccctctgagtcagagataaagagcattgcaacatggctgcaggataatcatgatggttcaactgggctgagtactgacagcttagtggaagcgggttatcctggtgctgttgcacttcgtgaagttgtgtgtggcatggcggccataaagatctcttccaaagattttatcttctggttccgatcgcacacaacaaaggagatcaagtggggtggggctaagcatgaaccggttgatgcagatgacgatggcaggaggatgcatccacgatcttcattcaaggccttcttggaggtggttaaatggagaagtgttccctgggaagatgttgaaatggatgctatccattcttgcagttaatattacgtggctccctgccagatgaagatgccaacagaaacaatgtaaggtccattgtaaaagctccatctgatgatatgaagaagatacaggggctacttgaactgagaacagttacaaatgagatggtccgcttaattgagacagcaactgcccctgtcttggctgtcgacattgccggtaacataaatggatggaacaataaagctgcagaactaacaggtttacctgtaatggaagccatagggaggcccctgatagatcttgttgttactgattctatagaagtggttaagcagattttggactcagctttacaaggaattgaagagcaaaatatggaaatcaagcttaaaacattccatgaacatgaatgcaatggtccagtaatcttgaaggttaactcctgctgtagtcgggacctttcagagaaagtcattggagtttgctttgtagcacaagatttgaccaggcagaagatgattatggataagtatactaggatacaaggagactatgttgccatagtaaagaaccccactgagctcatccctcccatatttatgatcaatgatcttggttcctgcttagagtggaataaagctatgcagaagattaccggtataaagagggaagatgcgataaacaaattgttaattggggaggtcttcacgcttcatgattatggctgtagggtgaaagatcatgcaactctaacgaaacttagcatactgatgaatgcagtgatttctggtcaggatcctgagaagctcttttttggtttcttcgacacagatgggaagtatattgaatccttgctgacagtgaacaagaggacagatgctgagggtaagatcactggtgctctttgctttctgcatgtggccagtccagagcttcagcatgctctccaggtgcagaaaatgtcggaacaagctgcgacaaacagctttaaggaattaacttacattcgtcaagaattaaggaacccactcaatggtatgcaatttacttgtaacttattgaagccttctgaattgacagaggaacagcggcaacttctttcatctaatgttctctgtcaggaccagctgaaaaagattttacatgacactgatcttgaaagcattgaacagtgctatatggagatgaacacagtagagttcaaccttgagcaagctctgaatacggttctgatgcaaggcattcctttgggcaaggaaaaacagatttcaattgaacgtaattggcctgtggaagtatcatgcatgtacctttatggggacaatttaaggcttcagcagatcctagcagactatctagcatgcgcccttcaattcacacaaactgctgaaggacctatcgtgctccaggtcatgtctaagaaggaaaacattggatctggcatgcagattgctcatttggagttcaggattgtccatccagctccaggcgttccagaggccctgatacaggagatgttccagcacaacccaggggtgtccagggagggcctcggcctgtacataagccagaagctggtgaaaacgatgagcggcacggtacagtaccttcgagaagccgacacctcgtcgttcatcatcctgatggagttcccggtcgcccagctcagcagcaagcggtccaagccttcgacgagtaaattctgaccctcatgctgctggaactgcagcgagtgttctgccgtgtcgaagtctcggttgtagctagccaagtggctgctactgaaacatcggttggtcggttctggtatctagcacggcctgtgtagtgcggatagatttggttgtttggctttggagagataagctagctggctaggtgtaacgtaacgtcgaccgataactgtatgtgaatgatgatgagctgtgaggacgaataaaggcttcacttgtgttc

SEQ ID NO: 31315 - DNA, 1909 bp, Zea mays
  Clone ID: UC-ZMFLB73154B07_FLI
gaatatgtcgtcggcaggtgtgattgtcttggggccagttccagaagaccctgccttcctgcccatctgcttcaatggcagccggtcacagcactgctcatctgggtcacaactgcaggattccattcttattttccttgctgtgccgggtatgccacccatgcccatgagcgtgctgggatctgagtctattgcatctgtcaagctgcgcatccagcagttcaagggctttgtggcgacgaagcagaggcttgtgctggatgggcatgagctggcaagaaacaactccccagtcaaggattatgggctggccgagggaaatgttctgcatcttgttattcgactatcagatctacgtgtgattaacattgagactgcaactggaaggaagtttcagtttcaggtggaccagagccgcaatgttaagtttctcaagaataagcttgaagcagagggtgatgaggatattggtaatcttgaggatcacaagcttgaatatgatggtgaggagcttgaggacaaccagctgatagctgatattagcaggagggatgatgctgtgattcatttattcatccgcaaaccagcaaaggtatggacacaacaagttgatggagatactttggttacagttgtcaatccacaggggaaaggcaacctgcaaaatgaagctggctcagtgaactccgcaaactcagttggggttaggcctgcccctgttgaaccaatagttaaccgaaaagcaaagctgtcatgtgaagtgatgaagatgataaattcaaccatagctggactggagaaagggcacctgcctgtgatgtcagctgaaggttcaggaggtgtttatttcatgcgagatgcaacaggccagaagaatgttgctgtgtttaagcctattgatgaggaacccatggccaaaaacaacccaaggggcgttcctgtgtccacagacggcgaggggatgaagaggggaacaattgtaggggaaggtgcattcagggaggttgcagcttatattctcgaccatccagttagtgatagtaaatatggtcacagtgttgggttttctggtgtgcctcccaccacattggtccgaaccttacatagggggaagagcttcaagattggttcactgcagatgttcatggagaacaatggaagcactgaagatatgggtcctcgatcttttcctgtcaaggaggttcacaaaatagcagtactagatattaggttagctaatgctgatcgtcatgctgggaatattctagtgtgcaaggagggagaaggtggcaactacaagctgattccaattgatcatggttattgcttgccagagaagtttgaagatgttacatttgagtggctctactggccccaagcccgtgagccattcagtgatgaaaccattgaatacatcaaatcacttgatgctgaagaagacatcaagcttctcaagttccatgggtgggagctgcccccacgatgcgctcgtgttctgcgcatcagcaccatgcttttgaagaaaggtgcagctcgtggcttcacaccatatgacatagggcgcattctatgcagggaaactgtgaatagggagtctgagattgaggacatcattcaggaagcagaggatgctgttctcccagggtccagtgaaaacatgttcttagaaactgtatctgaaatcatggaccgtcacctcgacaaggagtgagtttagaaattcagaataactgatctagttgttccagttccagctgtatccggtttgttgtttctattgttgacaagcactgatcaacagactaataatttgatttgtttgtacctctcaaatgtttctttcggttgtaatgctcgagtactttgcttagcacactttgtgaataatatatttgttcagttagacatt

SEQ ID NO: 31316 - DNA, 899 bp, Zea mays
  Clone ID: UC-ZMFLB73154B08_FLI
cttctttcattcgccgccgccgcctgctctctgctgccgtcgccatggggagaaggcctgcgagatgctatcgccagatcaagaacaagccataccccaagtccaggtactgccgtggtgtccctgaccccaagatcaggatctacgatgttggcatgaagagaaagggtgttgatgagttcccctactgtgtgcaccttgtctcttgggagaaggagaatgtctccagtgaggctcttgaggctgcccgtattgcctgcaacaagtacatgaccaagtctgcaggaaaggatgccttccaccttcgggtccgggttcaccccttccatgtccttcgtatcaacaagatgctttcgtgtgctggggctgataggctccagactggaatgaggggtgcctttggcaagcctcagggcacctgtgctagggtggacattggtcaggtcctcctttctgttcgatgcaaggacaacaatgctgcacatgccagtgaagctctgcgtcgcgccaagttcaagttccctggccgccaaaagattattgagagcagaaagtggggcttcaccaagttcagccgtgccgactacctgaagtacaagagtgagggtagaattgttcctgatggtgtcaacgcaaagctgctcggtaaccatggaagacttgagaagcgtgctcctgggaaggctttcctcgaggccgttgcttaagtccaatctacagttggaatgcgaatccagacgttttggtttagcctatcttattttgctttgtgcaacatgaattttaagtgtatggggtattacagtgccttgtgtgaacctgcttatctcgtgctgaacatcgttatgcatggaagtacttatcttttgttctgctaaaaattaaagtgttctgcgact

SEQ ID NO: 31317 - DNA, 2461 bp, Zea mays
  Clone ID: UC-ZMFLB73154E12_FLI
caagtttattagtgcaactgacactataaaaaggatgaagactaacattgttggaatggaggcaaatatggagcagctccttacaaagataacatcagtgcaatcaagaagcgacacagtgaatacatctctttttgacaaaagggaaaacattgagaaattacatcgcacacgcaatctgctccggaaagttcaattcatatatgaccttccaactcgtcttaacaaatgcatcaagacagaagcatatgcagatgctgtcaggttttttactggagcaaaacctatttttgaggcctatggagatacatcctttcgagactgtaaaaaggcttctgaggaggcaatggatgtagttatacaacaccttcagacaaagttatactcagattctgaacctattgaagcaagagcagaagctgtagttctccttaaacaattgaagtttccagtggacaacttaaaatcgaatctacttgagaagctggaagaatgtctcttgaatttccagaatgagactacacatgcttcaattggtgacatctcaaagacatttcgtgcttatttaataatatttcctgattcagaaaggcgtctcattgaacttgcacaagctttgttcttaaaccgatatgagacagtcagagagaatctgaagaaaagaattccatcaacagatctactggcaatgctacgatccttatgggaggatgcaaccatcatcgatgaggttatttcagaggctgcgctaccagctttttctttggagactactcgagacattgttaagcaacacatagcaactgcatttctccatcttcaaagtgaaatatcagaggcactggttaggacacattcaacatcaaatgagaagttggaagagtcacagctgcaaactgctatggagacaagcaaaatcaaagtatcccaaggatgcatagatctcctgcaggaatttcatcatctggtagatggcaatatagagttgcttgttaagctgagggatttgattattgattgggtacaagaaggttttcaagagtttttccagaaacttgatggacattttcatgtgctttctgggagaagcaaaacaaatttacaagagccaactatggattctatgcaaactgataagaccccaacagtcttggtacttatgcttgcacaactctgtgtttacattgaacaaacaacagtccctaaagttacagaggagttagcttctttttttggaggtggtgcacatagctacgaatatggaccaccttttgtgcctggagaaatatgtcggctatatcgatcatctggagagaaattcttgcaccattacataaatatgaagacccagaagatctccaaacttcttaacaagcgatttacaacaccagtttggattaagcacaaggaacctagggaagtgaacatgtttgttgatctacttctcctagagatcaatggtctggtatctgaagtcaagcagatcttacctggtatggttcggcgacatcggcattcagatagcactggtagcacgacttcctccagaagcaatccaatgcgagaagacatgttgaaccgatcaaacacacatcgtgctagaagtcagtttttagaaaatcacctggcaaagttatttgagcaaaaaatggaaatattcaccaaagttgaatacacacaggaatctgttatttctactgtcctcaagctctgcctgaaaagcttgcaagaatttgtccgtcttcagactttcaacagaagtggatttcagcagattcagctggatatggaatttctcaagacctctcttaaggaatttgtggatgatgaagcagccattagctttttactcaaagaggtgaacaatgctgcccatgagagatgtcttgacccaatccctcttgagccccccatattagataagctcataaatgcaaaactagcaaaaattaaagagagaaacccaaatatgcggtagctatgcacagattggtgtcgtttactagaattcagttctgtccatttgaatgcactattcagagttgtgtgtgcaacttcatagagtttagggcacatagcatggatgaaaatctggagtcagactcagatttgaataacactccccaaattgtatactggtatacttaatttggggtggtcgagctgttagcatccccttgcttgtcaggctaccgtcaagttgtcttctgtgcattgttttcttatcccaggtcaggtactggtctgaatttaatcaaatgagcatcgagctgttagaaaaccaaggcaccaactctaatagattcaccatctggaaagcgagggcagttatcatgccttgtgaagatggtttgttgggattgcgattccctttatgcgtcctgtttttttatttgtcatcttctgctgtatcatcctttctttgaactatattttcatgtggtacatgataccttttgtt

SEQ ID NO: 31318 - DNA, 939 bp, Zea mays
  Clone ID: UC-ZMFLB73154F03_FLI
cagaagaaaatgcaacgggcagtgcaggccgtcaggtcacacggcaatgttcttaaatatgctgttctacaacacatcagcgctcccaagccagcaatgcttcctgctgccttttctcgtttcatgtcagtttcatctgctcgcctagaggatcgtggatttgaaactgccactgtagcagatgtcttgaagtctaaagggaagagtgctgatggatcttggctctggtgcaccacagaggatagcgtctatgacgctgtcaaatctatgactcagcacaacgtgggagctttggtggttgtcaaacctggacagaataaatcaatcgctggcattgtcactgagagagattatctccggaaaatcatagtgcagggaaggtcttccaagtcaactaaggttggcgacatcatgactgaagagaacaaactgatcacagtgaatcccgacaccaaggtcctgcaggcaatgcagctcatgacagaaaaccgcgtcagacacatcccggtgatcgacggcacggggatgctggggatggtctccatcggcgacgtcgtgcgcgcggtggtggccgagcacagggaggagctgaaccggctcaatgactacatccagggaggctactaggacggcgtgtgcagcgacgaccccctccgatcccgccagtcagtgaagtccgcctttgaaatccaataactcggaacaatgatgatgacgaaataggccgtgttttcttggacaatgatgttaagttcggcaaggttttcctttctctttttttattctactgcgtggtctatgtgtatattgccaaaggcatgcgtgagccatgcgcccggtgctggggcgcagagaccatctgatggtggaaacaccggaaataagagcgtgccgctgtgtgtttcctttgaaggaataaaaatggtgttcgtgttgtgc

SEQ ID NO: 31319 - DNA, 1928 bp, Zea mays
  Clone ID: UC-ZMFLB73154G03_FLI
gtgaacgagaactccgagaatccatactggaaagcgataggatacagcgtggacgagccacgggaggatcgggctcggacggcgacaccgtcgccgtcccggcccctcgacgtcggcgtcgtggagaccaggctgctggacgacaacaagctgctcagatcgctcgtggggaggggcctcacggtgaagccggcgtcgtcggacgcgaaccaccacacagtgcaatgcgacgccgtcatcgtggggtccggctgcggcggtggcgtggccgcggccgtgctcgcgtccgcggggtacaaggtggtggtcgtcgagaaaggcgactacttcaccgccgaggactacagctcgatcgagggcccgtccatggagcgcctcttcgagcgaggcggcatcttctgcacgtccaacgtgaccaccatgatcttcacgggcgccacggtcggcggcggctcggcggtgaactggtcggcgagtatccggacgccggaggaggtgacgcaggagtgggcgcgcgagcacgggctcccggtgttcgcgagccccgggtatgcgcaggccatggacgcggtgtgcgcccggctcggcgtcaccgacgggtgccaggaggaggggttccagaacaaggtggtccgccgcgggtgcgaggctctcgggctgtgcgccgacgctgtgccgcgcaactcgtcggatgctcacttctgcgggagctgcaacttcggttgcccgaccggggacaagcgcggcaccgacacgacgtggctcgtggacgccgtcgcgcgcggcgcggtcatcctgaccggctgcaaggctgagtacttcgtcctcgagaagaaccacagcagcggcagcggaagcgggcggggcaagaagtgcgtgggcctggtggcgacctgcgcgagcaacggcgtcaccaagaaactgcgcatcgaggccaaggtttcgatcgcggcttgtggggcgctgatgacgccgccgctgctgcggcgtagcgggctcaagaaccggcacatcggcagcaacctccacctccacccggtgtccatggcgtggggttacttcccggagaacaagcaggaccccccgctctctggcaagtgctacgagggcggcatcatcaccagcatgcaccgcgtcacggaccgcaccatcatcgagacgccggcgctggggcccggcgccttcgccgcgatggtgccgtgggagtccggccgcgacatgaaggagcgcatgcgccggtactcccgcacggcgcacgcctttgcgctggtccgcgaccgcggcgtcgggttcgtggacggcgaaggacgcgtgcgcttcaccccgagccgcgaggacgtcgacgagctccgcaacggcctacgccgcgtgctgcgcatcttggtggcggcgggggccgcggaggtcgggacccaccgcagtgacggtctccggctgcggtgcaagggcctccgcgacgaggacctcgaggggttcctggacgaggtgaccatcgagaaggggcccatgcactcgagggttgacaagtgggctctccactgctcagcgcaccagatgggcagctgtcgtatggggtccagccctaaggacggcgccgtggatggccgcggcgagagctgggaggcagagggcctgtacgtgtgcgacggcagcctgctgcccacggcggtgggcgtcaaccccatgatcaccatccagtctatcgccttctgcctctccaagggcatcgccgagaccatggcccaggggcagggcaagggacagtagcctatgattgagacgcgcctggcgatggtttaattcatgcgtgcaacactgcaacatgtgtgcgttcttgttaatcgagtgtggtgaaagcgtcgaaaaatgtgtttgtgcattgtgtttgtgcaaatggtacgcgaatcacaatacatcctgtttcctgc

SEQ ID NO: 31320 - DNA, 2044 bp, Zea mays
  Clone ID: UC-ZMFLB73154G11_FLI
ctcccaaccatacgtccatatccccctcccaacaaaaaaaaaactcccatcaatggcgatctgaatcaaccaaggcatctggaagcttggacatggagcggatcctcaagtccgccagggagtcgggctccctgaacctctccaatcgctccctcagggagatacccaaggaggtttacaacaacttggacactggcagccaggatgagaaatggtgggagggagtggacctccaaaagctcattctggctcacaataatcttgaggtgttaagagaagaccttaggaacttgtcttcgcttgttgttctaaatataagtcacaacaagatatcttcccttccagcagctatcggagatctcccgttgctaaaatcactggacatgtctttcaatcaaataaacactctgcccgaagagattggcctggctactgctttagtcaaggttgacttctcaaacaattgccttactgagcttccacctaacctcgccacatgcccggacttgtccgaactcaaggcatcaaacaacaacatatccagagtaccagatgtacttgctggctgttccaagttaagtaaattggatctagagggtaacaagcttgtggcactttctgaaaacatgtttgtgtcatggacaatgctcacagaattgaatctcgcaaagaatctacttacagccatcccaggtagcattggagcacttccaaaactaatccgcttggacatgcatcagaataaaataacatcgattcccccttccataaaaggttgctcttcgctagccgagttgtatatgggaaataacttattgtcttcaataccagctgatattggcacgttatcaaagttaggcatacttgatctccattctaatcagctaaaggagtatccagttggagcctgcaacctcaaattatctttccttgatctatcaaataactcattatctggtctaccagctgaactaggtaaaatgactaccctaagaaagcttctgcttactggaaatcctatgaggacacttaggagttcattggtttctggaccaacaacaacattgctgaagtatctgcgcagccggctttcatccgatgaggaagcatcaggatccagaagcaccccaactaaagatgaccaaattgctgcagcaaggcgcttgtccttatcttcaaaggaactggacttgagtggccttggagtgaccagtgtaccagctgccgcgtgggagacaagtgatgtggtgaaactggatctttctaaaaattcaatagaagatctaccaaatgagttgtcattatgctcatcacttcaatccttagttttgtctaataacaagataaaaaggtggcctcacacagtggtttcctcccttccctgtctgtcttccttaaagctggacaataaccccttggtagagatatcatccactgatcttgtgcctctgtccaaacttgaagtacttgatctaagtggcaatgcttcagcacttcctgaaccttctgcagtttctgcattaccacagctgcaagagctttacctaagacgaatgaaactccatgaatttcctaatggtttgctgggcctaaaactgcttaggattcttgacctgagtcagaatcaccttacaactgtgccggagggcatcaagaatttcactgcactcattgagcttgatctgtctgacaacaatataacagcactcccagcggagctgggattgcttgaagctaacctgcaagtgctgaaactggatggaaatccgctaagaagcataagacgaactctgttggagcgaggaacgaaagcagttctcaagtacctcaaagaaaaattgccgtctgaataatatttatagaacaaactattgttggagtaatggaataaaatgtttttttgccactgtatctcagttttctggactgaattttgtgcaaaagtatctggaccttgtgtgagaagagagctttgtgagtgtgttgttggatatactggttatagtccacatgttttattggaacaaaaatattttctctgttc

SEQ ID NO: 31321 - DNA, 828 bp, Zea mays
  Clone ID: UC-ZMFLB73154H06_FLI
cagcaattgaactgtcatctgcttcgtggtggccgcatacatgaagaataaccaactagaccatgctttgcagtggctgctgagtttagagaaggaaggacttcaacttggtgtcaagacaaatctcatgttactggattggttgtctatgttgcagctagttccggaggctgaacagtttgtgcagaagataaagaatcttggagaagagcccatagaagtccatgtgttccttgccgatatgtatgcgaagtcgtcccaggaagataaagcccgcaggtccctcaagatcttggaagagaagaagaaactattgaagtctgatcagtttgagagggttataagaggccttgtcgatggtgggttttcggaggaggcaaataaattctacaaaatgatgaaatcctgtggctttgaaccatcaaaaacaatcgaggtcgctgttaaggctctcaggattaggggcggttctcatcgcactggtaggtagagcctgtacgccggcagagtggcagtgatctactgggcacgcagtcaggcaaagagggattctggtgtgagaaccttgtggcactgacacggtacaatcaaattgacaaaactcagtgctgaaagatggtttggccaattttttttttctggttgtcaattgtctcgaggcgcgacgttgcttccatagactatgtagttaataggtcctggctaaatgactttgttgtttccagtgatcaggattttcacttgtattagatgaggtttgaagtgattgtaacactgatccatctttcaggttgtgccaaggaaaacatatatccgcgattagtggtt

SEQ ID NO: 31322 - DNA, 1167 bp, Zea mays
  Clone ID: UC-ZMFLB73155A05_FLI
tggcgcgccaccaccagcagcgggcgctgctcctgttcccactcgtcttcctcctcctcctccttgccccgcccctcgccggcgcgtggggaaaggagggccacatcatggtctgcaagatcgccgaggtcgcgcccgattccgccctatgaaagttgggtcgaattgtagacagcagagctgggcgagcgctccttcctggaattctgatggatgcctctttgcgcggcgtgcagaagtacctgtcggagaaggcggcggcggcggtgcaggcgctgctgccggagtcggcgggcggggagctgtcgacggtgtgcccgtgggcggaccaggtgcgctggcactaccactgggccagcccgctccactacgccaacaccccccaagtctgcaacttcaagtattctcgggactgccacaattctcgtggccagcaagggatgtgcgtcgtcggggctatcaacaactacacggaccagctctacagctacggccagaagacttcgtataacctgacggagagcctgatgttcctggcacacttcgtcggcgacgtccaccagccgctgcacgtaggcttccaagatgacgagggcggtaacaccatcaccgtccactggtaccggaggaaagcaaacctccatcacgtgtgggatgtcagcattattgatacggcgatcaaggacttctacaacaagagcatggataccatggtagaggctctcaagatgaatcttacagatggatggtctgacgacatcgtccactgggaaaattgcaagaacaaacacgcgacctgcgcgaacgactatgcgattgagagcatccattattcctgcaactacgcctacaaagatgtggagcaagacatcactctaggagatgattattttttcagtaggtacccgattgtggagaagaggttagcgcaggctggaatcagattggcgttggtacttaatcggatatttggtggaggtgaagcggatgatataccactacaagtacagtaacagctctaataaaaggaagcatagctattacaaggatttgtccattacgtcgtctatacatcaataaattggcatgaatttgtaactccattgctatacatcaataaattggcatgaatttgtaacaactgaaaggatcaagatgccacccttg

SEQ ID NO: 31323 - DNA, 361 bp, Zea mays
  Clone ID: UC-ZMFLB73155B10_FLI
cctgcatctgtaccgagtctcagctgtctcctcgtctggagctgaagacttacaactgacagctctcactgctccaggaagcactccacagcaagggatccaactgtcgaggtcgaccagcgatgggtacgaagcgtcagggggtgaagacagcgaccgcattccgtcacggatagtgcaccgctcgtcgaactgggcaagcatcatcctcaactctgaccagagtgcgtcctcatctggcattcttgtgccaaagaacagactgtcctgacttcatgtgaatgaagattgtaaatgatcagccaagaaccggagattccagtatctggccttctctgttgtcaatatcagattttttcgc

SEQ ID NO: 31324 - DNA, 3494 bp, Zea mays
  Clone ID: UC-ZMFLB73155B12_FLI
gcgaaaggttatagagttggtcctgtgtatgatgatgtgttggcaatggcttggttttttctggagcttattgtaaaatcaatgggattggaacaaagtcgtctcttctaccacaatcttccactaggtgaagatgtcccaccactgcaattgaaagaaggtgtcttcaggtgcatcatgcagctctttgattgccttctaactgaggttcatgagcgttgtaaaaagggtttaagcttggcaaaacgcttgaacagcacacttgctttcttttgctatgatcttttatcaattattgagcctcgccaagtttttgagctggtttcgttgtacatggacaagtttgcaggagtttgtcaatcagtccttcatgactgcaaattgacattcctgcagataatatgcgaccatgatctattcgttgagatgcctgggcgggatccttctgatagaaactatctctcgtcagttctcatccaagagatctttctgaccttagaccatgatgatttatctcaacgagcgaaggctgctcggattttggttgtccttatatgcaaacatgaatttgatgcacgctatcaaaaaagcgaagacaaattgtacattgctcagctgtattttcctcttatagggcagatccttgatgagatgcctgttttctataatctgaatgccattgaaaagcgtgaagtgctagttgtcattttgcaaattgtgaggaacttggatgatgcaactcttatcaaagcatggcaacaaagcattgctagaaccagattgttcttcaagcttcttgaagaatgtataatccatttcgagcacaacaaaacaggagacaacatgctacttggtgctagttctcggagcccagatgtcgagcatcctgcatccccaaagtactctgaacgattgtccccatcggtcaacacatatttgtcggaggcttcgaggcatgaaataaggcctcagggaacaccagaaaatggatacatgtggaacagggttagccctcaattaagttcccctaatcagccctattcattgagagaagcacttgctcaagcacaatcttcaagaatcgggtcaaccgccagggcattgagagagtctctacatccagtgctgagacaaaaaatggaactttgggaagaaaatctcagtactgccgtgagcctcgaagtgttgggaataactgagaagttttcagttgctgcaggcgctcgaagcatcactactgattacgcgaagctagattgtgtaacatcaatcttaatgggtcttttatctaggaaccaatccttggctttttggaaggctttccttcctgtggtctacaatatatttaatgttcatggtgcaacactaatggcaagggagaatgaccgcttcttgaagcaaattgcttttcatcttttgcggcttgctgttttccgaaacgattcgattagaaaaagagctgttgttgggctgcagattcttgttaggaactcattcaactatttcaaaaacactacaaggttaagggtcatgttgacaattactttgtccgagttgatgtccgacgtgcaagtaactcaaatgaaattcgatggttctcttgaagaaagtggtgaagctcggcgccttaggaaatcactggaggaaatggctgatgtgagaagcaaggatctgttaaaagattgtggcctccctgttactgcattggaggcggcccctgaaggctcctctgataataggtggtcttgggtagaggtgaaacatttgtctaaatgtctagtccaggcccttgatgctggtctggaacacgccctcctgggttctgtagtgactgtagacaggtatgcagctgccgagggtttctataaactagctatggcctatgcacccgttccagatcttcacattatgtggttgcttcatctgtgtgatgcacaccaggagatgcaatcatgggctgaagcagcacaatgtgcagttgctgtagctggcgtgatcatgcaggcacttgttggaaggaatgatgctgtgtggagcaaggagcatgttgcttcgctgcgcaagatctgccctattgtcaacactgatgtgagtgcagaagcatctgcagctgaagtcgagggatatggtgcatccaaattaacagtggactcagcggtcaaatatcttcaactagccaataaacttttcacacaagctgaactctaccatttttgtgcaagcattcaggaactcataattcctgtgtataaaagcagaagggcttatggacagctggccaaatgccacacatcgctcacaaacatctatgagtcaattcttgaacaggaggctagccctataccattcattgatgccacatactaccgagttggtttctatggtgagcgttttggcaagctcaataaaaaggagtatgtatttagagaaccacgggatgtacgtcttggtgatattatggagaagcttagtcatatatatgaggctaaaatagatggaagtcacactttacacataattccagactctagacaagtcaacgctgatgagttgcagcctggcttctgctatttacagatcactgctgttgatcctgtgatggaggatgaggacttgggtagcaggagggaaagaatattttctttatctactggtactgttcgtgcacgtgtttttgaccgttttcttttcgatacaccattcacaaaaaatggaaaaacacaaggtggtctagaagaccagtggaagaggcgcacagtgctccaaacagagggttcctttcccgctttggtgaaccgtctgccagttatcaaatctgaatctctggagttctctcctgtcgagaatgcgattggaatgatcgaaacaaggacagctgcattgagaaatgagctagaagaaccacggagttctgaaggtgatcaactcccaaggcttcagagcttgcaaaggatactccaaggaagtgtggctgtgcaggtcaacagtggggtattaagtgtgtgcactgcattcttatctggtgagccagcgactaggctcagatcccaagaactgcagcagctcatcgctgcattgcttgaattcatggctgtctgcaagcgtgcaatccgtgtgcatttcagattgataggggaagaagaccaggaattccacacccaacttgtcaatgggttccagtcactcaccgctgagctatctcactatatccctgctatactctccgagctatgatagaactgtagcaagccagaaattaggtagcatgtgaatggttgttcattcattcagttgcaggttcccaccaaatgtccatatttccattagctttggttgtatagttctaggaaccggaaattaactagtcttcgaagttctgtaccgtattgcagaaccgattcctgattttggagtgtaaagtctgtataatacctagtgttatctgttatgcaccagttatatgctgagttccttcttttttgcagtttgctact

SEQ ID NO: 31325 - DNA, 1777 bp, Zea mays
  Clone ID: UC-ZMFLB73155D04_FLI
tttagaatatggtgccaaggcaaagtgtattatccgtgctgctcatgccgcaacacctagggacaaaatgagctccgaggagtcatctgcaatgctcaattcaagaattgttgcaatgaaccagttcatccacaagcttcaaaaagagaacaaattgagggagaaagagcgcaatgaggctcgcaatgtgctaaagctgagggaagaggagctagcacaattaagagcaaagctcaacttgatagaaaggcagggaaaagctactgagaatgagatcaattcaaaagttatggagaaaacccagacattgaggggtgaactcatgaagatggaagaagcgatgtataagcagcagcaagagctctgtgtgctaaggcagcgactgcaggaggttgagcgtgaaaaggctgatagttgtcagccagggcagcaggatgtaattggaggtagactgctggcacggctatcagagatgcctgcaggccttgatcaatcaatggcaatcgacatgtctatggacttagatatgggagatcagacgtccatgcaagatgtcaaggtaataaaggaggatacttgccagcagggccaaatatggaatcacacaaccacagcagcaagtgcttgcacagggtctttggtgcaagaagatgatgtcaggctgtccgggtatcctgaaaagactgtcctcagcactgtgtttgaggagggagatgaagattatgcagagaagaaatgtggccttcaagaggaggtacgcaaggaggttgtagatgagaactttaaggtggacatagcacaacatacactttctgagccagatcatcctgcaacaaggaagcatcatattgagaacatgttcaggctctgtggcaaccatcgtgaaatagctaagaagccaaaggttcagtcaccagcaaaggaaatgttctggaatgagaaccagtctccagcaaagcaagtgtttgggaatcagaacaaatcaccagcaaacaaaatttttggagacgaaaacaaggagccgttggcatggggagctatagagacccccatgtgtgacgtcagagtgactgacagcccagtgtcttctcagctttctccaatcgtatgccaagttgtggatgcgccattatcggcgcaaccggatacatgcagtgcagtggaagagagtgatccgaacaaggagaacagccttgctggacagaaggatggcggcctcttggaagtttacataaaatgggagtctggcaacctgatcaaagggctgaagctactgcacaactcgtgcctttcagatctgaggaagtttatagaggctcacttcgaagaagcaggcagcaaacagaagcatcagttcaccttccttctcctcggggatccgtccggtgctccggtgtcccgggacacggaagcttcggtgcagataagcaggctgcctcactggaacaaccagccggacagctacctggcgtgcctgcgcgcggccaagaagccgtctgcggaccacgtgcccttcagcccgctggacagcaatctgaacacggttcacctcgccggtgcggtgtcgcccaaggtcaaccagatgagccccagctacatccgggagctgagagcttgagctcccgtggtatctgttgcttgtccctcgtggatcgattatgttttgtgtaagatttgattgctagtctggtttgctaaccggaactactgcaacccgtgaccaagataattgcagcgaggagatgacaaatgccacctcttcaaagttgtgtgcgct

SEQ ID NO: 31326 - DNA, 879 bp, Zea mays
  Clone ID: UC-ZMFLB73155E05_FLI
aacagacctgctgtcaatggagttcatcctgtcagaccttctcctgatgctcctaatgactgcatacacattcaattgctggctgaggttatgagatgttcctcaacctcaatgcatgttttacgtactgctggtgacgatggtttgctggtaatttcgttgatgccaggctactttctttttttgttttgtttcttgttagctccagtgactttctatttctggtgtcgatgcaggctgattcaactgctgactacagtagtgataatagaatatctttggatgctattgaaactatattctgtgaagtggatgagcttgggccccaggctatggtgaacaatactaaccattgtgactcatgcggtgagtatttgattcaccctacgatggtggcacgaggagctgaacagtacttagagctaaatgacctgtccttttcgctcaccgatggtcctgattcctgtggcgtgcttttctctaatggtgtatctgttgagcaactaccggatcttgagctcaggtttgagcagttctctcctgaccacatctccaataccgctattgcttccacatcaacaacggttggttcatctgcttcagtgcccttattggaggatcacaggacctgattcagaattggagtcatctggcgcacatgttaattgaatctaggaggatctgcaggacaaaggcataatgctccctttttttcaattttcatgaagttagaatttttttttggatgaaggcacggattagtgaccacttggcacagaaatatgtttgtgttgcggcttgtgaatccaggaccatttctctgcctgtagttttgcatggtagaactagatgggcaacaacaaaatgtgttcagtattg

SEQ ID NO: 31327 - DNA, 1754 bp, Zea mays
  Clone ID: UC-ZMFLB73155E10_FLI
tgcatgcaacacaggctcgatcggccctcgtcttgccttcaacgagcagctagttcacgccccaccaacagcttcacgacttcttcgaagctgttctttaaacatcttgtttaaaacagactctagtatctctttgagctcagcttggtctgtcatgctctagcactagcacaaggtcatggccggctcttttgagttcgacaccgaatgactgaaacgaaggggcagaaaaaaaagatgtccttttcgtcctactagctagtaccaggctttcggtaggtatttctttaatacaaggccagtgtttaatagaagctcgcagaaatgtctttttgaaaaaaagtcaaaagcgaggaaagcgaagccttttaggtgaaatgattagtgcaaatgacagatttagacctgtcatcatgctagagggctgcagaggatgggaatccttggcagaatcagtagtaccttctattcgcgtattacttgtgatgccacaaggcccagttcccatgtgcagatgtgctgctgctcggctgctccccagaactactagcaaaaatgctccacctccactgacctgtgtcctggaaaagaaacatgctgtagtttttataatagtatcaggaaaagaagaatgttacagacgggccagtaaaaaaatatcagacagtgcttgatactagtagttcaaactgctccagttaagtagctaggattagtaaacaaagaacagttacagactcaacagtggcagtaaaaaaatcacagcagtaaagcagaaggcagggaaaaagaaaataaaccctgaacatgtttttttttctacagtagttgtcagtatttgactgttttactcctacctgctggtgtccccctcgcgcaggcaagctgaccggcggcggcccgacgaccccggcgggcctgatcgcggcggcggtggcgcacgcgttcgcgctgttcgtggcggtgtcggtgggcgcgaacatctccggcgggcacgtgaacccggccgtgaccttcggcgccttcgtgggcggcaacatcaccctgttccgagggctcctgtactgggtggcgcagctgctggggtccaccgtggcgtgcttcctgctccgcttctcgacgggcgggcaggccacgggcaccttcgggctgacgggcgtgtcggtgtgggaggcgctggtgctggagatcgtgatgaccttcgggctggtgtacacggtgtacgcgacggcggtggacccgaagaagggcagcctgggcaccatcgcccccattgccatcggcttcatcgtgggggccaacatcctggtgggcggcgccttcgacggcgcgtccatgaaccccgccgtgtccttcggccccgccctcgtcagctgggagtggggctaccagtgggtgtactgggtcggccccctcatcggcggcggcctcgccggcgtcatctacgagctgctcttcatctcccacacccacgagcagctcccctccaccgactactaaaagccgaagccgaccgacccaggggtgcgcagcgcagcgcagctagcatccagcgctctctccccgctcgccgccgtttagtttctctcgtgcacgtgcatgcatcgtagactgtctcaggccgccgctgcgccggcgccgctcgcatcgtttgcttccttggaccagcagtcgtcgccgtcaggctgaactgcttgtaaccgtgaattccggacccgtttgcttctgtaagatttgtgcatttgcctgagtac

SEQ ID NO: 31328 - DNA, 3809 bp, Zea mays
  Clone ID: UC-ZMFLB73155G10_FLI
tccgttgttaccgcagtaaggattctacaaatagtatggctctttttatccttgattgatgcggggatttattaggaactaggcaagaaagtcagatcttttatataatcttgctcattccgatttttgccctacatcctgattcgatatatagtgaaatatattttggacttagttctgggagtgaggggatttttataaaaacgtgtatgagcccagtgaggagaggccatgaaggttctaggagtgaagggattaggatcgggaactgctgctgcatcaggcgcaacaaggcaatgaggaggatgtgtttcagggcaatgggtgttgtaggagcattgatataagtgacgccctcactgaagttggtctgacctgccttgaggtcctcctcaccaagtgaagcctcgcctcggtgaatcaggtcactcgcttaattctgctctgccgtactcatatcatcgaatcccttaattatagtctaccagttagctactttactgaaaatctgactctgcagtgaactaattagtacttgttttagtagtttattttgggttagttgataacagtatgaattgaaatagcacttgttccaacagttgattcagggccagttgaggacggtatgaaatgaattaggcacacagtgtggtttctgtgtgtaactcttgctcttcttttccttttcctcctcaagatggtagcaatgctaaaatagttgacttctggggctatgctttcaccttgagagtcttcagatgaatttagtggtgcaattattagatgcttcagggtcttggttttgcagttacaaccatgcttggatcatttttgttctttcaaaccaggaacagtgttacctatgatcccaaccagtacaggcttggatgttagaagtgtagtcagctcaaatcactctacacaaccacctgttttcttagctaaatgcgtgtgtggtacgagcataaggttcttatttggtttctcatttgtggtaacggtcaggaacaacaactggtctacgtgttgtacagttgtggtgtgtgcctataggcagagctaatgtagatcaagtgtcctactatagaaagttttttaggaaatattccccgcactccaaattataagacattttgacttttttagatgcattgtcttttctatgccacccctcttccataaggtaggcatatccatccatcctacatattgaattctattcattgcttggttgatcatctcactgtcaatgaaatttgaagtatctcactgttttgccccctaagttcatcctgatctttagaccctactctgaatctcgcattgcttctgcaccacctacgtcaaaattgctctaactctgttcattcacttcagtgtctttttaactgaagtaatttgtttgttaatttgatgaattaccctgccaacgaaatttgaatcacctcagtgtttaaccatcgaatttatcctaaacttcagactctcggaatctcacattgcttctatatttgccttaaaattgctctgacactgttgattcacttcggtgctattttaatataagtaatttgtttattaatttgatgaattttgatttaactgtaaactacatgatagtgattttatccacatctaacttattctctttagtgtgtttcaggaagaatgctttacaaatccgaatataagttcagtacgatagtgcaaacagagagcatcaggtactccttaggttcctattgacgttgaattgtcctaatgcggttcatctaatgttacttatccatgttctattacgaactgtatgtgtgctattttcccacaattttctaatcaaaatattcagcacaaaaggatgacctcgtatatgggatattcaattgagtgtccatgaaatttgacaaaactagaaaattgaaaaaactagcaggcctgtagatctgagcaaatgatatgaagtacatgtaattactttctcaaaacgtagattagcttttttgcaaggactttagttgaaaattggaaaatctaacatgcatgtagatctgagcagacgatatgaagtacatgttgtttctttcacaaaatgtagatgagcttttttgcatggacttcagttgttatgttgctcctcgttaacactaaaacttaacctgctcgagttacaattatacatctcaatccagatcagccttttcattgttctggttctgctcatttatcctttctggtcacataaattcttgccatttaacaccagcactaaagaagatagggagagttcaatgcatgatgtttgatttgttgacactggaagaggcgactaattgaggccgttgtcattgccaccggtgtgcacacattctttgtcaaggctgcatatcttgtcgattcaacaaaccaagttggtcattttcagaatgcaagctaagtgtgacgccgccacagaagaccatgcccactgtatctatactttatactaatttttaacgtccaaaggacaccagatgtttcaatgttaacgatgttgttgttatacactgatgttttgttcttatttgcttgcaactttttgcagctgttcgtgctatcggtttggaaagaacatgtggaaagccaatctcggatcttgcttccttcaggtttccacattgtagacacacaagagtccagcctgcgacaaacgctcctgcaggttagtccgagatggcccttcattttcctgtttcaacagataaaaaaactaaggacgcattaaaaaactgaagtatgttcaacaaatcaccaaccatgatttttctgaggcacatgggtcagcacaaactccatttgccaagaaaaggttataatgcattcacaccaataaatgttcgtttcacaagacataagcaaagaacattgaggtcgcattatctaaccttttggtgattgcagttgatgcttcttccagtagtttgtgacagattgctcaaagaaaagcaagacagttcgccaatcctagaagtggaaaaaacaacatagaataattagccagctacagggagtaaaccaataagagaagaaacattgtaatgccatgtttccaaatgggcacaaagaaattttgcctaagacactactgtcccaattgcttcagcccttattcttcgtagcggtttctgccgtctggcccggttctggaattatgtggccatcagctgattgtcaacagtctcatgtaacccttgagttctgatactcctgtttccctgctaattcatttctgcatttgcatttgaatcaaatgctcatgatttcaaagatgacttctgacgacttttttgaatgttgatctgtttgcaggagattggagcctagatccagtttgctttgttggaaaacttcaagcacctctagacggaaggagattggagcctagatccagtttgctttgttggaaaacttcaagcaccactagacggaagttgtctgcactgaagatcaggacacgaagatcgcgagctttaacaaggctcgccttgtgcggaaggtgtatttcagtgagatctccaagatgaagcattagggggtcaatcgccccagattttacgcgtagctaacttagtagggcacccataatccataatttattctctgtagttgtagcagcgacatagaggtgtcattctgtagcacattgtgtaacatgtaggagagagagaaacacatatccccattctttctactgaaacaccagaaatagttgctcttgctccataattcgttaatctgaacttctgaagccatgccaaggccttatattg

SEQ ID NO: 31329 - DNA, 1193 bp, Zea mays
  Clone ID: UC-ZMFLB73156A09_FLI
ctccgacgctcctttctttctcggaggcgacagctcgaactcgaatccctcatccagcctggcgctggcgtcgccggtcgccgccgctcgattgcctccgcctgaatatcccttgccccataaggcctgaccttgaaagcctcgcctcttgatcccggcggcggcggaggggagggcgatgccgaagcggacgacacacacctactcgagcgaggacgcactgccggagggccccgagtccgaccttttcgtatactactgcaagcactgcgcctcacatgtcctcatcaccgatacccaattgcagaaaatgcccaagcgaaagactgacagagcacatgttttagacaaggctaagcatctttcaaggctaaatgttaaggaggcaggaaaagtaatgttgaaacgtggtgaaggaaagcttgaaaagcagtttcgcatgagctgtgtgggatgtgacctttttgtttgttaccgatcagaagaggatctggaggttgcccctttcatatacgttattgacggagcactgagttcagttgctgctgagacaaatccacatgatgctcctgtacctccttgcatcacacaactggaaggtggacttgtccaagtagccattgaagtggaagaccgggcacaacgttcagcaataacaagagtgaatgctgatgacgttcgagtaacggtagctgcccttgctgctcgaggggaagctaacagtgagttgctagaatttatgggcaaggttcttggcctaagactgactcagatgacccttcaaagaggatggaataacaaatctaagcttctaattgttgaggatttgtctgcacggcaagtgtatgagaagctcctagaagctgtacaaccttaggcacccgagcgatggagcaatgtggtatgcagtatgcgtctggatattctctttcgagggcataggagaaggtttccatctatattgtgcaacaagtggagcagaacgtgtcgagacgaggtcgaaacatggctcaaatgtataactagaccatagcagtatccggttcattgtttctgtcgtgactcagatattgtatcctgtggtctcaagggaggtggttttgtgatttccacattctgatccagactgtttttgtggccacgacgcgtgctcgtgttatttatttgcaaaataaatagatatatataaaatt

SEQ ID NO: 31330 - DNA, 3158 bp, Zea mays
  Clone ID: UC-ZMFLB73156C01_FLI
aagatagagggagaggcaagagtcgcatcgcagacccagaccacgccgccgccacctccgccgccacctccgccggtgatcgagtcgcgtcggcgctaccttcaagctagaagacaataagcatcggcagacatgttcggctccaccaacccatttgggcagtcgtccacaagcccatttggccagacctcgtttggaactccacagggatttggccagtcttccactgctgccaacaatccttttgccccaaaaccatttggcagcccgaccacagcttttggggcacagaccggaagctcgctctttggcacaacatccactggtgcctttggccagcagcaatccactcctgcatttggcacaacatccactggtgcctttggccagcagcaatccgctcccacatttggcacaacatcctcatctcagtttgggagctctacaccagccttcggtgcatcccccactcctgcctttggtgccacatcctctggatctttgttcggacagaagccaagttttgggggctttggatcatcttctagccagtcaagtccttttggtagcacgttccagcaaacacaaccaacatttggcagcagcacttttggttcatcaactccaccggcgtttggtgccacggctcctgcatttggcacaactacaccagcctttggcaccacaactgcaccagccttcggtgccacgactagcccagcatttggttcaacttcaacatcattatttggtgcttctagcaccccaatgtttggttcttcagcctttggcacatctgctactggttttggaacttcagggactacagcatttggtgtgagtagtactactccgggttttggatcatcaagcacaccttcatttggcacatcagctagtgcgttcagttttggttcgtcaccatcttttggacaaacagcagtttcctctggtagcactccctttggaacaactccctcaccttttggtgcaccagctcctgcgtttggctcacagacagcagcaccaacttttggacaaccacaatttgctaatcaagctggaggaaccagaataaaaccttattctcaaacaccagatgttgacagtgctactagtggtactcagcctgctgcaaaacttgattccatatcagcaatgcctgagtacaaagagaagagtcatgaagaattgaggtgggaagactaccagcgtggagacaaggggggaccgaacacttctggaactccaacattggcacctagctttccatcaccaatacaacataacacttttgcttcgacaagtaatccattctcaacgaacccattttcaacaaacaatccgttcgctcctaagcccactacaactactagttcaccattcaacacctcatttaacaatgcatcagttgcaagttcgagtctattcacatcatcccctggtaccacaatgtttgggcaaccaggtgtttctacacttccagctccagcaagtaattcaccgtcattatttggaaatatcaatcctgctcctgctacatcatcaatatttgccacgtcagtgacgaataatccaagtccattcggcactggcacatcattggctaacactcaatcagccccactattttcctcagcatttgctcaaccgacatcaagtacaccggctttctcctctgggagcctatttggctcaactaatcctggcagtctgtttaccagcagcggtccttcacttttttcaacaccaacatttcaacaatctgcccctgctcagagttcgaacatgttctccttccaacccccaattcaaccagcttctaccgctggactccctttttttcccaacacaaatcaggccttgccgggacagccaacttctagcctgtccagtatggtcatgcagcctgctcttgtttcaaatccatttgggatgcttccagcaatgcctcagatgtccatcgggaatggtggatcttcaccttcagttcaatatggaatatcaagtttgccggttgcagagaagcctcttccaagtagatcattgtccatggcggttcctaggcatttgtcacagagaaggataaaactgctgccgagaaaatataatccaatatctgatggcaaggttccattctttgctgatgatgaagaatctccagcaacaccaaaggcagatgcttttttcatccctagagagaacccaaggaacctggtaattcgtccaattgagcagtggtcttcacggagagaaactggccggcaatatactgcaaagaatgttactgattcgaacaaatatgaagatgcttccattgaaggtgagcgtggtaagtctgccatgtcaccaagcagcaggccacctgtagtggaaaatgacaaacagcatgaggccagggccatggctcaacatgcgaatggaaatgctacttcagttgagaggctgttgcctaagcttccacgtgcagattacttcacagagcctagtatagaggagcttgcggccaaagaacgtgcggagccaggctactgcggtcgagtgagggacttcgttgtgggtcgacatgactacggcagcatcaaatttttcggggagacggacgtgaggtgcctggatctggagtcaattgtggagtttaacgaccgggaggttattgtgtacaaggacgatagcaagaagccccctgtgggcgaggggctgaacaaggctgcagaggtgactctactgaacatcaagtgcgtaaacaagaagacaggggagccgtgccagggggcaagggtggagaagtacagggagatgctggtgaagaaggcggaggagcagggcgcagagtttgtgtccttcgacgctgtcaagggagagtggaagttcagggtgaagcacttcagcgcctacgggctttggtgaaatcctggggagttaagtagtttgtttgttctgatagagcaacgctttacgctcttgtcaaataccatgcttggatctgttgtgctgcttctgtacaatgttgctgctgttaaaatgcttgcaaattgcactgctctgctgctgaaaacaggagcagcagtagaaactaccgcaacaggagggcgtgctacctgctactgttatgtattattatactatattctaagtataataagacttagtttttt

SEQ ID NO: 31331 - DNA, 2145 bp, Zea mays
  Clone ID: UC-ZMFLB73156C04_FLI
catttccatggccctcgaagcccgtctcggaccaccaagcgttccagcagtcatcacaacgcagaggatccattggctacctcagtgagtgggcgcgccgacgacctcgcctggcgctgctcgtccgacactttcgatctcaatgggcgcgatttcgagagctccgagaactgggcggtcctgtccaccgagggtgacaagccagctcctcgtttcgatcatgcagcagccatggttgggagcaaaatggtggtgtttggtggcgactccggtcaatctttgctagatgatactaagatattgagcttagacaagcttacctgggattctgttgctcctaaagttcgaccaccattgaacgggcgttctctgaagctgaggccatgcagaggtcattgcctggtttcgtggggaaagaatgttattcttgtgggagggaaaagtgatcaaccttatgacaagatatcagtatggaccttcaatacagagagtgagctctggtctcatatggaagcgaagggtgacattccggtgtctcgaagtgggcatacggtgattagagccggtcctgttttaattctctttggaggtgaagatgccaaagggaagaaactacatgaccttcatatgtttgatctgaagtcattaacatggcttcctctgaactataagggtgctggaccttctccaagatcaaatcatgtagccgccctttacgatgatagagtcctattgatttttggaggtcagtcgaagtccaagaccctgaatgatattcatgctctagattttgaaacaggtcaaaacccatgggcatcatccatcacctcgagcaggttgctgcggagctctttgtggaactaaatggtatattgcaggaggtggaagcaagaaaaaacggcaccctgaaacatgggttttcgatgtccttgagtccagatggtctgtttgtgtagtgcctcctagttcctcaatcactacaaagaaaggtttcagcatggttccattgtactacagggacaagatcgtgcttgttgcttttggagggaacaaaaaggaaccatccgacaaggttgaagtactagtggtgctgcaaaacgagcactgtttcagctggcggtctgcgcccgaggtggaacccttactgtacgacgagtctcctccaggctcaagggaactcgccgaccatctcagcagctgcgctccaccgtatcctactagctccgcggcgaggagcggtctcgccgccacagcggagaactcctgcgggaggaaacccctcccggactcactgctacggacctcgaacctcgggggctcgtcgctccgcaggcagttccgtcaggaagaggagtgcagcagcctggcgcaaaagctgcagaaaccgatcgacgacgacaggtacaaggacgccgccgacgagtgctccgagcatcaaccaccctcggccacgaaccctaaaccgcggaacgacgcgcggcggtcgtccccggaggtcgtcgtcgacgcaaaagcgaggaggctgctgggcaggagctcgtcggacatgaacaaccaccaggacgcaagggtggccgccctggtcaggaggaacgtggcgctggaagagcagctgtcggcggcgctggcgagcaaggacgaggcggagaagaacctgtccctggtcatcgacagcaaggacggcctggagaagaggctggccgagaaggacagggaggtcgaggcgctgagggagaaggcgacggggttggagctggcgcaggaggaggccaacagcctctccaacaccgtccacgccgacaacgtgcggctggagcgcgaggtggcgttcctgaaggccgtcatggacgagacccagaaggaactgcactcgactcgcggagttcttgcaggagaacgcgcacgggcattccagcttcaggttgaagtctttcatctgaagcagcgcctgcagacgatggaagggaggtcacccgcagcaccaagaaagcctcagaatgcgtagggtagggtgcaggcgtgtagagtttttgagcgatagatctgctgtagattcattcagtgatgtaatgtaactgtagtaggtgccggagctactgtaatttgtaatattattcgacgcgatgcgatgcaaacgtatttcgc

SEQ ID NO: 31332 - DNA, 2100 bp, Zea mays
  Clone ID: UC-ZMFLB73156C08_FLI
gtaacggtagaccacttgtgcaaactatgatcagaaaaaaaaaatcagttcgtccttgcaaactggtttattttttttcacaaatatcaaaacgcacactacatctacatgaaaccggaaaacgaaaaaaagaaaaagaaaaacaggaagagcaaaacctcctccaagagcaactctcccaagcaagcacctactatactactagtaactaatagcggacgcgtgggccaccacctctctcacgtgtgtgaggtggcgagcccaaggaggagcgggaggccacaagtccgatccgcccgtatctaatccgctcgagcgcagcggctcgttcctcgcgggggcgcacggttggcatttcgagtgctgagacatcggcttcattgaatcctaaagcacggttgagccatggctggctcccttgctgcctcagccttcttccctggcccaggggcgtctccagcagcatccgcgaagaacttggctggtgaagtaccggatagtttgagcgtccgtggtattgtcgcaaagcctaatgccaattctgggaacatgcaagtgaaggctcaagcacaaacccttcccaaggttagtggcaccaaggttaacctcaagaatgcaagctcagacacagaggaggcgataccctacactgctcccaagacattctacaaccaactgccagattggagcatgcttcttgcggctgtcactaccatcttcctggcagcagagaagcagtggacactgcttgactggaagccgaagaaacccgacatgcttgttgatacatttggttttggtgggatcatctaggatgggatggtgtttaggcaaaacttcattattcggtcctatgagattggtgccgatcgtactgcttctatagagacattaatgaatcacttacaggaaacagctcttaaccatgtgaagacagctggccttcttggagatggttttggcgccacgccagagatgagcaaacgaaacttgatctgggttgtcagcaaaattcagcttcttgttgagaagtaccccttgtgggaagacacggttcaagtggacacgtgggtagctgccgctgggaaaaatggcatgcgtcgagactggcatgtcctcgactgcaagtctggatgtacgatcttgagagctacaagtgtttgggtgatgatgaataagaacactagaaggctttcaaaaatgccggacgaagtaagggctgagataggcccgtatttcaacgcccgcgcagccataacagatgagcagagcgagaaactggctaagccagggagcactgctggtggcgatgctatgaagcagttcatgagaaaggggctcactcctaggtggtggggtgaccttgatgtcaaccagcacgtgaataacgtcaagtacatcggttggattcttgagagtgctccgatcgcgatcctggagaagcacgagctcgcaagcatgacgctggattacaggaaggagtgcggacgcgacagcgtgctgcagtcgctcaccaccgtcgcgggtgaatgcgcagacggcgacacagactccaccatccagtgcgaccacctgctccagctggaaacaggagccgatattgtgaaggcgcacacggagtggcgcccgaagcgggcgcatggtgaggggacccccatggggggtttcccggcggagagcgcgtgaatccatatttggcagggtgagggggacggctgtgaagcacagatcctatgtttatgggtacactaacgcccaactgagttgagtgtgttttggttggttggttggtcgcgacaagtatggcaggcacatgggggagcgccgcattacccacacccaacctggggatttggccaagacaaaagcccagcggtatgaggatcgaggaagcagaccagagttgttgcggagcgagaggactggggatcagtgtgtgttgtgggttgctgggcaaggatacatgcagggggagctgatggttttgcaggggatgatgttgtgtagctggttggttggttggggtgtgtagaaggcattcattcccctttgtaacagcctaatctgtacattcttaccatcatctttgtcttgttgatt

SEQ ID NO: 31333 - DNA, 1625 bp, Zea mays
  Clone ID: UC-ZMFLB73156G12_FLI
agcacaactacctggtcctcgacgtcgacgacatcccccgcgtcgtgcaggaggctttcttcctcgcctcctctggtcgaccggggccggtgcttgtcgacatccccaaggacatccagcagcagatggcggtgcctgtctgggacaagcccatgagtctgcctgggtacattgcgcgccttcccaagccccctgcgactgagttgcttgagcaggtgctgcgtcttgttggtgaatcccggcgccctgttctttatgttggcggtggctgcgcagcatctggtgaggagttgcgacgctttgtggagctgactggaatcccggtcacaactactcttatgggcctcggcaacttccccagcgacgacccactgtctctgcgcatgctaggtatgcatggcacggtgtatgcaaattatgcagtggataaggccgatctgttgcttgcacttggtgtgcggtttgatgatcgtgtgacagggaagattgaggcttttgcaagcagggctaagattgtgcacgttgatattgatccggctgagattggcaagaacaagcagccacatgtgtccatctgtgcagatgttaagcttgctttgcagggcatgaatgctcttcttgaaggaagcacatcaaagaagagctttgactttggctcatggaacgatgagttggatcagcagaagagggaattcccccttgggtataaaacatctaatgaggagatccagccacaatatgctattcaggttcttgatgagctgacgaaaggcgaggccatcatcggcacaggtgttgggcagcaccagatgtgggcggcacagtactacacttacaagcggccaaggcagtggttgtcttcagctggtcttggggctatgggatttggtttgccggctgctgctggtgcttctgtggccaacccaggtgttactgttgttgacatcgatggagatggtagctttctcatgaacgttcaggagctagctatgatccgaattgagaacctcccggtgaaggtctttgtgctaaacaaccagcacctggggatggtggtgcagtgggaggacaggttctataaggccaacagagcgcacacatacttgggaaacccagagaatgaaagtgagatatatccagatttcgtgacgatcgccaaagggttcaacattccagcggtccgtgtgacaaagaagaacgaagtccgcgcagcgataaagaagatgctcgagactccagggccgtacctcttggatataatcgtcccacaccaggagcatgtgttgcctatgatccctagtggtggggctttcaaggatatgatcctggatggtgatggcaggactgtgtactgatctaaaatccagcaagcaactgatctaaaatccagcaagcaccgcctccctgctagtacaagggtgatatgtttttatctgtgtgatgttctcctgtattctatctttttttgtaggccgtcagctatctgttatggtaatcctatgtagcttccgaccttgtaattgtgtagtctgttgttttccttctggcatgtgtcataagagatcatttaagtgccttttgctacatataaataagataataagcactgctatgcagtggttctg

SEQ ID NO: 31334 - DNA, 960 bp, Zea mays
  Clone ID: UC-ZMFLB73156H09_FLI
ggtgaggtcgcaccaccatggcgtcgctcctagcccggcaggcagcgcaggcgctccgcgcgaggcaaacggcgcagctcgggccggccgcgtcggcgatgcaagggcacctccgtacctacatgaacgcggggattcccaagcggttcaaagaggatgaggagaaagaacagcttgcaaaagatctcgcaaaagattggaatgctgtgtttgaaaggagcatcaatacattgtttttgactgaaatggtccgtggcttgatgctaactctcaagtacttctttgatagaaatgtcacaattaactatccgtttgagaagggtcctctgagcccccgcttccgtggtgagcacgctctcagacgttatgaatctggggaagagcgctgcattgcttgtaaactatgcgaagctatatgcccagcgcaggcaattacaattgaggctgaagaacgtgaagatggcagtcgccgaaccacaagatatgatattgacatgaccaaatgcatttactgtgggttctgtcaagaggcttgcccagtcgatgctattgttgaggggcctaactttgagtttgccactgagacacacgaggaactactgtacgacaaggagaaattgcttgagaatggtgatcgctgggagactgagattgctgagaacttgagatctgagagcctctatcgctgaatctgtcttccattatggttgataaactgggttcttccattttccatattttgctcaactagctgatgaataagcaaacgatgtatcataacttaggtacgatgtttttgtaccttggcaccatctgtgtgttttgttcattgccttgctaaaggtggcaccagatgttctttgatgggaaaattccttttgtagcactgagctgttttcagtcaccttattttgtatacaatgaaacagaacgctgtgttcatggcacagtgatttggtg

SEQ ID NO: 31335 - DNA, 1373 bp, Zea mays
  Clone ID: UC-ZMFLB73157B04_FLI
cgccagcaagctctgcctctccgggacgctcgacccggccgccgtgcgcggcaaaatagttgtgtgcgaccgcggcgtcaacgcgcgcgtggagaagggcgccgtcgtgaaggcggccggcggcgccggcatgatactggcgaacacggcagccagcggagaggagctcgtggcggacagccacctgctccccgcggtggcggtggggcgcgcggtgggcgacaagatacgggagtacgcggcgcgcggtggcggtaggcccatggcgatgctgagcttcggcggcacggttctgggcgtccggccgtctccggtcgtggcggcgttcagctcccgcggccccaacaccgtggtgccggagatcttgaagccggacatgattgggccgggggtaaacatcctggccgcctggacgggcgtcgctggaccgaccggactcgccaaagacggccgtcggactcgcttcaacatcatctcagggacttcgatgtcatgccctcacatcagcggggtggcggcgctcatgaaggcggcacacccagactggagcccatccgccatcaagtctgcgctgatgaccaccgcctacaccgtggacaacacgaactcctcgctccgggacgcggcggacggctccgtcgccaacgcgttcgcgtacggcgccggccacgtggacccgcagagggcgctttcgccgggcctcgtgtacgacatctccacgcacgactacgccgccttcctctgctccctcaactacagcgccccgcacgtccaagtgatcaccaaggcgtccaacgtctcgtgcggcgccccgaacaagtcccgccccggggacctcaactacccgtccttctcggtggtgttcggccagaagcggaagacgaagccggcggcggccctgcgtttcaggagggagctgaccaacgtcggccccgcggcgtcggtctacgacgtgaaggtggtcggccccgagtccgtcgccgtcacggtgacgccggcgaggctcacgttcaggcaggccggccagaagctcaggtactatgtcacctttgcgtccagggctcggcaaggccacgcgaagccggacttcgggtggatttcctgggtcaacgatgagcacgtcgtccgcagccccgtcgcgtatacgtggaagatgtgatgtgaggttccctgcctgcctaaaatctagctcgatgacgaaggaataggataggttggtgtagtttgctcaccgcttcgcaaagagaatcggcgtgaagctctctatctctctctctcggctgcagtgcagacctgtacttgtttcctatctttcttttcggacatcaagtaaccctgaatctgaatgacgaatccgccgtttggtgtttgcc

SEQ ID NO: 31336 - DNA, 1218 bp, Zea mays
  Clone ID: UC-ZMFLB73157C04_FLI
gtcaccaccgtcccgcccccgcgccgtcccacccttgctcccactcgttgcgccgcgccgcgcgatgcaggcccgcgtcgtcgtcttccccgtcaagggccgcgcctggtgcttcgccctcccgcgcgcctccgccgcagcgcccgctgctgatggcgccctcccgcgcccgaccctgagggacctctggcgcggcatctcctccgggtcccgcacggcgccggagaaggccgaggcggtcgtcgacttcgtcgctgacaagatgaacagggcgtgggtcgggttcgggagcgcgccggaggggtcgatgaagagccggatccacagcttcgggctgaagctgctgtcccgggtgaggccgtcggaggtgctcctgaagtccgtcaccaaggacgtgagcgcgctcgagatcgtgcatccggcgagcataaattctcgtcttgtgcgtcgacgtttgcggcatattgctgttaggggtgcatcagttcacaagaaatttctgtatggctcggtttgtttgcttccagttactagtgttttcatggtactaccgttaccaaacattccattcttttgggtgctatttcgtgcttattctcattggagagctctacagggaagtgagaggctcgagttactagtttctgactgctcagataagtggaaagttcttgaggagaagattaattcagtaaaggatggcaaacccagtgaaaatgcaaggaattctccttggaagctgcggccatcagaaaagcttgacaggtttcttgagggtagaaacttggatgaaggtttggattgtgataccattttgagtatatgccaggagtacgatttggacaagatcgatgttctcaagtacagggatcttctgtagccacatccagattgtttctctgaggtttatacgtttaaattcttctgctagtgagatcaagatgaagggtacaagagttgcatgaacccactaaccattggcggtcaaatgagttcttttaaatagcttcagattttcttgttatgtaccaaaccggtctgccactagtgcaatgatctcagaaacaaagaggacatcttatgaaactatagaagcccagggcagttgttcccaccgtgcaaatagagattgctagctgccaactttcccccgtcagccatcacaaattttagttgggatcaatgaacgacaaatgcaaagagcagggttgaaaattg

SEQ ID NO: 31337 - DNA, 1152 bp, Zea mays
  Clone ID: UC-ZMFLB73157D09_FLI
cgccgcctgcgctctccccctcgcgagatagacaaccctagctcccgtctccttgcttaccctcctctccaacccctctccgatctctataaaagacccgaatttcgaattccccctcgaacccgcgatccgcgctttccttcccgcccatttcggtctctgattcggcgcggattcgctgcgcgggagcccccgaggttgcgtgcgtgattcggatggcggagccggggctcgagggcagccagccggtggatctgtccaagcacccctctggcatcgtccccacgctccagaatatcgtatcaacagttaatttggattgtaaacttgacctcaaagcaatagctttgcaagcacgaaatgcggagtataacccaaagcgttttgctgcagtcatcatgagaataagagaacccaaaaccacagcactgatatttgcatcgggtaaaatggtatgtactggagcgaagagtgaacagcaatccaagcttgcagcaaggaagtatgcccgcattattcagaaacttggttttccagctaagtttaaggattttaagattcagaatattgttggctcttgtgatgtcaagtttccaattaggcttgagggccttgcatattctcatggtgccttctcaagttacgaaccagaactctttcctggccttatctatcggatgaaacaaccaaagattgttcttttaatttttgtttcaggcaagattgttttgactggagcaaaggtgagagaggagacctacactgccttcgaaaacatctatcctgtactgtcagagtttagaaaaattcagcaatgatgacatgtgatgtgaaggtcacgttcttcaaattacaagcttcctcgaggattctcgtgtgaccatgaattctaaatgtacataaaagtctggcggaacttatagcatcctgtaatctctgtgagccgcggtctgtcagtattgggtgggcttgctgtggtaactggtggacatgtcgagttcatccatttgggtaggccttggtgaacacggacgccccacatcatgtctcagtttgagtagtttgtgtgaactgaagggtacgtgcttctcccatgtggttgcagcgttaacttgagtcaagtgctaacaagagtagataaaattttgcccc

SEQ ID NO: 31338 - DNA, 1212 bp, Zea mays
  Clone ID: UC-ZMFLB73157F05_FLI
gcgggtcgcaatcaaggctgctcccctctatctccgtgttcgcccctcggttcaccacccgccgccgccgagacctcctcctcgccggctactcctgaccccataaaggcagcgctcggaggtggccctctgtcgggtggagtggtggacacatccgcgcccatggccaaccgcggcgctgcggccggcaagctcaccgtcgccgagacattctccaacctcagggagcaaggcaagagtgcattcatcccgttcatcactgctggtgatcctgacctggcaaccacatcaaaagcattgaagattctcaattcctgcggttcggatgttatagaggttggcgtaccatactcggatccactggctgatggaccagttattcaggcttctgcaacacgggcgcttaagaaaggcactacactcgattctgtcatagaaatgctgaagggggttacacctgagctttcttgccccattgttcttttcacatactataatccaattctgaaacgtggtgtgggaaacttcatgtcttttatcaaacaagctggcatacatggacttgtagtgcctgatcttcccttggaggagacagcgttgctgaggagcgaggccattatgcacaacatagagctggtgctgcttacaacgccaaccacgccaacagatcggatgaagggaattgcacaagcttcagaaggatttctctatcttgtgagcgctgtaggggttacaggtgcacgctcaaatgtaaacttacgtgtagaacaccttcttagggagatcaagaaggttacagacaaaccggtagctgttggtttcggtgtatcgactccagagcatgtgaaacagatcgtgggctggggagcggacggtgtgattgttggcagtgcgattgtgaggcagttgtgtgaggctgctactcctgaagagggtctggaaaggctcgaggagtacgccaggagtatgaaggctgctatgccgtgagctgatctcactccccgtcacaggcaaggtaaatagaacatggttttagcaatattctgggcatgggtttggcatccagaactcatcttagtgctgtacgggtcgttctcgggtggtgagaacgaagtctggctttgcctataatagaaaagggttaaactgagttagtgcgacattttgatggaaaagcgagtgattgcgagatatcagttcatgcttattggc

SEQ ID NO: 31339 - DNA, 2775 bp, Zea mays
  Clone ID: UC-ZMFLB73157G04_FLI
ctcaaaccccagcggtcggtccaattcaaaaatcgaatcctgcgctccttccccaagctattcccaaactgccccacgtctcatcctcgcgagtcgcgacctcgcaagcctctccgacccccagctcaacgagatcgggcgagcgatcccctcttccccgaccaccagatcgcagcaatggagccggatccggtcgccgctggggcatcctcctcgccgccgccttcaccagcgccggccacgtccccgccgtggcaaacgcgagatgacgatgagccgggagcggtggattgcgcggatcccggaggagacctgaatcccgcgccgccgccgtcgcttcagcagggtacagaacgccgcggtgggcagcgaggtggagcaggaggaaccaaagaaggaggcgatggcaggagtaggggagactctccgcagcttcatggaggagtttggggatcaaggagaggactccattatcttgtcaccgcggctgaaggatattagtactcctgaccgccccgctgccctcggtttcctaggggagaagtataacaacctcatggagaggtacaagaagtacaagaagcaggtggtcaagtgttccgaggagtgtgaaccaagatataatggcctgaagaagaagtacacagacgagtgtgcagagaggcggcgtctgtacaatgagcttattgagctaagaggtaacattagggtgttctgcagatgcagacctctgagctccgatgaggtcaaccgtgggtgtttatctgttgttgagattgacccatcacaggagagtgagctgcagtttgtgcccagtgaaaaagaaaggaagccctttaagttcgatcatgtttttgggccagaggatgaccaaggaactgggaaaactttcacaatggaaggggttccagaaaataggggtgtaaattatcgggctttggaagaattgttcagaacgtcagagaaaagaagtgcatctgttgcatacacattttccgtaagcatcttggaagtttacaatgaaaagatcagagatcttcttgatgagagcaatgatcaatcaaaaaggttggatattaagcaaaatgctgatggaacacaagaagttcatggtttggttgaggctccagtttataacatagatgatgtgtgggagaaactgaagtttggtgctcaaaatagatctgttggctcaaccaattctaatgaactcagcagccgctcccacagtttggttagggtcactgttaggagcgagcatttggtgacttatcagaggagcagaagccacatgtggctggttgaccttgctggaagtgagagaatagctaaaactggggtagaaggagatcggctgaaagagtcacagttcatcaacaaatcactatctgccttgggtgatgttatatctgcccttgcctcaaaaaattcccatattccataccggaattccaagttgactcatttgctccaaagctctttaggcggcgattgcaagactctaatgttcgtgcagataagtccaagctctatggattcaggagaaactctcagttcactcaattttgccagtagagtccggactgtagaacatggccctgctcgtaagcaagtggatccagctgaaagtttgaagttcaagcagatgactgaaaaacttcggcacgaggaaaaggaaaatgcacagctgaaccaaagcttgcagctgatgcagctcaagtacgcttctcgtgagaatgtcttcaggacactaaacgaaaaggtgaaggatgctgaacaagcatgcagaaattatcagcaacggattagagagctggaaagtgaattaggcaatgagaaaagggtttctagggattctgctagatcctcaaggccgccacttgttcctacgagacagaagcagcctcacggaaggaacgcgccaccttcaggcccttctagatggaggctcaaagcccccacaatccacaacaaagagaacattccggtgatgatgaacaaatcaaatcctggggatgaccctaataaggctgttggcagagcaaggcgcgtttcacttactccggtgattcgacaaatccccatccagcccaagaggcggtcttcgatagcaatactaccatctgtgagagagcatctttctgtgctaaacgaaaagagagcagcgtctcgactgtcgcaagtcaacatgccaagaagatcagtcgcgacctttggtttgaatttgggtccaggaacaccccttgcaggacatggtggacctgttgacgccaccccagacggagcaaagttcaggagatttgatctaggaagcagcagcagcaagttcacgagccctcctccgaatgtcaccccgcagcggaagatgggaatggcaccggcgggaggtcctccaaacgcagccaagctgtgcttcagcatccagaaaagagttacgcctgcacatgttcgggcaaaacctggtatgggcatctttgacccagctcttcgtgagaatatggttgtggggagaaccggcaacgcgctgcgggtgctcaacggcaagaggagacagtccgttgtctaactctggtactgcaaacgtttggacgttcgaacggagctgcagtgtggtgagaatgatggtgcctttcagcttgttcttagtgaaaccgtgttaggacagaagatattcttctcagcatccgtaaatggattttgattggctcttactagttgataagaaagctatgttaacattgcccatggaagtcgttgattatatttgttcgtcac

SEQ ID NO: 31340 - DNA, 1476 bp, Zea mays
  Clone ID: UC-ZMFLB73157G05_FLI
gtcctggcaatcactttgggaaggtggtcagtggaataactttgcttaaaaagcttgaagcagttggtagtgaaactggaaatccttcttatcaagtgaaaattgtagactgtggtgaagtttccaacacaaattctcaggatccgctaaagggagataaagtaagctcaaagacagataacagcagttcagacagtgaaaagggtggccatcgtaccaagcgttccttgacgaaaggcttcaatgcagcagttgctgggtgcttctttgccattgaaactgtattaagacctcttaaagcagaaaattcacctccatttacgactgcaatgataatattggcatctgttatatcatctactgtttcaaatgttttacttggagccagaccagcttttatagtgccagcctatgagctaaaatctgctgccgctctgactttctataggttggaatggctgctacactagcttcagtctgttcagtcccattgacttcagtactgcttctctttgagctgacaaaggattacaggattttgcttcctctcatgtgaacaagggagaatattgtgaactgaaggtcatgtatcagcgaaaagcaggctttcctcttgtagcaattgtgcactgaaaaactacagtgcccttatgacaccacaatagtaagcaagactacaggacatctatgcgaaatgcagctagccagctacactgatgtagagatcattcaggttctaagcatgagcaagctgggttatgatggtgttgtggcactgctggttgctgatatatcactttcagatcggtcttgaccagattgaagctctgtatcagtatgcccaatttcagtttgagtgtggtaactactcaggggctgctgattacctttaccagtatggtgctttgtgcacaaacagtgagcgaaatgtgagtgccctctggggaaagctagcagcagaaatcctaatgcagaactgggacctagctttggaggaactcaaccgcttgaaggaaataattgattcaaagaacttctcatcacctctgaatcagctccagaataggatatggctgatgcattgggctctgttcatcttctttaaccatatcaggtacttgaatgctatacagacaaatgcacaccatcttattaggtatctagctactgcagttgttgtcaacaaaaggagaaggaatatgcttaaagagttgattaaggtcattcaacaggagcaccatagctacaaggatcccgtaactgaatttttggaatgcttatatgttaactatgtagttgtgggcttttgaacaatagctggagtgatatgaaacattagtgatgtagttgtgggcttttgaactgcttcaagcaggagtgatgccgttgtggtgcttttgtgactgatcatctctggagcttttgtgaatgatctagctagctatctataaatgatctagttgtgaatgatattat

SEQ ID NO: 31341 - DNA, 1091 bp, Zea mays
  Clone ID: UC-ZMFLB73157G06_FLI
gcggagggacttgggctcgctggacaggtacgtgtgggcgttcgtgaacaacaggccgctgtcgccgagctacaagtacagccggaagatcccggcgaagacgtccaagtcggagtgcatcagcaaggacatggtccggcgcaggttccgcttcgtcggccccaccgtcgtccactccttcatgcaggcggtcggcctcaccaacgaccacctcgtctcgtgcccgcgccaccgcgcctgctccgccgccgccgttaactgattctgctgaccaccgtccaccgatcgagagccagacgtaaggaagaagagagacctttatatataaggacacgtacaatacaaccgagaaaaaagagaaaggtagtagcctctagtagcactagaagtagtacgtagtatacggaagggagagtgctggtttgcaattgtgtgtacgtacgagtacgatgatcgagtgtgcttgtgtagattgattacgcccccacccctaattagtcaatgaatgagcttgcttgctgcgacttccgcctgcacactgcagtgtgcagtcattgttcgcgtgaggcggttagctgcaggcgtgcgctctcctcctctcaacaagctaggctgcgcagatagtgatgtgatggatggggagatgatgatgatgatgattatagagagaagcccggccgtgtgggctacctgcatgtggccaagctctgattaaaagcgcgataacagcactctcacggcaggcaggcaggccatgtggtgtggtgtcgcaggcaaacgcatgtgcgacgaagacagagagggagagacggaaacgcagggagaagagcgggaaggaaagggggactagctaggaaaggcccgctttgccggccgcgcatgtgaccctgcagctcgcgtaccttttccaatcctcaaagtgggaggacggatcggaccccatgcactccacgctagtggtgtgtttggtttgtagagtcactccatgaggtgatgcatcataagttcattacaacaattttggtggaatcaactcactcctcatgtatatactaattattagcttataaggaataaggtggtgatggatc

SEQ ID NO: 31342 - DNA, 1500 bp, Zea mays
  Clone ID: UC-ZMFLB73157G08_FLI
ataggtttgaggtacgaggaattttgaagaatgcagatatacttaactctccgaatgtcatctgttcgttgagttttgatagggatgaagaatattttgctgctgctggagtttcaaagaaaataaaaatatttgaatttgatgcactcttaaatgatcgtgttgatattcattacccactgatagagatgcctagcaagtccaagcttagctgtgtctgttggaacaactatataaagaactacctggcttcaacagactatgatggcactgttcagctatgggatgccagctctggtcaaggattcacacagtttacagagcaccggaaaaggacttggtctgtgagtttttcagatgtcgaccctactaagttggcaagtggtagtgatgattgttgcgtgaaagtatggagtattaatcagaaaaattgtgttgatacaatcagaaatgtggccaatgtatgctgtgtacaattctctccatactcctcccgcatgctagcttttggttcagctgattacaagatatactgttatgatctgaggaacacaaggataccttggtgtactattttgggacatgggaaagctgtcagttatgtgaggttcttggatccatacacacttgtctctgcatcaaccgacaacacattgaagatatgggatcttaaccagactaattgcagtggattatctaccgattcttgcagcctgactctgaatggtcataccaatgagaagaattttgtagggctatctgttcatgatggatacataacttgtggctctgaaaccaatgaagtgttttcttactacaaaactttccccatgccaataacttctcataggtttggttctattgacccgataactggacaagtgacaaatgaagacaaccagcaatttgtgtccagtgtttgctggagagggaagtcaaacatggtagtggctgccaactccagtggtagcatcaaagtgcttgagcttgtgtgaatgaacgagagtcatattggagaagaaggttctagtgttgccatgcgggcctgcgatgctttcgtgcccttgggcactaaaagactcgactgctctatgcaagcatcctacaacaccgatcattggttattggaagctttgcttgaaactcacaagcaaactaaagtttttttttttccaagagtatgatggcctcacctccatttttgtgtttggcattttgagacggtacctattcatcgtgatgcaaacttcttttgggctagaggtgcgcgggacttgctatgactgttaagagcaaacgatggaaagaaagggaaaaaaatgatcatgtagctcgaagaagttaatcgtgctgtgtgaatgtttcaaggagaatgtctcaaatagttttatacccccttcattattgtacatatatctagggctgcctaatgaaaggccttgtaagttgtaactagagtagaatgctgatcatgagttaagtataatgaatggtcttcac

SEQ ID NO: 31343 - DNA, 2043 bp, Zea mays
  Clone ID: UC-ZMFLB73157H07_FLI
cccgtctctcgccgctagctttccctttcccttgcgctcctccttcactcctcaccctccccgcaggccgcggctcggcaagcaagcaacaacccccgccactcccctccctcaccaccatggcgtcgggcggctgcgctctcgcgccgaggccatgacttggcgccgcccgtggccgtggctctccgtcttctccctctccccgcgacgacaacccctcctcctccctgggcggcggcggcggctctagctagctagctagatggcgtcggcgatggtggtgttcgggggcggcaaggaccggccgtcgcctggcggcggtggggcgccgcaggtggacgcgggcaagtacgtgcgctacacccccgagcaggtcgaggcgctcgagcgagtctacggcgagtgccccaagcccagcagttttaagaacatttagccagaggcttagcaggggtttcaatgatgctgtcaatgggtttccagatgatggttggtcactgatgagcagtgacggtgctgaggatgttactattgctatcaactcttctccaaacaaacttattggtcctcatgtcaactcctcccagctgtttaccgcaattggaggaggcatcctgtgtgctaaggcatcaatgctgcttcagaatgtgccacctgccctactagtacggtttctgagggagcatcgctccgaatgggctgatcctggtgttgatgcttattccgctgctgctttgagggctagtccatatgcagttcctggtttgcgtgctagtgggtttacgggcagccaggttattctgccgcttgcacataccttagagcacgaggagttcttagaggttattaggcttgagggacacagcctctgccatgatgaagttgttctgtcacgagatatgtatcttctgcagctgtgcagtggcgtggatgaaaatgcagctggtgcatgtgcacagcttgtctttgcacccatcgatgaatcttttgctgacgatgcaccgctgctgccctcaggcttccgtgtcattccactagatgcaaagacggatccaccgtcaggcacacgcacgcttgacctagcatctgctctcgaggttggatctggtgggactactcgcgcttcaagcgacgcctccagcacctgcaacacaagatcggtgctgaccatcgctttccagttctcatacgagaatcacctacgagaaagcgtcgcagcgatggccaggcaatatgtcaggactgtggtggcatcggtgcagagggtggccatggcaatagctccttcccgtcttggtggacaggttgagatgaagcaaacacctggttctcctgaggcgcacacgcttgcgaggtggatcggcaggagctacaggtttcacactggagcagaactgcttcgcacagacacccaatgcacggatgcttccttgaaagcactgtggcagcactcggactcgatcatgtgctgttccctgaaggctgctcccgtgttcaccttcgcgaaccaagccggcctcgacatgctcgagacgacgctgatcgctctccaggacatctccctcgagaagatccttgacgacgatggcaggaaggcgctctgcaccgagtaccctaagttgatgcagcagggtttcgcgtacctccccggcggtgtgtgcgtgtcgagcatggggcggccggtgtcgtacgagcaggccgtggcgtggaaggtcctgagcgacgacgacacgccgcactgcctcgccttcatgttcgtcaactggtccttcgtgtgagtgaggaccgtccccctagcagagccagtcgcgcgcgcccgcctagcatttgcagctgttatttgttgaactctgtatccaagtactggtcgctcttgcctttgtccaggcaaccctgtgaaacgcacctgccccccccccccccacccacccacccagttcatcccgtggtggaacaaacaccttttgtagttgcttgcttgctatgttatgatggatcctggtctgctgcatctcctaaaaattggcttggaacattgcgtcc

SEQ ID NO: 31344 - DNA, 1382 bp, Zea mays
  Clone ID: UC-ZMFLB73157H11_FLI
cccggtctcgggcgcccaatttctgtgaacaggtcaaacccccccgcggcgccccacccccgcacgcagcgagtcagcgacgccccggccccgcgtcttcgtattcataacgccagagtccagactccagagtcctcagtcctcaccggcttctcctcccttcccgtcaccgatggagctgttcgcgcgcgcgaaggtggtgcggctcaggagccaccacgacaagttcctgtacgcggacgaggacgaggtgcgcgtgacgcaggaccgggacgggtcctcggcgaacgcgcggtggaccgtcgaggcggcgccgcacagcgcgggcgccgtccgcctgcgcagccgctacgggcgctacctcaccgcctccggggagccgttcctgctggggatgacggggcggaaggtgaggcagacggcgcccgccgcgccgcgcccggccaacgcgtccgtggactgggagcccctgcgggacggcttccaggcgcgcctccgcaccaaggcgggccacttcctccgcgccaacggggggctcccgccctggaggaactcggtcacccacgacgtgccccaccgcaccgccacgcaggactgggtgctctgggacgtcgaggtcgtgcagctcctcacgcccgcgccgcggcccgagcgcaccggctccgcgcccgtcgccaagttgccggactcgccgcccgcgccggacctcggcaagccaccgcaggcgcatgggccgcaccaccgcccatccaagtcctacgcgacgccaccgcccacgctcgagcccgtggcgccgccgccgccgccgccgccgccgtccaggctcaataagctcgagtcctccctttctttctccgcccccttgcacaaggtggagggacgtgccatccattaccatattgcagatgatctgggcaatgtggatgaaggcacagtgggacactccttcacattcaatggcagcaacttggaggagctcgcccacaagttgcaggaggagaccggtctggaggacatcattatatgcacacgcagccctatcaacgggaagctcactcctctccgtctgcagctgccaccgaacaacgcagcgatgcatatcgtgctcgtccaggagtcctcaaaggtggccaaatcatttccttggccatatggttcataaaccacaaacctttggcggagacagggccttgagttctggtggagaaaatgccggttgtgcagttacaccgggctatcagaagcaacctaccgtaaacttcatccgtgtacagtaaaaagaggcacctccgctagtatatatagcgtaaaaccagcggagattagtcgtgcggtatactgagagatgtgttccattaattaatttataccctgaatcgtgt

SEQ ID NO: 31345 - DNA, 1672 bp, Zea mays
  Clone ID: UC-ZMFLB73158A08_FLI
gtaagtcgctactgaccgaccatgaattcttgtgcgctggaatgatgaccattgttgttgttgtgtgagtgtcctcgaacaagatgtatgtagaggagtagcacatccggtggtgcaacgaccaggtgtactacctcgctgatgagcccggggtgcacttcatttggcagtccagccaagagtgatcggtactcaccatatcgcgcgcgttcgacgactattatatcaaggattgtggcgtcatctcgacaccggaggtgagcagaggtggaccgacaacaatgaccactcgccatcgtcggggtaccttttgtgccggcctgcctttaattctcttcgcaaacacacacttgcatttttttgtttaagcaagcgtgtatggtggtgcgtgcctgatgactaacgatgtacgacggaacttctaccggcaggtgtggcacgtgctctccaataatgagaccatgcaaatcatgacatatatcgaagtctacatgatactgatggttgcaatgtagtagtgaaacaactaaattaaaataacaaaatttatgtatggctaggatcacaaatggattatgaaatattttcttataacaatataagacacattttgtatataagttatcatggtattatatgttcccgttgcaacgcacgggtactgacctagttaattctgaagtgatttggcattgaaccttgctatcacagtgcttcagttaggttgtggagaagtaatatacgagattgctgagtgctagcctagcttgctttcaattgattagtagtttgctagctgttcttgcaatattttatcctgtaccataattagctgtggcagttcatgttacctttttgttctcttttctgtgtggctgtgcgcatatggatgtttgacatatactctctccgttcttttttatttgtcacgttttagttcaaaaatgaactagcgagcgacaaatattcaagaatggaggtagtaatacatagtatttactgttaaactgttgatgctcacttttgttttcagaatgagatgaatgaacgtgagttatctgcgctgaaatctgtcattaagtgcattgaagagcacaaacttgagcagcagtaccctgtggatccacttcagaaaagggttttgcagctagagaaagcaaaggcagacaagaggatggctgttgaagcagcaaagccgcagtccaagaggcctcgtgccaatggatcggcctttgcaacccgtgctacaggctttgctgacaagagcttctactcagcaaccccagagaggcatccattcaatccttgcgagaggcagtttgtgtatggcgctgaggttcatcttcctcccatgatgacctcagcgtcttacacgatgcaacctgcccatggaccttattacggtaatggctacccagttcagtaccaggtctcgtatatccactaatggagacagccaggtgcaggtgctctttcctaacaatctagcttaacctgctgctctttgctgtagtcgtatcagttactctgcaagtttccctagctggaaatatttggaccactcaatgtgtgtgctctgagtggctgttgtggtaattttatgccctaatgacatgacataaattactcctaatatttagctatcgatgaatctcccaatgtacttcattcg

SEQ ID NO: 31346 - DNA, 1672 bp, Zea mays
  Clone ID: UC-ZMFLB73158D09_FLI
ctcgactccagcatccctcgtccccgcatcaccgcgccgccgacactccgctcgctttcgctcccgagacccgggcctgccgagccgccgccatggacgaggagtacgacgtgatcgttctgggcacggggctcaaggagtgcatcctcagcggtctcctctctgtcgacggcctcaaggttctacacatggatagaaatgattactacggaggagattccacctccctaaacctgaaccagctctggaagaggtttaggggggaagacaagccaccggcacatctaggtgcaagcagagattacaatgtagacatggttccaaagtttatgatggcaaacgggactttggttcgcactctcattcacactgatgtgacaaaatatttgtcattcaaagctgttgatggaagctatgtcttcagcaaacggaagattcacaaggttcctgccaccgatatggaggctctaaaatctcctttgatgggtctatttgagaaacgtagagcaaggaacttttttgtttacgtccaaaattacaatgaagctgatccagtgacacatcaggggttggacctcacaaggattacaactagagaattgattttgaaacatggattgagtgatgacactgtggattttattggccatgcactcgctctgcacagggatgatcgttacctaaatgaacctgcccttgatactgtaaaaaggatgaagctttacgctgagtctcttgcacgttttcaaggaggctcgccttatatttatccattatatgggttgggtgagctgccacaggcttttgcacgtctaagtgctgtttatggtggtacatatatgttaaataaaccagagtgcaaggttgaatttgatatcgaagggaaagtgtgtggtgttacttcagaaggtgaaacggcgaaatgcaaaaaggttgtctgtgatccttcttacttgcctagcaaggtaaggaagattggaaaagttgcacgtgcaatcgctattatgagccacccaattccaaacacaaatgagtcccactcgattcagattattttgccgcagaagcaacttgggcgcaagtcagacatgtatgttttctgttgctcatatacacataatgttgcgccaaaagggaagttcattgcatttgtgtctgcggaagctgagaccgataatccacagtccgaactaaagcctggaattgatctacttggtcaagtagatgaactgttttttgatatgtatgacagatacaaacctgtcaatgaaccatctcttgataattgctttgtttcaatgagttatgatgctactacacactttgagacaactgtgacagatgttctcagtatgtacacagcaattactggaaagaccgttgatctcagtgtggacctgagcgctgccagcgcagctgaagaatactagagattttcctattagagataccatactctaaagaagaacggtgttaacacaggccctgcctggtggcttgccaggtttagatctatgctgcagctgcagccaattaaacggacagaacatatcaccctatagcatttacatggcgtttaaacacaagaccgtttaggatgatggtggtggttcctttgttccttgcattattgatcggatggttaacttttaactgtgctcacgtttgctac

SEQ ID NO: 31347 - DNA, 1875 bp, Zea mays
  Clone ID: UC-ZMFLB73158E10_FLI
ctgaggggaaattaagcacgtcatgtagtgaaccaaatatagcaaatgccttttggaggcgcagccaaaggagagttgccgaggaaccccgtggtgctagttccagccctgagcatccattaatgagagcaaggggaagatctatacttggtagtgagaagcaatcatttcaagaatacacagaatctggagctgcttcaagatcagatggtcttgggggcccttcaacctctaatgctcgaagaataaggcgaagaagcattagcattacacctgagattggagatgacatcgtgagggcagttcgggctatgaacgaaacactaaagcaaaatcgcctccaaagggatcatgtcgaaggttcatgctcatatgttatggaagatcaaagcaacaccaatgactgcccaaataaagatgatgcatcttggagaattggtgctactgacagtgactcaagaaaccgaactggttctactcagaaggccatgtcactaccttcttcgcctcatgaatatagaggtcaagttacccaaaaaagtgatgattttataagtaaagagaagatggcattggcatggaacaaagttttccagagctccccatttcttaataaggctttgctgccttttaaggaatggaacatagatttctccgagataacaattggcacgcgggttggaataggattctttggagaagttttccgtggtatatggaatggaactgatgttgccatcaaagtgtttctagaacaggatttgacaactgaaaacatggaagatttttgcaacgagatatacatcctcagccggttacgacacccgaatgttatattgcttcttggtgcatgcattacacctccacacctgtcaatggttactgaatatatggaaatggggtcactgtactatctcattcatatgagtggtcagaaaaagaaacttagttggcgtaggaagttgaaaattattcgtgatatatgcaggggattgatgtgcatacaccgcatcaagatagttcacagggatctcaaaagtgcaaactgcctggtcaataagcattggactgtcaagatatgtgactttggtctatctcgactgatgattgatagtcctatgaccgataattcctctgctggcaccccggaatggatggcccctgaacttatacgtaatgaacctttcacagagaaatgtgatatattcagccttggtgttatcatgtgggagctgtgcacattgagtcgcccatgggaaggcatctccccagttcaagtggtgtattcagttgctaatgaagggtcacggcttgagattccggaaggacccctcggcaggttaatcgcagattgctggtctgagcctgagaatcgaccgagctgccaggagatcctaacccgtctgctagactgcgaatatactgttagctaaaatggaagctgcatgctcgttcacccaattcctgcacaggtgagaatatttcttgtataaaacctataaaaaaagcctgccgattctgcggacttgaggtcacatattgaagccctgttctttttttttacaacggcgaccttttctctcaaaaatgtaaaaaaatgcttccccggttatagaagaacatattctggcccagaaatgtgccttatcgcagggcaagctaattctagataattagcatgccctcgaattaaccaagtgtttgttccgaagaatgttgccagtttgccattaccctgtggaatatggtaagcaagtacatggtgtgaattatgtgtgttgctcctaaacaggcggcaaataggaactagggtgctgtttggttggttccagggacctataacgtaaatggaaatagaaaacaccgctaccagtt

SEQ ID NO: 31348 - DNA, 3088 bp, Zea mays
  Clone ID: UC-ZMFLB73158F08_FLI
gagtccaggctccaggactaccaccactccgtctcgtctcgtcctcacaccccactccaccaccacctctgccttgcaaagctttccaccgatccgccgcctcgtccgcgcgctcgcaggcagcagtgtggactacccgccccatactccatcccctactcgaaggatacaccgtgagtaggcgtgatggtgcttgataccccgttttcgtgcagcttgttgctaattcgttttagtttgagggatcaagaaccaccttgttctttctttctttcttttttggactatgatgaatcattgcaaatctcttgaatacatttttcactataaaatactgccttgcctttgagctccttggttcacgtgcaatgtttctttgccctccgattttgcaggacctcgagttattaagttgggcgaggagaggtggttcattccagcagggatccttctcgtgagcccagtcgatctgaccgtccttggtatctggggggggttgttctgtactctctctttaatttgtgagtcgtgacaggttcttgaagtgcaattgttaagagttttagttgtagaggaagagaagggtttgctaatatggcgttggcagggacctccaaagtagtgctgggatgtatcgcctttgggattttctgggtgatggccgtcttccccaccgtcccgttcatgcctgttgggcggacggctgggtccctccttggtgctatgctaatggtcctgttccgcgtcatctccccggaggacgcgtacgccgcgattgacctcccgatcatcggcctgctcttcgggacaatggtcgtcagcatcttccttgagagggctgacatgtttaagtacctcgggaacctgctctcgtggaagagcagaggcagcaaggacctgctcttccgagtctgcatcgtgtccgcgtttgccagcgcgcttttcaccaatgacacatgctgtgttgtcctcaccgagttcatcctcaaggttgctaggcaaaacaacctgccaccacagcctttccttctggcccttgccactagttcgaacatcggctctgctgccacgccgatcggcaaccctcagaaccttgtcatagctgtcgagagtgggatctcatttggccagttcttgctgggagttttcccagctatgatcgttggggttctcacaaacgctgctatcctccttttgtacttctggaaatacttgtcggtggagaaggatcaggagggtgggcagcccacaggaccagaggtggttgccgacgatgaggttacttcccatcggttcacaccggctagaatgtcacatgtttcttctctgaatccagatgacatggattgcgtaagcgaaccgatcatcaggagcaacagtgtcagtactactgggaatgagaacctgagaagcagaagcatcaattctgaggctgacattcagcttgcgatcaagtctctgcgggcatcaagcatgtcgcatgagatggtagaggtctcgacggttcctgatcggagagatgaaggtgcatcctcaaggaagttcacaaggactgctagccagcaaaggagcgtgataatagaggatttagcaccctccccagagattaatggggaaaaggagaaagaaactgaagttgcagagaagagatggaaagtacttgtgtggaagactgctgtttatcttatcactctcggtatgctcattgcacttctaatgggactgaacatgtcctggactgcaatcactgcagctcttgttcttctggcactcgattttacggacgcacaagcttgtcttgagaaggtgtcatattcactgctgatctttttctgcgggatgtttatcactgttgatggcttcaacaaaacgggcataccgaacacactatgggagttagtggaaccatattcacgaatcgatagtgcgaaaggtgttgcacttcttgccgtggtgattcttatcctttcaaacgtggcctctaatgttcctacaggtaatttttcttacgcatatgaccatgtataaccatttaatactttatatacatatatgctcttctgtttgcaaaattcataacacatggtatttcgagaggttgtgtgctcaatgccgccatctggcctctgttctttattcatgacaagcatgattaaatgaaggaaatggaagcattacattatcttgtgtacataggatgaaaactgggatagcttcaagagaaggtgttaaatttcctataaagaattaaactgaattgctacaatgattcttgtttgcagccacaataggtctggtttgccactgactttaagaactgaaatatatattgaactctacagcagagtagtttctgtacagtaaaatatgcaatcctgagaatatttctgcagaaaataatcttgaaacactatgatcttttcacagaaataggttgtagagatatttgttttgtcctaaccagcgagccatatagtacactgaacccgaacaagctaattttcgtttgatccatgtttcagaagtttgggagagtaattaattattggttcattctgtccatcctacgtctgattttttttctcactgttttttattcagtcctattgctcggtacaagagtggctgcatcagcggcttcgatttctcatggttcagagaggaaagcctggctcatccttgcatgggtcagcaccgtggctgggaacctcaccctcctaggctctgcggcgaatctgattgtctgcgagcaggccaggcgggcccagttcttcggctacaacctcaccttctggagccacctccgattcggggtcccgtcgaccatcatcgtcacggcgattggtttgctcatcgtcatcagttactgaaacagctgaaggcagaagagcgtagtgtaagagaagcagaatggataaaaatccttccaataagaagtacatgtaaattaggcttgccctataactcaagtgtgtatcggtacgttatgtctccgtctgtgctcttgctcgtgagcaagcagcacatggctgaccgtgtagcttgcatttccattgcataataggcttatgaagaatgctttggtaat

SEQ ID NO: 31349 - DNA, 1912 bp, Zea mays
  Clone ID: UC-ZMFLB73158F11_FLI
gaccgatcgaggtggcgcaaagcagaggaaaaccccaggccgcaaccctcgcaaacactcaagtcctcgtcccttccgcactctcctcttcaactccagccgctttcaccgccaatcagaggtccaccaccaccaccaccacatctcttcgcatccaaccgccccgtaggatcacaggaaacggggatggcgagcggcggggcggtgagggaggtgggctcggccgccgagctgcaggcggcggtggccggggcgcgggcggcggcggtgcacttctgggcgtcctggtgcgaggcgtccaagcagatggacgaggtcttcgcgcacctcgccgtcgacttcccccacgcggccttcctccgggttgaagctgaagaacaacctgaaatatcagaggcgtatggagttacagcggtgccatattttgttttctgcaaggaaggcaaaactgtcgatactttggagggagcaaacccagccagcttagccaataaggttgcaaaagtagctgggcctgctagtgttgctgagtctgctgtacctgctagccttggagttgctgctggacctgctgtacttgaaaacatccaaaagatggcacagcgaaatggatcttctgctgttgaaagcataagctctggtagcacagaagatgcattgaataagcgattggagcagcttgtcaattcccatcccgtgtttttatttatgaagggaaccccagagcaaccaaggtgtggtttcagccgtaaagtgattgacattttgaagcaggaaggggtgaaatttgggagctttgacattcttacagacaatgatgttcgcgaaggcatgaagaaattctccaactggcccactttccctcaactctactgcaaaggtgagctgcttggtggatgtgatattgttgttgctatgcacgaaagtggtgaattgaaggatgtttttgaggagcacaacattacccttaaaccacagggaagcaaaaatgaagaagcaggtgaacctgagtctgcaactgagaagggcagtgcagtttctgaatcaatcaagcttactgatgctcagaaaactcgtttggaaagccttattaactccagcccggtgatggtattcatcaaaggtacacctgaggaaccaaagtgtgggttcagtgggaagctggttcacatacttaagcaagagaacattcctttctccagttttgacatcctttcagatgatgaagttagacaggggctgaaggtcttctcaaactggcctagttaccctcaactgtacataaaaggtgaactggttggcggctcagacatagtgatggagatgcataagagtggtgagctgaagaagatactatctgagaaaggggttcgtcaaaaaggaaatctggaggacagattgaagtccctgatttcctctgccccggtgatgcttttcatgaagggcaccccagatgctccacgttgcggcttcagttcgaaagttgtgaacgccttgaagaaggaaggggtcagctttgggtcctttgacatcttatctgacgaggaagttcgacagggtttgaagacatactccaactggcctaccttcccccaactctactacaagtcggagctgattggtggctgtgacatcattcttgagatggagaagagcggagagctgaagtcgaccctgtcaatgtagacacctaacctagcattcttgcctcgctggcgttcctatcatattgcctgcattggatcattctactatgacgtttgtgccaatgtattcatagatccacgtttggtgcctgcagtgccacattgctagaatcgtgacatctgcagatggaataacttgagagcttgttcggtactgattgctcttttatcaccagtctatttagcggatgagagttttttttgtt

SEQ ID NO: 31350 - DNA, 1255 bp, Zea mays
  Clone ID: UC-ZMFLB73158F12_FLI
gcccaagcaaaatatccgaagaaatggtcagatgcatggcatccatatactatcttctgcgcaccgaggcgccagcaggaaagcctgagaaggcccgctcgccattcttgtcaaggtcatcgacgaatgtcatccttcctcggcgggtgaacggagaggaaaacagcgcaccgaacaacaggtgcacggtggaaatagcttccatatcagttgacaagaaccagatgccagatgtctcttacgcgatcacccactacaggttgcttgtggaacagcttgaaagagttgatctgagcgtgtcggagaacagcgttaagttggccttctggattaacgtttacaattcgcttatcatgcatgcgtatctggcatatgggattccaaacagctctctgaaaagaatggcgctatttcacaaggctgcctacaatattggagggcatgccattaccgccaatgctatcgagcacgccttgctgtgcttcaggtctccacggatcggtcgttggttcgagtccatcctctcgacggctatgcggaagaaatgcccggacgagaagcagctggtccagctcaagttcggcctgcaggagtgccagcctctggccctcttcgccctgtgcaccggcgcttcgtctgaccccatgctgcgggtgtacacggcgaagaacgtgatggaggagctggagcgcgccaagcgagagttcctgcaggcgacggtggtggtgcgcaagtccacgaagaagctgttcctgccgcgcctggtggagcggtacgcgagggaggcgtgcgttggccccgacagcgtcctcccgtgggcgcagcgcgagggggccgtcgccgtcgtcgacgaccggccgcagcaggaggccgcccagcggggcgtggggagccggcgcaaggccgtgcaggccgtagagtggctgccgtacgccaccagattccgctatgccttcgccaggagcatggtcgacaagccacactgctagctgcttcgcctcgcacagtcgcactcctcgcatcgcagctgttgccgtctggccccgtttccgctggagaaagacatctgatcgctgtggcgcagccattctgatggctagatgtaaatgtctcgttgatgctgcgatgttgacggctagatagtactgctccgttccgtagtgaacaagtggcaaggatgggacgaagggtttgactaattttgcacaaggtgtacagaagctagttgatcgctattatttcaggtttcagcagc

SEQ ID NO: 31351 - DNA, 1631 bp, Zea mays
  Clone ID: UC-ZMFLB73158G11_FLI
caccatccatttgaataataggatactgatgcagggctcaaaagttatggctaacctgctttccttttgttttgggtgaccgaaacaaagtttggtgaacacttcacatgccatgtgactcagattagtgtcatagcattctttggcagcactagaactctagaagcacctttaaccttttttttaagaaaaacttgtctagttgtgttttcggtggctacagccagacagtttggcaaattgcccccattgcggtggtggtgccgtggtgggctgttaaaaaaaaggacatttaaaaactcttttagggctagcgtggcaactccattttctattgagaaatgaactaattttccttgtgaaaatggaaattatcttcggtaagccatgggattgagttggattcttagagaggattttagttccaaactagccctcaatcctatggattctaggagaggattcgagtttccaaactagctccggtaatccaagggatctagtcagattttcggagaggatttgggtttcgaaactagccctcaatcccatggattctgggagatgattggagttaaaaatctagctcttacatgatttattacctgcatttgttctttacatgctacagtctagagtatatggtttttgtagggcatggtccagagtagttgctggaggtgtttcccatgcacgttccatgttcaattatacacaatcttatcttgcacaatccattcccacatcagcatgggcattccgcattatctccttgcgcaaactgcattctctatcgcagacagtgaagcaagagaagtttcttatttcgagaatatcataatatctgcatttagcatgagcataacattagcaatcgctctttcttttcgatggatctcctatggaaaaagaagagcagccaagtaaaccgtgggaatgtttttttgttgttgtcttgtgttcgatggcaacacccaggtcgtgaaggcaatcgagaacgcgatccccgtgcggcacgccgccgccgccgccgccgcggagatcgaccccgcgagggaggaggagctgagggccatggaggcggagaaggcggagatcgaccgcgcggcggcggcgcgggtgcggcgggagctgtggtgcgggctgacgtacctggtgatccagacggccgggttcatgcggctcaccttctgggagctgtcgtgggacgtgatggagcccatctgcttctacgtcacgtccatgtacttcatggccggctacgccttcttcctccgcaccaagaaggagccgtcgttcgaaggcttcttcgagagccggttcgcggccaagcagaagcgcgtgatgcgcgcccggggcttcgacctccgcaggtacgaggagctccggagagcctgcggcgtggcggcgccgccgctccaggcccggaccccctgcgcgagcgcgggcgcggcgcgggagagcggccattgccactcctactgccattgccattgatcttggcctcgctcggttcattcctttctttttttctttgttgttcatgcccatttggtggggatgatgattcgtgtatccatctgatgcgcgcgcggatgcaaaaaaaaaagaagcatactgaattgaggttt

SEQ ID NO: 31352 - DNA, 2227 bp, Zea mays
  Clone ID: UC-ZMFLB73159A10_FLI
gctgctccattctcagccgccgccaatcccttcccgtgctccgcaaccgctgagtgagaagaagagatggccggcaagggcgatggcccggctatcggcatcgatctcggcacgacgtactcttgcgtcggcgtgtggcagcacgaccgcgtcgagatcattgccaacgaccagggtaaccgcaccacgccctcgtacgtcgccttcaccgactccgagcgcctcatcggagatgcggccaagaaccaggtcgccatgaaccccatcaacaccgtctttgatgccaagcgtctcatcggcaggaggttcagtgatgcgtctgtccagagtgatatcaagttgtggcccttcaaggtcatttctgggcctggtgagaagccaatgattgttgtccagcacaagggtgaggagaagcagtttgcagctgaagagatctcctctatggttcttatcaagatgcgtgagattgctgaagcttaccttggtagcacgatcaagaatgctgtggtcacagtccctgcctacttcaatgactcacagaggcaggccacaaaggatgctggggtgattgctggccttaatgtgctgcgtatcatcaacgagccaacagctgcagctatcgcctatggtcttgacaagaaggctaccagtgtcggtgagaagaatgtcctcatctttgatcttggaggtggtacctttgatgtctccctcctcaccattgaggaaggaatctttgaggtcaaggccacagctggtgacacccatcttggtggtgaggactttgacaacaggatggtcaaccacttcgtccaggagttcaagaggaagaacaagaaggatatcactggcaaccccagggctctccggaggctgaggaccgcttgtgagagggcgaagaggactctgtcttccactgcccagaccacgattgagattgactcgctgtatgagggcatcgacttctactccaccatcacccgtgccaggtttgaggagctcaacatggacctgttcaggaagtgcatggagcctgttgagaagtgcctgagggatgccaagatggacaagagcaccgtccatgacgttgtacttgttggtggctccactaggatccccagggtgcagcaactgctccaggacttcttcaacggcaaggagctgtgcaagaacatcaaccccgatgaggctgtcgcctatggtgctgctgtccaggctgccatcctgagcggtgagggcaatgagaaggtgcaggacctgcttctgctggacgtcacccctctgtccctgggtctggagactgctggaggagttatgacagtgctgatcccgaggaacaccaccatccccaccaagaaggagcaggtattctccacctactcggacaaccagcccggtgtcctgatccaggtctacgagggtgagaggacccggacacgcgacaacaacctgctgggcaagttcgagctctccggcatcccccctgcaccccgtggtgtgccacagatcaccgtgtgctttgacatcgacgccaacggcatcctgaacgtgtctgccgaggacaagacaacggggcagaagaacaagatcacaatcaccaacgacaagggccgtctctccaaggaggagatcgagaagatggttcaggacgctgagaagtacaagtctgaggatgaggagcacaagaagaaggtggaggccaagaactcgctggagaactactcctacaacatgcgcaacacgatcaaggacgagaagattgcgtccaagctgccggccgatgacaagaagaagatcgaggacgccatcgacgcggccatcagctggctggacgccaaccagctcgccgaggcggacgagttcgaggacaagatgaaggagctggagagcctctgcaaccccatcatcgccaagatgtaccagggcgcgggtgaagacatgggcggcgctggcggcatggacgaggacgcccctgccggcagcggcggccctggccccaagatcgaggaggtggactaagcggtttgttgtcagtcttgagtgtgctgcagttgctggctggcccagttgctgccgagagttatcgtcagttggtgcggtgtgtccgcttaaactttatttgtggttggttggtacttttgtggtggttatttttttggacctcgtgatagtcggtcggttcaatgttatcgcggctactggcaaaccttaagtgatacggtattcttct

SEQ ID NO: 31353 - DNA, 2020 bp, Zea mays
  Clone ID: UC-ZMFLB73159B03_FLI
gtcaatgagaacgatacaaaaccagatgaagctaaaattaatgctatgataggacgttctaatcagcaattccttgcacgtgttggagctattgagttggatgatcaaggacaagaggaatctggatctgaaaagaatgacatgtataccattttgccatgggtagatggtgttgcacggttagttttaatccttggacttgaagatgtctctgcaatcaaaaaggctgctagagcaatgggtgatgcatcaataaatgaacatatgcgtacctcattcaaggaagctggggctgttaaacctctacttcagctgctcaagcacaaagatgtacatgttagagaagctggtgcttatgcgttggaaaaattatgtgtaagtgccacagtctgccataatatcaaaacagaaggtggactagaattgcttgtaaatatagtcaaggatcgacatactccagtagaactactagagaagataatttatatactttctcgaatgtttgacatggggatttgcatggttgctgtgccggatactgaaggttataaggatagtgaaaacagtgcaaagacatctgttaaccaagagatgtccagcgagttgatctttgattttgatgctatctcacacttaacggaagttctaaaggaagcatcgccaaggttgcaagcaaaagtctgttgtgtacttgaccatatagcagcttcggagcaacatgccaccgcaatgactgctgcttgcactggttcagtaattgaagctattcttgaaataggggttattcatgggaccagaagtgactctgagaactttgaaattcctagtgtagttataaaagaactcagtgaggctgtgtctgcagctgtgaggttactctcaaagttattgaactttgatcttttcatccgcagcataaacggtgaaaaaatcacttctttgctaagaagaacgctcaaatcaaatttcccccttcagtcaaaggattgtcttgcggcatgcctcattaagctagaatccagagctggcttatcaggagatcatggtgttagtagtatagatatggagataactatctatgagactattccaaggctaattgagcaaatgatgatatcactttcgtttgaaaataaaagaagtgctgtaatagagctcaacaagataatatctggtggtgtgctggaatatacaagagcagtggcagattctggaggcatatttccactggtgaaaatgcttgaagaggcggatggagatgcactggaggctatcttatctatcttatataatctgagcatggatccagagaatcacccagcaataattgctgctggagcagtgcctctgttgaagcggattgttcgtacagaagccccacaatggagtagtgcaattcagctgttgagaacattgcctgtatgacattgatgaagaaaatggccattcatcgccaacaaacattataaactgcacttagggcctgtttggtttgatggctaacttgccacactttgcctaacttttgtgcctaaggttagttcttcaattcgaacgactaaccttaggcaaagtgtggcacatttagccacgaaccaaacagccccttagtgcatgcacagccaatttcttagattgaggttgcggttgaacctagctccagctccctatcatcatcaaaatttgaattttatgatctggaagaaagcatcagcaaggcatttcctccaaagtagcgatatatgctgcccttttggctagttgaaaagcacaccggggcctgatgtgtccttttgctcacatcacatgccacggcaatagctagtaccacgaactattttggataccggcagtttgctggttgtgagaggacccaagaaagttcaaattgtagcttgctaaatcgtcgtgtttcgacactaggtgactttactctttaaaaatgctatcctttttgtgtaacctgaaatcctgaataacctccacggtgccaatatcaaaagaatctctttttgactcc

SEQ ID NO: 31354 - DNA, 1443 bp, Zea mays
  Clone ID: UC-ZMFLB73159B11_FLI
gcagaattgcagccgaatccatcggagcccacggccgcacgcccgcagcccggccagcggccaccgcatcgcctcgtatgctccgcgcttgcacacgcgtcggcggcgcgggcgcgggcggctgcggccgacgagaacgcctcatggcctccctcatccccttcctccctccctcaccttactccactcacctcccgcgccagccccagtcccagccgccgacagccgctacccagcccgccgcagcggcgcgcccatcccggttccgcctcctgttcgcgcgcgccgcggcgcagcggcagcgcgactccgagccggcgccggcggccgaggagaggcggtcgctggccgtcagaacgggggagctgttcctggggctggcggcgctgctgctgcgcgggaccggggccgagcgtagcggtggggccgcggtggaggagatggaggcgagggacggggtagtgtgggagcagcgcccccaggacgtggacgcggagcggcggcgacgggagctcactagcccaggtttcagcttctccgccgcggggctgctcttcccctaccacctcggcgccgcgcagtgcctcatggaccgcggatacatcaccgagacaactccgttagctggctcatcagctggtgccataatctgtgcagtgatcgcatctgggaacacaatgcaagatgctctgcaggtgaccaaagttctagctgacaactgccgaagtaaaggcacggcgtttcgccttggggctgtactcaaggatgtccttgttgagtttctcccagatgatcttcacattagatgcaatggaagaattcgtgttgctattactcagctatcctggaggcctagggccttgctggtggaccaatttgactccaaagaagatgtcattaatgcagtaattacatcctcctttattcctggatacttagcacccaggccagctaccttcttccgtaataggctcggcattgatgggggccttacattgtttatgccgcccacttctgctgcagaaacagtccgaatatgtgcttttccagccagccgtttgggattgcaagatattgggatcagtcccgattgcaatccagagaacagggctagcccaagacagctgtatgggctgagcagaattatgctgagcttatcgccaagaatgatcaatcccttgtcgctgattgaattgagttcagtttgcccagaagtaattttggtatccaaagctgagttcatgagaatccatgcctgtaatatattgtaaagatagcaccgtcattgtcgaaggtggcattgttctgcattggatttgggtgtttatgccagcattttcgtagctgtgacaatagtgtagaacaggttgctagcatggccataaaaactgatcagcataatcaaatgtatagattatagatgatgaggtttgacctgagcct

SEQ ID NO: 31355 - DNA, 1202 bp, Zea mays
  Clone ID: UC-ZMFLB73159D10_FLI
tacttcggccacgtcgactgcctgcgggccatcctcgcggcggcgcggaccacgccggtggccgactcatggggtttcgcccggttcgtcaacgtcagggacgaccgcggcgccacgccgctgcacctcgccgccaggcagggccgctccgcctgcgtgcaggtgctgctggagaacggcgccattgtctccgccctcaccggctcctacgggttccccggcagcacgtcgctgcatctggccgctcgaagcgggaacctggactgcatccggaaactgctcgcctggggcgcggatcgtctccagagggactcagcagggaggattccttacgccgtggcgctgaagcgcaaccacgcggcgtgcgcggcgctgctgaacccgtcggcggcggagcccatggtgtggccttccccgctcaagttcatcagcgagctggacccggaggcgaaggctctcctggaagcggcactgatggacgccaatagggagagggaggagaagatcctcaagggcatcaccaagtattcgcagccatcgcctacttcgccttgcgagcacgatgccattgacgaagcgtccttggaggccagcgacggggagctgtgctgcatctgcttcgagcaggcgtgcagcatcgaggtgcaggactgcgggcaccagatgtgcgcggcgtgcacactggcgctgtgctgccacagcaagccgaacccggcgacgctgacgccgccgtcgccggcctgcccgttctgccgcggcagcatctcgaggctgctggtggcccgggcgagccccgacgccgatgacgacgacaaggccgccgccgcctcgtccccgcagctcgtccggcggcggtcgcacaacctcagatgggcggcggcgacggcgtggacaagcccgagcacgacctgtgatcggcatttgatgctgtgcgtggctgagcagacagcagagcacgaccattttaaaagctgaagcaggcattgccactggctttccaagatgagagacatcacatccaagcgtgattatctactggagtacttgtaatgcatcctcttcttctcccccatgtctggtctatttttgggcgtgctaggatggacctggccggcgcgatatggttgagctgagcttgagccaccgacatgtgtgtaaaactgtcggtcgagagaacacgcagagtggaaccggcgatgtgc

SEQ ID NO: 31356 - DNA, 1402 bp, Zea mays
  Clone ID: UC-ZMFLB73159E01_FLI
caagggttcctgggtttctcagtctttgactgagagcttctttgtgcaataccatggtgcggtttttcctcaccggccgagtatctgtttttgaaggtagggtttgtacttttcttcttttttaacaaagagataaattgctcgcctttgtgttccagaagaaaaatctcagcaattgtcaaacttcagtttttagttaaggttaatagataccaaacaaaggatactatactattgtttaatacatcgtatattatttggctagtgccagcctttgggctatagaatcctctaccaaataagtagcagatttatttggatggaaggagtgtatctcttattaaatacatacgacaaacatttaaggaacgaacgtcacaaggttatcaatagtaagcttgactgaccttgagttgaacaaaaactttcatgaagacgtatctttggcaatgaattggacaggtaaggttcaagaacacttcagctaaataaatgagtagagttaacatatatctttctcaagggatgggggactaggggagtcactagcattgattgtgcaccttgaatccctttcttttcttatataaggaggtatcctctacactaaactacgaacaagtatcagagacactctctgtcaggtgtctgcaatggacaacctcaaaacccattctgaatatgccgatcaacctcaggggccacaagcaaatgccgtttctttcgctttaccaacaggtcaggtcttagacttagatagtcatatgattggccaacagcacacgaatctgtcatcattctggttctcccttgagcagcacaggctgcagttggatcaggcccttcaactccataaccaacagttgcaggtgtcactgcagcagcaaatatctatgcagaactcaactctactgaaccttgtggaatctatgacaagagatgtgctgatgcaaaagaatgatgagatagccagcctgcgagtagagttgcagaggaaccaagaggatctagaaacaacactgcatgacagagatgagtggatgaaggtcgctatggccgcttatgaaattaatcagacacttatccgcatgcttcgtaccgtgcagctggaagcgaattctcatgtttcatctaatgatctagatgctccaagttatagtgaagcatcgagcatggcgaggacagcattggagacagcacagcccaatctgatctgcaaggtctgcaactctggtaatgccggcgtacttatgttgccatgccaacacctctgtgcatgtaagccgtgcgtagcctggcttgcgacatgtcctatctgtggtgctgtgaagactgatgctatcgaggctcgatttgtttataagaagtaaaaacgccaaagcagcaatccgaattcgtttat

SEQ ID NO: 31357 - DNA, 1369 bp, Zea mays
  Clone ID: UC-ZMFLB73159E10_FLI
gagggtcagcaacatacctgaaacttcaggcatcataggccaattgttgcaggagatcatgagaagattaaaccttacatttgatctccatatactttcttctggtgataaggagaagcaaagtgatctgcaggctttgctatgtggtgttctgcaggtcatcatccagaaactgagcagcactgatgcaagtccatagtttctcagactgctgatcagctgatgatgctgtttctgcgtgtctttgcctgccacaattctactgtccatgaagaagcaatgcttgcaattggtgctcttgcatatgctactggtccagattttgtgaaatacatgcctaacttcttcacatacctggaggctggtttgcagaattatgaagaataccaagtgtgttccatctctgttggggtggttggtgatatttgccgtgccttggaagataaaattttgcccttctgtgatcgcattatgactgttcttcttaaggacctatcaagctctatgctcaatcggtctgtgaagcctccgattttctcatgctttggagatattgctcttgctattggtgagaattttgagaaatacctaccatatgccatgccgatgcttcaaggagctgctgaacttcttggtactcttgatcagagtgatgatgatatggttgattatggcaaccagctcagacgtggcatttttgaggcatactctggtatactccagggcatcaagggcccaaaagctcagctgatgatcccatatgcaacacatctactacagttcactgaagctgtcttcaaagataggagcagggatgacagtgtgacaaaggctgcagttgctgtccttggggatcttgcagacacgcttggccagagctcaaaggatctgttcaagacccacctattccatgttgagttcttgagggagtgccaagcacaacagttggatgatgaagttcgggagactgcacaatgggcccaggggatgataaaccaggcggtggtctcctaatgtaggttgattttggtttgtttgttatgggagatttcttgtggttgtgccaagttcatttgccacagacgaaagaaaggctaccaatatatatgtagcgtcagtcgtaggatcctggtagacatatttgtgcgttgttggtctgtcaagtcggtgcgcgtcacattgtaccgagtggtttctgtccgagtatgtcttgaacagcaaaacttggttcatttatcttggtatttttcaatgctggtcatgtgtttcctttttttttcatttcttgtccagctgatcaagtttatatatgatacacacgcagactgatacatttaatcaaaatttgatctgcttgacatggtttgtt

SEQ ID NO: 31358 - DNA, 558 bp, Zea mays
  Clone ID: UC-ZMFLB73159H09_FLI
ggggagcatgtcctcgagcgctccctctcggaatcgaggagggaagtccggaggggtaaaaatgcggaggcagcagacatgggcggcgaaactcaacccggccgcaacggacatgtgccgggcagagcaagccaaggctcaatccgaagctcacaggctgcaagcaatgtggatgtgcacagtttccggaccgattggctcaagaacagcaagattggcagaagcaggagcgtgcattacacatctcctgggaacctggacaacgggatgcttcggttctatctgacaccgatgagaagctccagaactgcgaacagggggaggaggagaagttcgcgcttgtttgcgcgaggacttttcggtttcatataagtggctcaagtagagcgttagcccatgccatgcgtttttttaaagatggcagcagcagaagcaacttttctttggaatctacttggtttctaaggattggcatcctcgtaagttgcccgtcatatcctttcttgtaggtgactgtttgatcccaacttagactcaaagaagcttcactgttagttg

SEQ ID NO: 31359 - DNA, 1755 bp, Zea mays
  Clone ID: UC-ZMFLB73160A04_FLI
ctgagcagaaggttgaccagacacaaaacgtgtcaggacagaacgccgagattgttcaagagaacaataatgaggctcatactccaaagggcgttctaaatgacgggatgggggcactagaggttccaatcaatgaggatcagcttgttcctgcagaagaaaagaaatcacaaaccctagcccatgagacacatccagttccagatgaacatggatctgatactaaaatgccatctgaagattctctagctgttgagatagagacagttcccatcgatgctaatgaatctagcgaagttcctcatgaacagcaaactgataggatagacagcacaattcctcctacacagtcaaccccaacaacagttagtacttatgatcaccccacagatccagatgcaccaaaggatctctcaggagctggtgctgttgagcagaaatctcttgctgagacatattttctgcaagatgaacctgatgtttcgaaagatgcaaccattaaggaaaaaagaagtgatgaagttattcgtgaaaaaacttctaaagatggtaagattgtacttgatatcattgaggctattcatgccgccgaaaagaagcaggcagatgtagatgcatacatgtattcagaagagagaagaaagttgaaggagaagtatgaaaaggagctgaaagacaccagggccagggaactgatgtatgcagaggaggcagcaattctggataaggagctaaagaaagagaaactgaagaatgctgctgcattaaaggaactgcaagaaaaagctgaacaaaaattgcaggatgagctgcagaggaaggatgaagaaacaagccaacaaattgagaaggcccaagagatagctaaagctgaacttgctgcagctgttgcaaaagagaaagcatcccagattgaacagattgctgaagcaaaccttaatattgatgcgctgtgtatggcattctatgcacgatctgaagaaactaggcagagtcattcagttcataagcttgctctgggcactcttgctttggaacacgctttatccagtggatcaccaatccgatcagaagtggagctattgcgtaaatctgttgaaggcatcgacaaagattcactgttagaactggctctttcatcactcccagaagatgttttagattatggatcagataccatgatggggttgaagcaaaagtttaactccttgaaggaaactatcagacacttcagccttctaccagcaggcggtggtggaatcctggcacatactgttgctcgagttgcttcttcaatcaagattaaaggcgataactctggagatggcattgagtctcttatcaacaaagtagaaaggttgattgtggatggagacttgattacagcggccgatgccttggagcaagggttacatggaactgaagcagaggagatagctaccgagtgggtgaagcaagccaggaaacgagcgatcgccgaacagacccttgctctccttcaggcgtgtgcttcttcgaccacgttctcatgattttggccagactttttttttcttccttttgtttgcttggatttgccggtttcagtactctgtgaaaaagcttgtttttcccagaccatgttgaaaatgcgtggatggtgaacgagaaaaatcagatacaatactatagcagccagccagccactgggtctcaaagtgggggccctgcctaagtttttcatcgtgtaaacaaagctaataagttttgccctgt

SEQ ID NO: 31360 - DNA, 2235 bp, Zea mays
  Clone ID: UC-ZMFLB73160A10_FLI
atataccaaatggattagcttcaggagttgcaactgcatttgttccttctgatgtggactattcaaatgaagctcaaacccatgtccttccccacagcacactggaagcatatccaagtgatatgtctgttgggaacggcacaacttatcctaatttgggaatggcatgtggaagtgcacatgttactcaagatgcttatgcttatgctgctcctatcgccagtaatgagcctttggacattgatcccttgtatcttgcaaaatatggtgatggtttgctgcaaagattggacctgctggaaaggctctgtggctcgaacaaaggtcttgaattgataagaagagaaattgagatacggatgtcggacttaaatgcactttcatcttatggatcttctttgctcccattgtggttgcatgctgaggtgcacctgaagcaactagactcttctatttccaagctggaaatgaactatcatgcagattcagaacctaggaattcaaagacagaggttgctgaacacagggcacctgatgatgctgacttgataacaccctccaatggcgaggctttgaagtatgaagtttgtgctgggattactatcgatgcaaatatgaagattggtaagccagcttcaacgtctcagaattcacaaggtagggataatgcagctgttcctccaaaaattgaatctgacaatgatgaagatatggatgtggaaatggaagttgatgaagataatgtcgaagagcaggcacagtgcagttctgtacctgaaaaggagcatcctccttcagaacagttgagttcatctaatttgccatcatttgaagatcctacacctcctgaggataattctgttcctccacctccgccagaagaggaatggattccacctccaccacctgaacacgaacacgaaccagctcctccagcttccccagaagagccggctgcatcatatgttcaggtggatacaattcctcagccatatatagctcaagaaaatgttggctatacaatttcaggaatggagtattatagtactgaaggtacaaatgccaattactatatgcaagtgagtgagcctcatgtccttcaagcacaacattcttattatgcaccagtatctgggagtggcatatctgtttctgttgatggcacatctattgccccagaatcttattatacctatccttcagtcactgtggctgcaagcgctgtagcagctgaacattctggatactacgcttcatcagtctctgccatttatagcagtgcagcagatatcaaaacaagctcagcttctcttgtttctgcaattagcaattcggatctaaaaaatcatgataatgttatatccaatgatgcaagtattgtgcctttcacccaagctgtagtagcaacatcagctgcaggaacgacatctgttcctgaaagttctacacagccttctagcagtactacaaaccagatcaaagttattcgcaacaagaagcgggttgttggtattacatcgtctctgaggtctaataagaaggtttcaagtttggtagataagtggaaagctgcaaaagaggagcttcgtgatgaagaggaagatgagcctgaaactgctctagaggcattagaaaggaagcgacaaaaggaaatagaggagtggcggaaacaacagatagcttttggacatgctcaggaaaatgccaattttgttcctgttcgtggtgattggcgtgaccgtgtaaaacgcagaagggctgaagcaaaaaaggagtcaaaagatgacattgttgttgcatctttaagtagttccaaacagcataaaggatctcctgatctagcagagctttccaagggtcttcctactggttggcaggcatacttggatgagtctactaagcaggtctattatgggaacagtctcacgtctgagacgtcctgggagcggccaacaaatgaatgaagatctataaccttggtgtgcggtcaaccgaacgatacaagttgatttgttaatgtagttgatgctgttgaatgggcagcccaattttgtttggcagccaaccccatcctttagagaagaacaaaccacacctcaccaggagatggctgattgtttcattgtcttggtcacaaggcacaaaatttttgatgggataggttttgcttggctaacctatctgcagtacaacatctcttattaatcactaactagatgaaggcacatttcggtc

SEQ ID NO: 31361 - DNA, 1169 bp, Zea mays
  Clone ID: UC-ZMFLB73160B02_FLI
caattccccactagcaaccgtccccacaatcctccgacgatgcctgccgcgccgacgctgttgcccccgtgcgacgcggaggagccgctgctggcggagtcctccgaccgcttctccatgttcccgatccgtttcccgcagatctgggagttctacaagaaggcggtggcctccttctggacggcggaggaggttgacctctctgccgacgcccggcactgggacgaggcgctgtcccccgacgagcggcacttcatctcccacgtgctcgccttcttcgctgcctccgacggcatcgtgctcgagaacctcgcttcccgcttcatgaccgacgtgcaggtcgccgaggcgcgggccttctacggcttccagatcgccatcgagaacatccactcggagatgtattcgctgctgctcgagacctacatccgcgaccacgtcgagaaggaccgcctgttccgcgccatcgacaccgtgcccgcggtccggcgcaaggctgactgggccatgcgctggatcgacggcggggagcgcttcgctgagcgcatcgttgccttcgcctgcgtcgagggcatattcttctcggggtccttctgcgccatcttctggctcaagaagcgcgggctcatgccgggcctcaccttctccaacgagctcatctcccgcgatgagggcctccactgtgatttcgcctgcctcctctacgagcttctccgcaacaagctcgacgaggcccgcgtacgcgagatcgtcgcagacgctgtcgacatcgagcgcgagttcgtctgcgacgccctccctgtcgcgctcgtcggcatgaacggggatctcatgagccagtacattgaattcgtggccgaccgcctgctcatggcgctcgggtgcaagaagatgtacaacgtgaccaatcccttcgactggatggagctcatctcgctgatggggaagaccaacttcttcgagaagcgcgtgggtgactaccagaaggcatccgtcatgaacagcctcaacggcggcggcgctgccgaccacgtcttcagcatcgacgaggacttctgagttggcacgcgtaatctatggtgtcggtttaatgttagtatttgcttgtagtttgtaagcgtgatacatgtactctgagccgcttgatgcaatgatgctgtttcattttc

SEQ ID NO: 31362 - DNA, 865 bp, Zea mays
  Clone ID: UC-ZMFLB73160B09_FLI
cagaatgaagataaacatttgcaggagcttgagatctcaacagcatcagagaagctgatcgagtgccgggagacaatcataaacctgggaaaacaactgaaagcgctcgcatcgccaaaggacgccatcctcttcgaccaggttcttcagaccgctgttcgttctgagcgaaaaccccgatcgcagtcactaagcgagatgttatccatggaggacggaggattctattactcaggctccccaaaaaccaaggagatcatctgtactgaaccaagtgcgtcaggcgaaggaaaccgtcctgccgacgacgagggagacggcggttccgccgcagcatgtagctcttcacacccaatgccggtggctccacacttaaagcaggcgtgcagggtgaacaggacctgcaagggagaagccgacgtgaaggtagtgaggcttgccgttgtcccgagaaagcagaaggggaacggcaacctgctgaagaggatcctgacgggcaggaggaaggaggccatggccaagccgcaggtggtgttgagttcttagctgaccgaaagaatggaggttttggacatggcaaagtcatcgtttcatgtgtagatggagtttgttcgtttgtgtgtggagccatgttcatgtgaggttagtaataaagtcgcaggctgctgcgtagatgatgtatgtattagtgtggtgtgtgtgtgtgtgtcagtgtgaggtagtgctctgtcatgaactcatgaccctgttttctgaagactacctccttccttgtgtgttctggggaggttcctgaacctgtttgagatagtgctagttgcctagtatgttggcaatgatatatgttagtgtgcttcgtctgacg

SEQ ID NO: 31363 - DNA, 1815 bp, Zea mays
  Clone ID: UC-ZMFLB73160E08_FLI
cgccgctgtaccacgacaaggtataaccgcagtctctatccccccctcgacgaataactttcgtgagcgattgttgcttcagagtttgcagtgtagtggtcaagatcaattgttctgccattaaattcattcgctacatcaaccagtattggcagtgcggtgttgcggcccataaatttacattgattttctgtgtcaaatgttttacatggagaagcaaggtgcaaggatgcgtacggtttgaaaatactggtattgagttttgaagtatagctattgacaatatatagttccagtatttgaatagttgcttcacgcgtttttgcttgaaaactaagcatgtgtccctgttcatgtcaattcccataatcattcttggtattaccttccttttcaaaacaaaatgaataatattctttttctgctagttaatgggatgcaatgatctaaaacagcaaactgcaactactagatgtacagatttgtaagatccacaaaattcatgcttgccttttgaatgcatgatacttcccgtggtgaactcgaacaaaacatttgaaacttttttcgttgttgccagctcgttagattttacatgaggatgggtttcaaagcagttcatgaggttgatggatcatcaatcagtgatcttggtcacatgttggtgtggggaggtaggggtactagaatggatgctgatattgaagagcttcttattaagtggggaaacagattcagactacaagactaaaaggtggatggtaatactgatatgttttgtcgagacatgcagtttttgcagcatgccgcatacaaatcttgtttggatgcaataaggtacaagccttgcttcaacctttcttaacatacaattactgtacatcaagatcttgctatgtttcagttcttcagtatatccaattgaatttgttatgaagttatgtgaacacataaggttatttccttatattctaaaatagtggttagctattgcttgattgggaagtgtgattacattttccaacaagggctggccattttatcttgattgaaatggtggagtgaataaatttcctcagggaattttaggattctgaaggaggtcggcccaaaattttcccatttaaatagagctacgaggttatgagaagggtgtattaaatttttaattacccttcatctcttatacaactaatgagttgacatgtcatatttaaagtcaattcatgcacaagggaaatagtgtagtagttcctggttaaacatcctatgacatttatggactaacaattgttaggtgtgtaatggcatgacctagtgaattttttgataatagaacaaaattttagcctctaccatcagggatggtagacaggtgagcgtcaacgacaaagccaagccataaggctcaattcttacaacctaacagggaatagaaaagcaaaaagcaacataggttacatagatcggagtgctgtatgtgttccatttagtttctgttgtctcctctgttttttgactgcattcatgagtactcatatgcaatcctttgatggtgacatgaaactgacccaattgtcatattgtccgatggaaatcgcagcttatctaggatggatctatttttacccctggtgctttgacaatgtgatcgctgctaggagcatatatggatttgtacttgtatcttagacaaaatgacactctggtccttttttcatttgaagcaataaatctttgtgctggtggtgtcagctgccaacaatgattcttgtcatgaaactctgcgataatagccacttggaagagcagtct

SEQ ID NO: 31364 - DNA, 699 bp, Zea mays
  Clone ID: UC-ZMFLB73160E09_FLI
ggcggcggcttggaggagttggaggccgccggcgggtccctcttgacggtggcgttccagatcctggtggactccgtccccaccgccaagctctcgctgggctctgtagccacggtgaacagcctcatcgcctgcaccgtggagcgcatcaaagctgccgtctgcggcgctgaaggcaacccacagtagtagccatccataagatagagagcgagaggaggggtggtgcagcttttggggatcggagatatttatcagtggggagtcaagaacgcacctcagactctccttgccatgtggtgctctgatactgatgcaagcagggaaaaagaaggcgtcaccactatgcaaggggggatggttcgggtattgacttctccgtcgagtcaactagagaaaggatgcgtgctgcagagaagatgctgtttcttctggatctctttccatattttctagggtttacttcgtcatgttcgtcgtgttgttgttgttcaggctaaaaggtgcctgtgcctgctcgtaggctcgtagctagagaacagagatttgtttacctcttttattttattttttttggattgcaaagatttgtagaatctaggaccagtcatttcatcaccaatgcttggctaaaacgtgtaccgttgttgttcgtagctttcttgctatttaaaacgatgcaatttcaatcgctgagtt

SEQ ID NO: 31365 - DNA, 1541 bp, Zea mays
  Clone ID: UC-ZMFLB73160F01_FLI
ccaaaacaaggatgctacgcttgaagcgcttcctgtagatgagctcattgagaaggccgatggttttgccggagtcttccctgaacacaagtacgagatcgtgaagagactgcaggagaagaagcacatcgttggtatgactggagatggtgtcaacgatgccccggctcttaagaaggctgacatcggtattgctgttgcggatgctactgacgctgcgaggagtgcttccgatattgtccttactgagccaggtcttagcgtcattatcagcgccgtcctcaccagcagatgcatcttccagaggatgaagaactacaccatctatgcagtttccatcacaatccgtatagtgctcggatttatgctcattgcgttgatctggcaatacgatttctctcccttcatggttcttatcattgccattctcaatgacggtactatcatgaccatctctaaggacagagttaagccatctccgttgcccgacagttggaagctgaaggagatctttgctacgggcatcgtgcttggaagctaccttgctctgatgactgtcattttcttctgggctatgcacaagaccgacttcttctcggacaaattcggtgtgaggtcgatcagggacagcgagcatgagatgatgtccgccctgtacctccaagtcagtatcgtgagccaggctctgatcttcgtcacccgttcccgtagctggtccttcgtggagcgccctggtctgctcctggtcaccgcgttcctgctcgctcaacttgttgccaccttcctcgctgtctacgccaactggggcttcgccaggatcaagggtatcggctggggctgggcaggtgtggtctggctctacagcatcgtcttctacttccccctggacctgctcaagttcttcatccgcttcgtgctcagcggcagggcatgggacaacctcctcgagaacaagaccgccttcaccaccaagaaggactacgggcgggaagagagggaggcgcagtgggccaccgcgcagaggacgctgcacgggctccagccgccggaggcttcctccaacacgctgttcaacgacaagagcagctaccgcgagctgtccgagatcgccgagcaggccaagagacgagctgagatcgcgaggctgagggagctcaacaccctcaagggccacgtggagtcggtggtcaagctcaagggcctggacatcgacaccatccagcagaactacacggtgtgagagcccctctgctgcgatgtcgacgacaacacctttgctgcccgacgggagccatctgattacagataaaaattttcctagctgtaaagctctctataccaccagatactgccatatgatggtatggttgggtacccgtctttctagggagtttcttttctctctctcttttcttattgttatgtttttcaatagtggagtgtgcgcgtgttgtaatcgtttttacctgcgttttcctctaactagccggtgatctcgcgggaagcgaggtgaagaaataatgcaactaaaattctctgcc

SEQ ID NO: 31366 - DNA, 991 bp, Zea mays; identical to SEQ ID NO: 22522
  Clone ID: UC-ZMFLB73160F05_FLI

SEQ ID NO: 31367 - DNA, 1399 bp, Zea mays
  Clone ID: UC-ZMFLB73160G04_FLI
cgggaggggagaaaggcgaactcgaattgggggaagagagcgagagacgaatcgcatcgagccggagaggaagtcagagacagggaggagggcggcggaatcggcgccggcgggaggcaggcatggaggacctgagcgtggaggagctcgcctccaacctctccacctacaaagagcagctacgcgaggtcaagaagcttatcaaggagaagaaggatgatgctggaatttctgaatatattgatatggagaaggagcttcaagaggagccatgcccagcaaggtagcatgaaaaggccgcttgcaacagaagatttgttttggggaatttagatttttgtaaccttgaaaggtgagaaggttaattatggcaatggtttgtactactacaaatttcggtgttgctgctgctgttctaagttggatcttgaaatatgggcacatgtttaatactactgggaggttgcttgtgtttatgatgcttaatatcattttttgtgtttgctgcaggtcataacgttaaccgaagagattttggcaactgcaaagcaaactgagagtgcccagaatgttgcaggtctatcaccgccaagctattcagctggagtgcagtctgagggactggatgacctttcacattcccataagtttgccgttggtactagagttcaagctgtgtggagtgaagatggagaatgctgaattgccaggtataatgcaaccgttgaagctttgacaccaaatggatactatgtagcctacgatggctggggaaacagtgaagaggtggacccagataatgtgaggctgcttgaggaagaagcagctgatgccttgggacaagctgaaaaggaagctgaagctacaaaaatggcaataaagaggaaaattgaacaagcagcaacatctgattttcaggcgcgtagcttgccggccaaacttcgtatcgaaccaagtgaccctgaggatgttaaagctgcaaagcgtaagaaaatacatgctttcaaatcaaaatcccgctttgagcagcttgaatttgcccaaaacaaaaggcagaatgcatggcagcagtttcaaaccaaggggaaagccaaaaaggtggggttcttctccggtcgcaagaaggagagcatcttcaagtcaccggacgaccacagaggtaaggtgggtgtcactgggagtggcaagggcctgaccgacttccagaggagggagaagcatctgcaccttaaaggtgggtccggggatgcagcggatgatgacgaggagtaaactgaagaaccgagcctctgtttgtatcccgccgaacagacatttccatacctgttctttagcgccgacatggcctcgaggggactcttgacttaaaccagaaaatttcaatgtttgtcccattctc

SEQ ID NO: 31368 - DNA, 990 bp, Zea mays
  Clone ID: UC-ZMFLB73160G06_FLI
tcggccggcggcgtggacgtctcgtttgcgcacaacaacaccaagatcggcgccatcgtttgggccgggtaccccggcgcaggaaggcggcacggccatcgccgacgtcctcttcggaaaatacaatccaggaggacggctgccgctgacatggttcaagaacgagtacgtcaaccagatccccatgacgtccatggcgctgcgtcccgacgccgcgctgggctaccccggccggacgtacaagttctacggcggcccggctgtgctctacccgttcggccacggcctcagctacaccaacttcagctatgcttccggcaccaccggcgccactgtcaccatccacatcggcgcctgggagcactgcaagatgctcacctacaagatgggtgcgccgtcgccgtcgccagcctgcccggccctaaacgtcgctagccacatgtgcagcgaggtggtgagcttcagcctcagggtggcgaacaccggcggtgtcggcggcgaccacgtggtgccagtgtacaccgcgccgcctcccgaggtgggcgacgcgccgctgaagcagctggtggcgttccggagggtgttcgtgcccgccggcgccgccgtcgacgtgcccttcgccctcaacgtgtgcaagacgttcgcgatcgtcgaggagacggcgtacaccgtcgtgccgtcgggcgtcagcacggtcgtcgtcggagatgacgcgctggtgttgtcgttccccgtcacgatcaacctggcagtgtagactacttgtctgcaggactaggcgttaattgattctttttttttactcaaggtaataactttaaaccattaaatgtagcgggcgagaaagtggaagcaagtgtaattactttacacagtgctatacaaaagcagaagcagatcgatccattaattgtcacatgatttgtatccctgaaagcagaacgggtgaaaaaatttactattgctgttttgcgcctttgcggcacagtt

SEQ ID NO: 31369 - DNA, 1014 bp, Zea mays
  Clone ID: UC-ZMFLB73160H07_FLI
ccactctcccagcctctcttactctccgccgtcgccctgctcgcccgaagcagccgccggcaaaatggccccgaagagaggcggtagggcgccggtccccgccaagaagaaggcggtggtgacgaacccgctcttcgagaagaggccgaagcagtttgggatcggcggcgcccttccgcccaagaaggacctccaccgcttcgtcaagtggcccaaggtcgtgcgcatccagcgccagcgccgcatcctcaagcagcgcctcaaggtgcccccggcgctcaaccagttcacacgtaccctcgacaagaaccttgcaacaaacttgttcaagatgcttcttaagtaccgccccgaggacaaagctgccaagaaggagaggctcttgaagagggcccaggctgaaaacgaggggaaaactgttgagtcaaagaaaccaattgttgtgaagtacggccttaaccatgtgacttacctcatcgagcagagcaaggcccagctggttgtcatagctcatgatgttgatccgatcgagctggtcgtgtggctcccggccctttgcaggaaaatggaggttccatactgcattgtcaagggaaaagcacgccttggatcgatcgttcacaagaagactgcatctgttctttgcttgaccaccgtcaagaacgaggacaagcttgagttcagcaaaatcctggaggctatcaaggctaacttcaacgacaagtttgatgaggtcaggaagaagtggggtggtggtatcatgggctccaaatcacaggcgaaaaccaaggccagggaaaagctgcttgccaaggaagctgcccagcggatgacctaagtcttgtcctgttaaattaaaattttcgtgtacttgcgatcgtgtgcaatcacggtggttgtcagatctagtttttgagagttttgcttcagggagagacaccgagtcaccgaccatgacagaaagacatcatgtaagaattcaaagttttggttctgtaccatctagttcatgtg

SEQ ID NO: 31370 - DNA, 1026 bp, Zea mays
  Clone ID: UC-ZMFLB73160H10_FLI
acccaaactgccatgcatgagaatagatagacagaaagaacaggaaccaaccaacacaagacacaacaagctgcagcagcggcaggcatggggcaccgcgccactgacaccgggccccaccaccattaccacccgacgcacactttatttagcccacgtcactcgcagcccgcaccggacacgtccacgcgacagtcactgctagctacgtaccgggctacgtacgagacacacacacacacagagagagacgccagtaataaccgtagcgtactgaacagcaaaatcccgtgtcatactgccatgtacgcgcgcgagcgactaccccgccacgcgcgcacgccgatcccctgggccctggccgccgccgctgcgtgcgcacggcctcactcgctggccttctcgggctcctcaggagcagcaacctcctccgcctcggcggccggctcctggggaccagcaggagcaggagcctccggctcgtccgcggcgagctcctcgggagcagcagcctctgcctcggcgaccggctcggccgcggcgggctcctcggcaccagcaggaggagcagcagcagcctcctcctcggcggctgcctcctgctcggccgcgggagtctcctcgggaccagcaggagcagcagcctcagcctcggcggccggatcggccgccgcgggctcctcggcaccagcaggagcagcggcctcgggctcggcggctgcctgctgctcggccgcgggaagctcctcgggatcagcaggagcagcagcctcagcctcggcctcggcctcggcctcggcgggggcagactcctcgggcacgacggccggcggcggggtctccaccacgggcgcttcctcggccgccacgacggtcggggtctggacctcggcagtggccattggtggcgatgagaaggctgatggctacacgaaggagtggcgcggctagctagagcctagagctaagagcctaagactgagtgaagggtggagctgcaagagtgagcgaccagctgagagtgag

SEQ ID NO: 31371 - DNA, 780 bp, Zea mays
  Clone ID: UC-ZMFLB73161A04_FLI
ctgacggtcattgaggcgatgaactgcgggctgacaacctttgcgacgaaccagggagggccagcggagatcatcgtggacggtgtctccggtttccacataaacccaacgaatggcagggaggcaagcaacaagatcgccgagttcttccagaagtgcaaggaagacccaagctactggaacaaggtgtccactgctgggctccagcgcatctacgagtgctacacatggaagatctatgcaactaaagtcctgaacatgggctcgacgtatggcttctggaagactctgaacaaggaggagagagtggccaagcagcgctacctgcagatgttctacaacctccagttcaggaacctggcaaagactgtcccaaggctgtttgaacatcctcctccgcaagccccagcaggcgcagggcctagtacgatgacggtaacgaggccgaaagaaagaaagacacagactaggatccagaggatcatgaccagcttgatggggcagaagcctgctacttctgaataataataatacattagagccagggagacgagatgggtgtgcatgcgtgatctcctcaagccaaggtcctggcggctgcacatatattcattcattccattgagaccggaccagatcagtgtttattgtgaaatttgttgtggtgttgcatgtgtggttttcatctgtgtactgttgattggagagctggatgatgtaaagagagtgaaagtgcacatggttacaattgataataataatttatgacaaggattgagg

SEQ ID NO: 31372 - DNA, 341 bp, Zea mays; identical to SEQ ID NO: 6731
  Clone ID: UC-ZMFLB73161C03_FLI

SEQ ID NO: 31373 - DNA, 1574 bp, Zea mays
  Clone ID: UC-ZMFLB73161C10_FLI
gtcttctccctccctagtcgctccccaaatcggatctccaggccggcagaagttgagcggactgactggtcactgtagttcgatcgaatccgagtagggctgatacagttcgattcggcgggaggcatggcgtccgaaaagcacttcaagtacgtcatcctcggcggcggcgtcgcggcggggtacgcggcgcgggagttcgccaagcagggagttaagcctggggagcttgcaatcatctccaaggaggctgtggctccttacgagcgtcctgccctaagcaaaggttacctctttcctacgaatgctgcaagactcccaggattttatgtatgtgtgggaagtggtggagagaagctattgcctgagtggtactcagagaaaggcattgagctgatccttagtacagaaattgtcaaagctgatctttccaccaagactctgactagtgcagctggagcaaactttacatatgagatcttgctcattgctactggctcctcggtcataaagctcaccgattttggcacacaaggagctgattctaacaacattctatatctaagggaaattgatgatgctgacaagctggttgcagctatccaggcaaagaagggtggcaaggcagtggttgttggaggaggttatatcggcctcgaactgagtgcagccctgaagatcaatgactttgatgtcactatggtgtttcctgaaccttggtgcatgcctcgcctcttcactgccgatattgctgctttctatgaggcttactatactaacaaaggtgtaaagatcttgaagggcacgctagctgttggttttgatgctgatgccaatggtgatgtcactgcagttaagctaaaggatggcacagtacttgaagccgatattgttgttgtcggtgttggaggcagaccattgactactctcttcaagggtcaagttgctgaggagaagggtggaatcaagactgacgcttcctttgaaacaagcgttcctggagtatatgccattggtgatgtggctaccttccctttgaagatgtacaatgagttgaggagagtggaacatgttgaccattctagaaagtctgcagagcaggctgtaaaggcgatcaagggcaaagagtccggtgaaccagttccggagtatgactacctgccatacttctactcccgatcattcgacctggcgtggcaattctacggcgacaacgtgggcgaaaccatcctgtttggcgacagtgaccccacctccagcaagcccaagttcggctcgtactggattaaggacggcaaggtcttgggcgccttcctggagggcgggtcaccggacgagaacaaggtcattgccaaggtggcgaaaacccagccgccggtcgctaacctcgaggagctcaagaaggatggcctccagttcgccagcaagatctgagacgctcccgttccatgtaaaattccgtgtcatcgtgaaggttcttctggagctctggtcatgattgagaaatgttctgctacagatgttatactacatacgtgactacactacatgatatattcggttttctgattgtg

SEQ ID NO: 31374 - DNA, 2380 bp, Zea mays
  Clone ID: UC-ZMFLB73161D01_FLI
gtttgaaccatatgggtaaatcattccacacaggccctgataaagtgaatctttccagtgttacacagtctgaggctagtctttaccctattgatcctttagaacaaggcgacttttcaccactaattaaacaaaacttccaaccattacatagttcagacgaagtgccatttttcaaggagcactcttcatgtaatgattttttgaggaacaaaactgaagctcattttctggaaccacttgtctgttcaaatcctcaagaggtgtacacaacctcaacagatcaaatgggtgctgaacaatctcaatcaggatgtggccaaaagtacaatgatgccagagttcagacagcatcacatgaaaggcatcagtcttcaaccttgtgtgataaccagaactcttgttcggtggtgttgcaaggagttgcttcagactcaacacagaagttcgttgatactcaaaaggggccgtcaaaagctcgacaaaatggatcaaaagctaaggtacggggccgacctaaaaagaaaactgatgactgggacagtttacggaaaaaagtgctttctaatggtggggacaaacaaagaagtcatgatgcaagggatactgttgattgggaggcagttaggcaagcagaagtacgggaaatatctgaaaccatcagagagagaggaatgaataatatgctagcagaacggataaaggaattcttgaaccgattggtgacagaccatggaagcattgatcttgaatggctaagagatgttcaaccagacaaagcaaaggacttccttctaagcattagagggcttggactcaaaagtgttgagtgtgttcgcctcttgacactacatcatatggcttttccagtggacacaaatgttggtcggatatgtgtgaggcttggatgggtgccacttcaaccactgccagagtctcttcagttgcacctcttggaaatgtatcccatgctggagcacatacagaagtacctctggcctcgactatgcaaactagatcaacgtacattgtatgagcttcactaccaaatgattacttttggaaaggttttctgcacaaaaagtaagcctaattgcaattcatgtccaatgagagctgaatgtaagcactttgctagtgcatttgcaagtgctaggcttgctcttcctgcacctgaagaaaaatgtttggttacattggaagatccaaatgttgtagagttttctcaccaaacatacataaactcagggagtgttggccaacttgagtggagtgcaaattatcctaaacatgctgtttctggtaatcatcagccaatcatcgaggaaccactgagcccagaatgtgaaactgaaaatatagaggcacatgagggtgcaattgaggatttcttttgtgaagaatctgatgaaattcctaccattaatcttaatatcgaggagttcacacaaaacttgaaggactatatgcaagcaaacaatgttgagattgaatatgctgacatgtcaaaggcattggttgccatcacgcctgatgctgcttccattccaactccaaagctcaagaatgtcaatcgtctgaggacagaacaccaagtttatgaactgccagattcacaccctcttctggaaggattcgaacagagagaaccagatgatccctgtccatatcttctttccatatggaccccaggtgaaactgcacaatcgatcgatgcccccaagacattctgtgattcaggggagacgggtagactatgtggaagttcaacatgctttagttgcaacaatatacgagaaatgcaggctcagaaagtcagaggaacacttttgataccatgccgaacagcaatgagaggaagcttcccacttaatgggacgtattttcaagttaatgaggtatttgctgaccattgctcaagtcaaaatccaattgatgtcccacgaagttggatttgggacctcccaagacgaactgtttactttggaacctcagttcctacaatattcagaggtttaacgactgaagagatacaacgatgcttttggagaggatttgtttgcgtgaggggctttgataggacagtgagggcaccaaggcccctttatgcaaggttgcattttcctgtcagcaaggttgttagaggcaaaaagcctggagcagcaagagcagaagaataatagtacattgaagaaatataggggtgctaaccagacgaggatggatagcccgaaatgagatgctgacccaataggtcgccaaatcacctccaaattctaacccaatgacttccatctgtaatgaatggcaataccttgaaaacctgtgatggagatgttttgtggcgacatgatctcttaaattagattccgtctttggt

SEQ ID NO: 31375 - DNA, 2165 bp, Zea mays
  Clone ID: UC-ZMFLB73161D12_FLI
ccgccctcacgcacgcggcccaactagcctaacaaaccctagctagatttagaaaaaaaatttgtccccaatccgaaccgacgaggagctcgccgccgtgagatgtccgagtacgacgagcgctaccagggcaacggcgacatgcccgcagccgaaggcggctatccgcaggccgagtacgccgccgccgccgcgcctgccgccgggggttcgccgcccgcagacagcaagccctccgggttctccgaccacgccgacggccgctcctcccagcaccagcacgagacacaatcacatgacagtggttcctcgaaatctcgagaaagggaccgagaacgcgataagggcaaggatagggagcgtgacagggatcgtggccgagaaaaggggagggaccgagacagggataaggatcgtgaaagaagtgacagagatcgcgatcgccaccacagggaccatcgagagcgcagcgagaaaagggaacaccgtgatcgttctgatgatcgtgaccgtcaccgtgatggtcgtgaccgccaccgtgatgatcgtgattctgagaggagaagagatcgtgacagagatggtcatcgtaggcatcgctcccgctccccttctaagagtcgtgaccgtgaccgcagatctagatctcgttcacgctctcgatcaaagagcaagcgcgtgagtggttttgaccaagcacctccacaacatgcacttcctattgttgctgctggtgctatccctggtcagcttcctggtatcactgctcctattcccggggttggggtgcttccgaacttgtataatttggctgcaggacagttcaacccccttgttattcagccacaagccatgacacaacaggctacccggcatgctcggcgtgtctatgtgggtggacttcctccaacagctaatgagcagaccgttgccatattcttcaatggagttatggctgctattggaggaaacacagctggtccaggtgatgctgttcttaatgtctatataaaccatgacaagaaatttgcttttgtggagatgagatctgtggaggaagcaagcaatgcaatggctttagatggcataatgtttgagggagcaccagtgaaggttagaagaccaacggactataatccttccctagcagctgctcttggcccgagccagccaaatccaaatctcaatcttgctgctgttggcttaacacctggctctgctggaggattagaaggtccagaccggatctttgtaggtggtctaccatattatttcactgaggctcaagtgcgggagttgctcgagtccttcggacctctgcgtggattcgatcttgtgaaggatagagaaactggtaactcgaagggatatgccttctgtgtttaccaggatcttaatgtcaccgacattgcctgtgctgcccttaatggcatcaagatgggggacaagactcttactgttaggagggcaaaccaaggagcttctcagcctaggccagagcaagagagcatcctgctgcaggcacagcagcaggtgcaaatgcagaaactcgtataccaagtcggaggtgccctgccgacaaaagttgtctgcctgacacaggtagtgacagcagatgaactgagagacgatgaggaatacaatgacattgtggaggacatgagggaagaaggacgcaaatatgtcccacataatgccattgcagagtgttttatagtccgaccctatgcaatattggcaatcgggctttaacccacagaagacactattcttttgagtttgattaatcattatatcattagcctcttgcctatatatctctactcactaacacttggacaggtaacttggtgaaagttgtaattccacgacctgaccccagcgatgctccagttgctggtgttggaaaggtgtttttggaatatgcagatgtcgagggctcgaccaaagcaaagacggggatgcatgggcggaaatttggcgggaaccaggtggtggccgtgttctatcccgaggacaagttcgctgctgagcagtatgactgaaagttgtagaacctgttctagagttgcaacacacaatgtgtgtgttttttttaaaatctttgagggtaccgttttctcttgaatttgaatcttatctagttataagtttggtgcaggacc

SEQ ID NO: 31376 - DNA, 489 bp, Zea mays
  Clone ID: UC-ZMFLB73161E05_FLI
ctcagttccatttaccagaagtcacccgttacatagtagcctttggtgctcagaatactgtaatgatggttggcctggatggcagcttctacaggtgcagcttcgaccaagtgaacggagggcagatgttacagaaggagtatttccggtttctcaagtccgacagcccacctttaaggagcgcagccatctgacctacctctctcaccctgtaaataccgaaggttgtgcccggtccattgtacatatcaccatcttctcgccggctaaagttattacaggcagcgggaataaggagagctggccgtgtcggatcgccgcaacccacaggattccaaccttgaggtttctggagcggttggtgtcccatccaagctgcaagcatcatttgccatctctcttctttcttctagcgagaaccacaaccacccattggtacactacatataacgtaaaaagttcgataacgaatttgaccgtgtggtctgc

SEQ ID NO: 31377 - DNA, 488 bp, Zea mays
  Clone ID: UC-ZMFLB73161F02_FLI
aggagattgcaccactggtgatagtgttctgcatcttccatgcctgtgtgggcttcattttgccgtcactggccagattgcgaacaatgtacctgccaaatgagctgcgagggggcatgatgagcttttcaatgtcactggcaaatgccgccaccttcgttttcttgatacagggcagcgcccaccatcgacacgttgcaaactcaaccatcctgagccttgcgtcctatggcctgttaggagctgggggctgcgtccatatgttgaggaggtggaggaagcacactcggctgaatgcccgtagtctgtaggagctggaggcacccaatgaatgctatacacactgcagggtgagcttgagagcggtttctgtagcatgctagtatctcacgttttgtttatctgactttttctggaaatatcaggaggtaggtgtaggatactacttttgttgttgttcaaagaaattgttgaaattgaaggttgac

SEQ ID NO: 31378 - DNA, 629 bp, Zea mays
  Clone ID: UC-ZMFLB73161F03_FLI
gttctgaagcaaactttcagtccatatggagagcttctctatgtcaaaatacctgtaggaaagcgctgcggatttgtccaatattctaacagggcatcagctgaggaggccataagggtgctaaatggaagccagttgggaggtcagagcataaggctctcatggggccgtagccctgcaaacaagcagcctcagcaagagcagagccaatggagcggtggtggctattatgggtatccccaaggatacgatccatatggctatgctcggccccctcaagatcctgccatgtacgcctacgcagcatatccagggtatggaaattaccagcaacagccaccacagcagcccccgccacaacagtaatgatgtcccgagagtgatcatttgcaagctggtcgcaaagtagctggggggttggggcgcagcaactttggtgcgttggcatgagaaattttgcggcggttgcttgtgttgtgttgtattgttccgacgcccttgtacacgtagcctgtgttgtaactgaatttttgccgaggccttatgagtgactagtgtttcaactgtaactggattgcacatttttgtcgcaaggaatgtactattattgtgtggctcgtgccgctttg

SEQ ID NO: 31379 - DNA, 1193 bp, Zea mays
  Clone ID: UC-ZMFLB73161F04_FLI
gcaactgcaaagcagcaagctctactcttcttctgtactgaacgtgtgactagataacaataagcgtgaaccatggcggacgagtacggccgcagcggctacggcaggtccggcgccggcgacgactacgacagcggctacaacagcaagtccggcactgatgactacggccgtggcgaaggtggctacaacaagtcgggcggcgatgacgactacggccgcagcggcggcgatgggtacggcaggtccggcggcgacgactacggccgtggcaccggcggcggtggctacaacaagtccggcggcggcgatgactacggccgtagcggcggcgacgactacggccgtggcaccggcggtggcgggtacaacaagtccggaaacgacggctacgacagcgggtacaacagatcgggcaccaccaacgacgacgaatacggccgtggcaccggcggcgggtacggcagcaagccctctggcgacgacgcgtacgccggcggcggcggtggcggtacggcaagcagtccggtggaggcgcggacgagggcggagagtacggctcctcccgggacgactcggagaagtacaggaaggaggagaaggagcacaagcacaaggagcacctcggcgagatgggcgccctcgccgccggcgccttcgccctgtacgagaggcacgaggcgaagaaggacccggagcacgcgcagcggcacaagatcgaggagggcgtggcggcggtggctgccctgggcagcggcggcttcgcgttccacgagcaccacgacaagaaggaggccaaagacgcggcggaggacgccggggaggaggaggagtccggccgccgcggcgaggggaagaagaagcaccacttcttcggctgatcgggctgctgctcgatcgatctacttgcgtacgtaggctgctccccaggaccagaaggagcatgcatggagggcgaacgaagtcacgggggtttgattgcccgtctatgtatatcatgtgtagttactgatgatgtgtgtgcatggtacttcgtacgcgtgtttggtgatcgatgtgtggtgtgtgtgtctctgcatggacattttcctactctgcgttttttctctctctactgatatagtatatatgtggtgtgtctatatatgtgtgcacgtggttttcgctcggctttttatcaacgctttgagaat

SEQ ID NO: 31380 - DNA, 2099 bp, Zea mays
  Clone ID: UC-ZMFLB73161G03_FLI
ccatcctgctcagtgctcacttccacgcgggccccagcccgccacgagtccccgctcccacctgctcctcgccgccgttagcgcgccccgagccccgacagcctttctccttctagggtttctctctgtttcgtcctcatcgaatcggagtttcgcatggagtcatcgcggtctcggaagcggacgcgccaggcgcatgactgtgccgccgcgccgccaccagagcgagaagtggtagcgaggggtggcgcgtcgccaccatggagggaggatgaccgtgatggacacttcgtattcgaccttggcgagaacttgacccgccgatataaaatcttgagcaaaatgggagaaggtttgggttttctgcaatctgtcgtctcctcttctgctgggtatctccgttattattctaatgaagagggctacgagttggattttcgtaggtacatttgggcgtgttttggaatgctgggaccgtgaaacacatgaatatgttgccataaaagttgttcgcagtatccgcaagtaccgtgatgctgcaatgattgagatagatgtgctcaatcgccttgcagaaaatgaaaagtacagatctctgtgagtatctcagagacctaattacttaaagtataaccctattctgtttctgacttgacagttcctcttcaatttgtcagttgtgttcaaattcagagatggtttgactatcgtaatcatatatgcattgtaagtactagcttttggtcaattatactagtttctaaaagtcagttaccaattttgagaatgcatttttttgcagatgtgttggttgtttataatatttatcttattggccctcccagtacattgtatggaatgagagacttgtctatagaaattatgataaatcgcctgtagtatagtctttttgttcttcgctcgtgaaggttccctcatatggtcacaaattaaaaatattctttattcaatggatatcaatgattttgtcaggtttttgagaagcttgggccaagcttgtatgattttctaaagagaaatagataccaacctttccctgtggaacttgtgcgggagtttggacggcaactgttggaatctgtagcatgtgtgttagttattgcttgattctgcacatcaattattagctaatttggtagcattggcttcacttttctattgcttcaaaggggcagtgttaaccatcttttcttttgtaacagatatgcatgagttgcggcttatccacactgatctgaagccagaaaacatactacttgtctcttctgagtatataaaagttccaagtacaaaggtttaggctggagttttccatgtgatatttggagtgttggctgtattcttgttgagctatgctctgttagatctcttcacacactttatttttctagtaccagtctggtaattgttttcctaacatcacattttttagggggaagcattgtttcagacacacgagaatctggaacacctagcaatgatggagagggttttgggacctctaccagaggatatgatacggaaagcaagctcttcagctcagaaatattttaggagagcaacacgattaaattggcctgaaggtgctgtttcaagagaaagcatcagagctgtgaggaaactggatcgactaaaggacttggtatcgaggaacgctgaccattcaaaggtggcactggtggacttgctatacggtctcctacggttcgagccatcggaacgcctgacagcagaagaagctctggaccatccattcttcaggaacccaacatgacttgttgagcaggcttgactcatgtaactctactgaaggtggtggtaggaagcaggcagagccgtccccattgcaaagctgaaggcatcttgttcctctataccagagagtttgtgtaaggcctgtcaatggggcttcttgtggtgataaaactgatggctttagtcacccaatgtcatgtacactagcatttttcctagggagcttagttcgccagacggcgcttgtatgttgttaaccgggatacactatgagctgtgccccgatgccctggtgctataatccaatcgcaaatgatgaaatc

SEQ ID NO: 31381 - DNA, 1505 bp, Zea mays
  Clone ID: UC-ZMFLB73161G05_FLI
atccgcctctcgcgcgcccccgccgacgcacgcaactcgcagacggcgcccccccagatccacttctcgctggccgctcagatcctccatatcctgacctctccctcctcttgctgcagatgatatgctagagcgtcagcaaggcggactctccaaacctccagagagggagggaggcagcagccaatgcccagcacgtaccaatctgcgtggcgggaggtgcccggactgcgtacccacgggcgagcaggattttgacgatccacgacccgatgaagtcgccggcgtcggtgacgcacaaggcggcagtggccatcgtgcgctgacgcccagtcccttcctctcgcgagcgaaacggggggcggtggtgccgccgggcgaatggattcgtccgagagcgagcaaataggggtaagcatttatcaagcggaagtgggaagaaatggtacagtgaagtggaggaaatgacacagaacacgagcgaagctggcatctcaaggcggtcgcactcgcacgttctattcttgtgtagtgcagctccgaagtcgctgctaccaggtgcccccgtgctggggcataggtgcagtcgccgctgcgcccagcctacacaaaggcagctaccgttgcgacaacgagagggagctcccaaggcaccaatgttgttgctgccagttcttcaaagagttattgatggttcacaaaagaccactgttgctctgccaattcacaaagccttgatgattgttatgatggaaccaatgttgaggcctacaacaatgatgtcattgttcccatgggacctcaatctccaaaaaaccaagaggccgtgggaagaggaatgtgacaatgagaaggttcagttaaagactattggaaaagatgtcgccctaaccgttgggcaaacacctggatgacatcatcttctctgctaaaggcaccatattctcttcaaggatccaaacaattaccccacttgggaagaggaatgtgacggagttagcactacctccacataatgggaaggttgggttaaagcctattggtacctgctccggcaccgttgctgttctggtctcggccgtggagatggaactatgattaaaagaaaagagaacactacggaaggaacctactgatgctcagtgtactgcgactttcccacgatgctcatgatgtcgaagtctgcagttgctagactggcccgagtaattgctaagttttgtagaaaatgtttaggcccatttttgaacgcatgaatttcgtataggctgtatttcacacgaaatacacaggaacaaacatttttcctgccttccaaacaggtcgttaggattagttgaagttccagtttgatcataggcacctaggtcgatgctctttagtaagatgtaagtaatatgtcttctggccaggttgagcaaggcttagctgcagtgtatcagtgtggtacagctgatgtatttatactgttacaatctaatgagactatatggattagagctatc

SEQ ID NO: 31382 - DNA, 1462 bp, Zea mays
  Clone ID: UC-ZMFLB73162C03_FLI
gacatatatacttaattattcagaaataagtgagtaacaagaaaaagaacaaaataaaagttacagataaaacacctgaaacgtagtaacagccagtttggccactaaaccggtagaggtgcagctcgcatgctttagggcttcttttagctgccattttgcatagtaagcagcaaacatacaaataatctggtgtacacttaaatggcagataaatgcattagtcatgatgggtttcatgatgagcagatctagcatcgcaagctacaacccggtcccatcctcggcatactgatctttccctcatcaatcttgatcaaagaatgatgcaggacacaactgctatcaatagtctctccatgaagctcgcagccgtgaacccacttgacctgagcaacctgcccaccctcacatagcgctccccttagcaaaacaaaatctagatgttccaagcctgcggcccttcagcaagcttggtcttctcgctgtgacagctccggtcccctctattctcttcacttgccctccactccccacaccagagtagcctcatctcctgcccttactactaccaccacatcacatgctcttgctactaccaccacctcctccgccatttggcaccgtcgcctcgggcaccctggacccgacgtcatgtcccagcttgccggccactcagacatatcctatactcggggctcttctgagcgcctctgtcatgcttgtcagctcggtcgtcactcccgccttcctttttccacttccacgtccagggctgttcaggcctttgatcttgtccactgtgatctctggacgtctcctgtccttagcctctccggctacaaatactacctggtcattctggacgactactcccatttcctttggactttcccccttcggctgaagtccgacacgtttaccactctcactcacttcttcgcctgggtatccactcagtttcggcgcccggtccgtgccctgcagtgcgacaatggtcgcgagttcgacaacaacgcctcccattctttcttcctcactcacggcgtccagttgcgtctctcgtgtccctacacctctgctcagaacggccgggccgagcgcatgattcgcaccaccaccaacatgatccgctgccttctttttcaggcgtctctccctgccacctactgggcagaggcccttcatactgccacgcatctcctcaaccgtcttccctcgaaggcggtgagccaccctacaccacactttgccctgtacggcacaaccccttcctacgaccacctgcgcgtgttcggttgtgcctgctaccccaacacttccgctaccgcccctcacaagctttctcctcgctccactcgctgcctcttcctcggctactcccctgaccacaaggggtatcggtgcctggacctcacctcccaccgcatcatcatctctcgtcatgtcgtcttcgacgaag

SEQ ID NO: 31383 - DNA, 1115 bp, Zea mays
  Clone ID: UC-ZMFLB73162D07_FLI
tttcaatgatccttcattgttgatggaagcactgacacatggttcatatcagattgctggcactactccatgttatcagcggctggagtttcttggggatgctgtattagatcatatttttactgattatttctaccatcagtaccctgaatgcactcctgaactgctgacagatctgagatctgcttctgtgaacaatagctgctatgctcatgcagcagtaaaagcaggattacataagcatgttcttcactcgtcatcagcactgcacaaaaggatggccgactacctggacaagtttgagcagtcattttcaggtccatcacatggttgggaagcaggcatcagtctgcccaaggttctaggtgatgtggttgaatctatcgctggtgcaatttacatcgacgccaagcatgacaaaggggtcgtttggagaagcatgaaacggatactggaacctcttgtgacacccgacacccttcagaatgaccctgtgaaagagctccaggaattctgtgatagcaaaggttacactttggagtacacggtaactcgtgacaacggtgtatcctcggtggtcgcagaagtgcggaccgaagggactacgtacaaggccactcggacaggcttctctaagcttgacgccaaaaagttggcagccagttccgtgctccgtgatttgaaggctgcggacacaaagcagtactctgcaaatggtatcagttgcacttaaacttcatagctctatggtatatacttttgtacaaaatcgtcgaatcagtaaggtgtgcaggtgcctaggcacgctaccctacttttactgcatctacgtctacggccacactaaagcagtacgtgcaacaatgttttgttttggtcatgtctcttgagagtgaaagtgtagcgttatttttattttgattcgcatttttgggataggcctggtggtgcaccagggcaccaagcgagtatgtggtccgtagggtttttagattactcttgtttcgagatgattggattaaattcttgtagagctgattggatggttcaatatcttggtttttagaatggtcatacgagtcttaatcatatcgagagctataatttttatacac

SEQ ID NO: 31384 - DNA, 954 bp, Zea mays
  Clone ID: UC-ZMFLB73162E09_FLI
tggagatcgtgcgaggctgtactacctgtacgcctccatcgtcgcctcgcaccatcaatcctgtgcggtgccagatcctccccgggtcttgtcttgtcgcaggtggaagccatgtccgccgcggacgcagccggcggcaaggaggcggcgccggcgtgcgactcctgcacgggcatgccggcggtggtgtactgccgggccgactccgcgaggctgtgcctgccgtgcgaccgccacgtgcacggcgccaacaccgtgtccactcgccacgcccgggcgccgctctgcgccgggtgccgcgcagccgctgccgctgcggcccgccacgcgcggcggcttcctctgcgccagctgccgcttgggggaggagaaggatgagcgggacggcggtggcgccgccgacagtagtagcgacgacggtggcgcggtggaagggtacgccgggtgcccctcggtcgccgatctcgcgaccatcctgggcgccggctccgcgtgggaggagccccagacgctccgcttggagagccggagctccggcggcgagctggctgacgaggtcatccgccagctggtggagctcgccaggtcggaggcggcggctcgcgctgagatggagcagcttactccatggccgtcgccggagcttgctgccattactggacagtacgccgacttcggggctctcgacgctgacaccgcctggcatgatgatgcagcagccatcgcggcagcagtagtgccttccactgaggaggagcagcaagcgtggatcgcggccggctgcgacgtcggcgcgtgccggacggaggagaaggcgcgcgagaacgacgctgctctggccgagccgtgtctgtcctcgttcgtggagatgtcagagatctgccccgccagcgtcgtcgtcaccctcagccacggcggggacgagggcgtcgacagcagcggcaagacagcccc

SEQ ID NO: 31385 - DNA, 1280 bp, Zea mays
  Clone ID: UC-ZMFLB73162F01_FLI
ggcttcatcaattggactaggttctggtttgcatacatttgtgctgtatctgggtcctcatattgctctgttcactattaaggctgttcaatgtggtcgaattgatctaaaaattgctccatatgataccatacagctaaaggttgggccatcatggcttgacaagaaatgttcagaatttggaccacctgtgtatccagcatcagctcattcagttaggatcccagtcttcgacctactacctcagatacagctggaggcagttctttggggaattgggactgcgcttggtgagctccctccttattttatatcacgagcagctcgcttatcaggaagcgagtcaaaagctgttcaggagcttgatgcagctacttccaaagaagatgggccagtagcatcatcccttaatcgaaccaagcgttggcttctctctcactcccaacatctcaacttcttctctatcttgattcttgcttcggttccaaatccactctttgaccttgctggtattatgtgtgggcaatttggtgtgcctttctgggagttcttgtttgctactttgattgggaaagccatcatcaagactcatattcagacactatttatcgtgtccctgtgcaacaatcagctcttgtatcttattgaaaaggagttaatctggatatttggtcacgttcctgggttttctgccacccttccgtctgtgattgccagactccatgctgccaaggacaagtatctatcaccaccagccccagtctcaccgtcatcacaaatgggggagaaacagtggaatttctcttttacatctgtctggaactctatagtgtggcttgtgcttttgaacttcttcattaagatagtcacgtcaacagcacaggattatctcaaaaagcagcaggatacggagatggaacttatttcggattccccgatccaggaccattctaaaactaactagtggcgcagctagtggtgtttatacacagctgctagcagcaaagattctcctctgtagcttaagcccctgcagatgatttcaagttccaacaattagtattagtagttattcatctgcgcagtggacaaaaacatggacacatggtcttggttaacttgtcagttgacgaccttttgtcattgagcctgtacctgtactggcagctcctgttggagtcattctgtttattttcggacatctacacggataaacagtaggaattgtttatggagcacggttggctttttttgaagtgaagagcacggttggctttgtg

SEQ ID NO: 31386 - DNA, 1759 bp, Zea mays
  Clone ID: UC-ZMFLB73162F07_FLI
gtccacggccaagcgcctcgaaggcaaagcttccactagccacaggccaacgaaatcgcaaagcgaagctacggccaccgaccgacgttccaagaagcgaaacgaaacgaaaatgatgatgatgatgggagagagagcgcacgcgcctccgtggcagcgctcgccggcggccagcggcgtcacggacgcggacgacgcgtctccgtacgccctcctagcggcgctgcagcattacctgccgtcgaacgaggtggcggcgtacgacgaagacgacgaggaggcggccctggcggcggcgaccgccgccgtcgacgcgtacgcctgcgacgagttccggatgtacgagttcaaggtgcggcggtgctcgcgcgggcggaaccacgactggacggcctgcccctacgcgcacccgggggagaaggcccggcggcgcgaccccaggcggtaccactactccggcgccgcgtgcccggacttccgcaagggcgggtgcaagcgcggcgacgcgtgcgagttcgcgcacggggtgttcgagtgctggctccacccgtcgcgctaccggacgcagccctgcaaggacggcaccggctgccgccgccgcgtctgcttcttcgcgcacacgccggaccagctccgcgtgccgccgccgcggcagtccagccctaggggcgcggcggcggcggcgtcgccgctggccgagtcgtacgacggctcgccgctccgccgccaggcgttcgagagctacctcaccaagagcggcatcgtgtcgtcgccgccgccgaccagcacgctcgtctcgccgccgaggtcgccgccgtcggagtccccgccaatgtcgccagacgccgccgccgcgctccgccgcggctcgtggccgggcgtagggtcgcccgtcaacgaggtcctcgcgtcgatgcgccagctgcggctcggcggcggctcgccgaggtcggcgccttccggcgggtcgttcttgggcggaggctacccgttcgggtccccaaagtcaccggccgggctgtacagcctcccgtccacgccaaccaggccgtccccggtgaccgtgaccaccgcctccggcgccaccgtcctcaccgtggaacgcctcaacctcggactcatcggggacgaggagccggtgatggagagggtcgagtccgggagagccctccgcgagaaggtgttcgagcggctcagcaaagaagccgccgttcccagcgacaccgccgcatccgccaacgttgagggagcggcccccgccccggatgttggatgggtctccgacctcatcaactgagggaactcgtggaactaccagctcagaagttcaggggggaataacaaaaaaaaagtaggaagatttttaattttttagttctttacaaatattttcctggtccttgtacagatgttcctgctttgtgaatagtcttggatggttgtcgaagggaggggaggcagggaatggttgatttgttatgaggtttcagatgatggcatgtcggtgaaggagacaaggtgcccagcaaaccatggtggaaaatggatcaagaagacatgtgcaggcgaccatgtatacgggttgtctagatgcacatggtgtcttccctgcctgtgaggtgggagcatgggaggcgatcatggcggcgatccaagaccgaacccataatttccgcgagcgattccagaacgaacggcgtcttgagttgatgttcattctgctatttgccttttaagattcgacgagttattactgctc

SEQ ID NO: 31387 - DNA, 1173 bp, Zea mays
  Clone ID: UC-ZMFLB73162F09_FLI
ggccccaactaccgcgcaccggagatcctcaagcccgacgtcatcgccccgggcgtcaacatactcgcggcgtggaccggcgccgcctcccccaccgacctggacatcgactcgaggcgcgtggaattcaacatcatctccggcacgtccatgtcctgcccgcacgtgagcggcctcgccgcgctgctccgccaggcgcacccggagtggagccccgcggcgatcaagtcggcgctcatgaccacggcgtacaacctggacaactccggggaaaccatcaaggacctcgcgacgggcgtggagtcgacgccgttcgtccgtggcgccggtcacgtcgaccccaacgccgccctcgacccagggctggtgtacgacgccggctccgacgactatgtcgccttcctctgcacgctcgggtactctccgtcgttgatctccatcttcacgcaggacgcatcggtcgccgactgctcgacgaaattcgctcgccccggcgaccttaactaccctgccttcgccgccgtcttctcctcctaccaagactcggtcacctaccgccgggtggtgcgcaacgtcggcagcaactccagcgcggtgtaccagccgacgatcgccagcccgtacggcgtggatgtcacggtgaccccgagcaagctcgcgttcgacgggaagcagcagagcctgggatacgaaatcaccatcgcagtgtcaggcaacccggtgatcgtggattccagctactcgttcggatccatcacctggagcgacggcgcgcacgacgtcacgagccccattgccgtgacctggccgtccaacggtggagcagcagccatgtagtagactgatgctgttgctactgtctaccgctgtgggaagaaggacagggccatgagcccatgagatccgaaatctccacgcctcctgcctgccataggaataatttcctcgactgaaccacgcaataattcagctgcccctatcgtggttgtggtggaccaatggaccatgcttgcagctctctcttttcatttaggggtaggttggttggagcagcgtatgtgattggctgcttgcaaggccgtgagggtgccatccattatggctcattggcgattggacgtgtatgaacaagtttgtaatgactagaaataatcattgtaccatgttttttct

SEQ ID NO: 31388 - DNA, 1405 bp, Zea mays
  Clone ID: UC-ZMFLB73162F12_FLI
ggctatactttacttgtttttgatgatcaggttatgatattgaattgatgatctcttcaggtatttgagaagcttgggccaagcctatatgactttctgcgaaagaatagctaccgttcatttcctattgaccttgtccgagaatttgccagacaaatattagagtctgttgcatttatgcatgacttgcgacttattcacacggatctgaagccagaaaacattctccttgtttcatcagagtctatcagggtgcctgattataaggttgttactggattcctaaacttttacacacttctgtattgtatttactgattaaggttctttttaggacatatacacattattaatgttctttagcaatcctttatttgccattaacgtggcactgtcatgtggggaccacctgtgcgacagtgacaaataggggattatggaaaactgcaacggcaggcattcctctgattcttatgtggacaggaatttgattacttaatttaataacagattatgcagaattgcaactgcataaatgcacctttttctctaaactttattttaatttgcaatgaaggtttctatacgaccaccaaaggatggttctttctttaagaaccttccaaaatctagtgctatcaagctgattgattttgggagtacaactttcgagagccaagaccacaattatgtggtgtcgacaagacattatcgtgcaccagaagttatccttggtataattgacatccgctgacccacacacaaagtggccaatttacctttattttctatttttttcttaatgacaccagtttctttgttttgtatttgttttttaaatctttgataaatgacaattcttgtttaggtcttgggtggaactatccatgcgacttgtggagtgtgggttgcattttagttgagctttgttcgggggaagctctctttcaaacacatgaaaacttggagcatttggctatgatggagaaggtcttagggcctctcccaaagcatatgattgtcagagctgatcggcgtgctgaaaagtacttcaagcgcggagtaaggttggactggccagagggagcggcctcacgagagagcatgaaggcagtctggaaattgcctcgtctgcagaaccttgtgatgcaacatgttgatcattctgctggagatctaattgatcttcttcaaggacttcttcggtatgatcctaatgagcgcctgaaagcacatgaagctctacaacaccctttctttaccagatgcatcagaagatgtggtttctgaggctacactgagattgaaaatgtcaatgctgtatttcttcattttgatgtgtaagaactacaaaaaagtggagatgttctacgaaaaatgaaatatgctaacttgcattctgttc

SEQ ID NO: 31389 - DNA, 1921 bp, Zea mays
  Clone ID: UC-ZMFLB73162G09_FLI
tctatcgcaaacaggcctcgtctcgtcctcgtcctcgtccgccgccaaatcgaacccccccaaaccctagctacccggcgcaacgtccccttcccgcctctccgcggcgctgcgtgacacccggcctccgctacgaaacaccggggcgggtgtagcctagcgggcgggccatggcgtcaacggtgctggaggcgacgcgggcggcccatgaggatctggagaggctggagcggctcgcggtgagcgagctgcaacgggagcccgctaacccgcgtgaccgcctctttcagtcccaccgcgtccgccacatgctcgacctcgtcgtctccacctccggcaagctcgtggaaatttacgaggacaaggacaatgctaggaaggatgagatcaacactcatcttactgcacccacgcaaagtggactgtttagcaagtactatgaaaggctcaaagagatccgtgaatatcatcggcggaacccatctgcccgctttgttagtacaactgatgactatgaagagcttctaaaggaggaaccagttattgaattcactggcgaggaaacttttggccgttaccttgacttgcatgagctttataatgagttcataaattccaagttcggaacactgatggaatattcagcttatgttggctgtttctcccagacggacaagatctcacatagtcataaagctaccagagaatacttggaacatattttggaatatctgacatcatttctgtatcgcacagagccattgcaagacattgataagattttttttaaagctggagagtgaattcgaggaacaatgggccaatgaaggaatacttggatgggggaataaagggacagaaaaagagtctgaaatagatctcgattactacagcacagttgaagaacttgttgagcttggcccagaaaaattaaaacaggctttagctgctcgaggtttgaagagtggcggtactgttcaacagcgtgcagatcgtcttttcttgttgaaggttacaccgttggaacaactagataggaagcattttgccaaagttccacatactaaagatggctcaaacacagctcctaatggtaatgctttcaaggaggatatgaagaaagaaattgcattgatggaagtgaagatgaaacgtctttgtgagctgctagatgaggcctttgtaaggacaaaggaaaatgcggagaagaagcttactttgacatatgaagagatggaagcagaacgggaagaggaggaggtacaagttgacactgagagtgatgacgaagagcaacaaatctacaatcctctcaagttgccgatgggttgggatggcaaacctatcccctactggctgtacaagctacatggccttgggcaggaattcaagtgtgagatatgtggaaaccatagctattgggggcgaagggcttatgagcgtcatttcaaggaatggcgtcatcagcatgggatgcgatgccttggcattcccaatactaagaatttcaatgaaattacatccatcgaggaggcgaaagcgctctgggagaaaattcaagcacgacaaggggtgaataagtggcggccagacctagaggaagagtatgaagatcaggaaggcaacatctacaacaagaagacctacactgacctgcagcgtcaaggcctgatctagggctcctgctggttaaagttgtcgggatttgttcagaacttatctcatgtagttgtaactctgaaaatattggcccatctggcatacattttatgtaataacatgattctccggaactcatgtgcttttcccggttgtcatggttgtctcgtgtgtctgtttgcccagcttggtcgtccgtagctatgttatgttttatataatcgtaaatgtgttattgtattaagcacaagttggtgtttgc

SEQ ID NO: 31390 - DNA, 1285 bp, Zea mays
  Clone ID: UC-ZMFLB73162H04_FLI
acccgggagcagacagtgacaggcgaaccaagacacgcagggacagggagacatggggcgagggcgagcgccgtgctgcgccaaggtggggctcaacaggggctcctggacgccgcaggaggacatgcgcctcatcgcctacatccagaagcacggccacaccaactggcgcgcgctgcccaagcaagcaggtttgctgcgctgtgggaagagctgcaggctgcgctggatcaactacctgcggccggacctcaagcgcggcaacttcaccgacgaggaggaggaggccatcataaggctgcacgggttgctcgggaataaatggtctaagatcgctgcctgcctgccggggaggacggacaacgagatcaagaacgtgtggaacacgcacctgaagaagaaggtggcgcagcgggagaagaagaaggccggcgcggggagcggcgacgccggcacgcccgccactgcgcccttgtcctcggcgacctcctcgacgacgacccacaacagctccgggggcagcgactccggcgaccagtgcggcacgagcagggagcctgacgcgaccgacgtgtgccccctccagctagaggacatggacgtctcggacatgctggtggacggcgcgcccccggcggcgcagccaatgccgtcgccgtcctcctcgtcctccctgacgacgtgcgtcggcggcgtggaggagctgatcgagctgccggtgatcgacatcgagccggaaatctggagcatcatcgacggcgagagcgctgtggcgcgccatggtggcgatgcagccgcgccatgtacgggcaccggcaccgccgtcagcaccagcgaagcagaggaagcggcggcgaacgattggtggctggagaatttggagaaggagctgggcctgtggggctacgcggaggaggatactcaggcccaccctgacctactggaccactacacaggtttgagcccactctgcgccctggagggggacccagtctccacctacttccagaccgggcccgccgccgcggaacctgagctcctggtggtcgtcgaaccatctgccgttctgctatgactatgagcaacatgacggacggtcacagcaacgaacatcctggttcttggagatgttcggtggatcaaattcgagtagtttgtttgatgcagtggcagattaatatctctacaggccaattagaatgcacattcagaacagaaccgtccaaagaaagcctgtagagtgaaggctagtactctcttattcttaacagtgtttaacgcagat

SEQ ID NO: 31391 - DNA, 594 bp, Zea mays
  Clone ID: UC-ZMFLB73163A09_FLI
gcgaaagagcagcggcgcaaaggaaagggagccatgctcgcgtcgccggcgctcgccggcgcccactccttcgcggcgtccgtgtatggaagcctcctcgtcccctcgcctcccgtccccgcgccggcacgtcgcgcggcgctgtccgtcgtcgccaaggtcaaggtggccacgccccaggacgaccgcatcgcccgccacgtccgcctccgcaagaaggaaatagcacaaaagatcggtgaggtgattgccaagtcttgtttggagaaagggatcaccaaggttgtcttcgaccgaggtggtttcctctaccatggccgcataaaggctctcgctgattctgccagagagcacgggcttgaattctgagtcgtccaggcgtttgttcatatctccaggatcacctgtaatcttctcttttttttctctctccatatgccaaacagagctgttttgtagtcactcgccttgttctacagggtgcaaagccatggcccatggccactcgttgaccatgtcacgtttttttcgtttggtaagagtcttgtgttctgacgcttctcgaattgatattataagctgatcgtggttgtt

SEQ ID NO: 31392 - DNA, 1297 bp, Zea mays
  Clone ID: UC-ZMFLB73163B09_FLI
taggttgcctgatcggttgatcgctccatggcgatcatctccgacttcaaggacgacgaggcaccggagcagcagctggcggccggccacggcgtcgaggtggccctcgtggcggcgttggagaggagcggcggcgcgctccccttcctacaggcggctatggatgtcgcccaccgcaggtccggcctgttccgcgacccttcggcggtgagcaaggtcaccgcgatggcggcggccgtcagggcgcagatcgaagccgaggagagggtgaccagggaggcggaggccaagaggaaggcggaggaggacgagaggaaggcggaggccgaggcgcagagggctgccaaggaggcggtaatggcgacggcagaggagaagccagagagcacggtggagaaggacagcatggaggtggataagaaggaggaagccaacgtgagacaaccaaatgctggcaatggtcttgacttggagaagtactcgtggactcaacagttgccagaggttaacatcaccattcctgttcctcaaggaacaaaatcaagatttgtggtatttgatttaaagaagaaccatctgaaggttggtctgaagggccagccacctatcattgatggcgagctctataagccagttaaggttgatgactgcttctggagcatagaggatgggagaaccctgtccatattgcttacaaagcatgaccaaatggaatggtggaagtctgttataaagggtgatcctgaagttgatacccaaaaggtggaacctgagaacagtaaactctctgatttggatcctgagactagacaaaccgtggaaaagatgatgtttgaccagcgccagaagcagatgggccttccaacaagtgatgaaatgcaaaagcaagaaattctcaagaagttcatgtctgagcacccggagatggacttctctagagcgaaattagattgaggatgtgtttggccgtttgtctgaatgcgttattagtatgaaacattttttgatcagtttgcatgtaatgcgtcagaaatatctggagatagacttctctagagcgaaaatagcttgaggatgtgttcggccagttatttctaccagtgtgcattggttgtctgagtgcgttattagtatgaaacaaaaattttgatcagttcgcgtgtaatcgtcagaaatatccggagatggacttctctagagcgaaaatagcttgaggatgtgttgggccagctatttctacagtgtgcgttaggttgtctgagtacgttatcagtatgaaacgaattttgaacagtct

SEQ ID NO: 31393 - DNA, 2219 bp, Zea mays
  Clone ID: UC-ZMFLB73163E08_FLI
gaaaaaccagcttttgcttggaatcagacacgctacccggccacagactgtgatgccctcttctgttctttcgagtgacagcatgcacatcggactccttgcagcagcagctcatgctgctgcaacaaacagccgcttcacaattttctataatcctagggcaagtccaacagaatttgttatacccctttcgaaatacatcaaggctgtttttcacacgcggatatcagttgggatgcgattcaggatgttatttgagactgaggaatcaagtgtccgcaggtacatggggacaataacagaagtgagtgatgctgacccagtgcgttggcctagttcctattggagatcagtgaaggttggttgggatgaatcaaccgcaggagaaaggccacctagagtttctctgtgggaaattgagccactgacaacctttcctatgtatccatccctgttcccactgcgagttaagcatccttggtattcaggacttgctgctcttcatgatgacagcaatgctttgatgtggctgagaggagtaaccggtgaagggggctttcattctttgaacttccagtcacctggtataggttcctggggacaacagagactccatccatccttacttagcaatgaccatgatcagtatcaagcagtggttgctgccgcagctgcctcccagtccggtggttatctgaagcagcaattcctacaccttcaacaacctatgcagtccccacaggagcagtgcaatctcaatccgctgttgcagcaacaaatactacagcaagcgagccaacagcagatggttagttctgatgctcaaaatattcagtccgtgctcaacccaggtgctattcagcagcagctccaccaactccagcagatgcagcatactcataatgaccagaagcaaaagattcaaccagatcaacagtaccaagttgctagcagtgcggttctcccgagtccaacatcattaccaagccatttgcgtgaaaaatttggcttctctgatcctaatgtgaactcttccagcttcatcagctctagcagcaacgaaaacatgctggaatcaaacttccttcaggtaagttcaaaatccgtggatttgtctagattcaaccaaccagtagttagcgagcagcagcagccgcaacaacaacaggcatggaagcaaaagtttatgggctcacagtcaatgtcttttgggggctcggtttcgcttaactcgcccactagcaaagatggttctgttgacaacaaagttggtcgtgatgtgcagaaccagtccctttttagccctcaagtcgactcttcctccctactgtacaatatggtacctaatcttacctcaaatgttgctgataataatatatcagcgtttccctctggatcaacatatctgcaaagtccaatgtatggttgtctggatgactcttctggtttattgcaaaatacaggagagaatgatccgacaactagaacttttgttaaggtttacaagtcaggatcagtggggagatccttggacatcacccggttctctaattatgctgaacttcgagaggaactgggtcagatgttcggcattaagggtcagttggacgaccctgatagatcaggctggcagcttgtatttgtcgacagggagaacgatgtgcttctccttggagacgacccgtgggagtcatttgtgaatagtgtatggtacatcaagatactttcacctgaggatgtgcataagatgggaaagccaggaaacgatccacgctacctatcttagctacctatcttaaatcgatacatggagctctttctggctcccatgacgattctgcggcacactgcagcactgttcacgacggcctgctctactgtgctcgcatgttcgcccgtgtcatctctactctctagcatgcacaccgtgctcgtcttcagaagacgaactccccgtcgcttgtatccggtgcaggtcaccgctcctggactgatattttgtaggttccacgtaggaatcagtatcagcaactctatcctagtttgtggtaggctcgcgcggcgctcgttcctgtgtcgcatcaggatcttcggactaaaatgcgtagtcgaaaccgttctcgtgattcgtaagctattcatgtatttgaggattcctcgacatgctttcgacgatgaactgcaataatctgaatgcaggaggattgtttgagatttgt

SEQ ID NO: 31394 - DNA, 1308 bp, Zea mays
  Clone ID: UC-ZMFLB73163G06_FLI
caagttcaatgcgcgttgccatggcttcgtaaggttagctcagtattcagaagtttcaaatcgaaccgagcctttcaaactccaaaaggggactggtagaaggtggacggcagacagagatttggatcaactgcagcaatccatagggagcaatgcggatgactctgaagtcattgaaattgttgggaaaaatccatttctgtggcctgaccactggccagtcaaagactatgccaaaatctttgattgccttgtcttagttcctgagatagaaaccgaagtggttaatgtgagatccaagattagagaggcaggccaaagagcaagacatgaagctgggagttctcatagtaagcagaggagagatagctcaacgaatccgcctgtaccgtatgttgctgttcacatgaggatagaaaaagattggatgatacattgcaagaagtgggagcaacggtccaagtcgcatgaaatctgcagtagtaaagaagagatcattcataaggtctcacagatcactgatctacatcggccggttgttgtttatcttgcggtagctgacagccttcttgaagatgattcaataaccagtgggtggagagtgggtatggttgcttacgagaagaagaagcttggtgttactgacgtctacgatcggcagccatatcttataaagtctgccatcgactttgaggtgtgctcaagagcagatgtgtttgttggcaatagcttctcaacattctccaacctcgtagtgctgtccagaacagaaaggctgtataacctaggaaaggcgagctcatgtggcgagaacatcgggctttcatcgtatgcatacaatgtcatgggcggcgatggtggaccgcagagatggatgacggatatgtcggatggaagcctgcagaggttaagttacggaacaaataacgtctcatgccactgactttgacgcatagcacttgcctgaacatgatgtatacgtgaggaagtccctgtccgatttcatttagggcttgttcgtttgtgtcggattgcacccggaatcgttccaactaatcaaagtttatataaattagagaaacaatccggttaggaatcgttccgacccatcaatccgacagaaacgaacaaggccttatcgacaaaggaaacaagtacgtgcagctaatttgctgtgcctctgtgtttgaagcacttgtgaaagactatggccaggagttgtctgttgatagttgtgcttaaaagccttgacagtgttgggcagtttgtagtttgtataaagctgaatgctgtgcgatggcttttacc

SEQ ID NO: 31395 - DNA, 1682 bp, Zea mays
  Clone ID: UC-ZMFLB73163H09_FLI
cttggtggaaatattcttgggggcagtatcccttcatcattaggacagctggtgaaactgggtacaaccttgaaccttagtagcaatggtctagtgggtgacattccatcacaattcggccttgaatgtttcttacaaccaatttagtggaccagttccagataatcttgtgaagtttctgagttccacaacaaattcttttgatggaaacccaggcctctgtatctcttgcagcaccagtgattcttcttgcatgggagctaatgttctgaaaccttgtggcgggtcaaagaaaagagcagtgcatggccgattcaaaattgttctcatagttcttggctcattatttgtgggagcagttctggtactcatactctggtgcatccttctgaaatctcgagatcagaagaagaatagtgaggaagcagtcagtcatatgtttgaaggttcctcatctaaattaaatgaggttatagaggcaactgaatgttttgatgacaagtatatcattggtaaaggtggtcacggaaccgtttacaaggcaacactgaggtcaggggatgtttatgctataaagaaacttgtgatttctgcacacaaaggttcatacaaaagcatggttggagaactgaagacactaggtaaaatcaagcacaggaacttgattaagctgaaagaatcttggttgagaaatgacaatggattcatactgtatgattttatggaaaaaggtagccttcatgatgttctacatgtagttcagccagcaccagccttagactggtgtgtgcggtatgacatagccctcggcactgcccatgggttagcatatctacatgatgactgccgccctgcgatcattcatcgcgacatcaagccaagtaatatactgctggacaaggacatggtgccacatatttcagattttggcattgcaaagctcttggagcagccttctactgctcctcagaccactggtgttgttggcaccattggatatatggccccagagttagcgttctccaccaagagcagcatggagtccgacgtgtacagctacggcgtggtgctgctggagctgctcacgaggagggcggcggtggatccctcgtttcccgacggcacggacatagtcagctgggcgtcgtccgccctgaacggcactgacaaaatcgaggccgtctgcgacccggccctcatggaggaagtcttcggcacggtggagatggaggaggtgagtaaggtcctgtcagtggcgctgcggtgcgcggccagggaggcgagccaaaggccctccatgaccgcggtcgtgaaggagctgacggatgcacggcctgccactggcggcggccggtcgttgtccaagtcgaagcaggggaaaccaggatcgcaatccaacagcagcgcctaccggcagtaggatctctgactctgccgagctgtttggggacaccaactttactcaactttagtctctactctataggtaccctcgcttggtgtacatcctgattggttagttggcaaagattagttgtagttcaaatgaaacggagagatgctggactcgtgtcagtgcgagtgaagcaagctgcttgttctgaaatctgtggactgtggcttgtccgtggcttccagggacgggaccaggatagaatgggtattccaaattgtactaaagg

SEQ ID NO: 31396 - DNA, 1676 bp, Zea mays
  Clone ID: UC-ZMFLB73164C03_FLI
attcagtcggcctcgctactttcctaagtggaaaaagggttctctccggccatttccttgagtcgttccgccgccactcgaccaccaccgccatggcggcgccgacgccgaccacaaccactcgcagagactaccgcctccgcccccgctgcttctcgtctccacgcagctgtccgatggccaagcgactcgccggcatcgacaaagaggtagggggcggcacgccaacagagcagcccacccagaccgggcaggccgcctcgttgcgctcacccatttggtcagcgccaggtgctcgtcgaggtggtgaggttcacgcataagagcggactgaggggctgtgacggtggctggaaggatttcctggcccggaacgatagaaagtttggcgcgtcggtgagcgacccgaggaagcgctccagggacgtgctgttcgccttcctgcaaaccttccccaaggatttccagaagaaacacttgatgccactagtccgacgagagccaccggaaggcaacgcaggcattcctcagtccccaaagtgagctgctgggcagctgctcatcaccaacacaattctaacccccagcagtttcaggcgattggcatacgaatcgcaaagacgctgcatgccttctatcagttctgccgaccacacacaatatttggaaccgtgagacctaatttccaagactgaaattccattctatatatgtcgcaagtttatatgcatatgtatcatgctttcatttttttctatcttatatctggaccatgtaccagataataggcattacttcggtgtctctcctaccagtgaaagagcctggacgattttatgttgatagctatatggggatttctcgaggtataaatgtataattatcatattgaaagctatataccctgggcacgtatttcatattcttttcttcttcttctttttattcctaaaaattaccaacatatatacactatctcattttgacacttttgttcaggctttggccgccgcattatgtatgaacgtttatgtagtagggctgaacaaggtattttttgtgttaattttaatcatgcctgctgtcgatgacattactgtgtatacatattcagagtttcggataaccttttgaaggtcaataagccaaccctcccattagcgtcaggagagttttcagtgccaactccagtattgttagtagtggcattcttggtcatggtaatgttatatgtttcacacagagatctacgaaccatctattctggtatccctcatggtcttatattttatatgttcaggtgtctggtcatggcttgcttgcctccacactctggcaaagagcacaacaatttgacattgagaataaggattgtatcacacaattttatatgttcatttggaagttattctacgccgagtattttcttataccatttgtgtagtaaagaatcatgcgaagaacaacacccctgctatagacatgtgaaggtttattgctaatgttactctaccgaatggtctgaatgtctatgcgtcatttgaatgtaatatgactatttgttgtatcagggtaacaactggagcaaatgtaccatgtatattaagtattaatttaactgcatcatttgtaccatgtatattatgactatgtatgagatattgtctcttattatt

SEQ ID NO: 31397 - DNA, 1773 bp, Zea mays
  Clone ID: UC-ZMFLB73164D02_FLI
gtgcccttctcactgcacgccagtgagaattgagatcccagcaccgagacgacgacacaagtctcacctccatcctcctttactcctcatcctagatccctctctccgaaccccgccgcccgccgcagatccgaaggtcattggcagccatgatctcgtccagcaagctcaagtccgtcgacttctacaggaaaatacctagggatttgaccgaggcatcactatctggcgctggattatccattgtagcagcattagcaatggtttttttgtttggaatggagttgagcagttacttagcagtcaatactaccacatctgtgatcgttgataggagttcagatggggagtttttacggatagatttcaatatgagctttcctgcgctttcatgtgaatttgcatcagttgatgttagtgacgtgctgggaacaaacagattgaacataacgaaaactgttcgaaagtattcaattgatcggaatttagtaccaactggatcagaattccaccctggccctatccccattctcaataagcatggagatgatgttgaagaggatcacgtggatggtgcattttcattgtcatctcgcaattttgatagcttttcacaccaatatcctgttttggttgtcaacttctatgctccctggtgttactggagcaatcgactgaaaccttcatgggagaagacagcaaaaataatgagggagagatatgaccctgaaatggatggtagaatccttctaggcaaggttgactgcactgaggaagttgaattgtgtaggagaaaccacatacaaggatacccatccattcgtgttttccgtaaagggtctgatataaaggagaatcagggtcaccatgatcatgaatcatactatggtgaacgtgatactgagagtttagtcgcggcaatggaaacatatgttgcaaacatcccaaaagaggctcatgctttggaagacaaatccaataagactgttgatcctgcaaagcgccctgctccaatggccagtgggtgcagaatagaaggctttgtgcgtgtcaaaagggttccagggagtgttgttatctcagctcgatctggatctcactcgtttgatccatcccagataaatgtttcgcactatgtgacacagttctcatttggcaaaagactttccccaaggatgctgcatgaattcataagacttactccctatcttcgtggataccatgatagactagctggccagtcttatactgttaagcatggtgaggttaacgccaatgttactattgagcactacctacaagttgtaaagactgagcttgtaacacagaggtcctcaaaggaactgaaagtgcttgaggaatacgaatacacagcacacagcagcttggtgcacagcttctatgttcctgttgtgaaattccattttgagccttctcccatgcaggtcttggtaactgaagtcccgaaatccttctcccatttcatcacaaatgtctgcgctatcatcggtggggtcttcacggttgctggaatactggattccatctttcacaacacactcaggatggtgaagaagattgagctaggaaagaacatttaaatttcgacgccgctgcaagtttaggcggatgcactaggtagccattgttttgttataactaggtaatgactcatgaaaatcggtatatgaaagatggcgtgctgaattgacggttgaaattcggggggtcatgaaatcatcatataataactagggatctcactgtttcgct

SEQ ID NO: 31398 - DNA, 1143 bp, Zea mays
  Clone ID: UC-ZMFLB73164E11_FLI
ttccagattatttgagaatgacacttccatattctcattgggcaccgatgagaaagttggagatcctaccaaaactcataatggctctgagaaagttgcagcaacagaaccactcggtagatgctccttacttattacaccaactgaagatagaactgatggtattactgagcctgtggaccttgcaaagaataatgagaatgcaccccaagaataccaagctgcatctgaaattatccctgataaagttgcagagggtaatgatgtgtcttccacaggaattactaaggatactactggccatagtgcagatggtaaagctctcacttcagaaccgcatataggggaaacacatgtcaactcagcttcagaatccataccaaatgacgcagctcccccaacccagagcaaaatgaatgggtcgaccaagaaatcattagtcaacggtgttttggatcaaccaaatgccaactcagggctagaatcttcgggaaatgattatcctagctacactaactcgagcagtgctatgccacccgcgagtaccgagttaattgggtctgcagctgctgttatagatgttgattctgctgagaatggcccaggtacgaaaccagaacaaccggctaagggagcctcgagagcatcgaaatccaaggtttccacgaggacagaagagggtgttgcgaagcgcaacaagaggaagagcgacgtaggggcattgctgcgctacattgttgtgtactaatatatgttgacggcccagaagggcaacatgatccctaggttaactagagctagcgccgactggtcgtttccacgtacgatgcactgcgcatcagcctgtatccatgttgtattatcgtagggcttgtaatgaccacatgccctggttagagttgatcattaggaccagtagctgcttgatttgtgtctcggtgatctagctttgggtagtttgtgcagttggaaggagacagtttgttggttgtattgtattgcagcgcacagctagcaagtgttgttgtagccatcaggtacgtgttgtgtagtgaatccaggtccagggacagagctgttcctctgtatggtggaccctgaccctttgttttgtgccatggggcctttctgtgttgtgcttac

SEQ ID NO: 31399 - DNA, 1084 bp, Zea mays
  Clone ID: UC-ZMFLB73164G06_FLI
gccactgatctctttaacatgttgtcaatggatggaacaacagagaaagagtcagcgtcatcttcaaacgacgataatggctgggatggcttccagtctgcacaaccagtacctagttcagagaaaaaagattctgccaaaccagcagaaagcaagacccagtctacatctggaatggaagacttatttaaagactcaccagctgtgccattatcctcagctccagctgtttcccaagtaaacgctaagaatgatatcatgagtttgtttgagaagtccaatatggtatcacctttcgctgcccatcaacagcagctggcgctcatgtctcagcagcaagctcttctaatggctgctctcaaagctggaaatgcaccacaaatgatgattccagggactgccaatcagctaaatgctaacggaaccttgcctttccaaaactggacaaatctttatcaaaatcctgggtcgactccagcagcagcacagaatggtgccaccaaggttgctaacaacaatcaggacttctcttctggtaccttcggttttggcacacctggggtgtacaacattagcccaactgtcccagcaaatggggccacgacagcaggtgctatcaacaacggcactgcatcaactgcctcttctactctcccctcacaatctggcaaagactatgatttttcgtccttaactcaaggatttttcaccaaacgatgagcgcctagtgagcttgaaaaccaaacagaccacaggatcatgttggacgaggcatattgatttagggagcacaaggggcttacacatgcttatttcgaggcagattttcttctggtggatatattgttgtttcatgaccttgtagctgtcggacaataagagtggaaatatgccgcaaaatagctttgttgtttctaaaagcgaagaatacattgccggttatgtcaacggcttttactcgaggaccaccttgtcagttatacaagtctaatgcagtcttttcactatgttggtcttgatttatctacgacgtcgatactgattacagattgttttgtattgtattttacgacaattggatttt

SEQ ID NO: 31400 - DNA, 1622 bp, Zea mays
  Clone ID: UC-ZMFLB73164H05_FLI
attcagatagctctggggctattgagctaccatctgatgctgaaggagattcacaagaagtaaacagcaaagcaaaggtgagggatgatcatgccaattgcaaactcaatgaggtacaccaaagctctgaatcagagaaagataagcaacttgtaccagataacgcagcaacaaccaatatgtcagatgtacaacgtgaaaattctcatgtacagaacaatcagaagtacgaaattatcaatgtgccttctgattctaggccacttctagttttcattaacaagagaagtggggcacagagtggtgattcactgagacagcgtctgcaaattcttcttaatcctgtgcaggttttcgagttgagcaaacagcaaggtccagatgttggtttagctttatttcggaaggtaacccatttcagagttcttgtatgtggtggagatggcactgctggttgggttttggatgccattgagaaacagaagtttgaaaccccgcctcctgtagccatccttccagctggtactggtaatgatcttgcgagggttttatgttggggtggtggccttggtgttattgagaagcggggaggtctattctcagttttgcaagatgtagagcatgctgcagtcactgttcttgacagatggaagatcacaataaaggacaaccaagggaaacttatgagaccaccaaaatttatgaacaactactttggggttggctgtgatgcaaaggttgccttagatatacacaacctgagggaagagaaccctgaacggttttatagccagtttatgaacaaggtgctgtatgcaagagagggagcaaagaacataatggataacacatttgattgttttccttgggatgtcaagcttgagatagatggatccaaaattgatattcctcaggactccgaaggtatccttgttgccaatatcaggagttacatgggaggggttgacctttggaagaacgaggatgatgtctctgacacttacctccctcagtccatgcatgacaagaagctggaagttgttagcttcacaggaatgctgcatctcgggaaactgcaggttgggctttctcgtgcaaaaagattagcccaaggccatcatataaaggttgaagtcagtactacaatgccgatccaagttgatggagagccatggtcccaggagccgggaaccatagaggtttctcatcatagccaggccttcatgcttaagagagtctccgaagaaccgctgggtcatgccgcttcggtaatggccgacatcttggaaaacgctgagagcagtggcattatctcagccttgcagaagaggactttgctccaggagatagcgtctaggcttttgtaggacacagttctaacgccagtagttgtgtgtagctcaccctatagctctctcacgtcttcagcagccagaggcttgcttctgggctactagagaattgcgcctggtcgttgtacatacaccatcatggtattttaccctgattcggattgtgttgtgtatgattctgtaaaattttgtacaccctattgggtgagcacacactgacactgttgcggtcggaaattctggtaccagttgtctggattgctgaaactt

SEQ ID NO: 31401 - DNA, 1561 bp, Zea mays
  Clone ID: UC-ZMFLB73164H07_FLI
ggggcagaggcgcagagacaggcgtcttcgtactcgcctatctccgcgactcaaagcttcttccatttcctaccgccgccgctgcagctccaccccattccgtcgacaccatgagggagtgcatctcgatccacatcggccaagccggtatccaggtcggaaacgcgtgctgggagctctactgcctcgagcatggcattcaggccgatggtcagatgcccggtgacaagaccattgggggtggtgatgatgctttcaacaccttcttcagtgagactggtgctgggaagcacgtccctcgtgctgtttttgttgaccttgaaccaactgtcatcgatgaggtgaggactggcacctaccgccagctcttccaccctgagcagcttatcagtggcaaggaggatgcagccaacaacttcgcccgtggtcactacaccattggcaaggagattgttgacctgtgccttgatcgcatcaggaagcttgccgacaactgcactggtctccagggcttcctcgtcttcaacgctgttggcggaggaacaggctctggccttggttccctcctcctggagcgtctgtctgttgactacggcaagaagtctaagcttggtttcactgtgtacccatccccccaagtttcgacctcagtggttgagccatacaacagtgtcctgtccacccactccctccttgagcacactgatgtggctatcctgctggacaacgaggccatctatgacatctgccgccgttcccttgacattgagcgcccaacctacaccaacctcaacaggcttgtgtcccaggtcatctcatccctgactgcctccctgaggttcgatggtgctcttaacgtggatgtgaatgagttccagaccaacttggtgccctacccgaggatccacttcatgctttcctcctatgctccagtcatctctgctgagaaggcctaccacgagcagctgtctgtggccgagatcaccaacagcgccttcgagccatcctccatgatggccaagtgcgatccccgccatggtaagtacatggcctgctgcctcatgtaccgtggtgatgtggtccccaaggatgtgaatgctgctgtggccaccatcaagaccaagcgcaccatccagtttgtggactggtgcccaactggctttaagtgcggcattaactaccagcctccaagtgtggtgcctggtggtgacctggccaaggtgcagcgcgctgtgtgcatgatctccaactccaccagtgttgtggaggtgttctcccgcatcgaccacaagttcgacctcatgtacgccaagcgtgccttcgtgcactggtatgtcggtgagggtatggaggagggcgagttctctgaggcccgtgaggatctggcagcgctcgagaaggactacgaggaggttggtgctgagtttgatgagggtgaggaaggtgatgatggtgatgagtactagaagtatcctgatgcggtcatcgtcaggcttgtgtgctgctcttgtccccgttgtggtttgcaacacctgatgttgtaagactttctggttatgtc

SEQ ID NO: 31402 - DNA, 573 bp, Zea mays
  Clone ID: UC-ZMFLB73165A11_FLI
caaacattgcgcaagctggtggtttagcctgcctctctccagacggtctaaaggctatgcaagatgttgttggcttctacaaggagaacactgaaataatcgttgagacatttacatcactcggattcaacgtgtatggcgccaagaacgctccatacgtatgggtgcacttccctggccgcaattcgtgggatgtgttcgctgagatcctggagaaggccaatgtggtcactactcctggcactggatttggaccgggtggcgaaggctttgtgagggtcagcgcgttcgggcacagagagaacatcattgaagccgcaaggaggttaaagcagctgtataagtgagcaccgatgcagcttctgtgccctcctagacagatgtatcaataagaacacatcagggcaccaaaaatcgcttggtgaagctgccagaagatgttagattttgaacttttttttttaattctcgtgcggtgtctacattcaaaccatttcgaactctagacaatgcttgttgtaatcctgagacccttcattcactggtgaagttgtgattgtcttgtctgtgttc

SEQ ID NO: 31403 - DNA, 1757 bp, Zea mays
  Clone ID: UC-ZMFLB73165B08_FLI
tgcaggctcaggtgatgaatcttctggtggtttcgatgaactggattgtcagtacacaccaacagagagggaggactacgctctatcagatagggtggttcaagtgcaacaacagtaccctgataagcaggcagaagtgcttagctttgatcgggttttacaagggcgcatcacttttcctggtcagcagtggcattctgatttttatgccaatactacccaaactgaggataacgatgcatatagctgcgagtatgcccaagaggtcaaatatgcaattctggatggcagctctaatttgccagaaaccttagattctgaagttgataaactgtccctggggcattctgatttgctggtgcagttgttggactctgaatcatgcacagaagctaagctgattgatgcagtgaaacagttatctggacgaatagaggtgatggagaagaagcaggcttggtccaacaaagaagtcaaacatctacaagggatgaatgagaggttactgaaaagaattgttgaactaaagggaaccgttatgacattgaattctaaaatagatcctttaaccctagatgattcacttaaccagtttgtagaacaatgtttgggttcagaagatgtcatttatttagttggtggttttgatggcttctcatctttgccatcactagactctttttccccttcattggacatactaacaccccttaaaccaatggctgttggcaagtcatattcctcaactgttgcactagagggcaagatatttgttcttggtggtggtgatggtgcttgctggtttgatacagttgactgttatgaccgaagccgtgatgattggtccacatgcccatcgttgacttgtgacaaggggagccttgctggggttagtgtcaacgggagaatctatgcatttggtggtggagatggaaccaagtgtttctctgatgttgaaatgtttgatcctgtgcatggaaagtggataaagaatcaacctatgctggaaaagcgctttgctctagctggtgtagcactaaatggtgcgatttatgctgttggtggcttcaatggtgttcaatatttgagctgtgctgaaagacttgatcctcgggagcctaactggaaaatgctaccaaagatgagtgcaggaaggggctgtcatacacttacagttcttaatgagaagatattctcgattggtggatatgacactagggctaaagcaatggtgtctactgttgaggtgtatgagccaaggatgccatcgtgggtgatggttgaacccatgaactacaccagaggatatcattcttcagctgtgctcggtggctcaatattcacctttggtggggtgaaaggtgaagcagacacaatcttggatgtggtggaacactacaaggaagggtgtggctggatgacaacgggattgaagtcgattggcagaagatgctactgctcagcgattgttctctgactgtaactgccttaaaaccaagtgagaatgaggagactgataataggtaaaactaatatattaatattaggtaaaaactaagaaggctcttgcttagcctgaactgacaacactagacacgatggacctcgtagtttctgaatcggcgaactgtaaaacaaacattgagctgtttgtgttgtccgacactggatggtgggtggatgcatgcatgagtgaatcggtactgaactgatgtagagatgacacttccatggatgaatatccaagtatttgactc

SEQ ID NO: 31404 - DNA, 1267 bp, Zea mays
  Clone ID: UC-ZMFLB73165C02_FLI
cacgccatttcagaaatccgtctttgattctatcccaggcacgccagttcagaaatccgtgtttgattactctgtccctagcacaccgatgcagaactcagtctttgattattctgtcccaagcacgccgatgcagaagtcactctttgattctgtccctggtacaccggtgcagagatcagttttcgattctgttccgagcacaccaatgcagagatcagtttttgactctgttccgagcacgccgacgcagaaaccattcttcgactcctttccaagcacaccaatgcagagatcactgttcgattctgggccaagcagagcagaatctcctaccgccagcagcatgtatggcaaagagcagaagggattcttcgattcttcagtcccgagtactccaatgtacaactcaagcttcacgccaaggtatagcgaagcaggagacgattcattcgacaccatgtcccaatacagctcatttggcatgcacgagagcaattcctttggacagcgcgacagcttatcgagattcgattctttcagcagcaatgctgacaacggtgggaatgacacttttgcgaggtttgattctttccgcagcacttcagatcagggtgggggcaacagcttcatgaggtacgattccatgaacagcagcagcgaccatgacgggatcggcacgtttgcgaggtttgattcgatgaagagcagtaactacaacagccggggctactcgttcgacgacgaggacccctttgggacagggccgtttaaatcgacagagaccacgagccacagcccgacaaaacatgggacggacacatggagcgcgttttgacaggcaggggctgtatcatatattcaatagaggtcatgcgcttgtgcaccttactgcagatatatacacacgtacaggggcaagacaattttttgttgtgtgcatgggcctctgctccaacacacctggggaaggggaagggatgggacggggatttgcttgtgtgcttgctttgtgtttaattttgtacgtaggctgggaacatgtgtttggtgggatgatgatgatgatgctgctgctgctgcttataaactcaacattctttataccttgtattgtacaagtgcatgtacaagatgtgagtcgacccgtttgggttgagtaactctcgagtgttttttcttccatggtgtagcgttttcctgtttctccagaattttctgagcaatgtacagacagacaaacttttgtgtgaaacacctgttgtcc

SEQ ID NO: 31405 - DNA, 2012 bp, Zea mays
  Clone ID: UC-ZMFLB73165C03_FLI
cctcccctcctccccatcgcgaactcacaagagaaccaagtagacgagggagaaggagatggcgaagaagaaggagaaggcggtgaacgtgtcgggcaagccgcggcactcgaacgacgtcaaccgccccaatgacaagaagggcgcgggcggcggcgccggtggcgggagccggtccgcggctaccgtgcggcggctcaagatgtacaagacgcggcccaagagggaccgcgccgggaaggtgctcaggaacgatttccagtctaaagagctccccaacacccgcatcgagcccgaccgccggtggttcggcaatactcgcgttgtgggccagccacagcttgaaatgttccgggaggaactccagagtcggctttccgacaacttcagtgtcatcctgaaagaacggaagctgccactatcgctcctgcaagatcatcaaaagcaagcgaaggcacatctgcttgaagttgaaccttttgagcatgcttttgggccaaagggcaagaggaaacgtccgaaactaactgctcttgactacgaatctttgctgaagagagctgatgattcccaagatgtgtttgagcaaaagtatgcttcatcaaagttgccaagggaggaagaagaagatggcttacgtgatctagtgaggcatacaatgtttgagaagggacagagcaaaagaatctggggtgaactatacaaagttattgactcttcggacgttgttgtgcaggtgttggacgccagggatccaatgggcactcgatgctaccatctagagagacatctaaaagagaactgcaagcacaaacacttggttttcttactaaataagtgtgatctaatccctgcttgggctacaaaaggatggttaaggaccctttcgaaggactatcccaccctagcattccatgcaagcatcaacaagtcatttggcaaaggatctcttctgtcagtattgaggcaatttgctcgtttgaagaatgacaaacaagctatttctgtcgggtttgttgggtaccccaatgttgggaagtcatcagttattaacacactacggtcgaagagtgtctgcaaggttgctccaatacctggagagacaaaagtgtggcagtacatcactctcactaaaaagatatttttgattgattgtcccggtgttgtatatcaaaacaatgattcagaaactgatatagttctgaagggtgtggtccgggtgacaaatttggcggatgctgctgagcacattggtgaagttcttaggcgtgttaaaaaggagcatctccaaagagcgtacaaaattcaagattggtctgatgataacgattttcttgtccagctgtgcaggaccactggaaaacttctcaagggcggggagcctgatctgacaacagctgccaagatgatacttcatgactggcagaggggtaaaatccccttctttgtaccccctccgcagcaaagcgacggcggtgcatctgaaagtgctgaacctattgggattaccaaagaggacggagtaagcagcgacaggactgccgcagccatgaaagccattgcaggaataatctcgtcacagcagaacatgaatgtgccctgccataaggaaaacaatgcagacaatgaagacactactgaaaatgcagataacgaagacattgagagttcagataacgaagacaatgatgacatcgagcctgcagagcgatctgagtgatctttgggtacagatgtggattattagagttgatatgtcaaggctaattaatttgtcagcccaggtgttgtgtagctacttgaccatatcactggcgtgctagaaaaaaaggatcatgttgagttgcactttttgtaactatcgtacctgaatctttgtaatagggcaagatcagttttgctaggtacctggttgtatcgggatggttatctgtgctgtctactacaaatacagttacatctattttacttaaatcaagtggaagttatctctaaatttttattgcggcttc

SEQ ID NO: 31406 - DNA, 1722 bp, Zea mays
  Clone ID: UC-ZMFLB73165F09_FLI
tgcctcgccagcgaagcgatgcagccgccgcaccaaccgccgatgaacgggcaacactcccagcctccgccgcaaggacccgtggtgcccatgcctccgcagcagcaggcgcccccgctgccgtactaccagcagcagcaggcgccgcagtactaccaacaggccctcccgcagccgtgggggcagcagcagcagtacgctgcaccgccgccgcagtacccgcctccgcctcagacgcagcattacgcgacaccaccgcagcagtacgcccctctgccgcagcagcagtacgctcctccaccgcagcagcagtacgctccttcgccatatggtaccacgccgggaagcggtgaagtcaggacgctgtggatcggagatcttcagcactggatggacgagaactacctccactacaacgcctttgcggccgtggcccagcagattgcttctgtgaaaattatacggaacaagcaaactgggcactcagaaggctatggttttattgagttttactctcgagctgctgcagaacatactctgatgaacttcaatgggcagatgatgccgaatgttgagatgacttttaagctgaactgggcttctgctagcactggtgataagcgtggagatagtggttctgatcgcacaatatttgttggtgatttggctcatgatgttactgactccatgttggaagatgtgttcagagctaagtacccttcagttagaggagctaatgttgttgttgataggatgactggatggcccaaaggatttggtttcgtgcgttttggagatctgaatgagcaggcacgtgctatgactgagatgaatggaatgttgttatctacaaggcaaatgaggattggtgctgcagctaacaagaagaatagggatgctcagcagacatatgcaactgacggatgtcatgccatctgcatttaaggcctggaattgtcttcagatgtctatgtaaccagtgcctcggttaggagcataccagagctctaaaggaaattcttcagagaatgatcctaacaatacaacagtctttgtaggtgggttagattccaatgtaaatgaggagtatctaaggcaaatttttactccgtatggagaaatttcctatgtgaagattcctgtaggcaaacattgtggatttgttcaatttaccagcaggtcatgtgcagaggaagccatccgaatgctgaatgggagtcaggttggtgggcagaaagttcggctttcatggggccgtagtcctcaaaacagacaggcttctcagcatgatgccaacaaccagtataatgggaacagctattatggataccaacagccgggttatgaaggttatggctatggtgcttccagtgcacaagacccaagcatgcaaaactactacggatactctggttgtggtaactatgagcagcagcagccaacacaggaacagcagctgcagcagcctccaccaccacagcactgacgattgcttgcacacctctggagtgctatcggattagagtgatggtggagtcacggggcgctgcaatgagacatcctatatagatatgaaggtcatatagtcgcataggagtggttagactttcttggggaccagtgttaatcgatgatggcactccggatgtttcttctgtttgtcgttgagatcttgactgttgaagtgtgctctgttgatattaatgtcttcgtcagattgtt

SEQ ID NO: 31407 - DNA, 1096 bp, Zea mays
  Clone ID: UC-ZMFLB73166B07_FLI
acgaaacgcggcagccagcacaacccagcagagcgcgactcgactcgaatcgaatagtcccgtcctttcggttctacctttccctcccgcgccgccgcagccgcctccagggccgcggaaaccctagccacctcgtcagtgccgcgcgccgggtgtctcgccgccgcccgtcactgccgctgacaccgccggagcgatcggatctcgagaccgtcaggagacacgatggaggattgggattctgaagatttccagcccgttgctcctgttgtgaaagtcgagccacttaaaaatcagtgggctgatgaagatgtcgatgccgacgacgtaaaagattcatgggaggaagaagaggaagaggagaaacctaagccagcggctgtgcaaaagaacgcgacgaaacctagcgctaaggctcctgctaaaaagggaaaacagcaagcatcaacaagtgccgaggaaccagacgagcctttgagtcccacttcagagaaaattcgccaacagaggcttgtggaagaagctgacttcaagtcaactacagacctttttgcaaagaagagcggtgaacaaaagtcactagatacttttatcccaaagtccgagagcgactttgcggaatacgcggagcttattgcaaataaactgctcccctacgataaaagttttcactacatggctctcctcaagaatgtcatgagactttccatgacaccgttgaaaggctcggacgcgaaagacatatcttcctccgtgacggcgattgctaacgagaagatcaaggctgagaaagaggccgcagcaggcaaaaagaaacaaggagcgagaaagaagcagctccacatcgagaaaggagacgacgacttcatccccggacggggtggtggctacgatgacccggacgagtacgacttcatgtgatttggctggaaggaagagtaagtagggttaataggtttccgtcttgtatacatttggcaagcagagaacatatcacgagagtttgcggcatactatactatggcatggaacatgcgttatctgtttgaggatgaattttgactctgcaggacaagaagatcacaagtgcttactt

SEQ ID NO: 31408 - DNA, 1682 bp, Zea mays
  Clone ID: UC-ZMFLB73166E01_FLI
cttgctgcctcatccattccagagctgcgaagacagacagacagagagaaagagggatcgacggagcaaggcggggccgtgtccggtcacacacgagcgagccctctcggccgcgcgtttgtgaatggtgaacggcgagcggcgggcggacgcggagtgcacgcgggcgtcgctgctggggaggtatgagatcgggcggaccctcggcgagggcaacttcggcaaggtgaagtacgcgcgccacatcgccagcggcggccacttcgccatcaagatcctcgaccgcagcaagatcctctccctccgcatcgacgaccagatcaggagggagatcgggacgctcaagctgctcaagcacccgaatgtcgtccgcttgcacgaggttgctgccagtaaaacgaagatctacatggtgcttgagtttgtcaacggcggcgagctcttcgacaagatcgctatcaaggggaaactgtccgaacacgagggcaggaggctcttccagcagctaatcgacggcgtcagctattgccatgacagaggtgtctaccaccgagacctcaagccagagaatgtccttgttgatcggaagggcaccatcaagatctctgacttcggcctcagcgctctacctcaacatctcgggagtgacggacttctgcacacaacatgtggcagccccaactacatagctcctgaggttctgcaaaacagaggctatgacggctccttgtcagatctctggtcgtgtggggtgatcctctacgtgatgcttgttggctgccttcccttcgacgacaggaacctcgtcgttctttatcagaagattttcaagggagactgtcagatccccaagtggctttcgcctgccgcgcaggaccttctcaagaggatcctccaaccgaatccgatgaagaggatcaacgtcgcggggatcagggagcacgagtggttcaagaaggactacgtgcctgctgttccgcacgatgatgacgaagacgtccttcctagtccagctccctcgataaagccaatcgatgagccggcgcaagagaagtgttctcctatcaacgcttttcagttgatcgggatggcctcttcccttgacctttctggtttcttcgaggaagaggatgcagcgcaaagaaagattcggttcacttcgacgcacccacccaaggatctatttgacaagatcgagagcgttgtcatggagatgggattcaaagtccataggggggcaggcaagctcaaggtcttgaggaatagcaagtgttccaggaacccgtcatcattgttggtgtgcaccgaggtgtttgagctcggtccatcattatatgtcgtagagcttaggaaatcccacggagactctacgttgtatagacagctgtgcgaaaggctctccgatgagctaggtgcctgcaagacagaccagatcgcgaggactgaatcatcgagtgacgacctctcgagcgtcgatggcgaagcgttccctctatctgggttctgatcatattgctttccctgtgttgttttgggaacaggggatgaggaacatgctcgttcctgatgcaattctagattaggatcatgaatatagtgtacaaagccagcggcggcggcggtgcaaattagccaccgggttgaatataaataatatatatatatgatatgttgcatcttct

SEQ ID NO: 31409 - DNA, 1596 bp, Zea mays
  Clone ID: UC-ZMFLB73166E02_FLI
cgcgcgcattacattacattacatacaaacatacacagtttggccgttaattagccagcgctgacaaattaaccctcgtcttcgtcgcctgacccgccgccgaccgccgtacgtgaccaccaaccaggctatagagctacctccagccgccggcccgcgcgtcgtccgccgcggtgtacgtacgtctgccgcggagccacgcgcgcggacatggctcagctgaaggccgcgcgcgccaccgacgtcccgcccgccatgccggacccggacccggacgtcgtcgccgccgacctcggcgcgtgcgtacggcacgggcgcgttgacggtttggcagcaggaagcggcagggcggaggcgacggcgacggcgacgaccaccgcggcggcggccgatcagggacgacgacggccgccgctggtggtggtagggcaccgcggcaaggggatgaacgcgctggcgtcgccagacccgcggctgcgcggcgacatcagggagaacaccctccgcgccttcaacgccgccgccgccagccaccccgccgtcgcctacgtcgagttcgacgtccaggtgaccagggacggctgccctgtcatcttccatgacaacttcatctacacgcaacaagacggccaagtctcagcgaagcgtgttaccgagctgaacctggacgagttcctgtcctacgggccgcaaagagaccaggggaaggccggcaagccacttctccggaaactcaaggacgggaggatcctcaagtgggacgtgcagtccgaggacgcgctctgcacgctccgtgaggtcttcgagggcgtccaccggcgtgtcggcttcaacgtggagctcaagttcgatgacgacctcttctacacggaggagaggcttacctgcatcctaaaatccgttctcaaggttgtcttcgagcacgccaacgacaggcccatcatcttctccagcttccaacccgatgccgcgcagctcatccgcaagctgcaagacaaataccctgtgctcttcctgaccaacggagggacgcaggtgtacgccgacccgcgtcggaactcgctggaggaggccgtcaagctgtgcgtcgccggcgggctgcaggggatcgtgtcggaggtccgggcgatactcaggcagccgtcggcggtggccaagatcaaggaggccaacaaactgtcgctgatgacctacggtcagctcaacaacgtggcggaggtggtgtacgtgcagcacctgatgggggtggacggcgtcatcgtcgacctggtgcaggagatcgcggaggccgtgtcggcgttcacggtcgttacggccgtgcaggcgtcgggctcccaggacggcggcggcatcgtggtcggcgagaggatggagacggctgccgtggcggtggcagggacgccgagcttctcgccgcgggaggtgtccttcctcctgaggctcattcccgagctagtgcaatagcgcgttcttgctgctttgctggtggaatctcgcgacgagatcctctgtatccgtagagttaggtcactaacgtgtgaatccggcctttttgtttgtcaactgaaatcgaaaaaggttatgggttacattcgt

SEQ ID NO: 31410 - DNA, 483 bp, Zea mays
  Clone ID: UC-ZMFLB73166F03_FLI
cttccctggaagcaacaacgggacaggtctcttccagaccatcgtcgggctgaagattagagacctctacgagcagattgttgccgagagggctggcgcgccagtggaagcagccaaagtttgatggcccgcgtgcattcagatgtcctaaaacgggacaggcctcttcaaactcgacgcacgtctgttggggatatatgcatgggcagcatggcgaggaactaggagcctaggaggatgtggaagaaacgtcatttgcagagctcaggaaaacgtgcagcacttgtttagatgtgtgccttcttccatgcttcattgcagaaagaaatcaagtgcctctactactatcaggtactcctattcaagtgtaggagacgaatccataccacttccattgttggttattgtttctctgacccggagccaagaacagtcaacaaggacccgaggttgaacatctctttttatggactactggagagt

SEQ ID NO: 31411 - DNA, 752 bp, Zea mays
  Clone ID: UC-ZMFLB73166G04_FLI
tacgcttcagaacttgtgaagattttggagggtgcaaaccagtctgtgccaccacaattaaaagaaatggcccttcgtggaggatatggtggaagatcacgtcgatgggcatcttctgatgactcttatggtagtcagggatatggtgctaaaagatcaactgatagtttcaagaacagcagcttcggcaaccaggccgggggtggttcaagctttcactcgagcttccataacagctctagtggcaatcagttcggtgatactacaagctttcatgccagctatggtaacagcagccagaacaatcagacgggtgacaatccgagcttcccacccagctccagcaacaatcagtccggggatggtctcagttttcatgaaaggttctatggatcacgcggaagggacgagagcagatcaaacaatgatggattccgtgctaggagcagaagtcctggcaagcctgtggaagtttccaactggtgattgcatccactaggtgcaatccaatttttgcgatggtgacgaaaccaagtaaaagatggtacctcgacaagttatattttcctcttatcctgcttaaatctaaggatgtcctggaacatcaataacttaggatatgggtgatggtctgatcccaatggacaatggtctcctactttcttgatttgacgcctgagagacgcctgattccataccatatgcctgtggttgtagtttgtaaaatgttaaaaacttgactttgctagtat

SEQ ID NO: 31412 - DNA, 2588 bp, Zea mays
  Clone ID: UC-ZMFLB73167B08_FLI
ctaccttgtcagggccactttcctctacggcaacttcgataacagcaacgtctacccgaagttcgatatctccctcggagcgtctccctggtccaccatcgtcgtcgacgacgccaccacccccgtcgttgaggaagccatcatcttggctgctgctcccacgctcagtgtatgtctctccaatgccagcacgggacagcccttcatctctactctggagcttcgacagtttaacggttcgctctactacaccactgacgagacacgcttctttcttggactgtctgcgaggataaattttggcgcaggaagcaatgattcagtgagatatcctgatgatccatttgatagaatctgggaatctgattctgtgaggagagcaaattaccttgttgatgttgctccagggactgaaagaatatcaactacaaaacccatatttgtcggtaccaacgaagaaccacctgaaaaggtcatgcaaacagcagtagttggccaggatgggtcattgaactaccgccttgatttggaaggtttcccagcaaatgcttggggagtctcgtattttgcagaaattgaagatttggcaccaaatgaaacgaggaaatttaagttagaggtccctggcatgccagcactcagtaaaccaactgttgatgtggaggagaatgctcaagggaaataccgtttgtatgaaccaggctacacgaatttgtcacttccgtttgttttctcctttgggttcaggaagacgaatgattcttcaaaggggcctattttgaatgccctggagatttacaaatatgtccaaattactatgggatcacaggatgcaaatatcatggccagcatggtatcacgatatccacaggaaggttgggcacaagagggtggtgatccgtgcttaccagcatcatggtcctgggtgcaatgcagttcagaaacttctccaaggatattctcaatcacattgtctgggaagaacattaccggaagtatcccggtggaactgacaaagctatcagggttggttgagctaaggcttgatggtaattcattttctggccaaattcctgatttcagagaatgtgggaatttgcagtatattcaccttgagaacaatcagttaactggtgaattgccatcttctttgggtgacctacctaacctgaaagagttgtatgttcaaaataacaagctgtctgggcaggttccaaaagcacttttcaagagaagcattattttgaacttctcaggtaacagtggccttcacatagtaagcaatggcattagccacaccataattgttatatgtctggtgattggagccgttgtcttactgggtgttgctattgggtgctatttcattacatgtaggagaaagaagaaatctcatgaagacactgttgtcattgcagcagcaccagctaaaaaacttggttcatattttagtgaagtggctacagaatcagcacacagattttctttatctgaaattgaaaatgctactggcaaatttgagagaagaattgggtctggaggctttggcatagtatactatggaaagttggctgatgggagagagattgcagtcaaacttctcacgaatgactcgtatcagggaatcagagaattcttgaatgaggtgacattgctttccagaatacatcatagacacctggttacattccttggttacagtcagcaagatggcaaaaacatactagtgtatgagttcatgcataatgggacactaaaagagcaccttcgtggagctgataatgaaaagataactagctggctgaagcgtcttgagattgcagaagattctgcgaaaggtatagagtatctccacacgggatgctccccaacaatcatccatagagacctgaagagcagtaacattctcctagacaagaacatgagagcaaaagtggcagacttcggtctttcgaaacctgcagtggatgggtctcatgtgtcaagtatagttcgagggacagttggatacctggacccagagtactacatctcgcagcagctgacggagaagagcgacatctacagcttcggcgtgattttgctggagctcatctctgggcatgaacccatctcgaatgacaactttgggctcaactgccggaacattgttgcgtgggcccgatcgcacatcgagagcgggaacatccacgccatcattgatgagtcgttggacagaggctgctatgacctgcagtcggtgtggaagatcgcggaggtggccataatgtgtgtgaagcccaagggcgcccagaggcctcccatctcggaagtgctcaaggagatccaggacgccattgccatggagcgggtgctcgtgtccaattgcagcaacaggatgggttcaggtagcgtggagcagaatggaggagcatctttcgacgagctgctcatgcagccgggtctcagatgagatgagaacaacctactcgtaccttgagtccattgtatgtagtaattaatgtgtttactacattttttttgagaaacaaattaagtaatgctagcaaaggaaccagtatattattattattattattattattatt

SEQ ID NO: 31413 - DNA, 959 bp, Zea mays
  Clone ID: UC-ZMFLB73167C04_FLI
gcccctcgccgttaccgcgacgcttcggcctctggctccaccgcctgcctccctggctctgtgaccgtgacgagacacgtcgccgagaggccaccccgcttgggattgtgaggtaaagcgtgatggcagcgccaccggcgagggcccgagccgactacgactacctcatcaaactgctcctcatcggtgacagcggagttggaaaaagttgtctcctgttacggttctcagatggatcattcaccactagctttattaccactattggcattgacttcaagataaggactgtcgagttggatggcaaacggattaagttgcagatctgggacactgcaggccaagaacgtttccgcacgattactactgcttactacaggggagcaatgggcatcttgcttgtgtacgatgtcacagacgagtcatctttcaataacataagaaattggatcagaaacattgagcaacatgcttcggataacgtgaacaaaattctggtggggaataaagctgatatggatgaaagcaaacgggctgtgcccacttcgaaggggcaagctctcgctgacgaatacgggataaagttttttgaaacgagtgcaaagacaaacctgaatgtcgagcaggttttcttttccatagcaagggacatcaaacagagactttcggagaccgattccaagcctgaggatcgaactatcaagatcaaggctgaaggggaagctgaggcagcggcggcggcgcagaattcagcttgctgtggctcctgagcacttgtcaccgcaagatagtggcgttctcgcgcatgtaattttcatcgtttcattctttgccagcgactctctccttgtgcttcttgagctatcgcagttgctgtggcctggacaaatgggtgttaactgttaagtcagagcagttacttgctgtattgtgggaactctacccatggtaaggcgtgc

SEQ ID NO: 31414 - DNA, 927 bp, Zea mays
  Clone ID: UC-ZMFLB73167D10_FLI
acaagagaaaattaagttgcttggcgagcaatatggtgctttaagacgtacacgtggagatggaaactgcttttatcgaagctttatgttttcctacctggaacacatcctagagacacaagacaaagctgaggctgatcgcatcatggtaaaaattgaggaatgcaagaaaacactcctctctcttggatatattgagttcacttttgaggacttcttttcgatattcattgaactgctggaaagtgttctgcagggacatgaaactcctatagggcctgaagagcttctagaaagaaccagagatccacaagtttctgattatgttgtcatgttctttaggtttgtcacttctggtgaaattcaaaggaggtctgacttctttgaaccgttcatatctggcttgacaaattcaaccgtggttcagttctgcaaggcttctgtggaacctatgggtgaggaaagtgaccatgtgcacataattgccctatcagatgcactaggcgtaccaatccgtgttatgtacctagaccgaagctcgtgtgacactggcaacctgagcgtgaatcaccacgatttcatcccgtcggccaatgattcggagggtgatgcggccacgacacctgctcctgccacagagaaaccgtacatcactttgctctaccgtcctggccactacgatattctctacccaaagtgaattttgcgcatggttagtttcacgacttcggttgagaaagcacactgcccagaaaactcgtcatgtttcgcctgtgtgctgccaaaggtggcaaacttgcttttgagtgcttaatgccaatgccctcgttcaatctagatgttctctacctgctgtaagtcttactctggtacaaggatttaacattgtgttgactgcagagaagttcccgtggatatttgctactc

SEQ ID NO: 31415 - DNA, 890 bp, Zea mays
  Clone ID: UC-ZMFLB73167E12_FLI
gaaatatctagtcctgatgcttctacagctgttgggcaacacagagttttgatttttgctcagcataaggcttttcttgacatcatagagaaggacctgtttcaatctcatatgagaagtgtcacatatttgcggctggatggctctgttgatccagagaagagatttgaaatcgttaaagcattcaattcagacccaaccattgatgtacttctgctaacaacccatgtcggtgggcttggcttgaacttgacatctgccgacacattggtgttcgtggaacatgattggaacccaatgaaggaccttcaggctatggacagagcacatcgattgggtcaaaggaaagtggtgaatgttcaccgtctcatcatgcgtggcacccttgaggagaaggtgatgtctctccagaggttcaaggtgtcagtcgccaatgctgtcatcaatgctgagaactcgagcttgaagaccatgaacactgaccagctgcttgatctgttcacatcaacccctgcttcaagaaaagcaagcgacgagcagagtaagaggaaatctggtggcaaaggcttgaagtccattcttaatggtctggatgagctttgggatcagtcgcagtatgccgatgagtatgatctgaaccagttcctggcgaagctgaacggctgagccaccaccggctggctcgtgtacagtgtataaagcaatttggggcaggttaattttgttgttgctgttgtttgatagaggaaggaaaagattagatgctaacagatataggtggtggttggggttacgatctcaatttttttggtttccatcttcctcaatttttgttttgaggagttgtatatactctgctcacctataatcaaagctgcagctcttatcag

SEQ ID NO: 31416 - DNA, 833 bp, Zea mays
  Clone ID: UC-ZMFLB73167F03_FLI
ctccgccctgctgcacgggaaccgcgcctccggccggacgccgctggactgggagacgcggtcggcggtcgcgctggcggcggctcgcggcgtggcgcacatccactccacggggcccacggcgtcgcacggcaacatcaagtcctccaacgtccttctcaccaagaactacgaggcgcgcgtgtcggaccacggcctccccacgctcgtcggcccctccttctcgcccaccagggtgtccggctaccgcgcaccggaggtcaccgacatccgccgcgtctcgcagaaggccgacgtctacagcttcggcgtcctcctgctggagctgctcacggggaaggcgcccacgcacgccgtcgtcaacgaggaggggctcgacctgccgcgctgggtgcagtccgtcgtgcgggaggagtggaccgccgaggtgttcgaccaggagctcctcaggtaccaaaacgtcgaggaggagatggtgcagctcctccagctcgccatcgactgctccgcgcagcaccccgacaggaggcccgccatgtccgaggtggccacgcggatcgacgagatccgccgctccagcctcggcgaccggcaggtggccgacagcgccgaaggcgacgagccatctctataaccgccatagcagtagctcctcccctgatccaccatcacacgtactgtgtcaatctcagtgaatgaaaattgcttagttctttgcatggatcgatattgctcttgcttcacatcagcaacttgtgcatgtatgctttttctctttttcttctcttctttatctttttttttggcctctttctcacgggctttgatgattc

SEQ ID NO: 31417 - DNA, 890 bp, Zea mays
  Clone ID: UC-ZMFLB73167G07_FLI
gcctcctccgcttccgcctcgctcaggcttatagtcagtgatggaacacaaggaggcgggctgccagcagccggagggcccaatcctatgcatcaataactgcggcttcttcggcagtgctgcgacgatgaacatgtgctccaagtgccacaaggagatgataacgaagcaggagcaggcccagctggctgcctcctccatcgatagcattgtcaatggcggtgacggcgggaaaggacctgtaattgctgcatctgtaaatgtggcagttcctcaagttgagcagaagactattgttgtgcagcccatgcttgtagctgaaaccagcgaggctgctgctgtaatccccaaggccaaggaaggcccagaccggtgcgcggcctgcaggaagcgtgttgggctgacgggatttagctgccgatgcgggaacatgtactgttcggtgcaccgctactccgacaaacatgactgtcagttcgactatcggactgcagcaagggacgcgattgccaaggccaatcctgtggtgagggcggagaagctcgacaagatctgaggcgggcattgggggagcgaaatggttgcaatctgcaagaattcaacatgctgtctttgctgcgttatcattgaaacttgccattcttgtctgctgctgcgtcccgtgaggttcaatactgtgatgcacacagcatccaggcagccgcaagaatttcatcaaaatggtttcccgtgttggctatgtcgtgtaagcttaattcagttattcatggtggtttcggtcggtattgtggtattcccatttaggtagctctgtaatgtattgctgtctcaagcgtgttacattccaattagtaatagtaatcagcaattgtctgccccatatatttttt

SEQ ID NO: 31418 - DNA, 2511 bp, Zea mays
  Clone ID: UC-ZMFLB73168A03_FLI
ctcctgccgtcctcgatctcgtctcctcctccctacccaatccctcgcggtgggcgagggtggaagcgagtgacgatggcggcgctggaggcggcgagggagtgggcgggctccgtcataccgccggagctcgccgccgccgcggggggagacccactcgccgcgctggcggccaccgccgcggccctcgtcgcggggctgcttattatcgctgtctggttccgatccggaggcgggacgccgtccaagccggtcgccacgccggtacggccaccgccggtcaaggtggacgccgacgccgacgttgatgacggccggaagcgcgtcaccatcttcttcggcacacagactggcaccgccgaggggttcgcaaagtccatggcggaggaggcgagggcgcggtacgagaaggccgtgttcaaagtggtggatctggatgactatgctcaggaggacgaggaatacgaggagaagctgaagaaggaaactgtggtgctgttcttcctagcaacatatggggatggggagccaactgataatgcagcacgattctacaaatggtttactgagggaaaagagaaggaagtttggttgaaggatcttaaatatggtatttttggccttggaaacaggcaatacgaacattttaataaggttgcaaaggtggtagatgagctagtagaggagcagggtgggaaacgtcttgttcctgttggccttggagacgatgatcagtgcattgaggatgatttcactgcatggaaagaactagtgtggccagaattagatcaattgctccgcgacgaggatgacacaactggtgcatcgactccatatactgctgctattcctgaatacagagttgttttcattgacaaatctgacctgtcattccaagatagatcatggacactagccaacggtactggtgtgattgatattcaacacccttgcaggtctaatgttgctgttcggaaggagctgcacaaaccagcttcagatcgctcttgtatccatctcgagtttgacatttctggcactggtcttgtgtatgaaaccggagaccatgttggtgtatatgcagaaaattctgttcagactgtggaggaggttgaaaggctacttgacctttctccagacacattcttctccatccatgcagatgcagaagatggatctcctcgtaaaggaggaggttccttggccccacctttcccatctccatgtaccttgcggactgcgcttctacgatatgctgatctactcaatccaccgaagaaggctgctttgcttgctttagcttctcacgcatctgatccagctgaagctgagcgacttagattcttggcttctccttctggaaaggatgagtattctcaatggataactgctagtcagaggagccttcttgaagttatggccgcattcccttcagctaagccaccactgggagtgttttttgcagcaatagctcctcgtctgcaaccacgatactactcaatttcatcatctccaaagatggctccctccagaattcatgtaacatgtgcgttagtttatgggccttcaccaacaggaaggatccaccaaggagtttgttcaacatggatgaagaatacaattcctctggaatatagcgaagaatgcagctgggctcccatctttgtgaggcagtcaaatttcaagttacctgctgatccgtccactcctattatcatgattggtcctgggacagggctggctccttttagaggcttcttgcaggaaaggttagcattgaaacaatctggggcagaattgggcacttcaatccttttctttggatgcaggaaccgtaatatggactacatatatgaagatgagttgcaaactttccttgaggagggggcgctttctgagctaattgttgcattctctcgggaagggccaacgaaagaatatgtgcagcataagatggtggaaaaggccacagatatttggaacatcatctcaaatggtggttacttatatgtttgcggtgatgccaagggaatggctagagatgtacacaaaatgcttcatacaatagtccaagagcagggatctttggataactccaaaaccgagagctatgtaaagagcctgcagatggaaggaaggtacctccgtgatgtatggtgacacatcacctcaaataagccatagctctagcgtgtggaagtaaagctggctttgcgtgtatgacatgtctaatgccaacccaatcgtcagctttggaatgaagcgtgccattgatgatatactgaaatgagttgatcagtgcaattctttgacatctaactatttattattatatgagatgggaggaactgatggagaataaatgctgctgtagatttgtagaagttcaaaaaaattgggtacccctgacaagtttgtagccaagggggtacatcatacagtttgagatgaggacactatgtatactgtttgagacgaggacattatgtatactactctagaaggctaccg

SEQ ID NO: 31419 - DNA, 975 bp, Zea mays
  Clone ID: UC-ZMFLB73169A11_FLI
gatggccgctgcgagaatggcgctcgtctcttgcgcccgccgcctcccgtccttaccctctccgctcaccctctcgaggccccgcgccggcgccgtctcatttctggctgcccagccgtcgccggcgacggcaccgagatccggcaggaatcttgctctcttctgttctttatcaccgacgtcgccatcgctaactgaggccgccgtagcactgccgccaccgaaggctgcggtggaagagacgaagccccctgtgccgagcggggacgagaagggggaaccgactgtggaggagctagcgggcctgctggacgtccgggtgggccgagtggtgaaggcgtggaggcacccggaggcggacaccctctacgttgaggaggtggacgtaggtgaggcggagccccggaccatctgcagcggcctcgtcaacttcctccccatcgaagaactccaggacagaaacgtcattgttcttgctaacctcaaaccaaggaacatgcgtggcatcaagtcaaatggcatgctcatggctgcctctgatgcttcccatgagaatgtggagctgctcatcccttcagaaggttcctttcctggtgaaagagtatggttcggttccgaagaagaaaagaaccgtcaatctgaccctgcatcaccaaatcaggtccaaaagaagaagatctgggaagctgttcagcctcatcttagaacaacagataactgcattgcggttcttggtgataaacaaatgcgtacctctgcaggcctagttttctgcaaatcgcttcagggtgcaagagtgtcataaatctttatggccaacatctttcttgtatcatggaatcgtgtgtcatgtatcttccctgcaaataataactaactatatgaggagagcagcagggaaagaattttctttccaactactgagataatcactgtactggaaccattcacatttagttctcacttttcagtgtt

SEQ ID NO: 31420 - DNA, 2049 bp, Zea mays
  Clone ID: UC-ZMFLB73169C12_FLI
aagacatcggcacacagatgagtcctgaggatagtatatcttctccaaaagcaagacattcctgctccagtctgccttcaggacatctgataaaggaaccaaatagtcatatacctaaacctgaaattcgggacgtgcaggttgatgaccaagtaactgtgacccggtggtccaagcgacatgtaacacgaggctctgataagaggtcaacaaatattattgaatggaggaagaagaccactgaaacccgaactccatcttttgatgaaaaagaaagagaaagatgcatgtcacagtaagatattgcctatttctgcccatcagctaacaatcccattttgcaccactgcccagttttgaattggatttacacaaaaagaatatattgctccaattgtcatcttgtaactttcaatactccaagctgtcgttgtcgtttatcatgtttattaagaaaggtcagctcaatgttgaagtgaagctactatggctgtaatacctgttcaaattcacagaaaggagtaagtataaaaggtgctgaatgttgattagactattatatgacttgctaatatgctcttagtgttattgagaaatctacataacttgaagtcagggtcagatggtataagttgcagatattgagcttatgtgatgatacactagaaatattttacccattttcatcctacagctagtggtacatgctgacatgcagaatatcgcttaacatggggtcattatgttgaattgagaaccgaacagatgtttgtatattagagcgcctacctgagctttgaaccatggcattcaaagactggtcattgagaactcattgagaactctgattttagcaaaattttcctggccagcgagggtctggtaatcccctcttttaagaatgtcttcggtggactgtgtaaaatagtggacgtggtactgtagatgacaatgtttgcagaatgaattttgtttgcagcgtgaagtttgaaatagaggatgccataggagatgtcataggggagctggcgagctgctgaggacaacctaagaggaacccaagtggatattttttctcgcatggtctagttttttttccacaatccattagaagctcagtctataaaatgttgttccttttctagttttcttactgatgaggtggtaaaataaaaaaaagcatgggtcaattagaaagtctagtaattcatagaattgatgcgctagtcttacacaatatttttctttgccatttcgaaaaaagagaactcttatactgaggatataaatctgctacattttgtatttagagacctgtttatttgtgttttaaggtgcaaaagggaggaagcaaagatcacagcttgggaaaatctacagaaagcaaaagcagaggcagctattcggaagctggagatgaaacttgaaaagaaacggtcatcatcaatggacaaaattttaggcaaactccgctctgctcagaacaaagcacaagacatgcgaagtgtagtttcttctagtgaaggtcagtgtagtgtgagggcaaccaagaagacatcttcctctgtcaaaactggcaggcctttcagctgctgctttacctaccgtgcttgctagttgtgatacacagttggtgcctgtggctacagcaatggatatagttctactcgttatggacgcgaagggaagtcagttggggtttgactgcaaggcctaattgttaatgagatttgcactgatgaatgagatatcgttatggagcagcagacgaagccatcgagcaccgcgaaatccactcatgtaactgatggagtggactactgcagtctagtatgcgacgatcaatctctgtacacccggtagaaaaagttcatgagcttcatggcagttagaatcaggattgagctgatattcatcccgcttgatgtgtagctagctttcttgtaactggaattgtgtatgtaatgcaaatcatgggcgcattagactttaatgaagaaaaagtcagggctgcgcctttagaatgcagcttgctcacgttttgggttt

SEQ ID NO: 31421 - DNA, 1640 bp, Zea mays
  Clone ID: UC-ZMFLB73169D04_FLI
cttctccctccctagtcgctccccaaatcggatctccaggccggcagaagttgagcggactgactggtcactgtagttcgatcgaatccgagtagggctgatacagttcgattcggcgggaggcatggcgtccgaaaagcacttcaagtacgtcatcctcggcggcggcgtcgcggcggggtacgcggcgcgggagttcgccaagcagggagttaagcctggggagcttgcaatcatctccaaggaggctgtggctccttacgagcgtcctgccctaagcaaaggttacctctttcctacgaatgctgcaagactcccaggattttatgtatgtgtgggaagtggtggagagaagctattgcctgagtggtactcagagaaaggcattgagctgatccttagtacagaaattgtcaaagctgatctttccaccaagactctgactagtgcagctggagcaaactttacatatgagatcttgctcattgctactggctcctcggtcataaagctcaccgattttggcacacaaggagctgattctaacaacattctatatctaagggaaattgatgatgctgacaagctggttgcagctatccaggcaaagaagggtggcaaggcagtggttgttggaggaggttatatcggcctcgaactgagtgcagccctgaagatcaatgactttgatgtcactatggtgtttcctgaaccttggtgcatgcctcgcctcttcactgccgatattgctgctttctatgaggcttactatactaacaaaggtgtaaagatcttgaagggcacgctagctgttggttttgatgctgatgccaatggtgatgtcactgcagttaagctaaaggatggcacagtacttgaagccgatattgttgttgtcggtgttggaggcagaccattgactactctcttcaagggtcaagttgctgaggagaagggtggaatcaagactgacgcttcctttgaaacaagcgttcctggagtatatgccattggtgatgtggctaccttccctttgaagatgtacaatgagttgaggagagtggaacatgttgaccattctagaaagtctgcagagcaggctgtaaaggcgatcaagggcaaagagtccggtgaaccagttccggagtatgactacctgccatacttctactcccgatcattcgacctggcgtggcaattctacggcgacaacgtgggcgaaaccatcctgtttggcgacagtgaccccacctccagcaagcccaagttcggctcgtactggattaaggacggcaaggtcttgggcgccttcctggagggcgggtcaccggacgagaacaaggtcattgccaaggtggcgaaaacccagccgccggtcgctaacctcgaggagctcaagaaggatggcctccagttcgccagcaagatctgagacgctcccgttccatgtaaaattccgtgtcatcgtgaaggttcttctggagctctggtcatgattgagaaatgttctgctacagatgttatactacatacgtgactacactacatgatatattcggttttctgattgtgatatctgtacgtggctacactcacatgtgagatttgaataagtcctgcagcctcagggctcagctagc

SEQ ID NO: 31422 - DNA, 1646 bp, Zea mays
  Clone ID: UC-ZMFLB73169D05_FLI
gagaaattgaatcacaacttctgcctatagctacagcctcgttgaacataagagaaaaacatgtcaaggcttacctgggcacaacgccaggtgcaaagcccaagttttggcttgcttttcctgtgtctgttccacctcttggtttcaatacttattttgtctcaaacttgaagaaatcagcacatatttcttcgaagtccactcagtactcacctcaaggaagtgaaagtagtaatctacaagttggtcaaggcaacttgaaacttcaatataatgaagctggaaaattatccctgtactccgatagtaagactatggttcaagcaaactttgagcagaaatacaagtattatattggacaggatggaaatggaagtgatcctcaggcttctggagcatacatattccgccctaatggcacagttccaatcagtactgatgggcaggtttctctcacagttctgcgtgggcccatattggatgaagtgcaccagcagataaattcatggatttttcagattaccaggctttacaaggagaaggactttttggaaactgaatttatagttgggcccataccagtagatgatggaaatggaaaagaagtagcaactgaaattgttacaaacatggttacaaacaaaacattctacactgattccagtggacgtgatttcatcaaaaggataagagattatcgatcggagtggaagattgaagtgcaccagcctattgctggaaactattatcctgttaatcttggcatctatgtggaggatggcagcaaagagctgtctgtactggtagacaggtcaattggaggttccagtataaaggatggacaaatagagctaatgctacacaggaggctactccatgatgatgggaaaggcgtcgccgaggcgctaaatgaaacagtctgtctcgataagcaatgtgaaggactcattatacaaggaaaatactatgtcaaaatagacccacaaggagaaggagctcggtggcgtcggacatttggccaggaaatatactcccctctccttcttgctttcacagagcaggatggaggcaactgggcgaattcacatgttgcaaaattctctgcgatggattcaacttacagcttgcctgataatgttgcaatgcttacccttcaggagcttgaagatggaagtgttctccttcggtttgctcatctatatgaggccggggaggacaaggatctttcgtctttagcgagtatcgacctcaagagagtgttcccggagaagaagattggcaaggtcatcgagacaagcttatcggcaaaccaagaacgcgcagccatggagaagaagcgtttgaaatggaaggcgcaaggttctgcggctgacgagaaggtggttcggggtggccctgtggatccttcgaagctcgtcgttgagctggggccaatggagatccgcacattcatcgtcagctttgatcacatcagtgacaagcaacagctataatcgtctccgactagacgactatgtctggatgaagttgtcttgcggcttccaaataaaaaaaataatgtggcctgctgtgtacctgtggttcaacccatgatatggcctgctgtgggtcagcacggttctaaagctaaggacgttttataaggc

SEQ ID NO: 31423 - DNA, 1683 bp, Zea mays
  Clone ID: UC-ZMFLB73169G03_FLI
cctacccaaggcacagtggggtggccaaggatgttttaactcaactgcagaagtatttggataataaacacaactttgacatgtctaactacactgaccatgtgccacctgttcagcatcaaaaaaacaattacgattgtggctttcatgttttattgtatattgaagaattcatgaaggagaagatgtataaaatcaacaaaaaaatggtgttgaaattcagaaagcagctttgcatgaatctcttgtaccatcctttgaacagaataaatcttgtggaattcagaaagaagctgggtattacattgaaaagaaaacttcctggtatacttgatcttactattgaaggtgagaggagtgaatctgaggctgcagtgataattgaaatagagaacagagatgataagactctagaggatgaacatatttcagttgagaaagagtaaggtaaaaaagaagagcatgtactatcaactgacacaaagaatgacgaagcttcatccccatctgacgaagagcctgagcagagtgagtcatctgagcagactgtgtatgaaagatggatgattccaaaggatcattatcacctgagaaagagcaagctggagaaaaatatcctcaaacgaaaaaagaggttgggcaaagacaacatgtcctctcaggatatgatttctccagtgtttggcaagaggcttgtgcctgcaaacacacattttacctctcttaggaagttgcgaaaacacaagtttacgtctgataagatcaacgatgagatctgcaaacatatcttgaactacaatgaacgggagttgttaagtgtggggcagactaccatgactgggggtcagctggaaaagtacgtaaatgaaggtgacaatggtgataaaatactcagagcattcatcacatgcttcacttgtgatgaaaagttcaatcaagggaacatcacaaccgtcatcccgccacatgaagtatccgaagagggtgaactctccaaagttgatgctgcacaacttgtagaagaaatcaaagctgtactcaaaggcaccaatgttgcacgtgtacgcaaagacaccgaatccaccaaagatcccaaagtgaaagtctttcgaaacatgaggaggacatttatattttttcctttctacaagaatgaagaattgtttgtatttcatgtcgatacgaaaagactacccatcattgatgctctgttttgcaagatgtcatcattgtcgtttgaagatagatcctgactaggaaagtctatcatgggctgtctactcaaagccatgaaggattccggcttcatggtgaaaaaatatggtgattgtaggttcacagttactgtaactgaactcgaattcaaagatagtgcctcagcgctcataagttttattgagaacttcacttctaagttggacgacaatgccaagaaactgaaaaagggtgacaaggactggctggaaccttacaagaagtcgacagtggcataccttgtttgtcacactgaaaataaggtggtgttgcctgacgatattgtgaagtacaagcaaaacaagtgaggtggttgagtcgttaatgggtccagtggctgtgttttaagacttgtatcacactacttgtatggctttattctctgaagctgttccattgttgccgttagtaacaggtgttgcttttgtc

SEQ ID NO: 31424 - DNA, 714 bp, Zea mays
  Clone ID: UC-ZMFLB73169G12_FLI
cgcggcgctcctgccgccgcgcgtggaggaggccgtcctgggcgacgccgagcaccggagggtggtcaacgccggcgcccacccgcggacgcccttctacggggagttcctgcgcgcggccaaggccgtgtggatgctgcacctgctagccttcgcgctggagccgccgcccagccacttcgatgccggacgcggtgcggagttccaccaggagtacatggagagcgtgaccggcgcgccaccgcacggcggcgcgggcctggtcgtcgggttcgccgtcgcgcccgggttccggctggggaacggcgccgtcgtgcgcgcccgggtctacctggtgccgcgtggtggccgaccgtgacagacccatgcatggcgtgacagaccgcgtggtagcgttgcatagcgccgcggcccacggatcacctccgagagttgttggtgggtgccaatgcgcaccctgctggagcctggagctggacctgcggagtagctgctggctggctgcgttggtgaagaacagacaaaggctcatagctactgtactagtggctccgtagattttatttcattttacttctccttgttaatctcaaaaaaagtaataatcgccatgtgtaagaggactttgaatttaattctcgcatcaacatcgtttgtaatcatcaccttgagatttgactttgtagttaagagggacagttaagttcagcagtg

SEQ ID NO: 31425 - DNA, 3548 bp, Zea mays
  Clone ID: UC-ZMFLB73169H10_FLI
cgaagccggtgaagtatgacgacgaggaggagatctcctcctcctccgccgaggaggacgatgaccagtccgccgccgccgcctccggatctggtgaggaaggggatgacgatgaggaggatgctgcggcgctgcccacggaggaggaggaagctgagggcgaggggcagcaagaggaggaggtcgacgaggaagagatcgaagccgtcactaccggcgctggagctgaggacggagaggacgccagtgccgctaccgccgctgaaggcgaagaggagtcccagtccaccgaggacgacgaatccgtcgcaagggacaaggacaacggcgacgagactgatgcagtggttgggaagcgtgagaaaacaaggctaaaagaactccagaagatgaagaagcagaaaatccaggaaatactggatactcaaaacgctgccattgatgctgacatgaacaataaagggaagggacggttgaaataccttcttcagcagacagaaatatttgctcactttgcaaaaggaagtcagtcgaatgagaaaaagcctcgtgggaggggacgtcatgcatcaaagatgactgaagaagaggaagacgaagaatacctcaaagaggaagaagatgcccttgctggtgcagggggtacacgtttagtttcacagccttcatgcatcaagggaaagatgcgtgattaccagttggctggacttaattggcttatacgattgtatgagaatggtatcaatgggatattagctgatgagatgggtcttgggaaaacacttcaaactatttcattgctgggctatctgcatgagttcagaggtatagctggtcctcacatggttgttgcgccaaagtccactcttggcaactggatgaaggaaatccaacgtttttgccctatcttacgtgccgtgaagtttttggggaacccagaagagcggaaccatataagggacaatttgctgcaacctgggaaatttgatgtgtgtgtgactagttttgaaatggcaatcaaagaaaaatctgcgttgaggcgcttcagctggcgctacataatcattgatgaagctcaccggataaaaaatgaaaattctcttctatcaaagactatgaggatttacaacactaattatcgtctcctcatcacaggcactccactccagaataatctccatgagctctgggctctcctcaatttcttgctacctgaaatatttagctctgcggagacctttgatgaatggtttcaaatatctggggaaaatgatcaacaggaggtggtgcagcagcttcataaggttcttcgcccattccttcttaggaggctcaagtctgatgtagaaaagggcctacctccaaagaaagaaacaattcttaaagttggaatgtctcagatgcaaaagcagtactatcgtgctctgcttcagaaggatttggaggttattaatgctggtggtgaacgcaagcgattgcttaacattgccatgcagttgcgcaagtgctgcaaccatccatatttattccaaggagctgaacctgggccaccctacacaactggtgaacatctaattgagaatgcaggaaaaatggttctacttgataaattgctgcccaagctaaaggagcgtgattccagagtccttattttttcacagatgaccaggcttttggatatcttggaagattatcttatgtataggggatatcagtattgtcgaattgatggaaatacaggtggagaagatcgtgatgcatccattgaagccttcaatagtccaggaagtgagaagtttgttttcttactttcaactagggcaggtggccttggtatcaacttggccactgctgatgttgtggttctctatgacagcgattggaatccccaagctgatctgcaagctcaggaccgtgcacatagaataggtcaaaagaaagaagttcaagtgttccgcttttgcactgagtacactattgaggaaaaggtgattgagagagcatataagaagctagcattggatgctttggttattcagcaaggacgattggcagagcagaaaactgtcaataaggatgatcttctgcaaatggtgcggtttggtgctgaaatggttttcagttctaaggacagcacaataactgatgaggacattgaccgtattatagctaaaggagaggagacaacagcagaacttgatgcgaaaatgaaaaagttcactgaggatgccatcaaatttaagatggatgataatgctgaattgtatgacttcgatgatgagaaggatgaaaacaaggttgatttcaagaaacttgttagtgataactggattgagccacctagaagagaaaggaagagaaactactctgagtctgactactttaagcaagcacttcgccaaggtgcaccagcaaagcctagggaaccaaggattccaagaatgccgcacttacatgatttccagtttttcaataaccaaaggctaaatgaattgtatgaaaaggaagtgcggtaccttatgcaagcgaaccagaagaaagataccattgatggtgaagacgaagatcagttggagcctttgacagcagaggagcaggaagagaaggaacaattattagaggagggttttgcgtcatggacaaggagagacttcaacacatttattcgtgcatgtgagaaatatggtcgcaatgatattaaaagtatatcatctgaaatggagggtaagacagaagaggaagttcaacgttatgctagagttttcaaggagagatacaaggaactgagtgattatgatagaattataaaaaatattgaaaggggggaagcaaggatatcccgcaaggatgagattatgaaggctattgggaagaagctagaccgctacaagaacccatggttagagttgaaaattcagtacggccaaaataaagggaagttctataacgaggaatgtgaccgctttatgctttgcatggtgcacaaacttggatatggaaactgggatgaactgaaagctgccttccgtatgtctcccttgtttcgatttgattggtttgtgaagtccagaactacccaagagttggctaggcggtgtgatacccttatccgactggttgagaaagaaaatcaagaatatgatgagcaagagaggcaagcaaggaaggagaaaaggcttgctaagaacatgactccaacaaagcgagctgcactaaagaattcagagggtgagaatactccaccgagttcattcaagagacgacggcagtcccttatggacgactatgtgggctcgggaaagcgtaagagaggctgaccacgtttggcatcctcccttagacatgccgtctctacaatgattttaataccctgccgcgcagtagtgcttagttcctcttgcacgtgagtcgaatacctcaagggcatgtgactagcgtaatttatgcaatgatgacataggttagttattaatcctaaatgaagcatgtatgcgcatgctgtgttagtgtcgtagatctggactttgcaattgcaactgttgctgccc

SEQ ID NO: 31426 - DNA, 3165 bp, Zea mays
  Clone ID: UC-ZMFLB73170B02_FLI
caacatcaagaaagttttgatggacttacttaaagatgtgggagctgccattgacacaacagatgatgagatgcgtctcatcaacaaactcaaaggacatctcacaaaaaagaggtattttgtagtaattgatgatttatgggatgtctcagcatggagctttattacatgtgctttccatcagaataaccgtgggagtcgaataatcataacaacgcgcaaaattgatgtggctaaggcatgttgcttgtcctctggtgatcatatttatgaaatgcaaccccttagcgttgctgcctcagaaagattattttttaagagaatttttggttctgaagaaagatgtccttctcacctaaaagaagcctccatcaaaattctaaggaagtgtggtggcctaccattggctatcattactgtatcaagcttgctagctagtaaagatctgacattggatcagtggaacagagtggcaaattctattgggtctacactcgagaataatccagacatagaggtcatgagaaagattctatctatcagttattttgatctaccacattatctgaaaacttgtcttctttatataagtatcttcccagaagattacatcataaatagaaagagtttgatagttagatggattaatgaaggatttgttcaagaagaatatgggaaaaatgcacatgatataggtgaaagttactttaatgagcttatcaatagaagactggtccaaccatggtttatcgatcatgacagtgggagtgtggtgacttgtcgagttcatgacatgattcttgatttaatcataacaaagtctgtagaggagaactttgttactttgttagactctcgagaacttacatcaagtccacagaacaagatacgaagattatctatccaatgtggtgacggagaaccaccagctttggtgctagaagagtcaacatcgctatctcatgtcagatcagtgactatctttgggcatgggaagcaactgccatctctttcaaacatgaaggctcttcgcgtgcttgacctagaaggttgtaagggattagaaaaccaccacctggaaaatatagagaggctaatccacctgaaatacttgaaccttagagaaacagaaatcacagagctcccaaagcaagtggtaaaactccagtacttggatacattggatataagaaacactggggtgagtgagttacctccggctattattcaacttcggcaattggctaggctgttcattgatcttgacaccagattaccatatgaaattggtaaaatgcaaaatttggaagagctgacacatgtcaatacgtgtatgtaccatatgaacttcctgaaaaagctggctcagctaagtaaacttagagagttggagataagttgggatcattacggaacacgagttgataaagtttcttatgcgggtattttgatacattcacttcacatactggccacacataaccttcggtctctcactgttcacatcatggacgaacagagcttccctcttcatacctggcatcctgctccttctgcacttcgaagactccacttcgacatgaacaacaacgaacaatttccaaagttccaacctgggtgggatcacttgtcaatctccaagaactaagcttccgcattacaaaaatgacacaagatgaccttgatgtacttggagatataccggctcttcgctctcttgccttccacatggaaatctgcaccaaaactacaccctgggaagatcctagacccgaggattggcttaggatcagaaaagggtttcaaagtttgaactccttccgcttcgaatgtggcccttgggagtggatgtgtctcatatttgaagctggatcgatgccaaagctcgaaatacttgaccttgaggttccatctgttgagaattacttgattcaaaaacttggttttgatcttggcatcaataacctctcctgcatctccacagttactcttagatttagtaatcggggatgcagccaagaaaatgaagttgccatcaggaaatcagtcagcatacatcgcaatagacctgcactggaaataataagaaaaaaggctcgaagttgaagaggcaaaaggaaaatctggatgggctgatagtaaacctgaaactctggtgaacttcgagttgggacttgtgagcatcagataaaggaagcaatgcagtgagttgataagagatggcgtgtgatcacaattcacagcacagacgaatccaaggaacctttccgcttttggggtttgaagatgacgcgatggaaattctcttgctgcgattgaagcgtcagccaattagaatcagaattgacacaactccggatcatgtctctctgtgctagaaacgttgattacctgtgcaaaaaaaaaagaagaagaaaaagatatcgttccaggaacaccgtggaacagctccagtgctccaaccaaacaggggcaagaggtgtttccgtgtttggcccagtagtccatgtatcctttgcatgtgaatttctccatttttctaagcgtgaatagattgggagttaggtggtgtttgttttgaagaattaattcattctatataagttgatgcatcatgagtatattctaaattagtatattctaaaaatttagtgtaatgaactcatttatcatattattactaattattagtgtataagaaatgaatcactcatttcattttccaaaccaaacaagaaagtgaaagtgagaaaatgattgttggcctcgttcctcaaaccaaacacgttgtttgtatagagttactggaggaagtttttttagtcttacaaaaaaaaatcaaggttaagagtggatttacctaactgttgcacatgcatgatctgatgaatttgactgcgtctagcttgctactgttaatctattatctcgagttctctgctgactccacattctgtacttgctaatatcgttgattgaacaacctgtacctttatttattaactttcctttggcacttttaggctggatatttcttgccacaaaatcctggttgtagtcttgtattgtagatcagatcgatggtgaggaccatggtggttttgattaatttgtgttataacagtggcattacaagtaaaactcttcttgcgacacttgagcagc

SEQ ID NO: 31427 - DNA, 1384 bp, Zea mays
  Clone ID: UC-ZMFLB73170B05_FLI
gttgaaaaccaaattagcaagagagagagggcacacactgcaaagatgagtctcataagagggatgggcaacgttgccaagagatggaaagaactcaatggcttgaattactggaagggcctagttgatccgctcgacctcgacctccgtaggaacatcatcaactacggtgagctctcccaggcaacctacaccgggctgaacagggagagaagatcaaggtacgctgggtcttgcctcttcaaccgcagagacttcctcagcagggtggatgtatcaaacccgaacctgtatgagatcacgaagttcatatacgcgatgtgcactgtcagcttacctgacgggttcatggtcaagtctctctcaaaggctgcatggagcaggcagtcgaattggatggggtttgttgcagtagctacggacgagggcaaggaactgcttgggaggcgggacgtggtggtggcgtggcgtggcaccatacggatggtagagtgggtcgatgatcttgatatttccttggtgcctgcttcggaaatagttcttccaggcagcgcagccaacccctgtgtgcatggagggtggctttcagtctacacgagtgctgatccagggtcacagtacaacaaagagagcgcaagacatcaggtgttaaacgaggtgaaaaggatacaggatctgtacaagccagaggagacgagcatcaccataacaggccacagcctaggagcagcacttgccaccatcaacgcaaccgacatcgtctccaacggctacaacaggagctgctgccctgtgtccgcgttcgtattcgggagccccagagtcggaaaccttgatttccagaaggcgttcgacagcgcggcggacctgaggctgctccgcgtccggaactctcccgacgtggtccccaaatggccaaagctagggtacagtgatgtcggcacagagctgatgatcgacacaggagaatcgccgtacctgaaggcccctggaaaccccctgacatggcatgacatggagtgctacatgcacggggtcgctggggctcaggggagcagcggagggttcgagctgttggtcgatcgggacgttgctttggtgaacaagcatgaagatgccctgagaaatgagttcgctgtcccaccgtcgtggtgggtggtgcagaacaaaggtatggtgaaaggcaaggatggccggtggcatctggccgaccatgaggaggatgatgactgatgtaacctgtcaactcatcttctaccagtttgttaccagagaacacatgtatcgttgtgtttaaaactgtacctgactgattttctgtatccaaatcataacttccgttggcttttatcggttgtaataaagcctgaatacacatgcttgc

SEQ ID NO: 31428 - DNA, 876 bp, Zea mays
  Clone ID: UC-ZMFLB73170D09_FLI
gttctacaacacatcagcgctcccaagccagcaatgcttcctgctgccttttctcgtttcatgtcagtttcatctgctcgcctagaggatcgtggatttgaaactgccactgtagcagatgtcttgaagtctaaagggaagagtgctgatggatcttggctctggtgcaccacagaggatagcgtctatgacgctgtcaaatctatgactcagcacaacgtgggagctttggtggttgtcaaacctggacagaataaatcaatcgctggcattgtcactgagagagattatctccggaaaatcatagtgcagggaaggtcttccaagtcaactaaggttggcgacatcatgactgaagagaacaaactgatcacagtgaatcccgacaccaaggtcctgcaggcaatgcagctcatgacagaaaaccgcgtcagacacatcccggtgatcgacggcacggggatgctggggatggtctccatcggcgacgtcgtgcgcgcggtggtggccgagcacagggaggagctgaaccggctcaatgactacatccagggaggctactaggacggcgtgtgcagcgacgaccccctccgatcccgccagtcagtgaagtccgcctttgaaatccaataactcggaacaatgatgatgacgaaataggccgtgttttcttggacaatgatgttaagttcggcaaggttttcctttctctttttttattctactgcgtggtctatgtgtatattgccaaaggcatgcgtgagccatgcgcccggtgctggggcgcagagaccatctgatggtggaaacaccggaaataagagcgtgccgctgtgtgtttcctttgaaggaataaaaatggtgttcgtgttgtgc

SEQ ID NO: 31429 - DNA, 1445 bp, Zea mays
  Clone ID: UC-ZMFLB73170E12_FLI
ctcagagacagctacaccattaccctggggtactaggatgtcaatcgcactgggagctgctaaagggcttgcttgcctccacaatgctcaaaggcctgtcatctacagagatttcaagacatcaaatattctactggactctgttgagtgttaaccacttcctcatgcttccttctcctttttcagttccattgctatcatccaatggtaatacatatatgtttgacatatttatcttcttgtttccgttgccacaggattatactgctaagctgtctgactttggcctggcaaaagctggccctgaaggtgatcagacccatgtatcaacacgggtgatgggaacctacggttatgctgcccctgaatatgtgatgaccggtactttcctcactgtttgtatatgcttggtgtctgcatttcttagaagatatcgtctaacagtttgggtatgaacttcatgtcgattttccagacactgaactattgtttgtactccatgagctgagatcacatattttgccacttcctatgctatgtctttcattatctgaatatagtaactttgtagcaatgtcttataaccaggaaaaaaacgtattattcttaatgcatgatctgatatcacatataccatcacacctacacttaatgatacctaatgtgcaggccacttgactgctagaagtgatgtctacagcttcggtgtggtccttctggagctcttgacagggcgcaagtcaatcgacaagtcgcggcccagcagggagcagagcctggttgactgggccctccccaagctgaacgacaagaggcggcttctccagatcatcgacccgagactggaggggcagtactcggccagagccgcccacaaagcctgcagccttgcgttctactgcctgagccagaaccccaaggccaggccactcatgagcgacgtcgtcgagaccctcgaaccgttgcagggcagcggtggaggcgatggacgcggccagccttctggccttcctgactataggggtcgccgcaggataaccgggaacagcgtccacttcagggccatcccgaaccccaagtgctcccctgccgtcccggccacggcttgccgagtgcggtgatgggtgctgtgtttcggttggagctgccggggtaggttccgttgtgtatattgcggccgtgggcagtggtgtgtgtgtgggtgcatgtgtgtgcttggcggcggcggggtttcggtttcttctcgggttttggcctgcgttttgatgtgtaaatttgatctgcgtgctgcattgctgctgctgcttttgtaaggccctctaattttcactgtggtcttatgtatccttcgactgagcgagccctgctgaaactggcgggttcgggattaaccctagaaatgaaatgaaaggctgaaccgagagcggttggatggctgatatggc

SEQ ID NO: 31430 - DNA, 1310 bp, Zea mays
  Clone ID: UC-ZMFLB73170H06_FLI
aaagtttgggatgttggaggtgatgtccgtcatattgcctggaatccttcacctgacaggcctattcttgctgctgtcgttggacatgacctactacttattaatgctgaggtggggagtgaagaaatgcaaacgatggtaaaagatctgctcaaggttgatgaaatggctcttcaagatgacactgatgacaagaaaccagctgtgaggtggttgaagcatgacaaacttgatgggatcaccttagttcatcaaaaggccgtgtcaaatgtggagtggcattacaagggagattacttcaccacagttgtgccaactggtgatacgagagctgtattgttgcatcagctcacgaaaaagcactcgcaccatcctttccgtaaaatgccaggccttcctgttgctgcaacattccatccaagtcagaagatgttctttgttgctactaagaaatttgttcagatttatgatctccaaaaagcgcagttggtaaagaagctggagtcaggtcttcgcgagatttcctccatctcgattcatcctggtggtgataatgttattgtcggaagcagagatggaaaattatgctggtttgatactgatctatctaccagaccatacaagactctaaagatccattctaaagatgttaccagtgttgcctttcaccgaaagtaccctctttttgcctcatcctccgaggattgtactgcctatgtatgtcatggaatggtctattctgatcttaaccagaacccacttattgtaccattgggaattcttcgtggccattctagttcggatggaagaggggttttggactgcaagttccaccctaaacaaccatggttgttcactgctggcgctgactctgtgattagattatactgcgactaagcattcctccaaggattcatgattttgccaagcaatatgacgtgtagccttttgttgggcctcagtatggtgatgattgctatattctggtatgaagttggattggtacacatgtatgaagccaagagtggtggatcttttgttatggggtcatggctgctctggaaaggaacattcaaacagcgggtagggtgtttaatcaatgtcaacggtttgccagcaagtgaaaattttcaaatgttcagtacagccacagaggccttagagtagtggttatgttctttagatgtgagactttagacgcttattttggtgattttgtaatgtcacctatcttgtaccatgaatcttgtaatactaaaaatacttttcgccaagctcatccaaggctgaggttcacagccgttcatcgc

SEQ ID NO: 31431 - DNA, 620 bp, Zea mays
  Clone ID: UC-ZMFLB73170H07_FLI
ctttagcatacaaatgtgttgaagttgcttatctgaaggctgcatactacaaacacccaactgcaagcaaagatagacaagtgttacaggcagttgtacagactgcaccaggtgaatcaccatcatcttcagcctcagacattgataatttaaataacaatggattatccaaggcctcttcaagcaaggatgctaattcaccacaagtggctggaaatcatttgttgctggccgctcgaaatcaaccacacttgatgcggttactagcttatacaaatgatgtcaatagtgcctttgaggctactcggaagtcacacatggcaattgcttctgctgctggcaatcatgaaaatggagtcgatggtcttccttcagtaaaaacagtactggattttaacttccgaagtgtgaatgatctactaaggcttgtgcgaatttcaatggagtccatcagctgctgacgtgttcagaatctgagaaagtgccacccgttggaagttcctgttggatgtttaatccaattaacttttcttgatgaagtagcatgaaactgaatagttcaacagtgaacagtgtaaaagcataggtcttctcatttgagcttgctggtcaatttgtac

SEQ ID NO: 31432 - DNA, 739 bp, Zea mays; identical to SEQ ID NO: 21766
  Clone ID: UC-ZMFLB73171C03_FLI

SEQ ID NO: 31433 - DNA, 1962 bp, Zea mays
  Clone ID: UC-ZMFLB73172A06_FLI
gttgctttgcttgctcctggaatcttcggaaccgaaggccaccgcgccaaccgcccaattaccgaaccaaaccctaccggtcgcggctcctccatagtccatactctcgcgcgcctaaaccctagccatcctcctcgccgccggcgaccgccgccatgagccgctacgacggccgcgctgcggacgcgggctcctaccgcgaccgccgcaggtaattgaccgccccacggtcaggctctaaagtctgaaccctaagccctggccgcggccgacgcgagtgactgtgcttccccttgtgttccatccagcgagggggcgttcggaggcgggtcgagggcgttctcggcgccgagcaaggcggacgcttccgcggcggcctcggagctagatgggctgccgcgcttcgagaagaacttctacgtggagtcacccgcggtggccggcatgacggaggaagaggtggaggcgtaccgccgccgccgggagatcaccgtcgacggccgcgacgtgcccaagccggtgcgtgagttccgtgatgtgggcttcccagaatatgtgttgcaagagatcacaaaagctggttttgtggaacctacccctatccaatcgcaaggttggccgatggcattgagaggccgcgaccttattggcattgcagagacaggatcagggaaaactcttgcttaccttttacctgccattgttcatgtgaatgcgcagcctattctttcccctggcgatggtccaattgtcttggtgttagctcctacacgtgaacttgctgttcagatacagcaagaagcaaccaagtttggtgcatcatcaaagataaaaagtacttgcatatatggtggtgtgccaaaaggtccacaagttcgtgatcttcaaaaaggtgttgaaattgttatagctacaccaggacgactaattgatatgattgaatcacatcatacaaacttgcgaagggtcacatatcttgttttagatgaagcagaccggatgctagacatgggatttgaacctcagattaagaaaattgtttctcagattcgtccagatcgccaaacactttactggagtgctacctggccgaaggaagttgagcagctagcaaggaatttcctttttgacccatacaaggtcactattggttctgaagacttgaaggctaatcatgccattgttcagcatgtagagatattatctgagagtcagaagtataacaagctggttaatctactggaggatataatggatggtagccgaattttaatatttatggacaccaagaagggatgcgatcagactactagacagcttcgaatggatggttggcctgctttgtctatccatggtgacaagagccaagcagaacgggattgggtcctttctgaatttaagtcagggaaaagtcctattatgacggccactgatgttgctgctcgaggcctagatgtcaaggatgtgaagtatgtcattaactatgactttccggggtcactcgaggattatgttcatcgtataggtcgaactggcagagcaggtgcaaaaggaacagcgtacacctttttcactgcagctaatgccagatttgccaaggaacttattaatattctggaagaagctggacaaaaggtcagctctgaattagctgctatgggtcgtggtgcacctcctccatcttcaggttaccgtgatagatatagggggtatgggggtggccgatcgtggagttgacgttcaaatgcttagttgctgctaagagcaatgctttacgtttgtttgttgatggatatgttgttttggcgcactgataagagcaatgctttacattttggctagtattcggtaatgatggattcacatactcttggatattgacctgtctcgatgctagaaaagtggcatgatatcatgcctgcaatatcattagtttatttttagccatagtttcagattgac

SEQ ID NO: 31434 - DNA, 1461 bp, Zea mays
  Clone ID: UC-ZMFLB73172B02_FLI
cgcacctccccacccctctcgccttcgcttcgtcgccacggcgagccccacgccgccgatcggggcgccgccagcggcggcggcgcccgatccgatggaagcggaggtggggccgccgaatccgccgcggccggagccagccggatcggagcccgacgacgcgcgcctctccccgcctcctcctgctcctgctccgccgcctccgcccccgcctcctcccgccgccgaggctgccgccgcgcccaccgcctccgcggccttctcgctgcaggctccagctccggcgccggcggaggcgaacggcagctccgacaggaagaggaggaggaaggcggaggacggggacgggtgcaagacctgcagctgcaagaagtccaggtgcctcaagctttactgtgtgtgctttgcttctgggttacattgtactgaatcatgtggatgtgaaccttgtcataacaagccacaattgcaaggtactctgcggatggcaacagttttacctctgaaacctgtccaaacattcgaagctggccaagacatagtggaacaagtcataaggtctcctatggatcttattagaagaaaatgcacatgcaagaagtcaggctgccttaagaagtactgcgactgctaccagggaggggcaggatgctccatcaactgtaaatgcgatgattgtagaaacccatttgggagaaaagtcggcgttattttggacggtaaaagcagtcttactgcacctatactgcacgaaagaaacgggactgaagttgactcaagcgacgaggaagacgacttctacatgaatcgacagctctccccaatacctccgtctccggtgtctagggagtcttcgttccaacaggagactctagtcggcgtcgaggtccagaccatgaacgggcacctgtaccccaaaccactgacccaggtgcgccccgagccgtcgtcctggcagctctcccggaggcccatcgaggaaccgcgcggggagatatggcgcttctcgaggaggccgagcgaggacgggacctctgatgccatggaagtgcacgccgtcgccccgagagagagcaagaaggcggcagaggtccgcggggacaggttcggcatcccgcggtgcatcgaggtgatgagcgccatggcggagctgtcgccggtggagaagtcgctggcgcccgacgtcttcttggacgcgagcaaccgggagatcttcctctcgctgagtgtagatattaggccaatctggctgaggcgcaagatgaagagccttgtctagctagacgctacaacagagatagcctgaggaattttcgtcgtcggcgtatacctaataaacccgtgctgtactgtagatatataatatatgtgccttagattcagagttgagttctggaccgatgggtgtaatataccttagtgctaatttatggtgcatgctgttatattggagttcttcct

SEQ ID NO: 31435 - DNA, 947 bp, Zea mays
  Clone ID: UC-ZMFLB73172C12_FLI
tctgctctagggtttttgccaagccgccgtcgccgtcgctctgccctcgtatcccctcccacgacaccgagacaccaagatgacggcgcagaccgcggaggagctcgccacccagatcgagcagcagaagctcgaggagcagaagaccgaggcagaggaagttgtggtggaggatgaggaggaggaagatgaggacgatgacgatgatgacaaggatgatgatgaactcgatgaaggggatgccagtggcaagtcaaagcaaagcaggagtgagaagaagagccgcaaggccatgctgaagcttggcatgaagcccatcactggtgtcagccgcgtcactgtaaagaaaagcaagaatatactctttgtcatctccaaaccagatgtgttcaagagcccgaattccgacacgtatgtcatattcggcgaggctaagatcgaggacctcagctcccagctgcagacccaggcagcagagcagttcaaggctcctgacttgagccagatgatcttgaatccagagacgtctggcccgggacaggaggacaatgatgaggaggtcgacgaaactggtgttgaggccaaggacattgagctggtgatgacccaggcatctgtttcaaggcccaaggctgtcaaggccctcaaggcttctaatggggacattgtcactgccatcatggatctgacaacctagggtgatatttctgtccgtgccacttttgttttggagtgctattgcaacttgagtgttatatgtggacctatgcttcgatgatgttacatgattgcttcttgggtcaaggtcattcaaacaaggtttcatctttgctggcttgaaacctggcagtagtttatagcccagaatgtttgtctgtggttctggtgtttcagtaatgtcacagttatcaatggctcttaagtttctgcaatatcacagttttctt

SEQ ID NO: 31436 - DNA, 1609 bp, Zea mays
  Clone ID: UC-ZMFLB73172D03_FLI
agagcaccagctcaccgccccaccgattcaaaggcgctcggatcctctgacgtcgacgttccctgccagctcccggctgccgccctcgctccttccgccatctgcgctgctctgcggcgccagagccggcgcccgcccgctgccgccctcgacggaccgggacacggggccccaccgttctctttcctgcgctgcgctgcgcggcggctgtgctgctgatcagttaatgtgcctgtgaggctgtgacaggcggcgtcgagcgagtccgaggcgggctaactaaacccgccgtctctcgaggcggcgcccgcggagggccaggtggagggccgaggaaggtggaggcggtgaggcgatggggggcgccaaggcggaggacaagcccgccgccgccaccgctgaagacgattggtgttaccagtttggaaacaagaatgcgtttgactcgaaggccccgaaaaaatcaccacttgcattgagagtggttgtctttgccatgactgtgttatgtgggatatctatttggtcaatgtgtatgaagcagctagggagtgatggctggtcaagaatagtgaagatcgaagttgtggaacaaccatgtaataagtctacagttcctccttctgaggttcaatttgcgcattaccctcaaccgacaacttacagcagggtctcgtggcgaatcacgtggccgtagtggactacttcaatcgaagaggagtctctgcaatatttctcttcagaaggaatctgctccgccagttggtatcacagctagcgaataaccacgacagattcctgaagcagttaaacggaacacacaaggcgcatgtccacacagagcatgaggcccatatactcgcgagatacaagcccaggctgaacacgtcgtcgctaatacggaaactgaaacaggctgatgagtacacacgcgacgcccttgagaacctaaataacacccgccacatcactgtctactacgaggacatcgtccgcaacagaacaaggcttctcgacgccctggatttcctcggagtgccgaggagggagctggcgagtcggcacgtgaagatacacacgaagcccctgtcggagcagatcgagaactgggacgaagtctacagcgccctcaacggtacccagtacgagggcttcctgaatgccgctgactatacgtaatatgacgtcacggtctccacgtctcttgatgtagatgtaggtgtgtaggtatagcgccccagctgtgattcctttgttcttgttttcgagtagccggccggccttctgcgtgcctgcctggcaggagttttgatgcgggggatggaggcgctttgccatggttgcgttcgagctcctggctagcccacccactagctttcctcatgtccatgtaacgaccctcgagcttctctcatctttggccgtccgcttgtaatgcttgtcgtcagtgatctcacccatgccatgccatgccatgccatgccttcgagggacaaagctgtgcacttgaacttgaggcttgtcttttcattgggtgtttgcggtgggcaagcaagacgctgcagttaaggattattggaaggtggaaggacttgttggagttgctctt

SEQ ID NO: 31437 - DNA, 1003 bp, Zea mays
  Clone ID: UC-ZMFLB73172G04_FLI
ctcgttcctggctgcagcaaagtcactgggaaggcggtgatgcttgacgagatcatcaactatgtccagtccctgcaaagacaagtcgagttcttatcaatgaagctcgcaacggtaaacccaaggctcgacctcaacatagaagggcttctatcgaaagatcttctccgcttccctggcgttccttcgtcttcccttggattctccccggaaatgatgcacccacagctgcagctctcgcagccaggcctgatccagggcggcgctgccggcatggccaatccggacgtgttcaggagaatcatgcaggcacagttaagcgcaaaggacgggtctcagatgccgccccacgcattgaatggggcattcagtgacgtcgcgcagcagcagatggcgtacccgtcgtcccaggacctgagcatcgggccgtcgcaggacgggtttcaaatgtgactgaacatgcccagctgcacatactagtaaaagatgcaaaaaaagggcttcttccatctgaggagtatctgatcggcgaacgtgcgggcgcgcagggggccgcgtatagctgcctgctggtgccgggagcagcagcgcctgctcagcgcgacgccttgaaccgcgtcgacccacggctgtgcctgtgctgctgcatcggtcaggtttttttatcgtgttcagaaggaactgaggaaaagctcgtggcgctggcctgtggcgttgcctggatagatggctggaaattctgtctgtttcggcggtcgcgtgcattcatggcatggcgcgcagtgcagtaacagtgggctgcgtgttggcacttggcacagcgaccaaatgagctgctgcaggatgtgatgcaacgcgaggagccttgttttgttagtagtttccaatgctttttttttgtttttgtttgcataatagctaagggtgcaagaaaacactcataaatttgggggtggggggcggcggtccggcgatgtctatgttgaaacatcatacatttggc

SEQ ID NO: 31438 - DNA, 1203 bp, Zea mays
  Clone ID: UC-ZMFLB73172G05_FLI
gtaaatctatggaattacggcatgtatataactatgtgagggttttctcttctacggacaacaaaactaatcagcattgcatatcaccccgttcgctcagagaggctatatctgcagttgttcttgtcacggttggtgatacgtcttgggcttcaggtattgttctgaacaaaaggggtttagttctgacaaatgctcatctcttggaaccttggagatttggaagaacttcaccttcagatttacaagcctcgttcgctggagaacatctcaatgctggagaaaacaaatcattgcaaccacaacaaggcaaaatttccaatgaagatgctgtcaagcataaggtttcgtcatttaacttgggtttcaaaagagggaagagaatatctgttcgtttggaccatgaagagagacagatatggtgcaatgctagtgtggttttcatctcaaagggtccacttgatgttgcattgcttcaaatagaaaaggttccagttgaattaaatacaatcagaccagaatttgtttgtccaacagcagggtcgcctgtttatgttgttgggcatggcctttttggaccccgatcaggcctacactcttctctatactcgggggttgtgtcaaaggttgtccaaatcccagcaaatcaactttctcatctggcccgtgctgaggctgacaatatggacataccagtaatgcttcagacaacagcagcagttcatccaggagccagtggcggcgttcttgttaatacacatgggctaatggttgggataataacaagtaatgctaagcatggtggtggaagcacaatacctcatctgaatttcagcatcccctgcaaattactggttgcagtcttcgagtattcagcaaatggaaacctcgtggttttggagcagttggacaaaccaaatgaagtgctctcatcagtttgggcattggcaccatcatcatccccatttgtcaggagctccccagaaaaaggcaaagaggaaaaggtcttggagttctctaagtttcttagtgacaagcaacaagctctgaaatctaacgtagatctgaaggaactatttaggtacaagactcccagcaaaatatagagtgcgtccactagaattcatacaaggaaaatgtttgttcccagaattttgtatgagacgtttgatcccagaaatccccagtacaaaatgagttatc

SEQ ID NO: 31439 - DNA, 839 bp, Zea mays
  Clone ID: UC-ZMFLB73172G06_FLI
acgaagctgaggccaggaatatggaactttcttcagaaggctagtaacctgtttgagttgcatttatacactatgggaaacaaactgtatgctactgagatggccaaggttcttgatcctactgggaccttgttcgctggacgagtcatatcaagaggtgatgatggtgatccttttgacagtgatgaacgagtgccaaaaagtaaagatctggatggggtactgggtatggaatctgcagttgtgatcatagatgattctgtaagagtctggcctcataacaggcacaatttgatagttgtagagagatacacctatttcccctgcagcaggcgtcaatttggccttcctggaccatcacttctagagattgacagagatgagaggcctgaggatggtacccttgcttcttcacttgcggtcattgagagaatccaccacaattttttttcacatcctaacctcaatgaggctgacgtgcggagcatactagcatctgagcagcgaaggatacttactggttgccgtattgtctttagccgggttttcccggttggagacgccagccctcacttgcatcctctgtggcagactgcagaacagtttggtgcagtctgcacaaacctggttgatgatcgggtcactcatattgttgcaaactcccctgggacagacaaggtgaattgggcattatccaaaggcaaattcgtagtgcatccaggatgggtagaagcttcagctctgttgtaccggcgcgccaacgaacatgactttgcagtcaaataacaccctccctgagcccgaattcatcatataggcttcggggaagaattcttctc

SEQ ID NO: 31440 - DNA, 1687 bp, Zea mays
  Clone ID: UC-ZMFLB73172G11_FLI
gctttgcgacgccaaccggccaaagctcccggctcggcggcgccgcttcgtttcgttgatggattggtccacccggttccgcacccgaaacccgtcgccggccgtgtcccactttgccggccacaggcggagtcaagcggatagggtatttctccggaccatggcgtcggcggccccggtggaggagccgacggcggcggccgaggcgaaggggcggctgaccggtgactccttcatccggcgccacctcaggaccctcgccccgtatcagcccatcctgcccttcgaggtgttatctgctcgccttgggcgtagaccagaggacataatcaagttggatgcaaatgagaatccatatggtccacccccggaggtcgctgcagcactaggtagtctcaagttcccctatgtgtaccctgatcctgaaagccgccaattgcgtgctgcccttgctgaagattctagacttgaatctgattacatacttgctggatgtggcgcagatgaactaattgatttaattatgagatgtgtgcttgaaccaggcgacaaaattgttgattgccctccaacattcacaatgtatgagttcgacgcttcagtcaatggtgcacttgttatcaaggttccaagactgcccgatttttccctagatgttgatctcattgtcgaagtggttgaacaggaaaggccaaaatgcatatttctgacatccccaaataatccagatggcagtgtaatcaatgatgaggatcttttaaagatacttgatctcccaatacttgtagtgctggatgaagcttatattgagttttcaagccttcagtcaagaatggcatgggttaagaagcatgataatttgattgttctccgaacatttagcaaacgggcaggtttagctggtcttcgtgtgggttatggtgcatttcctctgagcattatcgagtatttgtggcgggccaagcagccctataatgtttctgtggccgcagaagtttcagcatgtgcagctttacagaatccaacttatctggagaatgtgaaaaatttactggtaaaagaaagggagaggttgtttaatcttctcaagggaataccattcctgaagccatttcccagtcattctaacttcattctctgcgaggtcacgtcaggaaaggatgcaaagaaaataaaggaagaccttgcgaagatgggagtgatgatccgccactatgacaagaaggaactgaaaggctatattcgtatctcggttgggaaacccgagcacactgatgcactaatgaagggcctgaatgcacttcgattgtgagagcttttgcacacgatcaagcttttgcacactatcaagcttttgcacaccatcacatcaatgtaaacagtgtattcctttgcggatatatatccgtcaggctggatgcagtctataagaggagattgcatcactccaacgcatgtgaagcccaaacagacaagggtcgtgtgggtttcactatccttttgtttaccatgttgaagtctgtttttgttattcagcgacataacagctattcacaagattatcttgttcagaacaagtgtagcagttgaattcctggtaggtggtttctgatgttgggttgagacttgagagaactgaacattgtgtaggtataaataaaggccaacagagcaatgctgttgtctt

SEQ ID NO: 31441 - DNA, 573 bp, Zea mays
  Clone ID: UC-ZMFLB73173E11_FLI
gcttaaatattggattaatgaacaacgatagcaatgataagggcattgttgactatgaagttagtggggagggactgagagaagcaattaaaggcggggatgttaagggtgtaaagaaacttcttacacagggagtggattctaactactgcgacaaacaaggatttactttgctgcatttggctgctttgtttaaccaaactgaaattgctcttattctcatggaccatggggcaaatgttgaaagcaaaaatgggcaaggggaaactcctttggactgtgctccggcaatgctgcaatacaaaatgcgccaacgggtggaagaactcgcggcttcggcttcgaagggaccactagggtgaactgtgctcgtgctagtttctgctgagttcctcctattccagtttgtgtcaaatgtggtgtcaagaataaaatagttaagtcagctgaaagcttcttgctggtgggacagtgtttggtccgccagtgtataccatctagaaacgttgaatgccagtcacggctcacgcgtgtgaaataatatatattcagcttcatcctacattcctactc

SEQ ID NO: 31442 - DNA, 1798 bp, Zea mays
  Clone ID: UC-ZMFLB73173F04_FLI
tggcaacctagagcatctattgaggcttaacttgagcaagaatgatctagttggattcatccctgcggagtttggtaatttgagaagtgtcatggagattgatttatcctataatcatcttggtggtctgattcctcaagaacttggaatgctgcaaaacctgatgttgctaaaactggaaaacaacaatataactggcgatgtctcttctctgatgaactgcttcagcctcaatatcttaaatgtgtcatacaataatttggctggtgctgtccctactgacaacaacttcacacggttttcacatgacaggtaatcctggactctgtggatattggcttggttcttcatgtcgttccactggccaccgagacaaaccgccaatctcaaaggctgccataattggtgttgctgtgggtggacttgttatcctcctgatgatcttagtagctgtatgcaggccacaccatccacctgcttttaaagatgccactgtaagcaagccagtgagcaatggtccacccaagctggtgatccttcatatgaacatggctcttcatgtctttgatgatataatgaggatgactgagaacttgagtgagaaatacatcattggatacggggcatcaagtacagtttataaatgtgttctaaagaattgcaaaccagtggcaataaaaaagctgtatgcccactaccctcagagccttaaggaatttgaaactgagctcgagactgttggtagcatcaaacaccggaatctagtcagccttcaagggtactcgttgtcacctgttgggaacctcctcttttatgattatatggagagtggcagcttatgggatgttttacatgaaggctcatccaagaagaacaaacttgactgggtgactcgcctacggatcgctcttggtgcagctcaaggcctcgcttaccttcaccatgactgcagcccacgaataattcaccgggacgtaaaatcaaagaatatactcctcgacaaagattatgaggcccatcttacagacttcggcatcgctaagagcttatgtgtctcgaagactcacacgtcaacctacgtcatgggcactattggttacattgatcccgagtacgcccgcacctcccgcctcaacgagaagtctgatgtctacagctacggcatcgttctgctggagctgctgaccggcaagaagccagtggacaacgagtgcaatctccatcacttgatcctatcgaagacggcgagcaacgaggtcatggagacggtggaccccgacgtgggagacacctgcaaggacctgggcgaggtgaagaagctgttccagctggcgctcctctgcaccaagcggcagccctcggaccggccgacgatgcacgaggtggtgcgcgtccttgactgcctggtgaacccggagccgccgccgcagccgcagcagcagcagcagaaggcgcacgcgcaccaccagctgccgccgcagccgtcgccgccggcctacgtcgacgagtacgtcagcctgcggggcaccggcgccctctcctgcgccaactcgtccagcacctcggacgccgagctgttcctcaagttcggcgaggccatctcgcagaacatggtgtaggggaagacgtagacgttcggtgaggcgccttgagtgaggccgattgcagggggagtagtttgactgacattttgtgggacgcagcgcaggagattaacatgggactcagtagctagggtgttgttagctgtaaaaaaagtcatgtgacgcaagagcagcggagcttcttcctcttcttt

SEQ ID NO: 31443 - DNA, 1672 bp, Zea mays
  Clone ID: UC-ZMFLB73173F11_FLI
tttatccggcattgttactcttccctgcggagaacaaaagtgcaatagcatatgaagggggaatgtcagtgtctcacttaatcgaatttttggagtctcatgtgagcaattctcgctatctattggaatataaaggttagtggataaacatcttgtgactgcattggttctacttaaaatatttgaatttgcttatagttctgtaatgtgtgttagcttacactttacaacactattgtttcttagaagttgtgttaatcttctcatacatgaaagtactaagtatcaaccttgctcatgtgctgtttacctgtttggcataccagcctagtttaccattcttatctagactggcagctgcttggctgtggattacgttgttctagacgttcctagacgttccccaaacctgaagtgccaccacactaaggatatgtgctgtttggttcggcacatgtggttcggcctaatatataatctgtaacaaggatcgggtacgggttgtgcaatgctgataccacattaccgcccacctcccagctttgtctgattatgcccgcggactcccttctcctgttctcttctcacaactttgtcctctccactcaacttgcggatctcacattctcgcccctatgttccgtgtgttgccagcctgtttgttcccagccaacctgttacctttgttgctagccaaacacaattaaggaaatgcaagatgttaaaaattcgaaccaaacgaattgtattttgccttacactgtgacagattgcactgcaacctgattacattagcagtacgactcccaggaccgaaccaaacagcattagttaaaatgtcacatgcatgttctgaagcttattttcttcttggtactcaggatttatgtggaagaagagaatgacaccacagcacgatgcaccacaggcaattcagtttaaagtcagtgataaaggtagcggcaatgttggttctgagttaccaagtcatccaggtgtcgttacaggatccatccttactgccactaagaagctcgggaccgcagttccatttgataatgccaaggtgctcattgtgtcagctgattctcatgaaggatttcatggcttgatcatcaacaagcgattaagctggggtgtcttcaaggatctggatagctcgatggagcctattaagcatgcaccacttttctatggtgggcctgttgtggtgcagggttatcatcttgtaagcttgtcaagagtatcctcggaggggtacatgcaagtcataccaggcgtctattatggcaacatagttgccacaagccgggtagtcacacggatcaagttgggcgagcaatctgtcaatggcctgtggttcttcctaggctactcggggtggggatacaaccaactttttgatgagctaactgaaggagcatggcttgtgagtgtgaagccgattgagcatttggactggccgaagagttgaaagggttctgtggacctcacgcctcagctgtttctttaggaaaattcagttcatcttgcacatatctgccactctgcccacactgcaccgtgacattgtactgagcttttttttggaacatagcagcactgtgttttcataccattcacaccgtactatggtcacatattttttatacatagtacttttcttatagtg

SEQ ID NO: 31444 - DNA, 860 bp, Zea mays
  Clone ID: UC-ZMFLB73173G01_FLI
tccgttgctcgcctcgggtcaaaccctaagcagggagttgatttatccgctgcagccatgagtaagttgcagtctgagtctgtcaaggatgccatctcccagattgttggggatgccaaggagaagaataggaagttcactgagactgtggaacttcagattggtctgaagaattatgatccacagaaggacaagcgtttcagtggctctgttaagttgccccatatccctcgtcccaagatgaaggtgtgcatgcttggtgatgcccagcatgttgaggaggccgagaagatgggacttgactacatggatgttgaggctctcaagaaaatgaacaagaacaagaagcttgttaagaggcttgccaagaagtaccatgctttcttggcatcagaggccatcatcaagcagattccccgtctccttggtcctggtctcaacaaggcaggcaagttcccgaccctggttactcaccaggaatccctcgagtccaaggtgaacgagactaaggcaaccgtcaagttccagctcaagaaggttctttgcatgggtgttgccgttggcaacttggcgatggaggagaagcagatccagcagaacatccagatgagcgtcaacttccttgtttcccttctgaagaagaactggcagaatgtgagatgcctctacgtcaagagcaccatggggaagccatacagggtgttctaagtatgctcttttgtgaagtctgctaggttctggcaccgaggttttattgaattaaacttttgttaagagtatgtttttggacgatcctatatttcgtcctggcgctactatgtttcagaatggtggtactactataagtatcctggcgtttt

SEQ ID NO: 31445 - DNA, 2526 bp, Zea mays
  Clone ID: UC-ZMFLB73173G03_FLI
ggcacttgacacttatcacgcggccgtcgtcgccgtcgcgcgcgcgtcgtctcgtctcgtctccccaaccgcacccggctcgtgccactgacatccgccatttaacgcgctctgcctctgatcctgcttctagacttctagtagatatgagcgctgagcgagcgcgcggccatggtggctaggctgctagctggtgctggtgctgctggttttctccgagctcccattgaataacacgctggagcattgatggtccctttcagatggtagatggcgcgcatttacgccgccacggtacgagccgagctcccctcgctcctctgctatatagcgctagctccaccatccaggccactaccctcccccaccgccattgctcagcagcagtagtaaagccacgcctgacagacagctggttcatttctggttgctgccttgctggtggtagccctcggcgcaggcagccaagaacagagagagcgagatggatgtgaacgacgtgctgctagtggtgctggcggcggcgctggctgccatgtggtggcgtcggtgctccaagaccggcggtgtcgacggcctcccgccggggcctccgggttggccggtggtggggaacctgttccaggtgatcctgcagcgacggcccttcatgtacgtggtgcgcgacctccgggagaagtacgggcccatcttcaccatgcggatggggcagcgcaccctcatcgtggtcacctcggcggagctcatccacgaggcgctggtgaagcagggccccatgttcgcgagccggcccgaggacagccccacccgcctcctcttcagcgtcggcaagtgcaccgtcaactcggcgccctacggccccctgtggcgtgctctgcgccgcaacttcgtcgccgagatcgtgtccccgcaccgcgtcaagggcttctcctggatccgggagtgggccgtggacgcgcacttgcgccgcctccgcgccgagctcgcggcggacggtgccgtgcgggtcatggccagctgccgcctcaccatctgcagcatcctcatctgcatctgcttcggcgccaagatccccgacgagctcatccgggagatcgaggaggtgctcaaggacgtgatgatgatgaccatgcccaagctcccggacttcctgcccctcctcacgccgctcttcaggaagcagctcaccgaggcccgcggcctgcgccgccgccagctcaactgcctcgtgccgctcgtccgcgcgcgaagggacttcctccgcgacggcaccgcggcagcggcggacggcgtggagatgatgagcgggcccggggaagcgtacgtggactcgctcttcgacctggagccgcccggccgcgggaagcgcctcggcgaggaggagctcgtcacgctctgctccgaggtcatgagcgccggcacagacaccagcgccacagcgctggaatgggccatgatgcacctcgtcctcgaccccgccgcgcaggagcgcctctacgacgaggtcgtcgccaaggtcggcaagaccgcccggatcaccgaagccgacgtcgaggccatgccctacctccaggcggtggtgaaggagacgttccggcggcacccgccgagccacttcgtgctgtcgcacgcggcgacgcgggacacggagctgggcgggtaccgcgtgccggcggacgccagcgtggagttctacacggcgtgggtgacggagaacccggcgacgtggccggacccggacgcgtggcggccggagcgcttcctggagggcggcgagggcttcgacaccgacatcaccggcacccgcgcgctgcgcatgatgcccttcggcgccggccgccgcatctgccccgccgccacgctcggcgtgctccacatccagctcatgctcgccaacatggtgcgcgagttccgctggctgccgcccgccggtgagggcccgccggaccccaccgagaccttcgcattcaccgtcgtcatgaagaacccgctccgggcagccttcgtcgagcgggccacgacggagacggcgacaaccgcgtgatgagcgacaacgaaaagtaaaaaaaaacagagagaagttactagtacaagttactctttcactgggctctggcagggtgggtaagttgctgcaacgtgcgtgtcgtgcggggttaattcggtcccgcactctgcggtataaattacagttattaattaattagtccacggggaaggtgcgtgatcatcatatactgtatggatggattgatcggttcatcctacctgttggctggtcgacggatggctggatggacacgtgccgccaggcggatggatggggttcatgggaatgcaacgcacgatgctgtcctcatatcataatttttttttctttagtgtttctatgtgctattaattttaatagtagaagtactgtttcttagctttctatttctcttttctctgttcaatttcatccaaaagtgtacctacgtacgtactagctattgcatgatcgatgtggtcaatatattggttgtc

SEQ ID NO: 31446 - DNA, 1568 bp, Zea mays
  Clone ID: UC-ZMFLB73173G05_FLI
cactatttagcacatttgtattagtagttagcttttcgctattaatgcaggatcttacttatctctctcacaaagtttcttggttcttgtgtctaaatttggcggtaaatttacagtccgcttctcttctcttctttttcatccatctcagcatttagctagcttctaacctcttaattatacttactcttagagcaagcttaataacgcaacctatagtgagctttataagagcaagtttaacaatagtgcctatggtgggcttaaaacctctatagccatcaataaaacattcatataatggtgttaactataaggttgactcttagattactattttgtctttttgtcttttatctttttattttggagctcgtgtagcagctgactcttgtataagagcccacttctcctaattttttatctctctcttccacgtaagaaaaaatgtcgtgtaagcaggcctgtagctataataactctctcacgataaaaactgcacatttaatacttcgtcaaactctttcttttatagagtctagctactagtgagtaatctgattttctctctctttatttctctttctttcacatcattataatttggtatatcatcccttgcagcccatctacatcatcttattatatttgttcttagactatctctaacagattttctatactttgcaaacaatgtaatctacagtacaaaacagtactttgcacgacctgctggagatgaccttagtgataacatatgctacctattataccacgatagcgcctctttggtatcgctgcaaacaatgcaagggcaactaaggtagtgtttagttttgtagtatggttttggagtggcttcgcttttaatttattgttgttattattgtttggattgattctatatagcatggagtggttctaaaaatgaaaaattatgctcaaatgttgaaccattttagcttctcaaaatcttttggatggagccgctagcgggaacgaagccattctatcccaagtggcttcgaaaccaaacgctacgtaagttaacacattggccaatattgattcaccggctgaacaagaagagggtggatttctcgtcaccaatggaagacccaggccgtggagcgaggaaggcagaaagcaatctggacagccttgtcctctgaaggctaggctgggcacgcctcaacccagccctgtggatccactcccacctgagcggctgagcctgagggtccagactccagatcaccgagctcacgtgggcgacgcaccgtccacaatgcaaccccacatttccggccaggtatctcgtcgcctcccgtccatagaaaagcacgacgtcgcttgtcgatggcccatgggcgagagagaagcgtgatggagacgtgtgctggaattgaactgcggagagggtcgccgcaggcaacgtatagctcggccggccaccattttctccttccagcaggatatgtacagcatttttattgttgttgttctaagagcaactccaataaactccctatattctttctaatatatataaataaagttttttttat

SEQ ID NO: 31447 - DNA, 1800 bp, Zea mays
  Clone ID: UC-ZMFLB73174A09_FLI
tctgcaaccccccatccacccgcgaagtctcccaccaccgcgccgatccgggggcgggcggcgggggggcctcttgctctctactccacccactcgcggcctcacccgtggatctacgcggtggccggcgggcgcgatggcggaggcggagcgggagcagcgcccgctgccggaggtggagcaatctgtcacgtccataccggaagatcatgaagcaacatgttggggctgtgggcttcggcttgtctttgcgagctactcacctatctacaagtgtgggtggtgtggagccgtcacgcagagcaacaaccagactgcaaggaaacctgatagtatatggttttcccactggaggcgcctacgggacaggctcttcgtggctgtgctcgtcctcttcatgctcttcgttatatgtggtggggtctgggcggtatatcctgttgttttctcagtcagcaagttctgtggcgtatttcactgcacggtagcagctgtgttggctgtatgtaccgtcacaagctattgcttggcctctttgaaatgtgcaggcgcaccaacagacataaggtggggcagctatcccgtggttgggaaaggggatcttgagaactataccttttgtacatactgtagcaaaccaaagccccccagagcacatcactgccggtcgtgtaaaatgtgcgtggtggacatggatcatcattgcccatttattggcaactgcgtgggagcatcaaaccatcaagtgtttgtggtttttctcatttctgtggttatcagttgctcttatgtcgctgggatgaccatatacgcgagctaccagatatggccctccattgaattcccagacctagcatcatcatctcgtcactcgatgagttcttggaaaacggtgctggagatgatcactacggttgcaggctccgccttcttcttgtcagccaggggtctagtcctggtgtatctggcgtttgctagctcgtcagtgaatgctggtatagctgtgttgctgtgccagcagctgagctatatctacgaagggaacacgtacctcagccgtctgagctcaccaccgaatgccttgcagcatggagagaggggtttgcagaacatcgttcggtttttcgggtgcccgtatccagtctccagagctgtgttgcgactgcggtactccaacgctgccaagttgcaggatgattcagggtcgaaacttctttagagagtgctatactctcgattaagacgccgtttcgagtcgagacagttctgttctgttactcggaaattgtgatttgtgaacctcactcagttgaccaccggcagatttgtctgaataactgaagccgttttaggatgcagcactcatgacaacccgtgttcgatctggaggaaggattagttgttcatgaggacgccactcgcattgattaggtagagcaattttggcagatgctgaaatacggtgtggcctgcgcattcattgcctgcagacaataataaggtgctgatggtcttgcaacagactgcagcacctgaaattctgcatcaccatcactgccctttccaactcagcagagcttgaagatggcagcagcttcatccacagctggttgttgcagaagaaatgatcatcatgattaaatctgacagtagtggcttcgagagtgatgctaggatgttggagagaaaaaaaatgtgtcccgccatacctctttgatgttaattcactgacatgtatatatacgatcggaaacgttgtaacgttcacttgatgtaaattattagtcgattaatcatgcc

SEQ ID NO: 31448 - DNA, 1925 bp, Zea mays
  Clone ID: UC-ZMFLB73174B05_FLI
cagcctgccatcacctaccaaatccggcgggcgtccagcggatctccatctggtcggcgtggatcggatcttcggtggtgtttctcgtcttcacggcgattagtggcggcgagccgaccacgtccccgcagcagcagtcagcggcggcttgacgcggtcggacgggtacctctagttggcatcagcgagtgggcgcggggcgccgcaagtctcaccgtccgctggtgtagaggccccgagtctcggcgctatggagtgtaggccgcgtgtctccgcttagggagggccaggggtcaacaaagggacttgtcaagtgacaacatcgcggccttcgggtgttggaggtgtccggcctgttggtgccgtaccacaggattggttcattatttgtgggagatctatatttgtcttaccattctgttcccgcttctagtccccaaatcttcacgggctttgccagatcgctggccatctccttggcagccgcttccgctgtcgccagccatcaccaacctgcgcctcatagtggagcccaggaaaggcggtgggactgagcgagggaagaggagatgactagcttgtcgatcacggtgatgacgctgaacctgcatgaaggcgaacagccgagcgagagccccaacagctgggagaagcgccgggacatctgcgtcagcgtcatcaccagctactctcccaccatcctttgcacccagcaaggcttaagatggcaactggactacctacaacagtgcttgccgggttatgaacagtttggaatctcaagaaaaggctcacaggacaacactgatgaatactgcacaatattctatgaaaaggagaaggtggagcttactgaaggtggcactttttggttgtcggaatcaccatcggttccaggaagcatttcatggggagcaaaggcaccctgcattgcaacatgggcaacgtttcaactcaaaagactagaaccacctggattcagtttccagatcgtaaatacaaatcttgatgaagttagccctcgtgctcgacgaagaagtgctttacttacatggcaacatatagcatcgctgccacccaatttgcctgttatctattgtggaggcttcaatacacagaaggaatctatgactgggcggtttttgcttggcagatccagagaacatggtgttgttggtgatatgagagatgcttggccaaatgctcgagtgcgaaaaaatgtttcactaatacacacatatcatggatttaaaggggagaaacaaggtgccctggaatttcttaaattgatatttagagctctttgcctctgctgggatcgacagacacaggacttgcatatcgactggatcttgtttagaggacgcccattggttcctgcactttgtgaggtcattaatgacaatatagatggtgtttatccgtcgtcgcacttccctatctttgccgagtttttgcttccacgctcagtccgcctagctgagacaccttcatagctattgtgtcaattttctgttctatttttcccaatcttattttgattacggctgattgtttctttcgaccacttcaccatgatcttgcggtaacccccctttacaaccattgttgggtttctttctgttatcccattccgcaaaacaagacaatgcacatgtgcatccttgtatgtttcctgtcactagtccctattatgtgttcgccttagctttgttatcttcttaaagttcactttttccttatgtcattgatttttagactgtcatatataccgtgtatatatatggtatgaatatgttgtcatgtatagtcggccgatccttgtatatgttataccgttatatatgaagtgtgtatagagatattgggagatttcatttggttctgtttccataaaccatgagatctctcctctctttatatat

SEQ ID NO: 31449 - DNA, 951 bp, Zea mays
  Clone ID: UC-ZMFLB73174C08_FLI
gctgaatcctccctccggctcctagtagattcctaaccccctcccccaatcccagcctgacaccggtccacggcagaatcccattccgattcctccctccccgtcccgtctcccctctcgccctaggggccggggggttagggttcgcttcaccgccggcctctccctccgacgcggcaccggcccccgcgcaccgggcccggatgctatgctgctgagctgcaggaccctctccacctggagcagaggttgctttggatgctgtgctaagccaactccaataatagcagtagacgagccttccaagcggttgaggatccaggggcgatcagtaaggaaggctagcctctcggaggacttttggagcacgagtgcgcatgagatggagaacagcgggatccaatcgcagaggagcatgtcttcgatcagcacgttggctcagtccagcgatcagcatacggcaggaagtagcagcaacccgaatgagtttatgaatcaaggtcttatgctctggaaccagaccagacaacagtgggttggaagcaaaaaacgccactctagatctcaacagcctcgagaaccaaagttgagttggaacacaacgtatgaaagtctgctaggaagcaataagccattctcccaaccgatacctcttggcgaaatggtagatttgcttgtggacgcttgggagcaagaaggcctttatgattaggcctgtggagttcattatttgactcggattaatcgcttaatgcagaagctctaggttctcaagcgttatattttctgagcacaatggtgtaccatggatgtatcatgaaacatggcagcatccttatattaagcaattgtaatatattattcctgtcaagcttatgagaacattggatgacattgtacctggtgtttttatatgaaaactttgggtgatctaggcaactggattaaaac

SEQ ID NO: 31450 - DNA, 956 bp, Zea mays
  Clone ID: UC-ZMFLB73175C03_FLI
gcacaagtgatgctgctatgacactcgtgccagaacctgtggcacctgagacggtgggttcgacggcggtcgtcgctgtcatctgctcctcacatatcattgtctccaactgtggagattcacgggcagtgctctgccgaggcaagcagcctgtgcctctgtcggtggatcataaacctaacagggaggatgagtatgcaaggattgaggcagagggtggcaaggtcatacaatggaacggttatcgagttttcggtgttcttgcaatgtcgcgatcaattggtgacagatatctgaagccatggataattccagtcccagaggtaacaatagttccgcgggctaaggatgacgagtgccttattcttgccagtgacggcctctgggatgtaatgtcaaatgaagaggtatgtgaaatcgctcgcaagcggatacttctgtggcacaaaaagaacagcacaagctcatcatcagccccacgggttggtgactccgcagactcagccgctcaagcggctgctgaatgcttgtcaaagcttgctcttcagaaggggagcaaagacaacattactgtcgtggtagttgatctgaaagcacagcgcaagttcaagagcaaaacttaaccgtgacaagcgtagcaacaagttgctaagaacctatagattcggacagtcccaagttcggtcattttagttcgctgctttagtgcattgcttagcccagttccttatttttctcagttctttttaagccatgccaagggctgtattccccgtatacggtacagatcgcgaaatccctatcagggatggtttggtgatatcagggtttatatgttttcctgaccgtggtgactgtcctgttttcattcttctttcttcgctgccctgtattcattttgtcaagctggggcaggcatccaagtatttggcaatgtatatttgagcttgcaggat

SEQ ID NO: 31451 - DNA, 1200 bp, Zea mays
  Clone ID: UC-ZMFLB73175E01_FLI
acacagtgaccctgccccttttcccggccgtctcgctctccaccgatattccgctcctcctgtccagtcctcctcccccgagccggctcattatatcgtccgtcgcgcagcacaacgcaagtttgctagcggccggatcagcagccacaaaacgaggagagcaaccacgctgcacacagagacgcccgtgtgtgagatatagagcaagctcgatcgaaggaaggagggaagctagagatcgtacgtcgccatggggaggggacgagttgagctcaagcggatcgagaacaagatcaaccgccaggtcaccttctccaagcgccgcaacggcctgctcaagaaggcctacgagctctccgtgctctgcgacgccgaggtcgcgctcatcatcttctccagccgcggcaagctctacgagttcggcagcgccggcataacaaaaactttagaaaggtaccaacattgctgctacaatgctcaagattccaatggcgcactctctgaaactcagagctggtaccaggaaatgtcaaaactgagggcaaaattcgaggccttgcagcgcactcagaggcacttgcttggggaggaacttggcccactgagtgtgaaggagttgcagcagctagagaaacagctcgaatgtgctttgtcacagacacaacttatgatggagcaagtggaagagctccgcagaaaggagcgacacctgggagaaatgaacaggcaactcaaacacaagcttgaagctgaaggttgtagcaactacagaaccctgcagcatgcagcctggccagctcccggcagcaccatggtggagcatgacggcgccacctatcatgtgcatccaacaactgctcaatcggttgcaatggactgtgaacccactctgcaaatcgggtaccctcctcatcaccagtttctgccttccgaggcagccaataatatcccaaggagcccccctggaggcgagaacaacttcatgctgggatgggttctttgagttgctctgttaatcatccatccatcagatggatgtccaaactaataaaaggcactcagtgctaccatatgcatatccatgcttaagtgcttgatttgccacgacgtgggatatcttttaaatttatcgttctggtgtgtaataactaattaagaacggcaccttcattctatggttgtggtgtggcacttctatct

SEQ ID NO: 31452 - DNA, 1419 bp, Zea mays
  Clone ID: UC-ZMFLB73175F03_FLI
aagacatcgctactaccccagccacagtacccattgggtatttatctgctcccttgctgaagctggaatgtgcagctcgatcggttagcgctacgagtcctcgctgaatccagccaaatgatccccttgagcttgccagttagagcacgcacctaatataatgctggccttccgtcagaagtaacagctagctaagagaagcacaagaaaaatctggtagcttgagttctgactcgaactcagagatggcttatgcaagccccgggactgatgatacgtcgacagatctagatactgacgagaagaatcacatgttggagctagggcagcttgtgtcccttacagcttctgattccggcaacaaagcaaaggacaagctactaggtcaaaaggcactgcgccgtctggcccagaaccgtgaagctgctaggaaaagccgtctaagaaagaaggcatacgttgagcaacttgagaatagcaggctgaaacttagccagctggagcaggaactccagcgtgctcgccaacagggcatcttcattcctactccgggagacgaccagcagccaaactctactagtgaaaaaggtgctttggcgtttgacaaggactacgctggatgggaagacgagcacaggaagcagataagcgagctgagggccgcgctcagcgcacacgccggtgacgacgagctccggcgcatcgtggacggcgtcatggcgcatcaccacgaagcgttcaggctcaagtgcgtggcagccagggccgacgccttccacgtgctgtcggggatgtggaagacccccgtggagaggtgctttatgtggctgggcggatttcgaccgtcagagattctaaagttcctcgcaagccatctggaccccctcaccgagcggcagctcgcgagcgtacacggcctgcagcagtcctcgcagcaagccgaagagggcatctcgcagcgggtgcaagcgctgcagcagtcggtcgcggagaccctcgcgtcgtcagggtccccgtgcctgcctgtgcctgcaggtcgtgctcctccgcctggcgacgacgccgctccagactgctcggggacgatggcggcggcggttgcgaagcttgtcgctcttgaaagcttggtgcatgaggctgacggtctgcggaggcagactcttgagcagatgcagcgcgtgctgaccacccgccagtccgcgcgggcgctgcttgtgatcagtgactacctttcccggctacgcgctctgagttctctctggatcgcacgaccacgggaatgaattcagctcggcttatgtatctttgtttgacccggccgtggagaaaaataagaatcgaagatgcctccgctccttccatcatcactgcatgtaattgtaatctgaacatcattataaacagccgtaaccgttggcc

SEQ ID NO: 31453 - DNA, 1863 bp, Zea mays
  Clone ID: UC-ZMFLB73175H01_FLI
gggaacaataacctcaaatcagaaaaggttgtcaagtcatatgcagacatagtgaagaagaacacatttgtggaagttgggacaagagatgtggatgtggaacatgcaggctcaggtgatgaatcttctggtggtttcgatgaactggattgtcagtacacaccaacagagagggaggactacgctctatcagatagggtggttcaagtgcaacaacagtaccctgataagcaggcagaagtgcttagctttgatcgggttttacaagggcgcatcacttttcctggtcagcagtggcattctgatttttatgccaatactacccaaactgaggataacgatgcatatagctgcgagtatgcccaagaggtcaaatatgcaattctggatggcagctctaatttgccagaaaccttagattctgaagttgataaactgtccctggggcattctgatttgctggtgcagttgttggactctgaatcatgcacagaagctaagctgattgatgcagtgaaacagttatctggacgaatagaggtgatggagaagaagcaggcttggtccaacaaagaagtcaaacatctacaagggatgaatgagaggttactgaaaagaattgttgaactaaagggaaccgttatgacattgaattctaaaatagatcctttaaccctagatgattcacttaaccagtttgtagaacaatgtttgggttcagaagatgtcatttatttagttggtggttttgatggcttctcatctttgccatcactagactctttttccccttcattggacatactaacaccccttaaaccaatggctgttggcaagtcatattcctcaactgttgcactagagggcaagatatttgttcttggtggtggtgatggtgcttgctggtttgatacagttgactgttatgaccgaagccgtgatgattggtccacatgcccatcgttgacttgtgacaaggggagccttgctggggttagtgtcaacgggagaatctatgcatttggtggtggagatggaaccaagtgtttctctgatgttgaaatgtttgatcctgtgcatggaaagtggataaagaatcaacctatgctggaaaagcgctttgctctagctggtgtagcactaaatggtgcgatttatgctgttggtggcttcaatggtgttcaatatttgagctgtgctgaaagacttgatcctcgggagcctaactggaaaatgctaccaaagatgagtgcaggaaggggctgtcatacacttacagttcttaatgagaagatattctcgattggtggatatgacactagggctaaagcaatggtgtctactgttgaggtgtatgagccaaggatgccatcgtgggtgatggttgaacccatgaactacaccagaggatatcattcttcagctgtgctcggtggctcaatattcacctttggtggggtgaaaggtgaagcagacacaatcttggatgtggtggaacactacaaggaagggtgtggctggatgacaacgggattgaagtcgattggcagaagatgctactgctcagcgattgttctctgactgtaactgccttaaaaccaagtgagaatgaggagactgataataggtaaaactaatatattaatattaggtaaaaactaagaaggctcttgcttagcctgaactgacaacactagacacgatggacctcgtagtttctgaatcggcgaactgtaaaacaaacattgagctgtttgtgttgtccgacactggatggtgggtggatgcatgcatgagtgaatcggtactgaactgatgtagagatgacacttccatggatgaatatccaagtatttgactctg

SEQ ID NO: 31454 - DNA, 1209 bp, Zea mays
  Clone ID: UC-ZMFLB73175H06_FLI
cgccaggttgctcgatgagagcgatgtgtctcatgttgggtccgaggatgaggggctggaggaggattttgtcatcatagctaaccaagctgaggaggaggaggaggatgaggatggagacatggaagaaaagcaagagtggaatggtgtcttcagtgatgttgaagaggaggagttcgattttgaggaggatgagccaaagccaagagtgagacgattgctggatgaacaatttgatttgcttgctttagaggaatatggagacagtgatgatgatgacatgggtgttaaaggtggggaatatgaactgccaaatgaggctattgatgaactgaaactgttccaaaatcagaatgtatgtgttgatgaagaatatagaacaccagcagattttgttcgtcaaaaactggattcaagcatggctgatgaggtggatgaatctgctcgtgtgataaaaaaatgtgctgaatatgctgaaatatatttaaatgaaactgcagaagaggaggtggttgtgcttgtttcggaaagcagtgatgaatctgaagtttgggactgtgagaccattgtttccacattctctaaccttgataatcatcctgggacaattgaaactccaggaatctccagagcgcggttccctagggttttccctggagaaacaactacaacaaatggcatcatcaagcttcatgggaaagagaaactgccagtagaatacctgccacagaggagaagaaatggtgaaaaggagaagaaagtaaagcctgtagaagcttctgtcactgataaatttaaaaaaggagctgagaaggaaacaaaagaggagaagaaggcaagaaaggcagcagtgaaagaagaaaagagagaagcccggaaagcaaagaaagagctcaaaggcctgtataaatcagaaacgcagaaggctcagaaagttgccgctgttactggaccttcttccattcgactaatgtgatggttgatctgtggcacgtttactgatgagcgacgactatgacagtcttgaatccaaaagatcgcctggacaaatgcatcaaagctacgaacgatgtatgataccagttcatatttgtgctatactcatggattttgtcgacaggatacccaatgcttgcttactatatattagttagttgaaggagaagataattatacacacttatcgaaagcatgaaagatccttaaaag

SEQ ID NO: 31455 - DNA, 727 bp, Zea mays
  Clone ID: UC-ZMFLB73175H11_FLI
ccgacatcgtcccttcgtccccacgagcaaccgataatccgccggcgttgagatgttggtttatcaggatctcctatctggcgacgagctcctgtcggattcattcacctacaaggagctcgagaacggcgtcctgtgggaggtcgagggaaagtgggtcacccaaggtcctgttgatgtggacattggtgccaatccatccgccgagggtggtgaggacgaaagcgttgatgacacagctgtgaaggtggttgatattgttgacacattccgtctacagagcaacctccttttgacaagaaatcatttgtgtcttacatcaaaaaatacatcaagaatctcactgctgtgttggagccagagaaagcggatgagttcaaaaagggtgtcgagggtgcaaccaagtttctccttagcaagctgaaggacctccaattttttgttggtgagtccatgaaggatgatgcgtctgtggtattcgcctattacaaggatggtgccactaatccgacattcctctatttctctcatggtcttaaggagatcaagtgctaggcgtgcggcgaaattagttacccatgttgggtactatctatgtactattattatatccaaaactatagttgtcctggctgaattgaactcaaaagggtttgtttgagaaaaaattgtcccaagattggattgcttgttaaagctcaatattgttattgaagtgttattgctt

SEQ ID NO: 31456 - DNA, 1984 bp, Zea mays
  Clone ID: UC-ZMFLB73176E03_FLI
cacagcgtcgtttcaaagctaacctcccgctctttcctttctctgaatcccctgccttctcctgcctccccgtccaagatccccaaaactaccgccgcgccgccgccgccaccatgcctctgtcacaccggaacctcctcctcttcattccctctgtcatcgttctcgttgtcacctccgccgccgccctatccgtctccaccccggttgagctcacagtcacctcgcatccgccggcctccgtccacctcccgcacgcgcgacccctcgccggtggcggtaccgccgggccctactgcacgcgtgttctcctccaaggccgcccctcccgcatccgcgacccgtctcgcttcttccacgcgcttcgactccgcgccaacgccacccgcccccacggcctcgagctctgcttccacagaaatgccacagtggggccatgcaagtgcgccgcgtcccaatggcagaaaatgcccaagagcgggctctggatgcaggtcatctcaccatacgactaccggattcttgatttccgaatgcctgctgacccttcgaggtctgttgtggtgtccactgaggaagaattcttgctccacagggtggtgttctttgtcgtaggattggtgctcatggtggtggcacacacattgagcgagtctgtagtgttctactatggtggagcaatgactattggcattttccttgtgatactgattatactctttcagggaatgaagcttttaccaactggtagaaagagttctcttgctatttttgcatactcctcagtcgttggcatgacgacatattttcttcactatttgtcgggtatgctgcgctcagttcttgtggaaattgggattgctgaagacatgcataatcctcttggaatattcgctctagtatgtgtcgtcttagctggagcctggtttggttactggggtgtccgtaaacttgtcctggcagaagatggatctgttgatgagggtgtggcttattttgttgagtgggctatcttgattgtttcagctgttatgatcctccagagttctctggactatctctttgcctttgcagctctaatcttctgtgtaatcatcaaagcgattgcaagaattgaaggaaagtcaaaagttttacactatatattcggtaattcatctcgttatggagatttctttgaagactattctagcatgaatggaggtcgccaagatggcaagcttcatggtggataccagagacgtacagagagtagaaactctcctcttgcaggctcagcaaagtcattgtcgcaaggtgttgctagggacagcttctattcaacgtttcacaccaccccagagaggaggaaattctccaaagaggaatacgaagcattcacgagagaggagacaaagaaagctatgaagcaactgttgtcctcaccggatttcaacaggtgggcgttggctaacgcggacagaatatctgtggctccaccaggaggaaactacagcagcagcaacagcaaccagcagcgacatcgtttcttgggactgttttaagctgcgcgcgtggtgtgctttcagcaataggagtgctcattgctcaatgatttcgtgcgtgatttgattagcaagggtaggataacatcagtgttccacattttgaagtggcagcaaatatgtagaatattgtagtttagtcgcatcttaggtccaaagttcaaacagcatctgtctcttgtaacattccattcagtgctaagttgagtgaatctcaacttgagttgtatatgacgcttgatcatcattaggataggatgaaagcattcaagtgtttctatgcctgcataggaactaggaagcaagctgtgtgtgcagtattttgggtttgtagtcgggtcatgcgttggatactatttctcatttatgtctctaaactaataatttgttcttgattgtttaatatgtatgaatgatatgatacatactattttgccttt

SEQ ID NO: 31457 - DNA, 1991 bp, Zea mays
  Clone ID: UC-ZMFLB73176E05_FLI
cacgcacggcttccctctcctcgccgccggaggcgcgccgcggaagacgccacaatgagtttcgtcccgtccgttggcgcactagaggatgccctgcctgaccctgcactgcaatccgtcgccgggtgctgaccaggcgagctcctgattcggagccattttgcggggttcttttggggggccccatcgccgtgcttcgtttccctgcccgccttggccgtgcattaatacccgcttccttgtgatagtcctctccctccctccctccctccgccctcacttcccactcacctcgcgctcgtcgcctcggctggttcggttcttgggagtgtcagtctgctgccggttgcggtgaccggcaccggcacgtagacgcagcacttctcggagaccatctgtctgcgccgttccgatgggttgcttcgggtgctttgcgccggaggtggatgaggacctcaggccctccaagcacgacgattcgtcaggggctgatgcgaggaggaaggtcgcgccggatgtggccagcggctacgcgcacagcttcaccttcaaggatctgcttgtggcaactggctacttcaacgaggccaatttcatcggagaaggtggattcgggaaggtgtacaagggcaagatcaacggacagatggtggcagtgaagcagctcgctcgagacggcgtgcaggggaggaacgagttcttggtcgaggtgctcatgcttacagtgctcaaccatcgcaaccttgtcagcttggtcgggttctgcgcgcagggggacgagaggctgctggtctacgagtacatgccgttcggaagcctggagagccatctgtttgacgtgcctctcggcaagaaaccactcgactggaacacgcgcgtgaggatagccgtgggagtcgcggaaggggtttcctacctgcacaacgtagccgacccgcctgtgatctaccgcgacatgaaggccgccaacattctgctgggcgaggacttcagcccgaggctctccgacttcgggctcgcgaaggtcgggccggttggagacaggactcacgtgtccacgagagtcatgggcacctatggctactgcgctcctgactacgtcgtgagcggcaagctcaccatgaaatccgacatatacagtttcggcgtgctcctgctggaactgatcacggggaggaggatctacgacgcctcgaggcctaaaccggagcagagtctgttgacatggtcgaggccgttcctgcatgacaagaggaagttctacaggctcgctgacccggctctgctgggctgctacccgtcctcggcactgaaccagctggtcgtgatcagcatcatgtgcctccaagaccagccccacgtccgcccgatcatctccgatgtcgtcataggcctgaaccacgtcgcgagccagccatacaccgctgagcgcccgccgcccgcgtccgtgagctccccggtgggcagcgggtcgccgcagctcgtcaggacgccgtccagaaggagaggcggtactggtaggaggagcgcgcagtgcgcttagggcttaggcccacaggctgcattgttgcacgcatgtctcgaagagcagcaagatacgtcgtcagctcagtcagatcagatgaggccggctaggaggagggatgttgaaattgatgaagccggcaagttcagttccgtttagccggccggagcctttttgattggagcggcggggtctcgagtgagtgacctctgccttgacagggagatgtagcgaggctgatggttaggaaggagagttcaggttgactatgcatgactaatgctcttttcatatgcttcttcattgttgttgttgttgccagttttgaattctgtaggcagtgtacataggatcagtgtcctctgtaggggggtcgtgggatgttcatcatcaattcaccagccatgtacagagctgccatggctggcctgtagatgcaataagaagttcaccagggtttaagctt

SEQ ID NO: 31458 - DNA, 971 bp, Zea mays
  Clone ID: UC-ZMFLB73176H06_FLI
gcaggagctcaaggcggaggccatgtccatcgcgcgccagttctcgcaggacctcaccaagcgcttcggccgcacccaaagccgcgcggaagggcaggggcagcagcagcagccgtcgtcaggcatcgagtcggccctcgctgcccgcgccgcgcggcggcagcgcgcgcagctcgaccgcacgcgctccggcgcgcacaaggcgctccgcggcctccgcttcatcagcagcaacaaggccaacaacgcctggatggaggtgcaggccaacttcgaccgcctcgcttccgagggtttcctctcccgctccgacttcgcggaatgcattgggatgacggaatcgaaagagttcgcgctcgagctgtttgacacattgagccgccgccgtcaggtgcaggttgacaaaatcaacaggcccatggcatgggccatcttctcctgcgatcaggtgatggcgtacttcacgatctcggcggtggccgtggcgatggaggcggcgatgatcggcaagtacgggtcgcagcagttccagtggatgaagacgtgccacctctacaagcgtttctgcgcgcaggcgggtggcgccgtggcctgcgcggtggcggccagcctgaacatggtcggcgtctcgctcgtctcggcgttcaacctcttccggctgtacggcagcggcaaagggaggaagtgatctcggtcggcctgctgccactaggaacacagggccggcagcgccgcctgttctcttaggttttaacacccagtatggaaccatagcgccatggatggatggatggtctcttcttctccggtttgagtttttctggtgttgggtaggcatacctgtcgtctgtcagcgtagacataaaaaaaaaggtctctgggacgctcgcccatgtatgtatgtatatgatgtgaagtgatccaaggtggttcgcgtgctatggcaataaacgtgtgggaaagcgatgtat

SEQ ID NO: 31459 - DNA, 2351 bp, Zea mays
  Clone ID: UC-ZMFLB73177A01_FLI
gggttttccatcagtgtaactggagtcacaaagacaagatagctggtgatataacaacatggctcgagtggatcctgtcacagtcacttctccgaattgcagagtccaacccacaaggcatggatggtttttggctgcagaagggcaccacactgctgcttagactattgaagagtttgcaggaggatgtgcaggagcgggcggccactgcacttgctacgtttgtagttatggatgacgagactgcaaatgtggatcctgcaaggtcggaggcggtgatgcagaatgggggcatccgaatgttgctggaccttgcaaggtgctcaagggagagcgcacagtctgaagcagcaaaagctattgccaacttgtcagtgaataccaaggttgccaaggcagttgcagatgaaggcggcattacaatactcactgatttagccaagtcgatgaataggcttgttgctgaagaggctgctggtggcctttggaatctctctgtaggcgaggaccacaaggcgtctattgcagtatctggtggtatcaaggccctggtagatctaatatttcgttggcctgctggaaccgatggagttcttgaacgtgctgctggtgcgcttgcaaacctggctgccgacgacaagtgtagcttggaagttgcaaaggctggtggtgtccatgctttggttacacttgctcgatcatgtaaacttgatggcgccctagaacaggctgtgattaaaaagatctcgttcgtcccacgccaaagcgcacttctaaggttccggtcacggtcgcggtcattctcacatgggatacggtgccgctgtttatgggtggggcaggagttcggggttttctcaatgctgcaagaggtctagctaacttagctgcacatggggacaacaatgacaacaatgctgctgtaggtcaggaagctggggctctggaggcactagtgcaactaacaggttctcaaaacgagggtgtaagacaagaagctgctggtgctttgtggaacctgtcatttgatgacagaaaccgtgaagccattgctgcagtgggtggcgttgaagctttggttgccctagtgcaacaatgtttgaatgcttcagaaggccttcaggagagagctgctggtgcattatggggattatctgtttcagaagctaatagcattgcaattgggcagggtggtggggttgcacctttgctcacattggcacgctcagaggttgaagatgttcatgagacagctgcaggggcactatggaatcttgctttttattctggtaatgctctccgcatagtcgaagaaggtggggtgcctgttcttgtaaaaatttgctcatcatcagggtccaagatggcacgcttcatgtctgcactagcactagcatatatgtttgatggaagaatggatgaagttgctttggttggagcatcctcagctagcagttccaagagtgttaatattgaaggagctagaagaatagcatttaagcatatagagacctttgtgctcactttctcagatccacaaatgttctctacggctgctgcctcctcagccccggcagcgctgtctcatgttgctgaagcagtgtttatacaggaagctggacacctgagatgcagtcgctctgagattggtagatttgttgtcatgcttcggaatccttcaccaattcttcgtgcttgtgctgcctttgcccttcttcagttcacaatcccaggaggtcggcatgcggtgcaccacgcaggtctcttgcaggaagcaggagcaggtcgagtgttacgcccagcggcggcagcgacaacagcttctattgaagccaaaatctttgccaggattgtcctcaggaacttggaacaccatcagtcagggacgtcaacatgaacacccagcagaggtgcatcctccaacaaacaaaggcttctgcaacgatgggctgcttggccgatgcagaatggactactttggctttcggagcctttttacatcacaacaacagtttttctgtgcagacagtgactgaagggacttcaccgaaggtataacccacaactctgaagtgactgaatgaaacataagtgacggcccttcccgtatcgggcgtttaaggtgaacctgcagttttctagagattattttgtgtataagtaaaaaacttttagcgtcgatgagaattataaactggcatagctaaacttatggatatttattccttgttcgttattgttgaggtgtgtagcggcgtcatgtagaaattgggctattcctcctagtatacatgtaactttataaatgtactgttatgtattttcccccatgattgattctgtgcatttat

SEQ ID NO: 31460 - DNA, 2731 bp, Zea mays
  Clone ID: UC-ZMFLB73177A03_FLI
tcgccgcggcgcagctcggggcgctcggccggtggaagggctcggcgaggggccttcccgagtacacggtcgtccacaacatcgatggtgccgtcgtcgccgcccctgggagagccaaagccaagcagaggaggtcgcggtcgaccggatttgggaatcctgctcctgccaaacgggatgaacggaaggaagcagaatctttctggggttgatttggcttgaaggaagcgggatctttctggacaatggctgtctagcttcatccattctggtaacaaagaaaaaaacaagaaacatctggtatctgagtccagtagaaagttgtgcaaagagaagagcaaaatatctacaccagacgtctcttttaggtacagagggatggagtcttgtaagaaggtagctgcaagcttgaagtcgtgtgagccatgggggaacatggcattctggacaaacgccgctgggccaggttggaagttgagctttgttgttgagccatggactaagggctttagcgcgtcgtgtgcggcgccatattctgctggagccacagagcatcaattatcgctcgatgagaaggtggataactccaccgttgcatctggttttgatgggtaaagttatctatcagctagattcatggcaggaaaggttttttctattgtcggtatccagcacctaagtaggcctaggattttttcttctatctttaattagcaattgcctttttcagcaaccgttcttatgaatttcttttattgacaacatgaattagtctattttagttcatctctttcttgtcacaaatttaaatgaatataattgtttctgtgaagcccaaaggttccaagtcaccatgaaaaaattgaaatgacgagatctattaatctaattgttgcaccttggaaagtctgaaccatcagagtttaattgtatcacccatttacacaagttcctaccatcagagttcaactgtatcacccatccataagcaattccttttgttgaaatttatgagaagacatatgcctctgttaaggtaaaccttattcttcagttacaaatacttattgttaatgtgatggtcttaattttatggtcgctaccatggcttgcagtctcaggaacttttttgctgggaagccaattccttactgatctaagggacaacatttttgtttgcctgatataaggcaaagtgtgaaagggaaacgcgaaaagaaacgtgtcctggtcccaagtcacctgccatactgaacacgattgatcgcagaaagaaacacgttctggtctagactgacagttttggagctggagccggccatgcgctcgatcagagttccgctgcagccacgacctctctcccgaacgcgcacgagaagaccaggtggaacatatgcaagcaggttctagagcaataaccccatgaatccacatcgggggtctgcatctacacgggcgtgtactccgcaccgctcccctccggccccgaccgccgtgtgctcgttgtagccggggtcgacctcaaccacgacgacgatgcggtctccttgccctaggctcgacctcctcgctgacctcgccctgctccacctcaactcgcgatgaggattgtcggcacgttcacaccgcgccgttgcagaacgttggagcctctcagaactctagaagctgcctaccaccacgcaccctaagataggggcatatctgtgttagtcgcctgcacacatactgaaatatgggcatatccaccatgtattctactcttagttatgttagataaggcttttactctatcatttactgatctggtctgtttttagctccattagcttgttcacaagcttatgttagagaaggcgttatggcttttctcaagattataacatttctgaataactgttctgcataggcatggtaccatcttcatcatgtagctgggatgagctggcaccatgaaagaattcaagtggttaaatcatgcatctgcagaaatattgtactctcaaatggtgggttgctgcgtcacgggagtttgggtgaaggcctgaaggatgtgatgcaaaacgtcgatgcaggtctgggatgtccgcctcattatggatcaaaattcatgacgttctaaaggtgtcggatgagtacctatatactccctcccagaaacaaggcgcctcattacactattggaagctggacgacatggatgactctggcaagatgcggtgggagcacgacgacatggatgactccgaccatgagttcgacaggaagcctagcaacagtacgcagtagcaaggttgacccagaggggcagtggagagtaacccaacaccccctcctccgaccgtcatagcgcttctttcctctggcttcatttcttacctatgtatggatggtcttcaccgctggttacatctagcaagtcctcccaggggtgatctcaattttctcctgatttgctctctcctttgtttttttattgattcatctatgcacatttaatgatctatggcgtgccttcaatgcaattggtggaggcagtgacatgaaggagattgtcatgctgccaaagcacatcaaggacaatgcaaacaaggacagaggaagaccggacatgccatttccaggtggtgacatttctattctcacgcgcccacccaacatttttgcttttactaaatgactatgtgcacgaatgctttgtggatgttgagagggattatctgtgcttgac

SEQ ID NO: 31461 - DNA, 1047 bp, Zea mays
  Clone ID: UC-ZMFLB73177B06_FLI
cagttgcaagataccgtacgaaatatcaggctgctcagaagggtaaggtcggaatagtcctggacttcaactggtacgaggctcttacaaactcacctgatgaccaagcagcagcccaaagagccagggacttccacattggctggtttgttgatccattgataaacggacactatccacagataatgcaagatctcgtgaaggagaggctgcccaggttcactcctgagcaggctaaactggtgaagggctcggcagactacatcggtatcaacgagtacacatccagctacatgaaggggcagaagctggtccagctggcgcccagtagctactctgccgattggcaggttcaatatgtttttgcacgcaatggcaaaccgattggaccacaggcgaattctaagtggctctacatcgccccgacggggatgtacgggtgcgtgaactacctcaaggagaagtatgggaatccaacgatctacataacggagaacggaatggaccagcctggaaacttgacccgagaccagtacctgcgcgacgccacgagggtgcggttctacaggagctacatcggccagctgaagaaggccatagaccagggagcgaacgtggctggctacttcgcctggtctctcctcgacaacttcgagtggctggcagggtactcgtccaagttcggcatcgtctacgtggacttcaacacgctcgaacgccacccgaaggcgtcggcctactggttcagggacatgcttcagaagcattgagatctccagagccgagcctgagcacggaaggtaccattttgttcagcttcgcctagtgtttgggatggcccaatggttcaaatccggctcagtgcctggctaccaaaatgggaacaaaggacagctaccccgatcaattgtgatgttgtgtgtttgtgggtatgttctctctggagtttgagctgtggttattttatcgtgttggttgatcgtgtttgaaatgcttaattcaggactgtgacatctcgagttgttttaactaaatcttataagaact

SEQ ID NO: 31462 - DNA, 2927 bp, Zea mays
  Clone ID: UC-ZMFLB73177B10_FLI
agaagattggcatgagggaaaagagggagtcaaaggaggccaacagtgctgaaatggttgaagagaacaggaaaacaaaacacaatgactcatcagtagttaagcattcaaaattgcccccagtatgcttacgtgtggatcccttgccaagaaagaaacctggaaatggttcttctaggtctcctagtccaccaaggaaggatactgacaacacgaagaaggacgtggatgaggcccagagccagatcctggagcctaaacagtctagtacaagtaaggatatcactgtgtctgaagtgaaagaaaaatcgccttatgaaatgaagaaggaagttgggtttagaaatgaaacagtggaagctgcttctgttgaacatctgcaggaggaagaagctcccacaagtaaagatggccaaaaggtccaagctgctagcactacagttggtgatcaagaaaatgcagccctgaatagcatagaggaagatcatgtgcaagaaaatgctggtgcaggaagcttgaatggatgtgacaaaagaaaaaatgaagatgggacagtgattgaaagtgaaactgcgaaagatgatgccagaacatatggagttaatttgtcagaatcagatgctgcagttcgtattcagtctgcctacagagggtatgatgttcgaaaatggcaacctttggataaactctggaagatcaagcatgtgcatgaacagatgcaagttgtgaggaagcagattcaatgccttttagattcttgcagtaagccaacacaaaaagagcaagtggccataggtgaaactattatgaatttactcctgaagcttgacgcaatccagggcttgcatccaagtgtaagggaagctaggaagtctgttgctcgagaactgatttgcttgcaggagaagcttgatactttatgcaaagcagcatctggagacttgaatcacacagatagtaatgatgatgaatctgaggggaccaagaacattatccaaactgaagctcctactgtaataactgaagcttctgatagaaagagaactattgaactgggtaaggtacaagaaccatgttcagtggactccatggagccatgcaacacagttccatctggagtttcctgggaggtgaggccagatgtagacgctagcgaggagaagaatgaaaaacaagagtcatgtagcaccacagtggacgaagcgcacgaacaagtagcatcatcgatggatatgataagtgatgaagcttttacagctgacaaccaggagcatggaattggagaatcaaatgttacttcagtggaacaagtgactgaagaagagaaaccagcatctgaggatgaagtaaaagagccaccattggtgaactccacggcactattgtatgatactacttcatcaggggattccagtggactgaaacaatacacagcttcgaccgatcagaatctctatgctgaatcaaatacagggtcgtctcctgcatccactgaggacattgacataagtactctggctgtggaaagtgaagtggcggctgagaatgatggcccaattaacagtcaggtgcatgaaactgtagctctagaaaatgtggaaatgaaagatgatgtttcttctgctgaaaatgagcataacagatcgagcagccctgttattcatttagaggacccactagtgtctttgaaggatgttgagcagcatggtccaactcctactaaggactttgttgtacctaacacagaagaccaacaagaagccagagatatcagcttgcaggtacaagctgtggattccatgaaagattgtggcgaagtaccagatggaacaatagaggcttcgacgaatgatgatgaattagaactgggtacttctgcagatgtagaaaagaatgatcaacctaccttgctggaaccaagatcggagtctgtctctgtcccagaactgtccgtcttggatgaatctgacgataaaatgcaatgtggtgtttctggcaaggatgaggaagcacatgtggaggagaaaactgtaactattgctgttgacaaggtaacaggaggttctgcaaatttcgaggatcctctttgtgaggcatcgaggaaggaacctgacattgagaagagtcacccaagcctcggagaagaggaagacgatacaataggtggaacagtcttccctggttcaggtagctgtgaattatcatgtccacaggatggtggcatcgcagtctacgaggggcctgagatggtgtcaccagagagccaaactgatgctcggaaagaaaacatccattcagatgtcgctgagacagatgaatgcaccaagactcagaaggccgctctagcaggcacagagggagaaaattctgctgaagattctggtgtgccggtgtctgagatggacaaatgcaacgagatgccgaaggatgctccgacacttacagcagcaggtgcaaatcctgctgaagacgaagcttccctgaaagacctctctgtgcagacagagaacaaggcttcttctgcctccccagctcctgatgatccgaaggccagcgacgagaagacgctggcagaagagaaccagaagctgaaagagcttctgcaaaagcttctggcgtccggcaacgatcagatgggggtcatcacggacctaagtgagaaggtcaaggtgctggagcggaggctggcacgcaagaagagaccaaaggtgagggtgcacaagccatccaggcatgcttcctgtgtccactgaaaggataagtctgtaaggttttgaggttttatgttgtatggatccccatgttgcttcctgtgtccagctattgtgcactgtgtaggtatagccatgctgtggcactgtgcttcgtcttggacaacacaaggtgtggcatgttctgtattttatgtctgtataatgcatccaact

SEQ ID NO: 31463 - DNA, 2942 bp, Zea mays
  Clone ID: UC-ZMFLB73177E06_FLI
acggtgggcggacggtgggcggcctcgcagtcgcagcctcgctccggaggcggagcgccggagccccgcccacctcccctaaacggccagggcctgaccacccccacctcagtccctctcctgtgggcggcgtcctcccgcgcccatggggatctcgcacctccagcccgtcctcctcctcctcatgctccgggctctcgcgtcgcttcccacgcaggccgccgcgagaggcggccacgatccgtcagatgatggagcccacgggccattttcacgtaaacttcttgaagataagcctcagatcacagaagaaatggtccgtggatatatgagcaacactgagcttgagactgctgtacatgcctttggaagtcgttgttccaatatctccagggtgtacaggtacacgatgtataatgttttacttctgtgataattacatttggagcttctaaacaaacttttaagaccatcagtttttaaggacatgtaaatgactgtgtcattggtgggtagtaccgtagtaatataaggtcaggagcgactgcgtctttgacagacaaaggcccagcatggacagcatcgtcatgagagcgagagaggagagggagctttgggagatggctggaggctggagctaagagcatgtctctccttatggctccgactccagggttgtagggcccccttagtagcgatgtggtcaccattatttgtttagtcgtatgaggtatgacccccccttttttgtattcttgtttttggccatcgtaagtggttttatcttgtaacggccggcttggaccttaaccactttcttcttaatataatgacgcgcagctctcctgtgcttccgaggaaaaaaaggatttaaaatcattatcaaccatgagagaaacaacattgcatgcagtcatgttgatgggtaacaccgtaacagcaaatggataaaatgaaacatgtatctttttgaaaagaaaaccaatcatgaagcgccaacttagggcttgttcggttagagtgagattgggtgggtttaaatcccaagcaagtcaaagttcttctaaattttttccaatcccatccaatccatgtataatgtgaataaccgaacaaggccttatagcataattatatccataaggtacatgtattaattctgttttacttcagattgttttttgaggagaaaaatgtaggttttacttcagattgttgaaatgttccatgttcattggtcatgattagcaattttaagcatttcctgagtaacagaatattttggtttcaatctctttattctgttggtttgttatacaacttctgtactgtccttggatatctcattttttaagtgcactgcttctttctttattttgtgccctcctgttttctcatatgtccacacttcacttacattttatttcttctctctttgagggataacacaaacctgctatcagcattggaaagagtgtgaatcattttccattgtgggtgattgaaatatcagacaagcccaggcaaagggaatctgaaccagcattcaagttcattggaaatgttcatggtgatgagcctgttggaagagaggttcttatgcatcttgcaaattggctgtgtgataactatctgaaagattcactggcaactctcattgttgagaacatgcaccttcatatacttccgacgatgaaccctgatgggtttgctcttagatggcgtggtaatgcaaacaatattgatctcaacagggattttcctgaccaattcttccccgttaacaacgatattgactacagacagcctgaaactagagccattatgaattgggtaaagcaagaacacttcacggcttctgctagcttgcatgggggggctcttgttgccaactatccatgggatggaactagagacacaagcaaacactactacggatgtcctgacgataagacattccagcacatggcatctgtgtatagtcggtctcactataacatgtctttgagcaaagaatttgaaggagggataacaaatggagcattctggtacccaatatatggtggtatgcaggactggaactatatacatggaggctgctttgagttaactctggagattagtgacacaaagtggccaaaagcagatgagcttcctatcatctgggaacacaataggatgagtatgctcaatcttctagcaagcctaataaagtcaggggttcatggaaggatatttgcagcagatacgggcaggcctgtacccggctcagtgatgataaagggcattgattccaaggtaagcgcgagcagcacttttggagattaccatcgaattgttgcgcctggtgagacatatgaagtggtggcatcgatgcgaggcttccggcaaaaatctacacgcatcaggctggagcaggaagccgtcagcctggatttcatcctggacccggatggagccgatgggcagacgaagctgctgccccgtagtaacgaccggggctgccgctgcgacaacgacaacgccgccaagccgttccatgtccacgaagctcacctctggttgtacctccttatcgtgtccgttctcctggccctctacgtagtcttcaagaggaaaacggtgccgaggctgctggcgtatagacactcatcgtcactcagacggcctgttgctgtataagaggaactaattttgtggtctaggcggatagttttgtactacctctgttctcgaatagttgttgtccgctagttaatttttatagctagttcatttttatactaaaatgtgacaaatagaaaagaacggagggaaggagcaactgaagttagtcttctctttgccaaaacggtcggttgctgtataagttgaaggatgggtaatgtaccatggaaatgacattttttttgaatcaatgaaatacatgttgcgttgatgac

SEQ ID NO: 31464 - DNA, 709 bp, Zea mays
  Clone ID: UC-ZMFLB73177E12_FLI
caatttaatgtggacgggagtgtattgaaatgtattgggatagattttgacttgctattaatttaaaccgacccaatatcactcaatccatatggattaacagtgcgaacaaaccctaatggcctgttcgtttatgccggatttcactaaaaatcgttccagctgatcaaaccttatgcggctgattggttggactgctgcccgtggcctgcctcaggcgagcatgccccgtgggaaacagaagtttctagcgtacccgcgcatgcagctttaagagatatttttttgctagcgttgcatctgccagtacaacttgatctcgttttatgcacttaaccaaacaaaggctagtgttgggtcaacgcacgcgctcaaacgggacggacatgtgcagcataccaatcagaaggtatataaattagacaaacaatccagctagaaattatttcgggtgctcaatccactggaaccgaacatgccccaagatggtttaagactagaaaaagactttagcccaggtttccagctccgccgtaccaccagcgctagcttctagtttataacataatatatatttttcaagaaatacaaaagttgaatacaaaggtagaatgagtaagtgagttttaacttaacacgccaataaaaatcactaaagcaaataagatttatgatatcatatatagaaggaacgaataattgtaccgag

SEQ ID NO: 31465 - DNA, 1420 bp, Zea mays
  Clone ID: UC-ZMFLB73177F01_FLI
cggacgccgcccaaatggaggccatccggaagcaggcctcaaagctccgggagcaggtagctcggcagcagcaggcggtgatgaagcagttcgggggcgggtacggcgcagacggcgtgttcgctgacgaggctgaggcgcaacagcactccaagctcgagaaactctacatctctacgcgcgcggccaagcacttccaaagggatatagttcggggcgtcgagggctacatagtcacggggtcgaagcaagtcgagatcgggaacaagttatgtgaggatgggaagaagtatggcactgagaacacttgtaccagtggtagcacactgtcgaaggcggcattaagttttgctaaggcacggtccatgatggaaaaggaaaggggtaacctgctgaaagcccttggcacacaggttgcagaaccactgagagctatggttatgggagctcctttggaggatgcccgccacctcgcccaaaggtacgacagaatgcgtcaagaagctgaagcgcaggctattgaagtttcaaaacgccaaatgaaactaagagaagcatctggaaatagtgatatgatttcaaggctagaagcggctgagtcaaagctgcaggagttgaaatcaaatatgggggttttgggcaaagaagctttggccgcaatgactgccgttgaaggccaacagcaaagactgacactgcagcgtcttattgcattggttgaatcagagagaaactaccaccaaaaggtcctacaaattcttgatcaacttgagagagagatggtatctgagcgccaaagaattgaaggggcacctcctccggtggttgagagttccatgcctccaccgcctgcatatgaagaagtcaatggtatattcatgaggaatacggtcgcagagttggtcgagaccgtggagtatttcctggctgaggcaatccaatcatatcgagcagagagcgacactgagctcaacctttcagctggtgactacatagtggtccgaaaggtgtcgaacaatggatgggccgaaggtgaatgcagggggagagctggctggttcccctacgactacatcgagaaacgagagcgtgtgcttgcaagtaaagtcgcgcaagttttctaaaacttttgctgagacatccatatattcccggggatgtgcaatgtgtattatgcttgatcgtcagaagagaagatctgtaattttgctggaagctgcctgttggatggcttgttcctgcctggccgtctgcattgttcaaattcatgtggcaggaactgaacattattaatgcttaatcttcattcttcagttatcccgttaatatgtatccatactttttgtttgtttgtttgaagcatacaacaagacgagaaatcaagcgctaattattctgtatcgacaacaagatttatttg

SEQ ID NO: 31466 - DNA, 1456 bp, Zea mays
  Clone ID: UC-ZMFLB73177F04_FLI
ccgccaccaccaccagtctgtcccgttccccacctcaccctcttcttccctatactcgggctacacctgcgaccactgctcacctgtcgcggccatgactcccgcatccacctcccctctcgccgccgccgtcctgcccacgaacttatcttccttctctcgctgcccacctcgccgcctcccgcgcatctcctgcctggcagcgcccgaacgcgggggcaacaatgcgtcgaacgcctcgccggcaccgcagcagccgaggtggggtgccgcggtatccgccgcgctcgcggcggccgtggttgccgcctctatgccagcttacgcggacctgaacaagtttgaggccgagcagcggggcgaatttggcattggctctgccgcgcagttcggctcggccgatctcaagaaggctgtccacgttaacgagaacttcaggcgggccaacttcacatccgctgatatgagagagtcagatttcagtggttccacattcaatggtgcctatcttgaaaaggctgttgcttataaggcaaatttcactggtgctgatttgagtgatacattaatggaccgcatggttctgaatgaagctaaccttacaaatgctgttcttgtacggtcagtcctcacacgtagtgatcttggaggagccatcattgaaggtgctgacttcagtgatgctgttattgacctatcacagaaacaggcattatgcaaatatgcaagtgggaccaaccccatgacaggggtgagcactcgaaaaagcctaggatgtggcaatagccgtcgaaatgcatatgggagcccttcatcccctctgttgagtgccccgccacagaagatccttgaccgagatggtttctgtgatccagctactggtatgtgcgatgcaagctgagaggtttgatccaacatggaaactggtcaatggatggtgtacatacattggagattgagtaagagcagaacagtgcagagaaacaagtcgtttttcttttcctcttgccattgttgtaacattgcaacacggaatcaggtaaaattcaggatgtagatgagatatgcacgctgagtactaaatggcatgtatagcatagtatgtatacgaaaatagatcatatcaatcatgtgcttcatgcttgaaaggagtggcccctgccttgttctaaagccaacatagccaaaagcagaagttcaacagaggagtgtctcagcaaataaactttccactccatttcacaaacattgctgatgcatcggcagcaaccagagctgccgttctggatgaaccgcacaaatagacgtccatcgacagcttgactgtttgtgcagattgtcaggtcagttgctgaagtccctccttagcttcagctttcagctagctaccttgttaacatcaggtcctgaaacctgatatcaaataacaatatatatatatataaccacttcggtt

SEQ ID NO: 31467 - DNA, 1215 bp, Zea mays
  Clone ID: UC-ZMFLB73177F12_FLI
ccagtggctgctagccgagacaggggatagattgagagaggcgcgcagatggcgacgccgtcgtcgtcgctttgctccagcttcgcctccctgcggaccgcctccatcggccacccccgtggcatcgcctcctccacgcccaggaaggcattccatgtgagggcatcagctcgggttgacaagttctcaaagagtgacatcatcgtgtccccttcgattctgtctgcaaactttgcgaagcttggtgatcaggtaaaagctgtggaggtggcaggatgcgactggattcatgttgatgtcatggatgggcgctttgtgccaaacatcacaattggacccttggttgttgatgctctgcgtccagtgactgatcttccgttggatgtacatctgatgattgtggaacctgagcagcgagtccctgattttatcaaggcaggtgctgatattgttagtgtccactgtgaacagacatcgaccatccatttgcaccgaacagtcaatcagattaaaagtctaggagcaaaggcaggagttgttttgaatccagcgactccactcactgcaattgattacgttcttgatgttgttgacctggtgctgattatgtctgtgaatcctgggtttggtggccagagctttatcgagagtcaagtaaagaaaattgcagaactgagaaggttatgtgcagagaagggagtgaacccctggattgaggttgatggtggtgttggtccgaaaaatgcctacaaggttattgaagctggcgcaaatgccattgtcgcaggttctgcagtttttggggctccagactacgctgaagctatcaaaggaataaagaccagccaaagacctctagctgtagccgcataaagagctggacgtgtaatcatttactctgtgcaagtttaccagtgatgcgatctgtatagatgtgtgtcttgtccagctatacgtataccggagatgaaaggagacggaggcagtgaagaaatatccttttttttcttctcatttttcacgaggatgccgtgcactgctcccagaatgctgtgtccaatttacaaacgcacaggtggcacatgaactagcagagtagctctctcttgaaaggaaactgtatttggggtcgatgaaccctctggtgttattcttcagactggtaaacgatgtaacatgtttgataatcaataaagtgcgtcgtatggctttcct

SEQ ID NO: 31468 - DNA, 1065 bp, Zea mays
  Clone ID: UC-ZMFLB73177G04_FLI
ggagaattcctcccttgccccgccgtcgcatcctcttcgaagttcgaatcgaatcgcgccgcgatcacccacctcatggcggacaaggagcctgtcgtggagcggccagaggcgggtgaggaggaggaggacgcctcagccgccgccgccgcgggggaggaggaggacacgggcgcccaggtggctcccatcgtgcggcttgaggaggtagccgtcaccaccggcgaggaggacgaggacgtcctgctcgacatgaaggcgaagctgtaccgattcgacaaagacggtaaccaatggaaggaacggggcacgggcgctgtcaagcttctcaagcacaagcagaccggcaaggtccgcctagtcatgcgccaggctaaaacgcttaagatctgcgcgaaccacctcgtggcctccaccacgaagatgcaggagcatgcgggcagcgacaagtcgtgtgtttggcacgctgctgactttgccgatggcgaacttaaggaggagatgtttgccatcaggtttggttcggtagaaaactgcaagaagttcaaggagttggttgaggagatagctgagtcgcttacaaagaacgagggcaaggaaggtgaagatggtggttccacggctggattgctggcgaagctcactgtgagcgagggcaaatctgagggaagtggcaagtctgagtccactgattctggcaaagtgactgaaaccaaagccgacacagccccagctgagtagttggtgtggttgcacttgcacgcagattcgcctggtgctgaactagtttgtctgtccgcgtccagtggaagtttggtgccctttagccatggaatacgattgctatcatttgggcccgggccgagttggaggagtctcaggtgttcggtctggtttggtccgggcttgattttgctaaaaacttgggagtccatgggggttgggaacgtttgatatgtgagtcgctagtatttaactgcatggatcgttgtggattgcggtaaattcataaagtggaccctatatattttttatttcgttcaatacacattcatatcatcaatg

SEQ ID NO: 31469 - DNA, 696 bp, Zea mays
  Clone ID: UC-ZMFLB73177G09_FLI
aaaccaaagacacattgaaacacaaacgaacatcggttacaacgggacgacatcagggccggtggaaagcacaagagaacaagtacacgtataaaatccacgcatcaacgagaacatctagtagggaacaagaactagcaataatataatgacttctttcaaaactccacccatacatggagaagactccccgagggcttccttccgagatatgatgatgcgtgccatcctaacttgaacagggaaccctgtgaagatagttctatccggagaagagctcggttcttatttggggtgacagaaactcgaacaccacgtacgagaagctttggcacaaacacatgcacaccgtgtatatcaacttttatctccattaccacctccggtacatgcatggtggcggtcgtgggcacatgaacggtggcgggggcgggggtggcggcggcggaggtccgaagaatatcggtggcggaaatgggagcggcccaggcggagggagcggtggtcctgcaggaagaaagatttgtggtggtggaagctgcggtggcgggaagaacggttgccttggcggtgaatgatcatggtgtgagcaatcacagtggcatttagccactccgcctccgcctccaccggcaccgccaccgccgccgccgcctccacctcctccggagtgagagtgagagtggtggtgggtac

SEQ ID NO: 31470 - DNA, 1464 bp, Zea mays
  Clone ID: UC-ZMFLB73177H05_FLI
gcgcgcatcgtcatcagttcactagtcagtcgaggtcgaggggcggacgaggagctgaggagagagaagcttcaaggagttggggacttgggggttgccgagctgtccgtctttcccctcccctccacccaccagctacctcgggagggcaaggcaaacatctgcggcctcctttcccgaacccgggttggatggagcgggacttcctggccgcgatcggcaaggagcagcagcacccgcgcaaggagaaggcaggcggaggcgcggaggaatcagcttacttcggggcagcagccgtcccggcgatggactggtccttcgcgagcaagccctgcgccgccccggcgctgatgtcgttccggtcggcggcgagggaggagccttcgttcccgcagttctccgccttggacggcaccaagaacacagcccctcgtatgctcacgcaccagagatcgttcggccccgacagcacgcagtacgccgcgctgcaccgcgcgcagaacggggctagagtcgttccggtctcgtcgccgttcagccagagcaacccgatgttcagggtccagagctcgcccagccttccgaacagtaccgcgttcaagcagccgcctttcgccatcagcaacgccgtggccagttcgactgtgggttcctatggcggaacaagggatgcggtgaggccaaggacggcacaactgacgatcttctacgccggttccgtcaatgtgttcaacaacgtctcagctgagaaggctcaggagctcatgttcctagccagcagaggaagctcagcccccgtggcctgtaagccagaggctcctcctactctcgctccagcgaaggtcacagcgcctgaggttcttctgcctgcgaagcagatgctgtttcaaaaaccacagcatctctcgccgcctccatccagtgtccctggcatcttgcagtctgcagctctccccaggagcgcctcatctagctctaaccttgactccccagctccaaaatcttcggtcccgttagctgttcctcctgtaagccaggctccgccagcaacactgatcgccactacaactgcagcagcaataatgcctagagctgtccctcaagctaggaaggcgtcccttgctcgattcttggagaaaaggaaggaaagggtgacaactgccgcgccttacccatcagccaagagcccactggagagcagcgacacgttcggcagcgggagcgccagcgccaacgccaacgacaagtcctcgtgcacagacattgccctctccagcaaccatgaagagtccctgtgtttaggggggcagcccaggagcatcatcagcttcagcgaagagtcccccagcaccaagctacagatctgatcgtgccgtgcccagtgttcatagatttgtccaggctgaccgatgcagaaaaccataagaatacttttttccactcaagaggaagagattactatcg

SEQ ID NO: 31471 - DNA, 1287 bp, Zea mays
  Clone ID: UC-ZMFLB73177H10_FLI
caatttttgatattacgaagcagatttgtgatgcagttcaggcaagggctgaaaaagacaagaaccatggggttattcttattcctgagggccttgtggagagtattcctgaactatatgctctgcttcaggaaatccatggcctccatggcaaaggtgtttctgttgagaatatctcttctcagctttcaccttgggcatctgcactctttgagtttttgcccccttttatcaggaagcagctactactacatcctgaatctgatgattcagctcaactttcccagattgagactgaaaagctgctagcccagttagttgagactgagatgaacagacgtttgaaggagggcacttacaaaggaaagaagtttaatgcaatctgtcacttctttggctaccaagctaggggagcactgccttcaaagtttgattgcgattatgcctacgcaagtccctcaccagctcatttaataaagcatattgattgttgttggtttaacacgtgggttgttggttttaggttttggggcatgtgtgctaccacatcatagctgccggattgaacagttacatggctacggtgacaaatcttaagaatccagtgaacaagtggcgatgcggcgcgactcctatttcgtctatgatgactgtgaagcgatggtcgcgtggcccttcagccacccaaattggaaagcccgctgttcacatggctagcgttgacttgaaaggaaaagcatacgatgtgttgagacagaattcttccagctttttgttggaagatgtctacagaaacccaggcccgctccagtttgaaggaccaggtgccgattcaaagcctatttcattgtgcgttgaggatcaagactatatgggcagaataaaaaagttgcaggaatacttggagaaggtgaagaggattgtgaagcctgggtgctcgcaggatgttcttaaagcggcgctgagtgccatgtcttctgtgacggaaacactgaacatcatgacttcatcttctaccggccagactccactgagtcattaggtaccatttcatggtatggatcataatccccacttttttcagtggtggcgattaacgagtttaggaacagcaaccctggtatcatacgggttattcttttgtagccttttggagagttctatcggttttggattcggtagtttatgaaggcttgttgatgagtttgagctcgaatagcttttgaaacagccggatgatgccatctttaataaaccaaattctgtgactgcattcacatttctgtc

SEQ ID NO: 31472 - DNA, 635 bp, Zea mays
  Clone ID: UC-ZMFLB73177H11_FLI
tttcattcttaaagctggtaaagcattgagttcaaagaaagcagaagttcgggtgcaattcaaggatgtccctggtgacatttttagaagcaagaagcaaggaagaaatgagtttgttatacgcctccaaccatcagaagccatgtacatgaaactaactgttaagaagcctgggttagaaatggctactgaacaaagtgaacttgatctgtcatatgggatgcggtaccaaaatgtcaaaattcctgaggcatatgaacgccttatcttggatacaataagaggtgatcagcagcactttgttcgcagagatgagctacaggctgcttggaagatcttcactcctttgctgcatgacattgacgacggcaagctgaaggccctcccgtatgaacctggcagccggggacccaaggaagccgacgaattgagcgcgagagttggatacgtgcagacccacggttacatatgggtaccgccgacccttgcatagaagagaatacgaattgtttgtacctaggaagatccgagtgtcctacaataaagctgtgcgtatatgctcattttcgctatatcgcctgccgttgtaataatgttgtgctggatatgaaataaaattgcgtgttccattcagt

SEQ ID NO: 31473 - DNA, 975 bp, Zea mays
  Clone ID: UC-ZMFLB73177H12_FLI
ctcttgtcttgctcagcaatcatatcgcacgagatactattgactccaagtacagaccagtccagtactgttgtacggcctggttccgtggaacagagatgggcaagcaaaagattgtgctcaagttgcccctggatgacgagaggaagaggaggaaggccttcaaggcagctgtgggaatgaacggtgtgacgtccgccacgatggagggcgacaagatcaccgtcgtcggcgatggagtcgaccccatcacgctcacaaccatccttcggcgcagcctcggctacgcggagctgctcagcgtcagctccggcgacgacaagaagaagggcgacgggtacggctacgggagcgccggtggcatgatgtacggtggcggcggatacggtggtggcaaagagggcaaggagagcaaagagagcagcggcggcaagagcagtggcggcggtgggggctacggcggccattaccaggcgatgccgtcggtctcgtaccctgccgcctaccagcagtacaacgccatgccgccctaccccgccgcctactcctatcctgcagcatacccgcagcaagaacaggaccctggatgcagcatcatgtgaaaaaacatcctacaagttaatctgaggagttggttgaaggtggccgaacacatggagatcagattaacatggttgggttcgtccggacaagatgatccatgctgccttgagctgtgcaacagaggatgatgatccaggatgtgatgggcattatcatccgtgtaattatgtacagggttggccagcaaagttgacggattgatctgttggagttggaggtgttggtggaatgggaggcagagctgttccgcaagattatgattcaagtgcagactaagtagcagcaccgatgtttccttttcgtttctttcgtttttggtaaagttgtagtgtttgttgaagaaaaggattgcaataaaattagtgtttatac

SEQ ID NO: 31474 - DNA, 654 bp, Zea mays
  Clone ID: UC-ZMFLB73178A01_FLI
ccgttctcaaaccaacctaggcaattcgccgcagcctctcaccctcgcgagtcccgacctcccgcagccgccgcacagatggcacccaaggcggagaagaagccggcggccaagaagcccgcggaggaggagcccgcgacagagaaggtggagaaggctccggcggggaagaagcccaaggccgagaagcgcctcccggcgggcaagtccaaggagggcggcgagggcaagaaggggaaaaagaaggcgaagaagtccgtggagacctacaagatctacatcttcaaggtgctgaagcaggtgcaccccgacatcggcatctcgtccaaggccatgtccatcatgaactccttcatcaacgacatcttcgagaagctcgcggccgagtccgccaagctggcgcgctacaacaagaagcccaccatcacctcccgcgagatccagacctcggtgcgcctcgtcctccccggcgagctcgccaagcacgccgtctccgagggcactaaggccgttacgaagttcacctcgtcttaggatccttgtaatggtcatgtgggcgtcggcggtaggcgtggctcagtttatgtgatactgctagcgatggatgatgatgatctgcgtgtaattgaattaaagaattgtgctgatctttct

SEQ ID NO: 31475 - DNA, 2816 bp, Zea mays
  Clone ID: UC-ZMFLB73178A08_FLI
cgtccgtccgcccgtcgaatggcggctcccaaaccctaagccacagatcccttcccctgcctcagcttcgaacgccctcgcctcgccgccggtctttgtgtactgccgctgtgtccgtcggcgcggatcaagggtccgctccgctgcaccccgcggggagaaaggggcgggcctcggcgtcctccgctcgtcgcccgagtgtctgagtactatcaggtgcaagtccagccgaactgattgcatgacatatgaaatagcgagcgtcgaatgaccttctctatggatatggatttgaacgcatcaccggtgcctgacgatgatgagcagcagccttacaatgaaccagtggaggctgagtatgctcaggaggaacatgttgaatctgctgtcgcaacattgcgccgggaacgtgaagaaagacgcaagagactaaagagagagcagcaggatgatgggtcaaggctacattcccagcagattagggttgattatgctcctcaacccaaaaggcatagtcgcatcaaagaggcacctcagggctggttggactgtcctgcatttggggagccaatagataaaatcataccatctaaagttcctctcgatgaaacattcaatgagtcagtgcctcctgggaagcgatactcctcaaagcaactagttaacaaacaaagaaaagctggtcgtgaaataggtctggtgattgatttgacaaataccaccaggtattattcaccagctgaatggacgaagcaaggtactaagtatgcgaagattgcatgcaaggggagagatgcggtacctgacaatgaatctgttaataagtttgtctatgaggcaatgatattccttgatcgacaaaaacattcaaagaatcctaaatatattctggttcactgtacccatggtcataatcgtaccggtttcatgattattcattaccttatgcgcacacacgtatcttgtgttgctgaggcgataaatatgtttgctcaaaggcggccacctggcatatacaagagggactatattgaagcactatattcattttaccatgaggtccctgagaatatgatgatagcatgccctccaacaccagaatggaagagaccagatgatctcgatttaaatggcgaagctaagcaggatgatgacgacgacaatggtgatccagaaccaccgcgtaatgaatcagaggataaaatcatcaccaacgacgatgtgttaggggacgaagtgccatatgaccagcaagaagctttgcgtgtgctatgttataagttgcttgaaatgccccttataaggggacattcacaatttcctggatcacatccagtttctcttaacagtgaaaatctgcaactacttagacagcgatactactatgctacatggaaagctgacggaacacgatatatgatgcttataatgagagatggttgtttcttgattgatcgaaatttttgctttagaagggttcagatgcgctttccccataagagccttgaaggtctgcatgatatgaccttgattgatggagagatgattatagacacggtaccagattcaggcttgaagagaaggtacttggcatatgatcttatggcacttggtgcagtgtccaaaactaagttgccgttttctgaaaggtggaaaatgctggaagatgaaataatacgaccacgttattatgagaaaaataaatttgagagtggttctaagagcaatccgttgtacaaatatgacatggaattattttcggttagaagaaaagatttttggctgctctcaacagtaaaaaaggttcttaaggtgttcattccatccctttgccatgatgctgatggccttatatttcagggctgggacgatccatatgtaactcgtactcatgaaggtctcctgaagtggaaataccctgagatgaattctgtggactttctgttcgagcttacgaatgataatcgtcaactggttttcctttatgagagaggaaaaaagaaactcatggatggtgcccggatagcatttactgacgatgtagatccatcctctatcgccgggaggattgttgaatgctcctggaataaggaagaacagtgttggtcctgtatgcgtattagatctgataaatctactccaaacgacatcaacacataccggaaggtgatgaggagtatcacagataacattaccgaggaaaagcttctcgaagagattgatgagataagtcttctcccgatgtatgctgataggatgcagcaggctcatacaaagatggcacaacaacagcggcggagattgccaccacagtgctagccagtgctggggcgctctcctaccgccctagccagctgctggcttccgtagctgtgtaattagtagaggtttcagtagccccatatgatgatggctggctgggtctggcctgccaactaattctttgcacctcatttgtgtcttctccctgccctcccacccacctgtataggcgtcgccgcagagtagtttccctgtaaattgtgtactctatgttctcccatattctcccctatggttttatttttcatgggtgtagaatagcgtttaacaagagggtggtgttctaggtacattagtgtacgcgttactatctctcggtgttgcggttgccttgtgctagaataaatatggttaccatctgttgctgatgggtcatgtggttcccccggcggatatcatgtggttgcgtggtatgggttattttcgtcttctgttttgttcgcacctgatccgatccgatcttttgttcaatgaagaagaaaaaaattattggt

SEQ ID NO: 31476 - DNA, 805 bp, Zea mays
  Clone ID: UC-ZMFLB73178A11_FLI
ccctctccgaaatcaaggtagcgtacaccgctgcagtttctagagccctctctgccactcgtgatcccactagtcacaatgcctgccctcgccaagcccgcctcccgcaccgccaagcccgccgcggctccgaagccgaagcctgccgccgccaagccgaaggcggccaccgctggtgcctcccacccgccttacttcgagatgatcaaggaggctatcacggcgctcaaggagaggaccggctccagctcgcaagcgatcgccaagtatgtgggggacaagcacggcgcgtctctgccggccaacttcaagaagatgctttccatccagctccgtgggtccgcagccaagggcaagctcgtgaaggtcaaggcttcgtacaagctctcggacgccgccaagaaggcatcccccaagaccaaggctaagccggcaaaggccgccgctgccaagaccaccgcccccaagccggccaaggccgccgccgccaagtcaaagaaggcagcggctgccaagccaaagaaggccgctgctgctgggaccaagcgcaaagtgcccgagaagaaggtcgtggcgaagccgaagaagtcccccgccgccaaggccaaggccaagccgaagaccgtgaagtcccctgcctccaagaaggcacggaaggcctccgcatgagatgggttgctttaggtctaagctctgattgtggttggtgtcagttaggtactgtacaaactaagtgtgtgcccaaagtgtctcaggcggtgtgttatgtgcttagcaagttctatctatcagagtgttttagttt

SEQ ID NO: 31477 - DNA, 1853 bp, Zea mays
  Clone ID: UC-ZMFLB73178B01_FLI
ccagctcccaaaattccctctccgtcgccgccgctcccaaaatcccctctccgtcgccgcctctcgccaggtcgtttccaagccccgttgggggcctcgccggcgccggcattggatataacctcgcccgctacctccgtccgaatgcagggccttgatatttaatgggctggaggtggtacatgcatgttcgcagtgacaagaacacattgaaacgttggtttttcattgacaagaggcttgttaaagcatttttggtgcactaaccttttgttgtctgtaattggtttcacaacaagtttcttggggggttgtgtcctgttgatggatttgaagacaggcctcaattcacctgttattgctgaccatctccctacgttagcattgcctgctgctgtcatgactttcacaacacctactagctttccctctccggggctttgcttgaacactacaaagaagatacctctgcctggtaagattgaagaagttcgtgctgctggatggcttgatctcatgaaggcctcatcacctacccgcaaaaggcagatcaaggatgtcatctgtgatgctcaatctgatcttgatttgcaatactgcaactggacagtgaactatccttctgctttgatctcatttgaggcaattagtgatcttgctgggagtaaaaggttggcattgtttcttgactatgacggaacactttcaccgattgtggacaatcctgaaaatgcattaatgtctgatgagatgcgtgctgcagtgaggcatgcggcatcacttttcccaactgcaatcattagcggaagatctcgtgataaggtttttgactttgtgaagctaaatgaattgtactacgctggaagccatggaatggacataatgggccctgttaggaagactactgactccaatggcgtggaatgtattcggtcaactgatgtgcatggtaaagaagtcaacctgttccaacctgctagtgagtttttacctatgatcactgaggtgtatgaaaaacttggtgagagtgttaaggacattgatggtgcaaggatggaagacaacaagttctgtgtatctgtgcattaccgtaatgtggcggaagatgactataaaaaggttttccatcgtgtaactgctgttttggaaggttacccttgcctaagactaacccatgggaggaaggtttttgaggtccgtcctgttattgattggaacaaaggtaaagctgtggagtttttacttgaatcgcttgggctcagcgagagtgaagatgttctccctatctatgttggagatgacagaacagatgaagatgcattcaaagttctgaaggcaagcaaccgtggctttggaatattggtgtcgtctatacccaaagagagtgacgccttctactccttgagggatccagctgaggtgatggaatttctgagaatgttggcagcatggaaggagcagtccacctgatatcagttttgctgggtctgagaatgtgggcagtccacaagattataaatattagcaagatatataatatataatgctaatcaaataaatcggctattaggaggactcgagccatttttttgatttggcattttataagaggctaccacatttccatactttttcagtcccactttgttcttgtgttaaatgggttttcaaacagttcaattctttcattatttaggttccttaagtatatatgcaaatattcttaaaagggattttttggttccttctagtgtttcactgtgttgcgatttttgtattctgcaatctgtaaagaaccggttcttcgtataaacagcatttgacaatgcctcatggaaagtcaagttatgagc

SEQ ID NO: 31478 - DNA, 1839 bp, Zea mays
  Clone ID: UC-ZMFLB73178B02_FLI
cttggatcctcgacaagcaatggccatggaggaggagcagacaccacccgagctgcgctacctctcgggcctgggcaacaccttcacgtcggaggcggtgccggggtcgctccccgtggggcagaacaacccgctagtgtgcccgctgggactctacgccgagcagctctccggcacctccttcaccaccccgcgcgcccggaacctgcgcacgtggctgtaccggatcaagccgtcggtgacccacgaacccttctatccgcggaaccccaccaacgagcgcctcgtcggcgagttcgaccgcaccaccaccgtcgccacgcccacgcagctgcgctggaggcccgccgacgtgcccctccacccgggcctcgacttcatcgacggactctacaccgtctgcggcgccggcagctcatgcctccgacacggatacgccatccacatgtatgctgctaacaagcccatggatggatgctccttgtgcaatgcggacggtgacttcctcattgttccccagcaaggaaggttatttatcacaaccgagtgcggaaggctgctggtttcacccggcgagatcgtcgtgatccctcaaggtctccgatttgctgtcgacttgccggatggcccctcgcgtggctatgtctctgagatcttcggcgcccattttcagctccctgatcttggcccaattggtgccaatggcttggcttcgccgagggatttcctttccccgacagcatggtttgagcaggagcaccaccctggatacacaatagtgcacaagtatggtggcgagctgttcagcgccacgcaggatttctctccattcaacgtggtcgcgtggcatgggaattatgtcccttacaagtatgatctgagtaagttctgtccattcaacaccgtcctcttggatcatggcgacccgtcagtgaacacagttctaactgcgccaactgataagcctggcgtcgcgttgcttgattttgtaatattcccacccagatggctggttgctgagaatacattccgcccaccctactaccaccgcaactgcatgagcgaattcatgggcctcatctatgggatgtacgaggctaaggccgatggttttcttcctggtggcgccagccttcacagctgcatgacaccgcatgggccagacaccaagacgtacgaggcaacgatcagccgtgctgctgccaacgagccatccaggctcagtggtacgttggcgttcatgtttgagtcttggcttatccctcgcgtgtgcccatgggctctggattccccgtgtcgggacctcgactactaccagtgctggatcggattgaagtcacacttttcacctcctgctgctgctgttgatgatgagaacgagtagctgcttacagcagcagtcttggaacggacaggcagcgaactgaaactggggtggatatgctgtacgtcgtgtcctgcttgctgtcggtttctgaagcttttagctggcagggacaggcggctgttggctttgctgattgcccaaccctctcctgtaatattaatcctaccagagaaacttaaacttgactcaaccgatatgctattaaataaataaagcaagcaagttaggatacgagttaccagagttgtcacggttccagcaacccgtagccagtgctgtcacgtatcagtgagtacgtgattgcgacaaaaacacacacacatgttaatatgtatttttgttagtcacaataatcgtgtgttgttattaatcaccagaactgtagaggacctagatggtttcatacgcatcacactcaacttgttagtcacaatatttgacacaatgacgac

SEQ ID NO: 31479 - DNA, 562 bp, Zea mays
  Clone ID: UC-ZMFLB73178B06_FLI
gagctcaacagaagagttcgatgtctgaggggcaacctgctggtggagatggcaaggagggcaataccgacaggattttgcagttggaaggagagctgagagatatgaaggaacgattactcaacatgagcttgcagtacgcagaggtagaggctcagagggaacggttagtgatggagcttaaagctatcaagaaaggcaggtggttttagcaggatgcggagttgttgcctgacataaaacatgaggctgacaccacaggtgggcatcatcaagccgtgctatgctccagcaccagtgagactaagagcaagcaagtgcaagtgcagagtcagacagtgatatagcctggacgtgctaactggtgctggagcatgtgtctctcactgaagctccgtatgatgcggtacccagcccttgtttaactggacgtgctaacttgcgttgtcccctagagtcatgatcccgttcttattggtatttatttttaatggtatataattaatatatacaccagtatgtattgagtttgactggagagtgatggtcagttgttgatacc

SEQ ID NO: 31480 - DNA, 1686 bp, Zea mays
  Clone ID: UC-ZMFLB73178B09_FLI
ggaagacctgggcgccattaaaatgcaaattcttcatttggttggctgtcaagaatcgatgttggacagcggacaagctcgctaaacgtgggctggctcaccctgctgcttgtcctttgtgtgatcagctgaggagactatccaacactgtttagtctcctgtgtcttttctagagaagtgtggtttctgttatttgccaaattgaggttgtctactctgtcgcctcaggccatgtttggtttctttagtccagggactaaagtttagttaggggactaaagtttagtccctaacatgtttggttttaggggctaaaaatagtaagaatatactaaatgactcataagaagactaaaatggcattctgctattagtacaatgaactaaatgaggggtaaatgtgaaattaatatggtttagtccattttagcacatatgtgaaggactaaagactaaattattttagtccatattttagtcctagtgtttggcaaaaaaaggactaaatgggactaaaaactagagactaatctttagtccctctaaccaaacactccctcagtctagtgacaagttcctaaactggtggagtagagctgttaaaacagttccaaagaagttgagaaaaggccttaacacactcatcatgttggctgccttggaaatctggaagcatcggaatgattgtgtattcgaagggcaatggccttgtgttcatactgttttgcaggttgtggccaatgaatgtaccctttggtgtgctgcgggtgcctctgctcttcaggagctcctcactcgccaacccactcttagggtttaatttgagtcgctcgtagctgtgtggcctgtgtaggtgtgtgtttctgtaaagtggctgtttgggtggctgatgatgggcctgcgcatttcttgccttctttgtacctggtgctgactcttcggtcgctccgtttctgttttgtctcatttcttaatgaattgactcacagatcttctgcgatgttctaaaaaaagtttcattgcatcttaccatttctcccatgttaggtccatttgggagatggcatcaagttcattgaagacagtgttgctgcaaatcagtcagtaaatggcagtaccagaaatgcattcaaaatacttatcctcgatgttgattcatctgatctaagctctgggctgtcttgcccaccagaaaactttgtcgaagatcctttccttctaatagcaaaggagttccttttggagggcggcctttttgtcatcaatttagtctcgcggtcaacctcagtgagggaaacggttgtttcaagactgaaagcggtcttcgaacacctgtactcactgcaacttgaagaagacataaatgaggttctgtttgcatcaccgagcggaagatacctagaaatcaatgacattagtgcaggagcctccaaactgcaggacttgctcaaaattccggtggatgtagaatcagatatacagaagttgcagaaactccagtaacaatctcacctgacgcggagcaccatccatttgcatccacttgatttaggtgctgttcagttctcaccccagcagggcacaccaaaatgtcctttgttttgctcgtggaagccaaattaggaccagctgttttgtacaccagaattttgtctaactgcgctatagaaaaattttggcctgcc

SEQ ID NO: 31481 - DNA, 1703 bp, Zea mays
  Clone ID: UC-ZMFLB73178C07_FLI
tctagacgacgcgcttgtgtgcgtggccggacctgaaaagccggttcctcccccgaccccggcgccccaccgcagccgccggctcccaccgcccggcgcaccccgtcacctctccaccaaccggatacccggacggatccgctcccacctggatcctgatccggggaagtcaaaggggagatcgaagcttgagcagagggagccaaaatggtgaaggacacgcggtactacgacgtgctgggcgtggacccgtccgccaccgagtccgagatcaagaaggcgtactacgtcaaggcgaggctggtccaccccgataagaacccgaatgatccgcaggccgcggagaagttccaggaactaggagaagcataccaagttctcagtgaccctacacagcgccaagcttatgactcacatgggaaagacggcatctcaacggaggggattattgatcctgcaacaatttttgcaattctgtttggtagtgagctttttgaggaatatattggtcaactggcaatggcatcaatggcttcacttgataattttggtgaagatgagcagattgatgcaagaaagctgcaagagagaatgcaggctgttcaaaaggatcgggaagaaaaacttgcagagacactgaaaaaccggctacacatctatgtgcaaggaaataaggcagaattcatccagcatgctgaagcagaggtgtccaaacttagaaatgcagcatatggagttgttatgttgaacactattggctatgtatattcaaggcaagctgcaaaagaacttggaaagaaagtgatgtttttgggtgttccatttattgccgaatggtttagggacaaaggacattttatcaaatcccaagtaacagctgccacaggtgcaatagctcttatgcagttgcaagataacttgacgaagtatatgagtgctgagggccagtacacagaggaggaacttgaaatgtacatggaaaaccataagaaagtcatggttgattctctgtggaagcttaacgttgctgacatagaagccacattatcccatgtctgtcaaatggtacttcaagacagtagtgccagaaaggaggaattgcgcctccgtgctaaaggcttaaaaactttaggaagaattttccagggggctaaggtcaaccctagcgagggggaaacatcacaaacgaagaatatagacaacatggatggcaatgacggcagctcccctgactcgtccccaaatagagaggcacagttcactcctaatcagcctcctgtcccgagcccgtatgtggaggcgcctcatgttaacggagtctattgtccgttcccgatgccagcagctccgcctggcgcaaggagggatcgaatcccttgagtccagataaaacctgcttgtaaaatgggctctgtttaacattgcctataatactagatcatttgcatgatgaacctggagcagaggggaacacaggagtctgtcaggtgttctctgcacctccctgttattttggtcgcgtatgcttggtagcagccgtgtcttgtgtacaggtgtgttttgctattgttgatcgatgaagctgtaggtgtacatgttatgatgcccattatattattctgttgtcggcctgctgtattttagcataaacagtggatacatttgcatccatgggaaatgaaatgttctagtcattgtttccc

SEQ ID NO: 31482 - DNA, 675 bp, Zea mays
  Clone ID: UC-ZMFLB73178D07_FLI
accgccggaggacgccgcgaccgtggcaccgacctcagtgccgtcgtcggccgcctcggccatcgatttcctcaccctgtgtcaccgcctcaaggtacaagatactactaatcatgctcgtactaatcagtcgtcccctgatatgttgttccaaggccgctagggtcacaccggagatgctcacaatatttgtaagaaattctaaagtgcacacagaaagtaaaagtggctgcaccgccttgtgcatgtgcaatgatttggatcaattcattcatgcccctaatttctttgatgcttaggtccatcatatcacatgattctggtgcctattccttttgtttattctttagaccaccaaaaggaaaggatggataaaccatagcatcaagggccctgagtccattgctgatcacatgtaccgaatggccttgatggctctgattgctggtgatctgcctgctgtggatcgagaaaggtgtatcaaaattgctattgtgcatgacattgcagaaggtaggtcaaggtcatgtgtgccatgcagtacacaaattgttggtgtcttgtatgtccaatgcacttatctgatcatgaaaactacacttcacctgcgaatactttattagcttaaatgcttatttcatccacaaatccctttagtaaattagtcaaatattt

SEQ ID NO: 31483 - DNA, 1912 bp, Zea mays
  Clone ID: UC-ZMFLB73178D10_FLI
ctcgtccactcccccagtcacccccgcgcccgtctttgctctgcctctccgcgccgcagagcagagcagagcatggcgcccccacgccctctcctcgccgccgtcttcctcgccgcggcggttccgctcctcctttctccggcagaggcggggacggtgggcgtgaactacggccgcgtggcgaacaacctgccgaacccagcggcggttgtgcagctgctgaagcagcagggcgtggcgcaggtgaagctgtacgacgccgaccccaccgtgctgcgcgccctcgcaaacaccggcatcaaggtggtggtggcgctgcccaacgagcaggtcgcggcggcggcgtcgcgcgcgtcctacgcgctgctgtgggtgcgccggaacgtggcggcgtaccacccggccacgcagatccagggcatcgccgtgggcaacgaggtgttcgcgtcggccaagaacgtgacggcgcagctggtcccggccatggccaacgtgcacgccgcgctggccaggctgggcctcgacggggccgtcaaggtgtcgtcgcccatcgcgctcacggcgctcgcgtcgtcctacccgtcctcggcgggcgcgttccgggaggacctcgcgcaggccgtcatgaagcccatgctcgacttcctggcgcagaccgggtcgtacctcatggtgaacgcgtacccgttcttcgcttactccggcaatgcgggagacatctccctcgactacgccctgttccgccccaacgccggcgtgctcgacgccgggaacggcctcaagtactacagcctcctcgacgcgcagctggacgccgtgttcgccgcggtcagcaggctcggggagggctacaacggcgtgcgcgtcgtggtctccgagacggggtggccgtccaagggcgacgccaacgaggcgggcgcttcggcggcaaacgccgcggcgtacaacggcaacctggcccgccgcgtgctctccggcaacgccggcaccccgcgccgccccgacgccgacatcgacgtgtacctcttcgcgctcttcaacgagaaccagaagcccgggccgacctccgagcgcaactacggcgtcttctaccccaaccagcagaaggtgtacgacgtcgagttcgtcctcggcggcggcggcgccagccagggcaacggcggcctcgggtggcaggagaacggcggcggggcgagcagcaccagcaccaacccgccgagcggggtgaaggtgacgaccggggaggcgtggtgcgtggcgaacgcgatggccggggagcatcggctccaggcggcgctggactacgcgtgcggccccggcggcgcggactgcaaggccatccagcccggcgcggcgtgcttcgagcccaacaccatggtcgcgcacgcatcctacgccttcaacgactactaccagcgcaagggccggtccatcggaacctgcgacttcgccggcgccgcctacgtcgtcaaccaggcaccgaagatgggcaagtgcgacctcccatcgacggtctgaactgaagcagcagcggcgaggaccgtaacgccagcggccatctcgaggaacaaaagaatcgatggcaggcaggaggcagcacagcagctcagctcatcagtcgccctagagactggactggactctgggggacgccggaatctttgcccaccctttcagactttctttaccgctgcagctttgactccagccccgcagcgacgccgtagaacgaacatcgctgtactaggctgtagctgtacgccttcctttttgcagctttggctaatggtgggtgtgtgtgtggatatgtttgtttagtcatgaccagcactactacttctactactagcatgctactattaaaatctgatgaccagtacgtatagattaattaatttaaatggtttagcct

SEQ ID NO: 31484 - DNA, 934 bp, Zea mays
  Clone ID: UC-ZMFLB73178E05_FLI
agcaaataaagtgtcagcccgcatccgtgctcataaagctgatgtcaatgctgttaccttcgctgatgaaactggaaacgtgttgtactctggaagtgatgatagtctctgtaaggtgtgggacaggcgttgcctttcaggggaaaagtcagcaggtattttgacaggtcatttagatggagttacatttatcgatagccgtggtgatgggcgttatttcatctccaattgcaaggatcagagaatcaaactttgggacatcaggaaaatgtcttccgtcgtgagatctcgcccagtgagtctagtggactgggactataggtggatgccatttccatcagaagctcataatcttaagcatccaggtgatcagtctgtggccacatacagaggccattcagttctgcgaacacttatccgttgctatttctcccctgtgcacagaggtacatatacacgggatccagtgacaagtctgtacatatttatgacgtggtaaccggggaggctgtcaagaggctttcgtggcatggctccatcatcagagactgcacctggcatccatactacccaacgctcgtcagctcctcctgggacggcttcgttgcccggtgggaggcctcgggcgacgacgacgaccattcggtgctcgtcgccgacgagatgagaggaagcccttactaccggagatacggcgatcccttggtgatgtagagatgtctgcaaagtggttaacaccaaatggtagtgagcatgtactttgctttgttgtttgggaattacaactgagcagcatgtacagtgccgtttggctcatgtggttgtatagccttacgataaataatatgtagggatacagaaagaacacatgagatcgaagcgactttataaatcctatggaatttatagaaacagacaagatcctctttcctac

SEQ ID NO: 31485 - DNA, 1810 bp, Zea mays
  Clone ID: UC-ZMFLB73178E09_FLI
ctctgatctgagcaggaggaggaagaaagccaaaggccttccttgcgcttccagggcaaagaagatctgaggccgcggcggagcgtgacgacgacgaagtcggtcaggatgagccgcgaggataccctgaaagtgcagaccctcgagctcaaggtgaacatccactgcgacggctgccttaagaaagtcaagaaggtgcttcacaagatcgatggggtgtaccagagcacggttaatgcggcggagggcaagggtgacggtgtccgggctcatggacccggacaccgtcatcaggaagctgcacaaggccgggaagccggcgcagctgtggggcgccaccgccaagcctgccgtggcgacccagctcgagaaactgcagctcaaggatgccgggggcaagggccagggccagccgcccaagaacgcaggcggcaagggtcagccgcccaagaacgccgccggcaagggccagggccagggccagaagcagcagcagcccaagggtggagcgggcggcgccggcgccggcgcgaaagtggtggcgctgccgcactcgcagccgacgccgcagcagctgatgcagatgcagcagcagatgcagatgaacgggatgaagtttgctcatccggagctcatggccatgggcgcaggtcgcatgccgatgccgatgccgttcccggcggcagcgcaggcgcaggcgcaggccgccgcggccaaggaccccaagaccgtcaagttcgacctcccggggggcgaggagttcggggacgacggcagcgacctcgacgacgagttcgacgaactagacgacgtggatttcgaggacgacggcctcgacgacgacgacgacggcgacctgtacgacggccccgggatggtgatgaagcccatgggcatgcccccggccgctgctgccggtggcggcaacggaaacggcggcggcaagaagggtggcggcgggaacgaggtcccggttcagatcaatgggaacgccagcaacggcggcggggcgaagcagaacgggggcggcaaaagcggggccaagaacggcaagggcggcggcggcggcggcggcgtcgttgccccgggcggcgggaaccaggctgggcagggcaagccgaaaggcggcttccccggcggcgccggtctcggcgggccgatgatgggcggcgcgccgccgccgcatgcgggcatgatgatgaggccgccgaacatgatgggcggcgcgggcggtttccccggcatgggccagatgggcggccacccccacatgggtggcggcggcatgccgcaggcaggcgggggcgccgcgcacggcatgccggctggtggcagcatcagcatggccgctggcggaatgcctggggccgggttctttccgcgcggcgttggcggcggcatgccggccggcgcggagatgctgggcatgtcgcagctgcctccgcagcagcagcagcacatggcggcggtgatgcagcagcagcagcagcacatggctgcgatcatgcagcagcagcagcaacagatgatgatgatgaacgggcacggccacggccacggccaccatggccacggcgggtacgggtacgggcgcccggcgatgccgcagtacccgccgccgccggcgtactactacccgatgccgcagcgccacccgcacgacagcatgttcagcgacgagaaccccaacgggtgctcggtgatgtgaggcgaggcgcggcggcggcctgcggggggctccggagaaagtgaaccaggcaaccagccagccagccaaccggaaggagggagctcgggcccgtcaggtcgg

SEQ ID NO: 31486 - DNA, 1358 bp, Zea mays
  Clone ID: UC-ZMFLB73178G12_FLI
catacacaagcacaagcgcactctagcaatggcttctgaggttgtccgccctagcgacgccgagctactaaaggcacaagccgacatatggcggctcagcctctcctacctcacgcccctgtcactgaggtgcgccgtggagcttggcatccctacggcgatctaccgccatggcggggctgcctcagccgctgagctggtcacggcgctgtctctcccctccactaagctgccgttcctccgccgcctgctgcggctcctcgccgcgtcgggcgtgttcaccgtcgacaagcagagctcggaggaggagcggtaccgcatcagccccgtgtcctacctcctggtggacggcatccctcacgaggaccacatgaaccacaccgctctggtgctcacctgcacctcgacgcgctacatcgaggcggggatagggctggcggagtggttcaagagggacgtggtcacgtcaccgttcgaggagctgcacggggcgactctgttccacgagagcatggggagcctcgacgcagatttccacgacatggcgagcgaggccttggacgcccacgacaacttcggcatcgagatagctatgcgggagttcagggacttgttcgaggggatccagtccatgacctactgctgcggtaacttcggtgatgacaagggtgccagggccattgtcaaagccttcccacacataaaatgcactgtgctggcccctcccaagatcattgccaccaaaccggccgatggagcgatgataaactatgtcgaaggtgacatgttcagtttcattccacctgctcaaactgtcgtgctaaagcttgtgctgcaccacctgaccgatgaggagtgcgtcaagctcctggctcaatgccggaaggcgattccttcacggaaggatggcgggaaagttataatcggtgatattatgattgaccactctgggcctatgctggaaactcacctcctgatggacatcggcatgatgaccatgacaaaaggacggcagagagatgaaaaagaatggagcgagctcttcaccaaagcagggttcagcgaatacaagatcctgaaggaatttggagctcgtgttgccttcgaagtctatccgtgagattgcacctggactatacatatatatttacatacatatatgtatgtgtgtgggtgccttgcgtggcttggcgtgatgatgtcataaataaaaagggtgggtgtgcttgcggtattcatggatggccatggatctgagcacatgacgttggatgctttcttaaggctctcgtggatcttctatatttggaagaagctgtaaaataatatatcgccatctagtgttggcgttggcttgt

SEQ ID NO: 31487 - DNA, 1356 bp, Zea mays
  Clone ID: UC-ZMFLB73178H10_FLI
ctttcctgttgtgcctttcgaatgctctgagaatcaagctacccttgaagagttcatcactaaagcaaaagctgctttagtgtcagttggaattattagggaccctataatgtgcaatggtaaaaatggtggaaagcttactggtaggattattgattctgatatgcatgatgttgcccgtttccttaatcgtattctgggattgtttccagacattcagaatagattatttgaccttttcacaagcatacttgatatagtcattcagaatgcacgaattgaaggacaacttgattctggtattgttgatatcaaagctaaaagtgtcgaaatgaaagaatcaccaaagactgttcatgttgatactgtgtccggtgctagtacaatattatatacttttacagttgaccgtggagtttcttgggagttagcaaattcaatacttgaagaaaggctgaaagataaagcaggttcttctagtgatggattctatgagtccagaaaagaatgggcggggagaagacactttctgctagctttcgaaggttcagctgaaggattgtacatagtaattcggccagctgttggggaggcttcgagggaaatgtctttggttgagcttaaaagcaagtacaggaaggtctcatctgttgacaaaattagtaaaggctggcaagaagagtacgactcttcatccaagcagtgtatgcacgggccaaaatgcaaactcggaagcaattgcacagtgggtagaaggttgcaggagattaatatattgggtggtctaatacttcctgtatggggtgcagtagcaaaggcactggctaagcaggcacggcagattcacaggagaatacgtgtggtccgcttggagaccacgactgagaacaaacggtttgttgggcttatcattccaaattctgcagtggagtctgtactcgaaggtttgcaatgggtccaagatattgacgaatgatttggcaagaagctactcctttggcagtccttcctttgctttggaccaaatctttgtcgctgaggcaacttgtgcatttcgcttgtgaaacggttgtggttgtacgcagtcaggaaaagtatacgacaacggctgggccacttttgtgttatatatatgaaagttacgtaaacgtttatatcagaccggggtgctgttgtaagttagcctgttgttggaggctacatgcctaaatgctgcacgatgtagtggtgtggagatgtggtggctgtggctcttatgggcctgtgttgtttccctgacaagggtggctcatatggctggcctgagaccgattgggttggggtttgttttctataaacaaaacgaggttgaggatt

SEQ ID NO: 31488 - DNA, 999 bp, Zea mays
  Clone ID: UC-ZMFLB73179A10_FLI
aaagcaagccatgtggaggagggctttagcgatggtcctgttcatggctggcgccgcgctgctcgccggggctgccggcgccggcgcgcagcagggcgtgtggagcatcatcacccggcccatgttccagagcatgctgagccaccgcggcgacagcgggtgccagggcgccttctacacctacgacgccttcatcgaggccgccagcaagttccccggcttcggcaccaccggcgacgagcagacgcgcaggcgggagctcgccgccttcttcggccagacgtcccacgaaaccaccggtggatgggcgactgctccggatggaccgtttgcctggggatactgccgggtgaaggaacagaaacagacggacccaccctactatggacgaggacccatacagctaactcataagtacaactacaggctcgccgggcaagcgctgaacctgaacctggtgggcgacccggacctggtggcgagagaccccgtggtagccttcaagacggccatctggttctggatgacgccgcagtcgcccaagccctcgtgccacgccgtgatgaccggcgactggaggccctccgccaccgaccgcgccgcggggaggctccccggatacggcctgaccacgaacatcatcaacggtggtctagagtgcggcgaggaccgctccaccgacggcgccaaagccgccaaggaccgggtcggctactacaagaggtactgcggtatgctcggagtggggtacggggacaacatggcatgcgggagccagaagccttacggaggatgatgacactagtagctgatctatggttgctgcaatgcaagccttcacgtgtgtttgcctctctacctaaagaataaatcaagctagcagcaaacctaccttcggcgtgtgtctacttgcttatcatagtgtgtgtccgtgtatgagagatgatgtactgtcacgaactcacgtgtgtatgagagaggatacatggtaagactatc

SEQ ID NO: 31489 - DNA, 1672 bp, Zea mays
  Clone ID: UC-ZMFLB73179B07_FLI
ggcgtcttcacaaacgccggcgcaaactctcgcccgagcccgacagatcttcaattccccattccgcccaccgatcgaccttcacgccagtctcggtctcttccgaaggcgtcgcgcgcggttgtttgagaggagaggaggaagatgagggagtgcatctccgtccacatcgggcaggccggcatccaagtcggcaacgcgtgctgggaactttactgcctcgagcacggcatccagcctgatggccaagtgcctggagataagaccgcgggacatcacgatgatgccttcagcaccttcttcagccagactggtgctgggaagcacgttccccgtgcaatcttcgttgatctagaacccactgtgatcgatgaggtgcgcactggcacgtaccgccagctcttccaccctgagcagctcatcagtggcaaggaggatgccgctaacaatttcgcccgtggccactacacaattggcaaggagattgttgatctgtgccttgaccgtatccgcaagcttgctgacaactgcaccggcctccagggcttcctggtcttcaatgccgttggtggtggcactggctctggccttggttctctcctccttgagcgcctgtctgtggagtacggcaagaaatccaagctgggcttcactgtgtacccatctccccaggtgtcaacctctgttgtggagccttacaacagcgtgctctccactcactcactcctggagcacactgatgtctccatcctgctcgacaacgaggccatctatgacatctgcaggcgctccctcgacattgagaggcccaactactccaacttgaatcgccttgtgtctcaggtgatctcatcgctgactgcttctctgaggttcgatggtgccctcaatgtggatgtgaacgagttccagaccaacctggttccttacccgaggatccacttcatgctctcctcctacgcaccggtgatctcttctgcgaaggccttccacgagcagctgtctgtggcggagatcaccagcagcgcgttcgagccggcttccatgatggtcaagtgcgacccacggcacggcaagtacatggcttgctgcctgatgtaccgcggcgacgtggtgcccaaggacgtgaacgccgcggtggccaccatcaagacgaagcgcaccatccagttcgtggactggtgcccgacggggttcaagtgcggcatcaactaccaggcgccgacagtggtgccgggtgccgacctcgccaaggtgcagcgcgcggtgtgcatgatctccaactccaccagcgtcgtcgaggtgttctcccgcatcaacagcaagttcgacctcatgtacgccaagcgcgcgttcgtgcactggtacgtcggcgagggcatggaggagggggagttctccgaggcacgcgaggacctggccgccctggagaaggactacgaggaggtcgccgcagagggcggcagtgatgacggtgacgaggaggaggaatactgatctgcttgcatgaatctgtttggctgtcgagccaggttgtggtgttgaaaaacctttgtttgtgtcctggcccccctgggtaatgtttgggtgtttccttccatcatcacttgctgaactgctctagtatttgcatttgtaattgaagtctgtcgctttaagcactcttggttct

SEQ ID NO: 31490 - DNA, 2025 bp, Zea mays
  Clone ID: UC-ZMFLB73179F02_FLI
agggggcaaaaagggagaaatttcctctcacaaaaccctcgccagcttatcccccttcctccctcacacgatctctcctcgacggctaacccggattgccgtctcaggctcgggatccgggcgctcgcggcgatggacggcggcggcggcgctggcggcgcggagggggagctcacggcgcaggagacagcgctctacgaccgccagatccgcgtctggggcgtcgatgcccagaagagactaagtaaggcgcacgtgcttgtgtgtggcatgaacggaaccaccatcgagttctgcaagaatattgttctagctggagttggaagtttatccttgatggatgataatgtagtcacagaggaggatctgaatgcaaatttcctaattcctcctgatgagagcatatatggtggtagatctcgagcccaagtttgctgcgagtctttgatagatttcaatcctatggttcgagttttttgttgaaaagggtgatccatcattaattgatggagaattccttgacaagtttgacattgttgtacttagccgtgcatctcttaaaacaaagaaaaagcctggaggagcaactgaacaacaggagttgacatattctagccttcaggtagatgatttagttttcagtgacttctaaaatctaaagtctggtaaaattattttgactcaaacataccttgttcatgttttgctccctgaatatagtgttctttttggctgcaacatttgctgtgaaatatatgtgatgcaatgcaactgatagatgttaatgctatagaatgaagcaatttgaattacattttttatatttgaatctgagaagtgcaggtagtgcagtggtgagagcgattgaagcagcctctctgtatttgttggagaaaggcttgccttgggttatcccttccctagaccccactcctgggagcctctggcacttggtctgctcctttgtatttgaatgtgaatgatgtgccattgttttctgtaataatacaattacatttactttatttagttgtagcgatgaaaactaaaaaagactgctgtatactgattttcagtttgcctttaattctattgtgggtactttagtttgaactttaacttttttttggcaataggtgccttgaaattagctctagtctttgatgtattaagaattgcatctacctaaatgtcggcttttctatgacaaatctattaactggcagtgcctaatggcatatttgtttaaacttcatagctcaatgtatagtgctattggaagagttatgtctgatttgtttccggaaatctgcatcttatcattttggatgctttaatttggaaatgcattacagttttgttgaattaaacacaattgcattcaattttgttcatacaggaagctatctctgtgccttggaatagtctaccgaagaagacggcaaaattatactttgctatgagagtactggaggattatgaattatctgaagggcgcagccctggcgaaacaacactttctgatatagatgcagttctggctcggaggaaggatatgtgtgataaaatgtctttgaatgagtctcgtattcctactactctcgtggaacgactgctagcagctggaaagaaggagcatcctcctgtatgtgctatccttggtggtattcttggtcaggaggtgatcaaatcgatatcctgcaagggcgatccagtcaagaatttcttctatttcgatgtggctgacggtaaaggtgtcatcgaggatatcccaccaccaccacctgcaaaataaagcactcagctgcgtaactctcgactcgacttggttcactaatcgttttctgtacccactcagcttcgaacatgtagtagcaacttttagatctagagccatgtgaaaaaaggcaggtttgactttaacccagatgtttagggatttttcgagcagcaaactgtgacagtatgtatgcattgacaatttaaagctgaagtctggaccggtttccatgcttttgggggcgg

SEQ ID NO: 31491 - DNA, 495 bp, Zea mays
  Clone ID: UC-ZMFLB73179H05_FLI
gtggactgtatagtgatttgcccagtagacaactgaaagtgaaagttaaagatcgaagtgtgattgttacaacagatgcagagacaaaagttagccaaccttctagtttgcaagaattgatagataaggagaccgccaactacacccacgggcgatgctttgtgcgtccatccggtacagaagatgtggtacgggtgtacgcagaggcatctacgcaggtagaagctgacggtctcgcaaaatccgtggcacaccatgtggaacgcctccttggataacaatttgcagccttgtttgcgactattgagtagactacatcctctaatttcatttctcttacattttgacctgtaacttatacaaaacgtgagtccaattttttgaattttgtgattgatatgcgctgaacagagatcttgtatcgagacatgatacaagatatttgaacgggtgtaaatcattccgtcgcaatactcattcttcttgattggttgc

SEQ ID NO: 31492 - DNA, 1195 bp, Zea mays
  Clone ID: UC-ZMFLB73180A09_FLI
tcgagcgtagcatgcaggaacttatttgccgtgcgctcccaggtctccgctcgcgtgccttccagtctgtctcacactagctgctgtgggacgatcgaagtgggtgtgtcagctagctagctgcgccgtgaccacgcacatgaccgcagtgcgcgcggggctgatcaagggaaagtgatcggatggagctggagctcgggctcgcgccgccgaacccgcatcagccgctggctgccgccgccgagttcgtcggtctcctcagcagctcggctggctcgtgcgggaacaagagggttctcggcgacgcgttcggggccgccaaggcggccacgcttccgctcttcgtctgcgaggatggcgacggaggcggcggcgaccgcgaccgcgacggcgtcgtcgaccatgaacagcaaagcaacaatgtacccaggaagaagaggctggtggggtggccgccggtgaagtgcgcgcgtaggcgtagctgcggcggcgggtacgtgaaggtgaagctggaaggggtgcccatcgggcggaaggtggacgtgtccatccacggctcgtaccaggagctgctccgcacgctcgagagcatgttcccttcgggtaaccaacaagatcatgcagaagacgaggtggtggtctcgcacgagcgccgccgtcgccatccttatgtagtcacctacgaggacggcgaaggggactggttgctcgtcggagatgatgtgccgtgggaggtctttgtcaagtcagtgaagcggctcaagatacttgcgtagccgacggtcggcgcctcagagacgtcgtgtggtccgtctcaccaggatcggagcagtgtagtactcctgggcgtcatctgcgtaataacgttgtttctgtcctgtgtgcccgtagcagtacgtactgtcctatagtaagctagctttatggggtgcttcagctttcagagcatgacgaaagcactgattagctgctgtcatcacatttggttcgtctttgtgtcgtacggtatcgctggcgtcagtgtcgcggcagcctaggtgatctaagcatacttactatctcaagttacttttggtttcctgagcttgcatggtaattcatataccgtatacgtgtgtgactcaggggcgaagctgccttaaggcacaggggtcaccggacccgatggaatttatcaaatccagtgtaaaatact

SEQ ID NO: 31493 - DNA, 2445 bp, Zea mays
  Clone ID: UC-ZMFLB73180D01_FLI
caaaacccaaaccctaacaatcatttgcagcccccggcgtctcgagaacctccaaggaaccatccacaggcgaggcctcgctccgtgcccggatctcccatttccgcccggccggcgcggcgggatcctgatactggtgctgtctgctggggtttcgtgtaggagaaggcgcgagcgcgggtgtttggatcgggggaggcaacgctggcggctcgcggcggcagcaggtgatggcggatccgcctagcggtgggggatctagggcttgtgtctgcagggagagacaggtcgaggaggcagaggcgggtctggggctcgggagaagagaacaggggaggaaggagggaggatgctgagcgtggttcgggtacacctgccgtcggagatcccgatcgtgggctgcgagatcacgccgtacgtgctactgcggcggcccgacggtgcagtctccaccaacgatgtccccgaaaccgcgcccgctgatggccagttcatgcggtacagatggtatcgcatacagagcgaccggaaagtccctatctgcagtgtgcatccaatggaacaagcaactattcagtgcctcggttgtctcaagtcaaaaatacctgttgctaagagctaccactgttcagccaaatgcttctctgatgcatggcagcaccacaaagttttgcatgaacgagctagtagtgctctaaatgaaaatggggctgaagaagaggagttatttggcagatttggcagtggtggttctggggttctaagtactgctggatctggttctttgtcaaattttggacaaagccctggtgttaataatggacctgtgcctttctatccctcaggtaccgataaaaattctggagaaacttggtttgaagttggacgctcacgaacatatacaccaactgctgatgatattggacatgcactaaagtttgagtgcgtagctgtggattcagaaaaaaagtctccaattggaccctcaacctcaatcatgacatcacgtgtaattcccgcgccaactcctacccctcgccgccttatccaagtgaatggggatgttttaggtcacttggatttagacagccaaatttcgtccttagggacattcactgtgttatcctacaatattcttgctgatgcatatgctacaactgatgcatatagctactgcccaacatgggcacttacctggaattatagaagacaaaatttgctgcgtgaaattattggttatcatgctgatatcatctgtctacaggaggtacaagtaaaccatttcgaagattttttttcacctgagcttgacaaacatggatatcaggcgctttacaagaaaaggacaacagaggtgtattctggaaatcctatggccatagatggatgtgctactttttttcgtagagacaagttttcacatgttaaaaaatacgaggttgagttcaataaggctgcacagtctttaacagatgctattattcctgctgcccagaaaagagtggctttaagtcgattgattaaagacaacattgcactaattgcggttttagaagccaaatttggtaatcatggagctgaaaatcctggtaaaagacagctcctttgtgtggcaaatacacatataaatgtccatcaagacctaaaagatgtgaagctatgggaggttcataccctcctaaaaggattggagaagatagctgtcagtgcagacattcctatgttggtctgtggagatttcaactcaacccctgggagttctccacatgcgcttctggcaatgggcaaagttgatcagcatcatccagatctggcaatagacccccttggaattttacgccctccaagcaagttgaatcaccagcttcctttggtcagtgcatactctgcatttgcaagaatggtaggtgttggctatgatttggagcatcagcggaggacagaccctgcaacaaatgaaccactcttcacaaattgcacaagagattttactggaactattgattacatattttacacagcggactcattgacagtggattcattattggaacttttggatgaagaaagcttaagaaaagacacagctctcccatcccctgaatggtcatcagatcacatagcactcttagctgagttccggtgcaagccaagaatcagacgttgacacattagctctccaggtcttgtagaaaaggtcattgtcatcatccttggtggtggaacaccgttccatgtgggaacttgaggcagggcgggaacgcgggctctcggggaagcaaacaaccaagcagcctcaggaaggggaagaggcttgtaacatttgatttttaccctcctacatttgagctcatgatacttaagatgcccctgtgtaccattactttctatagaagaaaaatacttgagagaaatatttgaagggttataaggcccgtttttctt

SEQ ID NO: 31494 - DNA, 1782 bp, Zea mays
  Clone ID: UC-ZMFLB73180D07_FLI
ccccgttacaacaagggacttgcgttcacagagagggaacgtgagacgcactacctccgtggccttctgccaccagctattgtatcccaggagctccaggagagaaagatcatgaataatattcgacaataccagttgcctttgcagcgctacatggcactcatggatctccaggaagggaacgagaggcttttctacaagttgctcattgacaacgtcgaggagttacttccaatcgtgtacactccaaccgttggcgaggcctgccaaaaatatggatccatatttagtcgccctcagggtctttatatcagtttgaaggagaagggaaagatccttgaggtgttgaagaactggccagagaggagcattcaggttatagttgttactgatggtgaacgtattttggggcttggagatctcggatgccaggggatggggattcctgttggtaaactttccctttacactgccctgggaggagttcgtccatctgcttgcttgccgatcacattggatgttggtacaaataacgaggagctgcttaatgacgaattttacattggcttgagacaaagaagagccactggccaggagtacactgattttctgcaagaatttatgactgctgtgaaacaaaactatggggagaaagttcttattcagtttgaggattttgccaaccataatgcttttgatcttcttgcaagatatggcaccactcaccttgtattcaatgatgatattcagggaacagcttctgtggttcttgctgggcttattgcagcacaaacattacttggtggttcattggcagatcacacttaccttttccttggtgctggagaggctgggacaggtatagctgaacttatagctcttgagatctcacgtcagacgaaagctcctatagaggagtgccgcaagaaaatctggcttgttgattcaaagggcttgattgtcagtacacgaaaggagtcccttcaacacttcaagaaaccatgggctcatgagcataaaccactcagcaacctcttagatgctgttaatgctatcaaaccaacagtgttgattggcacatccgggaaggggcaaactttcacaaaagacgttgttgaagcaatctcctcatttaacgagagaccaatcattcttgccctatcgaacccaacatcacaatctgaatgcacagctgagcaagcttacacatggagcaagggacaagcagtgtttgcgactgggagtccatttgatcctgtggagtacaatggcaagatacatgttcccggacaggcaaacaatgcctatatcttcccagggtttggcctcggcgtggtgatgtctggagctatccgcgttcatgacgacatgcttctggcagcatcggaggctctggcccagcaggtcacagaagaaaattttgagaaggggctgatttatcctcccttctcaaacatcaggaagatctctgcccacattgcagccagcgttgcagcaaaggcatatgaacttggtttggcaagtaggcgccctcggccaaaggacctggtgaaatatgcagagagttgcatgtacagccccatctaccgcaactaccgttgaattcggatcaactccagttatgtgcaaatcagcagcagctattccgcagcgtttatctcttgcgatgtcatgtaaatcagctccggttagccttttggatgctagtcagtcatggtgctggtgccgtccttccggacaaggataaatttggaataaagtttgagtcgacgattcctccct

SEQ ID NO: 31495 - DNA, 2409 bp, Zea mays
  Clone ID: UC-ZMFLB73180D09_FLI
cgaaaccctagcccccagaccatcccactcgcaaccgccatgccggacctcccctgcgacggcgatggcgtctgtatggtctgccgcgtcgcatccccgccggaggtcgacctcctcacctgctccacctgcaccacgccctggcactctccgtgcctctccaagccccccgccctcgccgacgccgccagctggagctgccccgactgctcccccgactccgctgccgtcgccgctccctcgggccccgccaacaccctggtcgccgccatccgcgccatcgaggctgaccacacactctccgaccaggagaaggcgcgccgccgccaggccctcctcaccggcgacgcccccgacggcgcggacgacgatgacgacgaagcgtccgacgatgcccttgagatcgtcggcaagaacttcagctgcgttttctgcatgaagctccctgaacgacccgtcacgacaccctgtggccataacttctgcttgaaatgcttccagaagtggattcaaaatcagaagaggacgtgtgggaaatgtcgggcgcagatcccggccaaaatggctgagcagccaagaatcaactccgcactagtcgaagttatcaggatggctaagatttcaaagaatcctaactctgctggctcagcagttccatatcactatctacgaaatgatgataggcctgataaggcctttacaactgacagggctaagagggctggaaaagcaaacgcatcaagtggccagatctttgtgactattgcacctgatcattttggccccattcttgcagaaaatgacccccgcaggaatatgggtgttcgagtcggggaaacatgggaagaccgacttgagtgcaggcaatggggtgctcactttcctcatgtggctggcattgctggccagtctacgcatggtgctcaatcagtagccctctcaggagggtatgaagatgatgaagaccatggagagtggtttctttacaccggaagcggtgggagggatctaagtggtaacaagcggacaaacaaggaacagtcatctgatcagaaatttgagaagctgaatgctgctttacgcattagttgcttaaagggctaccctgttagggttgtacggtatactttcttttgccatatttacacataaaacagcgaggtttgccatgtttcctgtgttgtctttccttgtctatttgcttgtttctggaattcttaaatattgatgttcttgggtgttttgacagtcgtctatatatgcttcgtgtcctccaattgctggacctttgtctcactatattgtcttaaaaggtcgcacaaagagaagcggtcctcatatgctcctgaatctggtgtgaggtacgacggggtttacaggattgagaagtgctggaggaagattggtattcagggtaagttcaaggtctgcaggtatctctttgtacgctgtgacaatgaaccagctccttggaccagtgacgatcacggtgaccgtccaagaccattgccaaagataaaggagctgcaaggtgcaactgatataacagagaggaaagggcgcccttcatgggattatgatgataaagatggctggaaatgggtggtgcctccgccagtcagcaggaagcctgttctatctggggatcctgagaccgacaagcaaatccgtagagcaacaaagcgtgttcatttgtctgttgctgaaaggctgcttaaagaatttgcttgttcgatatgccgggcggtgattaaagaaccacttacgactccatgtgcccacaacttttgcaagacttgtttgcttggggcatatgatagccagtcttctataagggaaagaagccgtggtggtcggactctaagggcacagaagattgtgaagacgtgcccttcttgcccaactgacatctgtgattttttagagaatccccagatcaaccgagaaatgatggagctgattgagactttgcaacgcaaggctgttgaagaagccaagatgacttcagatgatgctgaggaatgtggtgatggtgattcggaggaaaatgatggtgatttggtgaagggagaggatgttagtggtttgaatgagggagagcaagacagtgcagacgctgatgctaatgttgaaggttctgtgaagattgtggttgaaatcaaggaggaaggaaaagatgataaaaggtcaaagatgggcgcgactgaagtggtggatgtgttagttgatgaagatgctgtgaagcagacgaaaaagcgcaaggttgatgctgaggctggcaccaacggtggcaagaggatgaagagcagtagtaccgtggaagaggttgctgtgtgcgtcactcctgtgaaacggagcaggaagagtggtgatatggatgatgagcgcaacggcagtcctgctgtgagc

SEQ ID NO: 31496 - DNA, 1515 bp, Zea mays
  Clone ID: UC-ZMFLB73180F04_FLI
ggagaagcctccgttcactctgggtcagatcaagaaggccatcccgccacactgcttcgagcgctcggtgctcaagtccttctcgtacgtggtccacgacctggtgatcgccgcggcgctcctctacttcgcgctggccatcataccggcgctcccaagcccgctccgctacgccgcctggccgctgtactggatcgcgcaggggtgcgtgtgcaccggcgtgtgggtcatcgcgcacgagtgcggccaccacgccttctcggactactcgctcctggacgacgtggtcggcctggtgctgcactcgtcgctcatggtgccctacttctcgtggaagtacagccaccggcgccaccactccaacacggggtccctggagcgcgacgaggtgttcgtgcccaagaagaaggaggcgctgccgtggtacaccccgtacgtgtacaacaacccggtcggccgggtggtgcacatcgtggtgcagctcaccctcgggtggccgctgtacctggcgaccaacgcgtcggggcggccgtacccgcgcttcgcctgccacttcgacccctacggccccatctacaacgaccgggagcgcgcccagatcttcgtctcggacgccggcgtcgtggccgtggcgttcgggctgtacaagctggcggcggcgttcggggtctggtgggtggtgcgcgtgtacgccgtgccgctgctgatcgtgaacgcgtggctggtgctcatcacctacctgcagcacacccacccgtcgctcccccactacgactcgagcgagtgggactggctgcgcggcgcgctggccaccatggaccgcgactacggcatcctcaaccgcgtgttccacaacatcacggacacgcacgtcgcgcaccacctcttctccaccatgccgcactaccacgccatggaggccaccaaggcgatcaggcccatcctcggggactactaccacttcgacccgacccctgttgccaaggcgacctggcgcgaggccagggagtgcatctacgtcgagcccgaggaccgcaagggcgtcttctggtacaacaagaagttctagccgccgccgctcgcagagctgagaggacgctaccataggaatgggagcaggaaccaggaggaggagacggtactcgccccaaagtctccgtcaacctatctaatcgttagtcgtcagtcttttagacgggaagagagatcatttgggcacagagacgaaggcttactgcagtgccatcgctagagctgccatcaagtacaagtaggcaaattcgtcaacttagtgtgtcccatgttgtttttcttagtcgtccgctgctgtaggctttccggcggcggtcgtttgtgtggttggcatccgtggccatgcctgtgcgtgcgtggccgcgcttgtcgtgtgcgtctgtcgtcgcgttggcgtcgtctcttcgtgctccccgtgtgttgttgtaaaacaagaagatgttttctggtgtctttggcggaataacagatcgtccgaacgac

SEQ ID NO: 31497 - DNA, 834 bp, Zea mays
  Clone ID: UC-ZMFLB73180F08_FLI
gtcacttgctgcctccgcttcccaggacagcttaactctgacctgcgcaagcttgcagtcaacctgatcccgttccctcggctccacttcttcatggttggctttgcgccactcacctcgcgtggctcgcagcagtaccgtgcgctcactgtccctgagctaacccagcagatgtgggatgccaagaacatgatgtgtgctgctgacccacgccatggtcgttatctcacagcctctgccatgttccgtggcaagatgagcactaaggaggttgatgagcaaatgattaatgtccagaacaagaactcgtcctattttgtggagtggatccccaacaacgtcaagtccagtgtttgtgatatccctccgcgtggcctctccatggcctccaccttcattggcaactccacgtccatccaggagatgttccgccgtgtgagcgagcagttcactgctatgttcaggaggaaggctttcttgcattggtacactggtgagggcatggatgagatggagttcaccgaagctgagagcaacatgaacgatctggtgtccgagtaccagcagtaccaggatgccactgctgatgaggaggcggaatacgaggacgaggaggccatccaagacgagtaagggtggtttgggccctgccacatttgtacccttgtttcctttcattccggggcttgcctatggtttgcttgttgtattcgctcaagttatgcggtatgtagtagtactttcgtgcgtagcatgctgtatgctaccacaaagactttgttcacctgcactgcttgatatgccagccatggcatatgtgacgagtatttcatt

SEQ ID NO: 31498 - DNA, 1130 bp, Zea mays
  Clone ID: UC-ZMFLB73180H04_FLI
cctcgtggcttctgggccgccggggcccctccggcttctcctggagttccaccgccgaccaagtcacgcagggcatctccgccgccggcctcaccgccatcgtcactggggcgtccagcggcatcggcgcggagacggcgcgaacgctggcgctgcgcggggcccacgtcatcatggccgtcaggagccttcccgctgcccaggccgtcaaggacgccgtcctcgcccaggcgccgggggccaagctcgacgtcatggagctcgacctctcgtccatggcctctgtccgcgctttcgcgtcccaattcatcgacaggggtctccccctcaacatccttatcaacaatgcaggagtaatggcaataccttttgcgctttcaaaggatggaattgagatgcagtttgcaactaatcatgttgggcatttcctgctcacacaccttctattggataccatgaagaggacctctcatgaatcaaatttggaaggaagaattgtcaacgtgtcatcagaggggcacagacttgcatatcgggaaggaatccgttttgacaagatcaacgatgaatcagtgtatagtagcattggtgcatatgggcaatcaaagcttgcaaacatattgcatgctaatgaacttgccaggcgatttgaggaagataatgtcaacataactgcaaattctcttcatcctggttccattatcacgaaccttcttcgctaccacagtatcctagatgttctccatcggacgctgggtaaattggtgttgaaaaatgctgagcagggtgcggcaactacatgctatttggcactccacccgcatgtgaagggcgtgtccgggaagtacttctgcgactgtaacctgtacgagccaagcgcgaacgccaaggacatggagttggccaagaggctctgggacttcggcgtcgagctcatcacctagctcatgcttcttgttgttagcgacttgttttcagacatggatgtaatgtaaatcccttgacagatggtaaattctgtaggccctcgaggagctcctgtgtggtaaactcattcacctcaatctatctacgtgtattaaggtggattagggtgtaaattaaattaatttacactccaatcgccctcg

SEQ ID NO: 31499 - DNA, 1054 bp, Zea mays
  Clone ID: UC-ZMFLB73180H07_FLI
gcggcgaccaccggagcgcggaggaggcacaggcgccgatctaaagacgatggccgccgcgggctcctcgccgtccttctcctcctcgagtaagcggctggaagggaaggtggccctcgtcactggtggcgccaccggcatcggtgaggccatcgttcgcctcttcatggagcacggcgccaaggtctgcatcgcggacatccaggatgaggctgggcagcagctgcgcgacgccctgggaggtgacgcgcagggcgccatgttcgtccactgcgacgtgacgtcggaggaggacgtgagccgcgccgtggacgctgcggcggagcggttcggcgcgctggacgtgatggtgaacaacgccggcgtgacgggcaccaaggtgacggacatccgcaacgtggacttcgcggaggcgcgcagggtgctcgacgtcaacgtgcacggcgtgttcctggggatgaagcacgcggcgcgcgctatgatcccgcggaagcggggctccatcgtgtcgctggccagcgtggccagcgccatcggcgggacgggcccgcacgtctacacggcgtccaagcacgccgtggtcgggctcaccaagagcgtcgccgcggagctcggccgccacggggtgcgcgtcaactgcgtgtccccctatgccgtgcccacggcgctgtcgatgccgcacctgccccagggcgcgcgcgcagatgacgcgctcaaggacttcctggcctttgtcggcggcgaggccaacctcaagggcgtcgacgccatgcccgaggacgtcgcccaggcggtgctctacctggccagcgacgaggcgaggtacgtcagcgcggtcaacctcatggtggacggaggcttcacagccgtaaacaataacctcagggcgtttgaggattagttgaggcatttatgccagctctgggattgggagggagtattaccgctatttcttctgctgttgtgacaagtgtgtgcaagactaataaaccgcagcatgttcatgtagccaacagatgattgaacattccaagtatcattgctgaattcacgc

SEQ ID NO: 31500 - DNA, 1138 bp, Zea mays
  Clone ID: UC-ZMFLB73181A07_FLI
cgcagacaaggcgacacccaagtccgtgctgagggcgatggccgtgccggggctcacgctgtaccacctcaagaggcacctgcagaagtaccggctggtggcggtgagccgaggcgtcgcttccccgctgggcgacagcggagatggcaccgacgagcgttcgtcctcgtcctcggagaaccagccggcggacgagtgcgacgacggtaccgtcgccgagccgcatggcgattcttccaggagcgtggcgcggatgcagaggaagctgcaggagcagatcgaggtgcagcggcacctacagctgaggatcgaggcgcaggggaggtacctgcagtccgtgctgcgccgggcgcaggaggtcctcgccgaccacggcctgggctcggcagccggcgcggaggcggagctggcctccgcggtggacaccgggtccctgtcctcctcctgctgctgctccccgacgcgccgccgctccgccgacagctgcgtgacgtcctcctcttcggaggccgagagccaggcccccgtcggcggcgccacgtggctccacacgtgcgccggtacgcgcgactgctccgttgagcaacagccggtgcagggggagaagagtacattcctgcagaggcacggggcagcagaggacggcacttcgtctgagatcgatcccaacggcaacaggtaggggacggagtcggagatcgtgatcggaagcatctctctgctctgcatgtgcccagcgtcggagaacagggaatgaatgattggcggggtggccttcaaggttgggacttggggaggggggccaggcttttgagcaatgtctgctgctgaaacagctacctgctctgctcttcgttccagaatatgatgtgcatgtttattttcgtttatgcgaatggttcttgtgtttcatgtaaaaaaattatgactgcaactcgaggaagggccagctgcaaatgatgcatgcagtgtgcttgaggtagcagtacaatgcaaggatgattgcatggtacagaactgtagtagctactatattattagtaagattgtatgccatcagtgagattgatgccttaagagggtaatggcatgagaactggaaaaggtttagaatgtatattaaggcctcatttgaaat

SEQ ID NO: 31501 - DNA, 718 bp, Zea mays
  Clone ID: UC-ZMFLB73181B02_FLI
cacccgcagtccaaggcggcggcggcccaggccctcgagcggctgcaccacggcgggcgcctcctgtccagggaggacgtcgggggcgcggtgcgcgtcaagatcgtcgtcagcaagcgcgagctcaagcagatggtcgcggcgctcggcgacggcggtctggtggccgcggccagcagcgagcgccaccggcagcgcgcggcggcagcggcagggccgggcgccgagcagaggctgcagtcgctgcggcggcgcagcgtgcggcgggcggccgaggctgccgcgcggcggatgcaggcgggcggggagtgggagcccggcctgcagagcatccccgaggaggtttgctgatgactaccagaccagtagatgatgtatgatgatggcgtccttctctttcatggctagtagtagtagtagcagtaatctcttgactaattgtggcttggatacgttttgatccatcacttgcctcgctgctgctaaaagcgcgctaggagatgtatggtgttgtacagcgctgttctcgttctgctctgggctatcctggcccagtacggctgcttcttgatgtagtttctgcgtacgttttgccctgtgagttttctctttattttggtgtggaccaagagaggatcggaggaaattgagagatgtgttttggaccttggatcacaatgcggttgctgctggtgattgattctggagcgctggcgtc

SEQ ID NO: 31502 - DNA, 2133 bp, Zea mays
  Clone ID: UC-ZMFLB73181B11_FLI
ctggtggctgcaacttgattcagtgacatatattagattttttcccataaggaatggcatatatataatagctataatgctggcatgctgcattggttacatgcaggtagcagagttgcttgcgtgcgaaggccgcttggtctggagttaagcgcgtgttgtaatggaggggcgtgggaaccctccgcacaccaccactgatgctgtgatcaagaagccaaggagcgtcgcatccaggaagccaaggtccacggagcagctcacgtatgagtacaatggcatttgcccgccatcttggagcgctccccatgacgatgacactggcgttggagctggtggacatcggaggaaagagctacacctaaatagccctgaaatgaagggctccatggctcataggagcgacgtgcccaggaagataaggagggatgatagatctggaggcgaccatgatggccatggtcggagcagcaaagcaaaggatgctgccaagcatggaagtgaaaatgttcttgccctagagtgcacagcaagaaacaatggatcccctgataacccacagttggtccccagagatgactctatgccttgtgaaaataggtcgagaaaagtaaagctcaaagttgttagtcgaaccctacatgccaaaaatggccaggatgctggtggcagtggtattcctgccacgttggatggctctattcatcagtacaagcaaaaggattctggtggccacacaaacaaagagacccatggtaatcgtgttgaaggaaaacatggcaacgggcatgaaatttttccatcttctgaccttgttcgcaagagcaaaaggattcccaagaagaaaacacttgacggagattctgatgatgaagatggtgaattacgctatctggaaaaactcaaaggggctaaagttgcaccagatcctgtgaacactagccataaaggttatgattttggtgatgatgctctcaagaaaaagaagctatccaagctttctagaaacaagagcaccccatatgaagtggacgacgacttcagaatgtctcgatctggcagggatggtaggaagaagttgaatttaggggatgacaatgagtttatagaagaggaggaatctgagatggatgaaacgaatgggctaaaggaacctgattcacctcaaggtgtgaagattgaaacccctggtcttacaacaagacagcgagcccttcaaggcaggggtggcaatggtgaaagctttattgagtttcctgatggattaccagcagcttcatcaagaaagcaaaaggagaagctctcagatatggagatacaagccaaaaaggcagaagctgcgctgaggcgcaagatgcaagttgagaaggcagagaaagaacagcaggctgaagcgatgaggaagatactgggaatagattctgagaagaaaaaggaagagaagaagctgaaagaacgagaagagagggaaaaacaggcaagattggaagaatacaggaaaaactgcgtccagactgtcatgggcccaactgggactgtgattacattccctgagagcatggggcttccgagtatatttaactccaaacctgtcagctatccgcctccgagggagaagtgtgcaggcccatcgtgcacaaacccgtacaagtaccgccactccaagactctggtccctctctgcagccttgcttgctataaggccgtcgaggaccgtcctcctgcccaggggagtgaaggtggtggtggccagggaagcgatgctgggcagggaactgatgccgcccaggagagtgctgggaagcaagcatgatgaatctagctgcctgacgcgattcaaccgtgaccgtcagttggctggagaagtgtaatgtcgacatggccagctcgctggtgtgttgttttcttggtctctcctctggtagtgtgtcgtctaacaaccaatcaacctgacaaaagataggtgtgtgactgccggtttccttttgcccgtcgtgaaccaaaccgggcttcgtaatggtggattggatcgagtttaaaacctatggtgtggtcggttcgatgtatgagactactctagtcgagaaatatgaagggaaacaaggtcgtgggagacctcgggctgtgggcgtc

SEQ ID NO: 31503 - DNA, 1418 bp, Zea mays
  Clone ID: UC-ZMFLB73181C07_FLI
gtggctgcgaatctgcaggaggaggaagaggtgaaatggtgaaggccgcgacgtggctcctcgatcggctcctctacgtactcaagcaggacaagggcaacgacgccaacaccgcgcgtgaccgacggcgaaggaggcgtgctccggccggtggcgccgccaacgccgttggaaacgatgatggcgaggagcagcacctcaacacctttctcgacgctgcgaatgcgtcgtccgcctcctcaagggtgcagttcaggaatatggcgtcgcgcgcgcggtgggtggaggaagccggcgctgcggaggtggtggagaacaggggcaagctgtggctgaccaccggtgtcactcgggccggcaagctgtactacaacgttgaggagaccgggttcttggccgaaatgggtgccttgattcttctcaatgataaggatgagacgataggaattgaagatatctatgggaagcttgctggaggaaattatgggtgctcctgggataccttccaggcatataagcacttgaaatcacttggatatattgttggaagatttggtgttccctggacaatgaagcatggtggtactcatcacaccattgctccccagatcaatatacttgagactgatcagagcttaaatagagttgacggagcctccaatgacataaccaaattgctcaaggaaatacagattgacgggatatgtccatcttttgaagtttatctgccaaatagcaagttcaaaaagtcatccccagggtgccctagtttcctcttatgtctattaaggggtaaaccgccctcaagggttgaattggaagcagtggaaaataatttcagaggcattcctctgaagtatgctcatgtggataatggacgggtcagctttctctcctttgatgaagttacactccccagcttgccctgatgggtagcagcagaacatgtgaagtgataaatagtgtgtttggtttgaggaatgaagtgatccatcttcttctcactcctcacttttttatttggtttgtggaatagaatgggttgatctatcatcactccatttctcataagctaataattagtatatacatgatgagtgggttgattccaccaaaattgatggaatgaacttatgatgcatcatctcatgaaacatagagtgactccataaaccaaacgcaccaaaagggtctgagcttcagaacaatcttgtcagaaatgataaagggtctcagcttcagaacagtgtcttgagatgcattcgccgcaagcgcagggggggcaaagtatttcagtactaacttttgaacatactaaagtatggaattccctggagtctcacaatccagcgatctgttgtacactccagattgtatgttggaaggagaaatcatgtctagtcttcttgttcgtctct

SEQ ID NO: 31504 - DNA, 3163 bp, Zea mays
  Clone ID: UC-ZMFLB73181D03_FLI
gttcagactctcaaactccctcgattgtaataacagagaaaaaaaccatccgccggaggccggagggcagattctccaccatcgcctccactccaccctcactacgcgaatccgcggcgaacccccctctcggattccttctctcctccccgccccgatcgcgtcgtccagagaccgccaggctccggcgcccccgcccgcccgggctcgccgggggtcgggatgccctgctgctcgccgtcgctgctcggagtcgggccgcgggtgcgctcctttctccgcgactacgacgccctccagtccctcgccctcgcactcatctacctccaggtgcgcattcccctcgtatgtcgcctcagaaggccggatcggcctggcccaccggcggcttgccgctccccgcgagatcggccaacttctgctcttgtactcgctgctgctcttgctgttagcgcctgtgatgtgaaacctggtgacggtatcgggtttgagcgtcctctagtgtttcctaccgtagtgggcgatattttagctgcctcagttttgtcagtaattctagtagttgaacgcgacggggaattgtagtttggtcgaatgcaattcagatagggttccgcttattttatattttaggcgtgaggttgcttgatgcttgggttttgaactagtaggcttctggatgaagtttcaaggttcagttacgtttagagataactgcgccttgcagcttaatactgtggtttatgttctctgaatttggtcagtttctgttgttgtctttgtgtttcttacattgttggagacaatcatgcgtcagcttttgttagatgcaactaaggtgccgtttggttcctaaaatgtaacgtaaatggtaacggtaatggtttgcattcgattactagcggtaacaaatttgaataggctggtatcaattctagtgtggtatccgattacggttggacttaaacaaacatgatttaactttatttgatacctattacattacaaatttgtgaaccaaacatcacctaagtgaatcccttagacgtgattatgttgaattagctaccaagttggtgaaacagtgaacggaaactggtcggtttacaatgtgatgacgcttggctattattagcattttacatagttagctcggctgagtacttgctttttgtttggttctcttgatcattatgcgactttaattcttatatccttgaaatgggccttcattcggcagaagttgaatttaatgaagtcgtgatattcatgctcataattacttcatcaatttttgttttagattggttgtgcgctgattgggtcacttggggcattgttcaatggggttcttgtgatcaacctagtgattggtctatttgctgttgttgcaatcgagagcagcagccagagacttggccggacatatgctgtccttctcttctttgctgtcgtccttgacgttgcttggtttatactcttctcccatgctatctggtatgtcttcggtagccaccatctatcagtttagttaccctgatgttttcatttggtacaatgtgaagtttggcacctagaaaggaatgttgtattctctatattcgaatgcttaattgactgattttttgactgggtttctttattcatctttcaccatgacataactaattgttttcaatgttgtataacagttgatctgtcaatgacttgtcatgcaatgactacctatataggttctgagttctaatatatcactagagtcattactatgatcattgaaacttagaactttgaagcacaagttgttcggtactccatcaagtgaagctttagcatgtgtgatcatatattctaaaccattgctttcatatgtttaggaacatttaaattatacttgcaaaattatatgtatagatttgtcgtcaaattttattttggtaacattctaattttgcaaggtttaataaagttgttacagtagaggttagtttggcatcatgtatcagtgtgaaaagcattacttgttgtgacatgactgactggaaagtgcatgtgttctattggacaagtgtagagaatttttcttatataatttttgttaggcacggcaacattcttgtagtgttataatctgtttcctaactttgtcttctaattatacaggactattaatcctgatgagaagtatggtgaactttttgttttctcactcagactagcattgtggatgcaaataattgggttttcagttaggtttttgtcttcattcttatggattcaaatgtatagattaggggcttcttccagcacgccaacatattttgaaaccaaccatgaagcaagaattagtttcttaagccctagatctgattcagttagacggagtcctacggcagatgatatattgggaggttcgatctatgatccttcttactactcgtcactgttcgaggatgtccgaaacaatgcatgcaatcatcagggtgataaacaaagtggtagtaatgacagtggttcaacatctgcaggccagacaccacgacttaaatcttttgctaatgatgtggaaggtggactaaaaagaccgttgaactcctagggataaaacaacgggctcatcttgggaacctaaatcctgtagccaccgttctctttgaagcatagaggtttgcacaccgcagcagtttatttctcagaccagcgggaagggggtgtccaacgaaaggagcttggcaaatactgtaacggcgactgcctgtgttgccgagcatccacagcagcatcggtgccattttggagcaccgttcgtactcagcgagcttgagccggatgtttctgcaaatagctgtccaatgttggtgttgcatatcgacctatgccatgcgatatgtttactgcccatcatgtcccatttttcagacctctcttcctgtttcttttaactaccaaggaaaatgaagcaagtagttcgttagttctttagtcacttagttattttctagctgtaggctggcagttgcttctcttctagcattttggtcattgttcatagcatttgtgttgacaaggaacagatctctagatcagtgaaaggaaacaaatgtaagtttcattctgttctagaaagagctgtgatccctattggatgcatgagttttgttag

SEQ ID NO: 31505 - DNA, 1875 bp, Zea mays
  Clone ID: UC-ZMFLB73181H02_FLI
agggtgggtcttctcttcccccttcgcttcctcgtgcagctccgaccacggtgagcgtagccacgccgctcccgcttgcccgcttccgatccccgcgccgcccccacaaaattccaggccggcacgcctcctcgtccacttgtgcaccgtggctaccgtttccctttcctggatctgaatttcgtcccgcgtagcgcagatgccgctaggacgggaggattaatctcgtggcccatgagcttaccggggaggaaggccccagcgggggcctccggagtccggcggtggctcgtcaccgtcgtcgtgtcggtgctggcgctggtgctgaccctcgttgtgatatcgctgtcccagggctcgtccctgcctcggacgtcgctgcacggttacctccccatcggagctactgacctggggaagcgttcgtcgtcggagcatgctgatgaaaacaggagtggcgctgcaattggggaggaattgtcgcagggtgagcgggagtccttagtggagcagaatggtcagggtggcgacgtgaattcaagccaaacgtctgcagcttcaggaaagatggatgacaacgagccggatccagcttcttccagtgataccacaacgattccggacgaggatacatctaatgaatctcaaaaggctgagcaagataattgtgatctatatcgtggagagtgggttactgattcttctgggccactatacacaaacaactcctgccctatcatcacacagatgcagaattgccagggaaatgggcgaccggacaaggactatgaaaattggagatggaagccagaacagtgtaacctcccacgcttcgatgcaaggaagttcttggagttgatgagaggtagatgtcccacaaaaccgaggcaacaaaaggatgcacaagtggctcttcaaatcaactaaaacaactatcgcccgcgtctggtcttcttggttagtgcacaggtcaactgaagctgtggggattgctcctaagggtattgataaagtttttctggatattcctgatgagaccttcatggagttcctcccaaggtttgatgtactcgtcctttcctctggccactggtttgctaaacgatcagcctatatcctgaacgagaatgttgttggagggcagctttggtggcctcgtaaagcaggaaaaatgcaggtcaacaatgtggatgcctttggtatctctgtcgagacttgcctaactgctgtggtgaataacccaaattttacaggcctagcaattgtgcgcacatggtcacctgatcattatgaaggcggagcatggaacaccggtggatcatgcaccggaaaggtcaagcccttgaatgaagtggtgaggaacggatttaccgatgcgatgcatgaaaagcaggttgcaggcttcaggaaggcagtgaagaatgcaggggaacacggttctaggttgaaattgatggatatcactgaaccctttgccttcagggctgacggtcatcctggcccgtacagaagtcctgacccaaacaagaagacacagagagggccagatggaaaacctccacctcaggattgtttgcactggtgcatgccaggaccagtagacacatggaatgagatgttgctagaaaccattcgaagagagttcgagacagatagaacctgaggatagaaagtgctggctacttcgccatcatgtattcatgttatacattctgcgctgcgaactccatagggatgtatcgctgcacttagtagcatgttgtgtttaccatagataggaaggaacaaagcttcggatacgtaagattcactgtattttctctgacacgattcttggacatcattttcttgccaaattttgtgggcctgaatccc

SEQ ID NO: 31506 - DNA, 1601 bp, Zea mays
  Clone ID: UC-ZMFLB73181H09_FLI
ccgtcgcatcccatcccactaccacccatctcgtcgtccgccgattcgatccggttcttccaacccaggggcagtgatggcgacgaagaggagcgtgggcaccctcggcgaggcggatctgaaggggaagaaggtgttcgtgcgcgccgacctcaacgtcccgctcgacgatgcccagaagatcaccgacgacacccgcatccgcgcctccgtccccaccatcaagttcctcctcgagaagggcgccaaggtcatcctcgccagccacctgggtcgtccaaaaggtgtcaccccaaagtacagcttgaagcctcttgttccacgcttgtctgagctccttggagttgaagtcgtgatggccaatgattgcattggtgaggaagtcgagaagttggctgccgctttgccagaaggtggagttctgctcctagagaatgttagattctacaaggaggaagagaagaacgaacctgagtttgctaagaagcttgcatctgttgctgacctttatgtcaatgatgcttttggcacggcacacagagctcatgcttcaaccgaaggagttaccaagtatttgaagcctgctgttgctggcttcctcatgcagaaggaacttgactaccttgttggagctgttgccaacccaaagaagccatttgccgccattgttggtggatccaaggtctcaactaagattggtgtcattgagtcgttgctggcgaaggtcgatatcctcatccttggtggtggtatgatctacacattttacaaggcacagggatattctgttggaaaatctctcgtggaagaggataaactcgagctcgcaacttctcttattgagaaggcgaaggcaaagggggtttctcttttgcttcccactgatattgtagtagcggacaagtttgcagccgatgctgagagcaagattgtccctgccactgctatccctgatgactggatgggtcttgatgttggccctgatgccaccaaaacattcgacgaagcattggacaccaccaagactgttatttggaacggccccatgggagtgtttgagttccagaagtttgcagctggcaccgaggcgattgccaagaagctagctgagcttacaaccacgaagggtgtcactaccatcatcggcggtggcgactctgtcgctgctgtcgagaaggctgggctggccgacaagatgagccacatttcgaccggcggcggtgcgagcttggaactcttggaaggcaagactctacctggtgtccttgccctcgatgacgcctagatccgctgctgctgctgctactcaggttctgccagctttgcgtgtcatcttgtttcggaccttggtgtagcactgcaaggctaaggtttactcctccacacatggactttcgaggataggcttgccaccgtgttttgctagatgagtcgtgaaataagcttttacttcctcgctgctgtgggtgaagtgactggaattcggaaatttggaactaacaaaaccccccgtggatttgtatgatacgttttgttcgacagtttgcgtcccatctttcactgtggtatctggtatggtatgttcttattttttgtctgac

SEQ ID NO: 31507 - DNA, 1267 bp, Zea mays
  Clone ID: UC-ZMFLB73181H10_FLI
ggcagacctcacttcttatgactatgatgcaccgattaaggagcatggagatgtgcataatgcaaaatacaaagcgctaagaagagtaatacatgagtgtactgggactcctctccatccacttcctgctaacattaaaaaagcaagttacgggattatgaaattacaaaaggttgtttctctgtttgacatcattgataatatcaatgatcctctgaaagtttctgtttcggagcatccactttatatggaacagataggccagatgtttggatttctcctgtacatgtcagaataccaagggaaactcccatcaagcatcctgtcaattccaaaggtacatgacagagctcaggtgtttgtgtcttgctcagctggtgttagaaccctaagatattgtggtgtaattgaaagatggtctaataaaacactagagataccgaacttaagatgttcatctaagaccagcctatatatcctggtagaaaatatgggtcgtgtaaattatgggccatatatttttgaccggaagggaatactatctcctattcaaatagatggcattactctccgtcactggaaaatgtatccactggcactcaattcactggacatccttccaaaacttcaactaatcactcaaataccttatgctggagccagtaaaatgtccattcatggagactcagaaaagattttacaggactcgtcatgctgttcaaatgaaagcacttctgcggagcctgcgttttatgaaggccatttccgtattgacaacgagactgagataaaggatacattcatatcgtttcgtggttggaacaaaggtgttgcttttgtgaacaacttcaacattggaagattttggccggcatgcggaccacagtgtaccctttatgttccagcgcctatcctcagacctggggataacattgttgtaatctttgaactgcatgctccaaatcatgagctcactatcgattttaccacggatccggatttcacgtgcggtccagaacagtgaaaaagggttgcacgtggacgtggtgtacatactgttacatagcagtacagtgcagtgttctgtccttcctcttgcttttctacgtcggtgctggtatagaatgggtaaatctgctctaggacactactctataaacgtggtattggctactggacactgctcaattgtgtacctttgatagctggatttgctgttgggtaccaaagaaaaaataaaatatcagggacagatcgtgaattctcc

SEQ ID NO: 31508 - DNA, 1798 bp, Zea mays
  Clone ID: UC-ZMFLB73182D12_FLI
ccagagtccagacccagaaggagagggagacagaggagaggaggagcagcgtggcgacgcccaaatcgagcgacctgatcgaggcccctcgccccaactcgctgaatcccaatccgagcccgccaattgggcgccccgcccacgccaaggctgaaagtcagtggagttctcagttctcaccaacattcagaaaactgttggctcgctgacaagtccaactgtgtttttcttggactacagatgaagcgagctcgaaggcgtatgtgcaagagatgactgatgagggatgctagtgacattgatgaacttgttacgggcgtgctggcgaccgtcatcgaaccggcatgcccgaacaggctcagatgttaccggtaggcaggatggacttctatggtacaaggacgccgggcagcatgtcaacggggagttttccatggctgttgttcaggccaataacttacttgaggaccagtgtcagattgagtcgggcccactgagttttctagattccggaccatatggcacttttgttggcgtttacgatggacatggtggtccagagacggcctgctatatcaatgatcatctcttccagaatctgaaaaggtttgcatctgagcagaatacaatgtctgctgatgtactgaagaaggcgtatgaagctacagaagatggattcttttctgttgttaccaaacaatggcctgtaaagcctcagatagcagctgtcggctcatgctgcctggtcggtgtaatttgtggtggcatgctttatgttgccaatgttggggattcccgtgttgttttaggaagacatgttaaggctactggagaagttttggctgtccaactgtcagcagagcataatgtaagtattgagtcagtgagaaaagaactgcagtcaatgcacccagaagataggcacattgttgttctcaagcacaatgtttggcgtgtaaaaggactaattcaggtttgtagatcaatcggtgatgcttatctcaagaagcaagagttcaatagggaacccctatatgtgaaatttcggcttcgtgaaccttttcacaagccgatactaagttcagaaccatcgatcaatgtgcaaccactacaaccacacgaccagtttctcatatttgcatctgatggactttgggagcacttaaccaaccaagaagctgttgatattgttcacagtagcccccgcagtggctgtgctaggaggctgataagagcggcgctgcaagtggcagccaagaaaagggagatgaggtactcagacctcaagaagatcgaccgcggtgttcgccgccacttccacgacgacataacagtcatagtagtgttccttgattccagcctcgtgagcaaggcgagcacgcaccgaggccccactctttccctgcgaggcggcggtgccagcgctggtctgcgcagcaacacgcttgcaccaacgtcaatgtggctatgaggaggctacaccctgactggaggacgttttctttcctcgtgtcgaatgtgttatatatgtacttgtaccggccaaggtcatccatctcccctcaatggtgtaaagaactaggagaggcgtggaagctcctctccagcgtctttgaatcccctcaatggtgtcaaggtgtggactcaagtcaatagcttcgctgttctgatgatgctctgtggaaactcgaatccttccacctgaaaaccaagtagtatgtcttctagtgctggaattaaccctagtgcatatatacatatgaaataaaaaaaagccaaaaggaggagtaacttattt

SEQ ID NO: 31509 - DNA, 1281 bp, Zea mays
  Clone ID: UC-ZMFLB73182G10_FLI
gctggtccttctatgctcctgacaggaccaggaactcagcatactagcttggctatatacattctgatgcgtgcagcagtgcttgcatcccgttgtggaataaagagcaagcgttttggaaagatctgtaaacctttgacttggtcacatggtgatgtcttccttatgtgcctctcatctgcacaaattttgtcagcatacattttaaagcaggacagtttgccatcatcatataaatcatttctaaacaagcatggtggaaaagatcttactattttgcaaggtgtgaaggatgtagtcaaccacactgctttcagtaacttagtgggttcgagaagtactacaaatctgttggtgttgacataaagctagatccaaacatgaaagtgccttgctcaattgtgcatggtaaccagtcatgtacaggacatgtcttttcattcttgttacaagcatatggaagagcagttcctgtatatgttccagtctacttagtccctgcacttgtagttcataggcagcatctcatgaaaaggccttactcaattatagggaagagttttctaggagtagcaagatctagtctgtttctctcagtatactgtgcatctgcatgggcttggacctgcctgctttttaggatcttccggagagccaatacccctcttgtcatccttggcacgtttccaacaggtctggctttgctcgtcgagaagaagagcaggaggattgagatatccctgtactgtcttgccagagctatcgagagttttttcacatggatgaccgatgcaggactctgccctccaatacttcagataaagcgagctgatgtggttgtgttcagcatagctacctctatcattatgcactgctatgcgcaggaaagagaagtcttccggtccaagtacctgaatgtgctggactgggtatttggtgtgccgccaccacccgacagtgaggataagaactgctatctaccagatgaagccaagaaatgccagtgacatactggcttgtagagttcattgcatgatttttgtatggtcacccatgtgatcctagcgcgagactagacccattagagggtttagtgaacgaaccttgtacaggactcttcggaaaatcgggactttagtggatatagcaagatagattttttaattaattgatttgtccaaacgatgccctggtcattaaatgaccatatgtggttgtaacttatgacctttattgttgttgttgtcatgcgaatataacttatggtccttgaaattgttt

SEQ ID NO: 31510 - DNA, 2893 bp, Zea mays
  Clone ID: UC-ZMFLB73183B10_FLI
cccaggacgagtcgcagcagccggccagccgcacagagtggtggagcctaggaacagaggaggcgccgagccatctccgcagcctgctaccggggaacgggcgggaacggactctaacttagagagagcgcgggcgagagaggtcaaccgcagccggaggcgatggaggtggtggcgctggtgagcggcggaaaggacagctgcttcgccatgatgcgatgcatggactacggccacaaggttgtcgctttggctaatcttatccccctcgacgacaccgtcgatgagctcgacagctacatgtaccaaactgttgggcaccagattgtggtgagctacgcgaaatgcatgggcttgcctcttttccggaggcgcattcgcggatccacaagggtctcaggtacagtgtcacggcaggtgatgaggtagaagatatgtttgctctgttgagcgaggttaaacgtcgaatcccatccatcagcgcggtgtcgtcaggtgcaatcgcatccgattaccagaggctccgggttgagagtgtttgctcgaggctgggcctggtctcgctggcgtatctatggaagcaggatcagactttgctcctagaggaaatgataaggaggggcattgtggcaataattgtgaaggttgctgcactggggctgaaaccttcttcccacttaggtaaagaactggctgaacttaagtgtcatctgctccaaatgaatgagaattatggaatcaatgtctgtggtgaaggtggagaatatgaaacactaactcttgactgccctctatttcgtaatgcaagaattattcttgatgactctgaagtgatactccactctgctgattccattgcttctgttggaattcttcatccacgggcgtttcatcttgagcagaagccagattcatctgatagaattggggatggttctgccgttcaagagagttctagttgtgtatatgaggttgatgaagttaccactcacgatgatgtgggagaaaaacaggccctgagtccagctgttgatgcttacaccaatgttgacctatgtatctcaaagacagggaacaatttgcgttcaatgagctgttggattcaggatccatccagagcttcggaaggcctgaaggcagaccttatagcagttttgagcagaattgaaaatcagctcaaggaagaagggttaggttgggtgaatgttttgtacgttcacctctacatttcaagcatgaaggaatttggattggccaatgaagtttacgtcagctttattacggaaaagaaatgctacctgggtgttccttcgcgcagtacaattgaattgccactagttcaggctgggttgggcaaagcatatgtggaagtcctagtttcaaatgaggtggtaaagagagttctacatgtgcaaagcatctcctgctgggctcctagctgcattggaccttatagccaggcaactctttatgaagatattctttatatggctggtcagctgggccttgaccctcctacgatgaagctctgtcttggaggtccaagagcggaactagaattagcactacaaaacagtgaagctgtggccaatgcctttagctgctcaatctatatctcggcaatacactttctggtgtactgctctgctcagttgacgtccagcgagaaggaagaaattgaacagacattgaagagttcttatattactcgtttggatcgctcaaaaggtggatcatatccaactgttctgtacgtattcgcgtcagaccttccgaaaggggcacgtgtggaggtaaagcctatactgtatgtcccttccactgatgattgggttgctgccgaagagacggagaccggagttccactgccagcaccgagcaaaacctggactgattgtaccgcaccatactctgcgttgcgcgattcgtgttgccaggtccacacaaccggcgggagaatttgttccgccgtggtgtcgatcacagatgacatcgcatcgaagatctgctctgcagctggacagctgcaccacggagaggagaatctgaaaataatggctagattctgtgctttccagatcgcgaagaccctggcagacaacagattttcctgggacagcgtaacgatgttgaggctctactactcggtagatctcgccgtggcggcagatgcagtgtccggagcattttccgaggccttggccgagcttgcccaagacaacccttccatgagaactgacgttcctttctacaacgttgtgcccgtagccggagctggccgctctgcgtgtgccaacgacataatggcgtgcgagttactggcatccaacgtctccagtgcgaagtccataccagccgaaccgttcgctgtgacgcctgcttgaatgcagctttccttcggaaattggaggtgggcgcacgttggaatttctgccagaggagccggtggccagtcaactgccagttggacgacgacggttgaccagcttctctagggctggcggcggtagcttcgtttctgtgctggcggtcgattaaaaaaaaagaccgtacggtgatcatcacagatgcacccatactgtattattctgtttcagcgtcctatacaaagtatacattgggtctgaattctgattagcctgtgctgatgcttgcaatgacattggttcttctgtgtacagactacggacagagtcccggtcagtaacgtgtgtgtacttgttcttcctctgtgttgacattcttgctcgatggtggaacctgtcgcagttggcggaggtgaagccgcgtagctcacttaggtctgccaaacacttcacttcttagattgtttctgtggaaatcgcttctgatgaatgcaaaatcaattaagtcgtccggttttgatgggagg

SEQ ID NO: 31511 - DNA, 1713 bp, Zea mays
  Clone ID: UC-ZMFLB73183C04_FLI
atacctccaaaatggcacctcaaccttctgctttcttgccagctcctgttactcagaccaattcatactccttaaggccgactgtttcttcttcagccacatcaggtgcgaaaacttcagatgttttatctagctcaatgcagaaagtttctccaatagtacctgggggtactgtgtctagctcagtccctactcctgctaaggattcatcaactggattgagtcaaaatgcttccaaacctgaaacgctaatatcaaaggtaactagtaccatagtttctgcaagttcgacttctgtcatatcagtcactgaaagcaaaccttcagtgcctccaacaactggcgccagcttgccttctactcatgtctctgctcctcaaacagcaccaacaacatcggaatcagttttcacttccacaggaaaaaatgtaggaccaaacactgacaccatctcaaccgatgaagatgacatggaagaggaggcaccttctgcaagtgccgaactgaacttgggagcccttggtggattcggccttgggtcccagccttcttcaagtcctcaaaagtctaatccttttggtgcctcctttggtacatctggcaataaaagttcaggcacaccatttactttgacaaccagtccaggacagcttttccggccagcgtcgctaagcattccttcagctcagccagcccaaccatctcaatcaactagttctagttctttttctaattcgttctcaagtgggcttactggatttggacagcctgcacaaattggatctggccagcagtcagcttttgggaagcctgcacagattggagctggccagcatgcaggatttgggcagactgcccaaattcaatctggttttggccagcctgcccaaattcaatctggttttggccagtcagcacaaatcggaactgggcaacagtcaggatttgggaagcctgcacaaattggggctgtccagtcaggatttgggcagcctgcacagtttgctgctcaacagacacttggatcagtgctgggttcttttggacaacctccccagttaggaggcataggttctggaggatttggtggattttcaagtgcttctacatctgctggttttagttctttatcttcaggtaatgctggatttgctggtgctgcatcaggtgggggcttttcagcaccaactgcttctgcaggtggtggttttgctgctgctgctactggtggaggttttgctgctcttgcttccaaaagtggtggttttgttggtgcagcttcatctggtggtggttttggaggtgcctcccagggaggtggctttggcagtggtggtggtggattcggatcctttggtggtaatcaaggagctgggttctcggcatttggagcaagtggggctggaagaccggcagctgatttcttgacgcagatgagaaagtaggctccaggcaaatccccagacaggtttacgcattagctatagcatacacatgaggcgagttacttttatgttccactcttaagcgttgtttcggcacaggagctgtagcataaacatgaccgcagtataccctggactggatgagccctcgcttcgctccatctattgatgatggaggggggctaccatttgggagccttattgttttctcttcttttacaagacacagcaggtgtcaacagcagcatcgacggttggtcttggattc

SEQ ID NO: 31512 - DNA, 823 bp, Zea mays
  Clone ID: UC-ZMFLB73183C08_FLI
atcctcctggacaacggcgagcgcggcctcccgcccaacgtggggctgcagcaggaggccgtgcagctggtggaggacatccgcgggaaggtgcacgcggcgtgcgggcccatcgtgtcgtgcgccgacatcacggtgctggccacccgcgacgccgtgagcctgtccggcgggccttccttcacggtgccgctggggcggctggacagcgcggcgccggcgtccagcaacgacgtgttcacgctgccgccgccgacggcgacggtggacgagctgctgacggcgttcgggagcaagaacctgtcggacccggcggacctggtggcgctgtcgggcgcgcacacggtggggaaggcgcggtgcagctcgtttggcgacgtggcgggcccggccaccgacgacgtgacgcggtgcgtgacggcgacgtgctcggcccccgggagcggcgacacgctgcgggacctggacttcctgacgcccgccgtgttcgacaacctctacttcgtggagctgacgctgaggaagaacaagggggtgatgctgccgtcggaccaggggctggtgagcgacccgcgcacgagctggctcgtccagggcttcgccgacaaccactggtggttcttcgaccagttcaggacctccatgatcaagatgagccagctcaggggaccccaggggaacgtcggcgagatccgccgtaactgcttccgcccaaacaccaacggcatcgccgcctctgcttgagttgactgaccaggcaccgatccattacttcactttcactgtgtgtaataattaataataataaaacaaaaacaacgcc

SEQ ID NO: 31513 - DNA, 1181 bp, Zea mays
  Clone ID: UC-ZMFLB73183D04_FLI
cgcctctctctcctctctctctctcaaaccgaaaagaaaagaggaaagtgggatagctcaatctcttcttccttcgtcattcctctcccgtaggttctctctccctccctccctccctccctccctcagcacacataaactcgagatacacatatatatcagtaggagaggatggatgtgcaaacctagcctgctgcctttgtagctgcaaattaaattgagctgtacctgttggtcttcctcctcgctcttcttggttctcgctggttgccgggagctgggatcgaaagtactgctgttgttcgcacggcgaggcggcggcggagaccggtcagaaggaatgtcttcggcccaaatcgcgccggcagatcatgtgtgctatgtgcactgcagcttctgcaacacagttctcgcggtgagtgtcccggggaatagcatgctcaacatcgtgacagttcggtgtggacactgcgcaaatctactgtcagtgaacctgagagcactgatgcactcactcccagaacaagatcatcagctccaggagaacatcaaggtccatggcatcaacggcactttgcacgatgatcatcagtactgcggccatttggatcagctcggttcttcttcgtcgtcaaggttccggcggcttccagtgatgtgttcgccacagaacgagcagcacctgctgcaggagcaaacacttaacaacaatgctcgtcctccagagaagaggcagcgggttccgtcggcgtataacagattcatcaaggaagagatacgcaggatcaaagcgaacaaccccgacattaaccacagggaagccttcagcacggcagccaagaattgggcacattatccaaacatccatttcggtttagacgactccgggcgagagggcaagaagaagctcgtggatcatgaggcggcggcgtctgtcgtcgcagtcgcagcagcaccgactgctgctaaaaagatccagggtttctactgatggtagcagatagatgtgtagattgattgatacatcatcgaccgggtggaagaattgataccacaaaaactgctttatatatatgtactgtgagtaaacagttaaaattaaacttgtgagatgtaccgtacatatgaagagctagctagtagtgagtcataaagtgggaaagtgaagcatatatagtcgt

SEQ ID NO: 31514 - DNA, 1007 bp, Zea mays
  Clone ID: UC-ZMFLB73183E09_FLI
gcaggtcggcgaggagggcaggaagaccgaagaccgagccgtgcgggggctcgggacgggaacgggacaggaccccaaaatctcagatccttcctgcccgcccgcccgtgcccgtcgacgcgtcgttcttgccggccgcgccccacctccgccctctcctcctccagggggatcggatacgccacaggctgcgcgatggtgctgtgggtcttcggctacggctccctcatctggaaccccggcttcgacttcgacgacaaaatcctcggcttcatcaagggctacaagcgcacctttaatctcgcttgcattgaccacagaggcacaccggagcatccggcgaggacctgcacgcttgaaaccgacgacgaggccatatgctggggaattgcatattgtgtcaagggtggtccagaaaaagagctaaaagcaatacagtacttggagagaagagagtgtgagtacgaccagaaaatatccattgatttctacaaggaaggagatcccttgaaaccagctgtgacgggcgtcttagtgttcgtttccactccagatccaattggcaacaagtactatcttggccctgctcctctgcaggatatggcaaggcaaattgctacagccaatggccctactggctataatagggattacctgttctcaatggagaaggcattagccagcattagccacgaagatgattcgatcatagagcttgcaaacgaggtgaggaaggtgctcaacagaacaaaggagaccaagatcactggtgccaatgcttccatgaaatcacatgcccctcttgtgcacctgtccgcgcttccagaaggcaccgttgtggactcgagatagcgacctctactcggaatttactttcagctcttgcatgtttgtggttgtggccatcatgtactgattttcccttttcaacagttgtcgtgaggctgtatcgtctggagtaaaaaaaaaaaaagctaaaagccggcactaataatgatattaacttg

SEQ ID NO: 31515 - DNA, 1035 bp, Zea mays
  Clone ID: UC-ZMFLB73183F04_FLI
cccaccgaattccctgcgattcctctcccctcgcctcctcgtctccccctaggggatcgtcggagaggaatcgcaaagagggccgtctcatccgagttaaggaagccatggagcacaaggaggctgggtgccaggcccccgagggacccatcctctgcatcaataactgtggcttcttcggcagcgcggcgaccatgaacatgtgctccaagtgccacaaggagatgataacgaagcaggatcaggccaagctggctgcctcctctatcgacagcatcgtgaacggcagcgacgccgtcatggagccggttgttgctggcagcaacacggtagtagctgttgcccaagttgagttgcaaacaatgaacgtgcagcagcccgctgatgttgccggacccagcgagggggtggcggcgatctccaaaggggggaaggtagggccgaaccggtgcagcgcctgcaggaagagggttggacttacgggattcaactgccggtgtgggaacttgtactgcgcactccaccgctactccgacaagcacgactgcaagttcgactaccggactgctgccagggacgccattgccaaggctaatccggtggtgaaggcagacaagctcgacaagatctagggggggttccctacggttgggtatcaggaagattgtaaaccgcggtaactcgtcatgcggaactgctgccttgccccccgcgcctttctcttccatgtttgctgctacaatcttgttgttgggcattgcagtgcacggtgcacacttgtgtagcccgcctcgagaattcctgcctctgcatctggtcagttctaaaatgatttgcatgttggctatgttgtgtaagctctatttatggtggtctcgctgagacgggtatttggcttcgcagttatctagctatgtgatgtactgttgtcttgtccctgggtattatatggtacactgcagccagtaatagtaatctgcaactgtgcgttaaatggtccgtcgttttcctatacaaagtatctctcttgtttgc

SEQ ID NO: 31516 - DNA, 1721 bp, Zea mays
  Clone ID: UC-ZMFLB73183G03_FLI
cgcgccccaaccccaaccccaacccagcggtcccagtcccccctccgttctctctgcactctgcagctgccggtgccggccatggcgcgcgccccgagctcgtggacgccgtccctcgccatggtgctcctcgtcgtggccgccgcggccgtggtcgcgtcgtcggaggcggccagggtgcccgccgccgtcggcaactggacgggggaggagctgcgcggggccgcggcgaggcggggcggccggcgctcccggcgccgcgcgttcgagaacggcctcggccggacgccgcagatggggtggaatagctggaaccacttcggctgcgggatcaacgagaacctcatcaagcagacagctgatgcgctggtcaacaccggtctggcgaagctgggctacgagtatgtcaacatagatgattgctgggcggagtctgacagggactaccagggaagcttcgttgcaaacagacaaaccttcccctctggcatcaaggcgctcgcggactacgtgcacgccaaggggctcaagcttggcatctacagcgatgctgggacacggacgtgcagccagaaaatgccagggtcacttgaccacgaggagcaggacgtgaagacattctcgtcctggggtatcgattatctgaaatacgacaactgcaacgacgccggcaggagcgtcatggagaggtatacgaagatgagcaacgctatgaagacgtatgggaagggcatcttcttctcgctgtgcgaatgggggaggcaaaaccctgctacctgggcaggcggcatggggaacagctggagaacgaccgatgatatcgccgacaactggggcagcatgacgtctcgtgcagaccagaacgacaggtgggcttcctacgccggacctggcgggtggaacgatcctgacatgcttgaggtgggcaacggcggcatgtccgaggcggagtaccgctctcacttcagcatctgggcgctcgccaaggctccgcttctgatcgggtgcgacgtgcgggcgatgagccagcagacgatgggcatactcagcaactcggaagtcatcgccgtgaaccaagatagccaaggtgcgcagggaaagaaagtgcagtccagcaatggcttggaggtttgggctgggccgctcagcaacaacaggaaggccgtggttctctggaaccggcagggataccaggcaaccatcaccgcacagtggtcgagcatcgggctcgcttcttccactgctgtcactgctcgcgatctatgggcgcactcgtcgttctcggctcaaggccagctatcagcttcggtgccacctcacgactgcaagatgtatgtcttgacgccgaactagctcagaagacaagagcggattgttccatggggcgtgggatgcaaccattcggtcaggattcagggaagaagagtatgcagtgcaggcaaggatttcaagagaaggaaattcgatatcatttggttatacaggatatgagtgcgaatggaggaataatttatactaatactatggaagtgtatttaaggcgccgtcaaaatgccggtgcctgtgttactggatgtttgtaacgagagttgcagcaataaaattggcttgcccaccaccctttttacgagcatgtggacggatttcagagaacaagagaatatagaaaatgtgcgttctctgtgaagtgatgttactaatgttatatcccatgaattctt

SEQ ID NO: 31517 - DNA, 776 bp, Zea mays
  Clone ID: UC-ZMFLB73183H07_FLI
tgttttcttactctaattatacatatacgttcatatagagatggaatcaccacccctcacggttgaagcgaccgcttttaccgagaaaatgatggacatgactttggaggatataatcaagatgtgaaagaaaaagaatcctggaggcaagaaaccccctaggcggccggtaaactctaagtctgaaggtttagggttttcatgctctcgactctgatagctaactcaggaacgaaccaatggtaacaattttcttcatttaatggtggattaaatgaaactatcttcggtctttggtacttgctcaacatctacaataagtaggtcagtggaacatatgtcctgtcaccgttagattgggcgatcgaaccatggtacatcagtcaccttctttaatgatttttttgttctacttactaatctgctgctttactcttccctggtgtttgtactgacctttttaggaaatcttgcagaactgatattcaatgtaaaatattcagtgtgatagaaaaaagaagattagtcgagtatgatctttatttcaatctgccaatgctcttgcgtgtcaatggatgtttgcaaagacaacagatgccaatgcagactggcttcttcctaacaacaaacctcaacaagccaagagagacgacaattggcgacgtaggaaaaaagacgcattaatcaataacgtgtggattcctggcagtggcgtagacaaggggctctaaggtttgtacaaacatataaatacatattaattactactatttttt

SEQ ID NO: 31518 - DNA, 680 bp, Zea mays
  Clone ID: UC-ZMFLB73183H11_FLI
aaaccggccgacgccttcgacatgggcggcggcctcatagcgccggacagggccatggaccccggcctagtgtacgacatccagccggaggagtacaaaagcttggacgaccgcgtcgaccgcctcaacctcccgtccatcgccgtgcccaacctcatgtacgactccgtcacggtctcgcgcaccgtcaccaacgtcgggccggtggaggcgacgtaccgggccgtggtcgaggcgccggccggcgtggcgatggacgtggcgccgccggtgatcgccttcgagagaggcggcgtcaggaacgccacgttcaaggtgacgttcgtggcgaagcagagagtgcagggcggctacgcgtttgggagcctgacgtggctggacgacgccaagcggcactcggtaaggatccccgtcgccgttcggaccgtcgtccgggacttcgtcgccgatgtgtctcgatgatgaacactgaacgatgtgtctgtcaaagaagaacaccgtctcgatgatcgtccatatatgcgacactgtgtcactgtgtgtgaacactgaacaacgtgtcaaaactgaacttatgttgccaatttatttgcaagcaacaaggcgctcccagctgatcttgtgcctttatgcagtttatacagttcaaataaactatgaggctcagcctagaattcatt

SEQ ID NO: 31519 - DNA, 2206 bp, Zea mays
  Clone ID: UC-ZMFLB73184B03_FLI
gcaaagagcattaagaacaggcctgaggtaaatcagaaaatgatgaaatctacattaattaaagatctttatggtgaaattgaccgacttaaggcagaggtatacgctgctcgagaaaaagttggggtgtacattcccaaagacaggtatcagcaagaggaaaatgagcgaaaggcgatggctgatcagatagaacaaatgaatgcttctttggaagtaaaccataagctaattagtgatctgcaacaaaattatgattctgagcttcaacattctgctgatttgagcaaaaagcttgaagtcacagagaaatgtctggaccacacaagcaacctactctctacgacaaaagaagatcttaaacaggcacagtataatctaaatgagaaagattatataatttcagagcagaagaaagcagaaaatgctttaacacaccaaacgtatgtgctgagatcagatctggaacaatatactcgtgataatacttcactatattcaaagattgctaggggagacaagctaagtgcaacaaataggtcagtcgtgaatacattccaaactgaccttgcttcgaagttggatattctttccaatacactcaatgcatcaatagaccaacaaaatatgcatctaaaatctgtggaggacttatgccaatcttatgttgattcccatgacaaggctacttctgagctgaaaaagaagattttggcttcaaaatcattatacatgtcacatatggaagctttcctaaatgttgtcctcgtacataaagcaagtgcaaatggcacactagaagatatatcatcactgtctgctgcaagctgctgtagtcttgaccagctactagtttgtgttgagggagaggcacagaatatatttaatgacatccataatttgttaaccatccaccgaagcgaaatgacgcacttcactcaagaattaagggagagtttccaaataagcttggataggacaaaagaaatgtccacctatattattgggctctttgacaagtacgttgaggaaacctccaaattgcacagtcactcaaataatactcatgaagcacaaatgaaaagcattgaagactttcagatggtttatgaggagcaatcaaaatcagtggagcagaagcttttagcggagataagcagtttagtatctaaacatattactcgacaaagagagttggtgggcgttagattgagctctctgggcgatgctgcccgtggaaataaggcatttttggatgaacacacatcggccatggagtttgtcacaaaagatgctaagaggaagtgggaaacgtttgcagagcaggctgaaaatgactgcaaagctggctccagcttttctgcagctaagcatagccgcatggaaaccatgcttcaggagtgcgcatgcactgttgactccgccgttcagcaatggaagaagtcacatgctgctgttaacgatctcagcagaaagcaagttgctgaagttgaagcactcgtcaggactgcaattgagaacaacgagcaacatgaactggaagttgcatcttctcgagctgtggctgaagaagacgcctccaataacagcaaggacatagctcagggcgttgaaaatctgttggaagaggcacggaattcaagttcaagagtggtctcaacggtggaggctcacttcggtgagctacagatgctgcaagagagccactcgagccaggctgccggtatcaacatgcacgccgacaaggctctccaaaccagttacaaggactacgaaccctcaggtgaaactccggtgaggtctgagccgaacgtgccaagcaaaggctcgattgaatcgctgcgagccatgcccgtggagaccatgatgaatgagttccgtgagaaccatccgtatgaacatgaatcgagcaaagaatctaagttatctcagatacctcgcttgccgctcgcgacaatcaactgagacattcacttccctatgtgcagtgtacttttattagtagggcgtcaatttgccggttttggtgtcccttgtgcacttgtgctaggttaaccatggggtgtgagctgccttggctctctccagtgcatttcccttttttcccgcattcaattatctgtaatgttctgttgtgccttgtacgatactgatattgtacagcatcagatatgtgccaaagctagcttgaattgcatgactcatt

SEQ ID NO: 31520 - DNA, 1619 bp, Zea mays
  Clone ID: UC-ZMFLB73184C01_FLI
ccgtttctgtcacaaatcgccactaaaaccctagccttccgccatggccacctcccctgccgcctcgtcctcctccgctccgaccgcctccgcggtggctgcggctacgatggctgttgaggccaccgacgggccggtgctcagcgtagtatcgaagcgtctccgcgcactgcggaagaagtacaaccgaatcacgcagatggaggagtcgctcgccgccggcaagacgctcaaccgagagcaggaggaggttctccgctccaagcccgtcgtcgccgctctgatcgacgagctcgagcgcctccgccctccgctcgcctccgccctcgcggaggagctctcctcccgccccgcccccgccccctccgccgcttcctcctccgactcagattcgtcagtccaggacttgcttgcgctcgtctacttcggctccctctttgacgtcaagcagcaaagcgacttcgtctctttggtttacacgcgcgaactcgagcggagcagctgcctcacttatgactacgtcggggatgatccggaggacagtctcgcggagaccgatctgaacgcggtttctgcccttgcctccctcgccgcgttgcgccctcctgctgcagccggagtctcgcaccgtgacgcccttcaggcttgtgctcatcacgcccgcctctggctctgccgtgcggatgaacccatccatcctgactccaccatcacatatgctggggtgagggcaaagctggataggatcatggcatcgggctacttcacagcgcagctagaaatgaggacaccattggatctggctgctgcagtggcaagttttggagctggaggtgtgcaggtgcaagagagcatggttgtgtcacctcaggcaccggaagcagtggaggagagccaggctgttgaaggacacaagaatgagaaggaagattctcaggctacagaaatctacaatgatcatcctgttgttgactctgaacatgtggaggatgaagtcctggtgcatccaactgatgaagttcctccagctgagacagagcaggagcaggagacatttgatgctgatgtgaaggatcaggagcaaaaggaccaacaattcatccagcggcggtcttaccagaaccagcgtggtggtggtcgtggtggcagcaggagaggctatcctaatggtcgtggaggacgtggtggccgaggtggcgggtaccagaatggccgtggtggataccagaatggtcgtggcggtgctggcgggtactactacgaatctggatactaccagccgaggaactacaacagaggccggggtggtcgctccggcggtggcaactcttactacaacagccatggtggaggtgcacaggggcatcatcctgggagtgttgagctgggcgcaaacgcctagcttcgctgactgttctgtttgataatgaggagcgagtgagtcgtgccattttgttattatagaactaacttagcctgttattacgtcaccgttggtcccatccgtgagtctttttgctgctcgagtgactgcatatggtcggtcggtattgaggaaatactctgggaaagtagtttcaggtcatattcgttttctaagttacgtttttttttgtgtt

SEQ ID NO: 31521 - DNA, 1703 bp, Zea mays
  Clone ID: UC-ZMFLB73184C08_FLI
ctcgctctcaggcgcatcattcttctcgcctcgtgtcgctgacttccccaagctttgctgggttgccttcgagcaggagacaggctgtgtagtgtagtctagtgctaccaggatcggatcagcggctgctgcgcttcagttgccgccggcggcatgagggtggtggtgacgggcgcgacggggtacctgggaggccgcctgtgcgcggcgctggccggcgcgggccacgccgtgcgcgcgctcgtccgccactccagcgacgtctccggcctgccccgcgacatcgagatgacctacggcgacgtcaccgacgccgagtccctcgccgtggccttcgacggctgcgacgtcgtgttccacgtcgccgcggccgttgagccgtggttgcccgacccctccgttttcttcaaagttaatgtaggtggacttgagaatgtgttgaaggctgtcaagagaacaccaactgtgaagaagataatctacacatcttctttctttgcaattggtccaactgatggttatgttgcagatgagacacagatgcatcgagggaaggaattttgtactgaatatgagaaatcgaagtttcttgcagatagaatcgcactgcaggcagcagcagataaggtgccaatcaccattgtctacccaggtgttctctacggccctggaaaacttacgactggaaatcttgtctcacgcattctaatagagaggtttaatgggcgcttgcctggttacataggagatgggtatgatagagaatcgttctgccatgttgatgatgttgttaacgggcacatagcagctatggagaagggcagagtgggccaacggtatctcctcactggtgaaaacatgtcgttcgtgctgatttttaacatggttgctaatatcacaaacacaagggctcccatgttccacgtacctctctggttgattgaagcgtatgggtggatttcagtttttgtttctcgcatcactggaaaactcccacttatcagttaccctactgtgcgtgttctgagacatcagtgggcatactcgtgtgacaaagcaaagatggagctgggctataccccaagaaacttgaccgaaggtaattcaaatttcaaaggcgtgcccaagacaatcaaactattctgctgggcgtttgcgatgcatatacaagagatcttggagcttcaatgcatttcgtgattccatgacccatgcttaagatttcaaagcatttgaacaccagcagggcagtacaaacaatcctgcaaggtatactgcagagaataatataagcagacaagaccataactttttcaaattaacggacggaagggtagccgttgattacaacgtcaatggaatcagtgagtgaacgcaaaatcctcagcttcttagatcaaaatccatacaccagtagaccaaaactatcagaaagctgtgtcgtctttaacagctctgggcccatttgtgccgttgtcatggcgttggatagtgcaaattaaaatataaaggtcgcatgaataatttgctaaccaagaacctgttagcaccacagaaggtagaagagaggagatcagagattggagctgggaagacggaagaaagacgagagcagacggggtttcagtgaattgatattttgtattctgttgtttgatgacttttacagatgactcagcctatatttatatctcctcaagctc

SEQ ID NO: 31522 - DNA, 886 bp, Zea mays
  Clone ID: UC-ZMFLB73184D09_FLI
tgaaagaactttggaagttggcttaccctaacagacaacttcctcctctgaagtcagatctctggaaggagatgggctggcagaactccgatccatccacagattttaggttcagttctgcagtgatgacgtttcttgataaattgtcatgcattatgttgacatgatttgagccggatgatttgtattttaaagtatcctatgcttgcagagcagctgggttcatgtccttggagaatctaatatattttgccagaaattacccagtatgttctattcatcctggattcctgggtgactcaattgtgtttaatgctgtgcagttgattttacatgcaggattcctttcacaggctactgcataaagcagatggtaagagagctgaatgggagtatccttttgcagtaggcggcgtaaacatatcctatatgttagttcaaatgctggatttacagtcaggaaaaatgagaacaaaagctggtgttcactttgttcaactactcgatgatgacggtgtggctttcgataaccttttctgtgtagcatttcaggtgcttgattctcaatggcttgcaaggcgagcgagttatatggaattcaatgaggttctgaagtctacacggggtcagttagagcaagagcttactatcggaggtatttctcgcattcaagacatgccatcattcagaatgctgagaaggtagcgctgtttgtacttcacaggaaaagagatacattttagattccaatatattgtttaaatttgttgtccgttctttcactggattttgaagacgtgacattgtgtatgttattgagtatattgtttgtaatgtcgcagcttaaagctacagatcataatatatgatatgatatcttgaaaag

SEQ ID NO: 31523 - DNA, 864 bp, Zea mays
  Clone ID: UC-ZMFLB73184F05_FLI
atacgctgcagagcatttttagtgataagaaattcaaaggttgtctcaactccctcatggatgctgatgcaacaacgagcaacattcaaagatttctgtacgtttccagcagcttgttggttctttcttcataacatctataattaaacatcaatatgtgctcagctgaatatggacaagcaattttttttttcagtttcagagctgtgtcatatatggacatggaatctggattcctgtcggtagaaagcttcctaaaggccctttcttccatgcagaggcaacctaagatggacagcttacaagattagaaagtaaggagcaaacctcatacaacttcaccagcataatgaaagatccatacaagacgcctataagacttctgataaatatgcaagcaccgtttgttttagggcctttgagcacctttcggatcgtgagctgattagttttggtgacaatagatggagaaaccaggcgcttgaataccgacctgttaagctcctcatatcctcccgcgagctcgctgagtccctcaagctgaacaccacctgccccgctgtactgcagaagctgtttgatcgtgaaagatacatgtagaatctcctttcagatggccgcgcttcacctgacttgagtcgccgctttcatgtttcaccgggttgtcaagttcatgtttcactgtaaaccggcgattgtattagtatcttgtccactgttcgctggaaaaggtgtgggccgtgtggccaactgcccagcgtgagtcgtgacctgcctgtcaatcgcttgagtcttgaccataggccacacggaattagatatctgtggtgcactgattttgggctaacgacccgatttctatct

SEQ ID NO: 31524 - DNA, 988 bp, Zea mays
  Clone ID: UC-ZMFLB73184F10_FLI
gaattttctgcctgccttcaggtttcagaggacgcatcagttgggtcatatattattgtcaagaatgaaggccagcatgacattgacattaatgtcaaagaaccgtcatcaaatacagataatgataagaagtctctacatcttatcaagggtgcctttggacagatgaacataacatataccacttcagatgctgggaatattactttaagtgatggaaaggtagactgcatcatacatgttgggcagccagtagagaggaaatcggtttatgatttgcaacaacagtttcagcagcttacagcctatgcaatgcgtttgaatccagcttatggagcctctttttttgttttcactgttgttttggttgctgttggatgtgcctgttgcaagtttgcaaagagaaaaggcaatgatggtgtcccgtaccaacagcttgagatgggaggtcaggcaccaaactcttcgggggtggacaacaccgcaagcacaacagatggctgggaagacggctgggacgatgactgggatgatgaagaagcaccggcaggacctgtggataaaaagcctacgggcagtgtctcagcaaatggcctttcgttgagatcacagacaaatagcaaagatggttgggatgtggattgggatgactaagctcctaagaacttggagtgtagctgtcaaatgagggaggaagatacttccatctgtctgacctgcaggaaagacatctacagttcgaaatgatggaacttagtcttgaccaagtgacccttatcctgaggtgaaggattgcctcacgccctcacttcatacggtttgtacaatattgttccaccccccgtctgagttgatacacgaactgttagcggtactgatttagttcttttcggtttgtaatggtacagaagaattgtcagtatatatatatataaaaccaaagcacacatttttattctttggttgaggtaattattctttaaactgc

SEQ ID NO: 31525 - DNA, 1121 bp, Zea mays
  Clone ID: UC-ZMFLB73184G07_FLI
gacagctccgccactgacggcgcgaggctaccgccgccaagggccgggagtcgcctctgcgtcaggtgcggcgagaggaaggccgcgctgaagcggcccaaaaccctagaacagatctgtagggaatgcttctatatcatctttgaggacgaaattcatcaaactattgtccagaattctctgtttaaagctggtgagcgtgtggcaatcggagcttctggtggaaaagattcaaccgtgcttgcatatgtgttatcggagttaaaccgtcagcacaactatggtcttgatttgttccttttatctgtcgatgaaggaatcacaggatatagagatgactcactagaaactgttaaaaggaatgaaatacagtacggcctgccactgaagattgtttcctataaagatttgtatggctggacaatggatgatattgtcaaagcaattggtctaaaaaacaattgtactttctgtggagtttttcgacgtcagatgacattgcagaaaccgtcttgctgaacattctgcgtggtgatattgcaaggttaagtagatgtacctttataactactggtgaagatgggccaataccaagatgcaagcccttcaagtatacctatgagaaggagatcgttatgtatgcatacttcaaaaagctggattacttttccacagaatgcatctattcaccaaatgcataccgtggttttgctcgtgaatttattaaagatttagaaagaatgagacgatgaatgttgcaggcctagagctatactagacatcataaaatccggtgaaaatttcagaatctccacaacaacaaggatgccagagcaaggaacgtgtgaacgatgtggctacatttctagtcagaaattatgcaaagcatgcgtcttgctggatggattgaatcgaggcttgccgaaactaggcattggaagtaccaaagcaggtgctagagctgacagtgatggtaagcaacgcaccaaacgttcagagaggaatacatcgagtctacaagggaaacatgggaacttcgatttctagatctctactgctatttttctccaaaaattgtaataaattttgatagtcattggtcatttagtggattttcttct

SEQ ID NO: 31526 - DNA, 1859 bp, Zea mays
  Clone ID: UC-ZMFLB73184G12_FLI
gccaccatcatttcgtgtcgagtctccgtttcaccctccccaaattcccctcaaatcgatctcccccgcaccccgaatccccgcgcccccgcgtctgaatccggcgccccccgccccgatccgtccgatccgcgccgaatcgccgttgctcggggcggaaccctagcccgatctccacctgtttcctcgcgatgggcgccggtcgtgtctgccgcggcggccctttctccgcctcccccgccgctggcgccgccgcggggcggccgttcccgccgctcaccgcgtcctcctcctcatctccttcatcggccccttccgagacagcgtccacgtcggtcaccaagacggtgaacggctcccaccacttcaagatcgcgggctactccctctccaaggggatcggcgtggggaagttcatcgcctccgagtccttcaacgtggggggattcgactgggcgatctacttctaccccgacgggaagagcggcgaggatggcgctgcctacgtctcgctcttcatagccctggccagcgaaggcaccgatgtgcgcgcgctgttcgagctcacgctcgtcgaccagagcggcaaggggcaagacaaggtgcatacccactttgggaggtctctcgagagcggcccatacaccctcaagtaccgcggcagcatgtggggctataagcgtttcttcaaacgagttgccctggaaacatcagactatcttaaagatgattgccttttagtgaactgcaccgttggtgttgttcaatcacatactgaaggaccaaagatatacacaattccagtaccacggtccaacatggctctacatattggtcagctattgacaagtgggaagaggacagacattgcatttgaagttgatggagagatgtttcctgcccacaaggtgattctttcagcccggtctcctgtttttagggcgcaactttttggtccaatgaaggataaggacatgaagtgtataaagattgaagacatggaggctccagtattcaaggctttgctccatttcatgtactgggatgagttgccggatcttgaagagcttactggtgtaaatacaacttgggtatccaccttgatggctcaacatttacttgctgctgcagaccgttatgcattggagagattaaagttgctctgtgaacttaagctgtgtgaagatgttgcaataaacacagtggcaaatactttggcactggctgaacagcaccactgctatcagctaaaaactgtttgcttaaaatttgtggctctgcctgagaatttgaaagctgtcatgcaaaccgatgggtttgattatttgcagcaaagctgcccatccctcctgaccgagcttcttgaatatgtggccaagataggagagcactccgtgagcccctgcctgtattcaactgaagtccttgatggtggagatgccaatggacgacgcgtgaaaccaaggatctaacggctgcccagatgagcctagaagagggagttccttgtctttttttttttgttgttgttgtaaagtgattccaatgacgggcgcttctgtggtgccataatcatgcatgttgtagcgttggtttgtgtgtgttgtgatttccccagccccattgctgctactgtagagggactgatatacatcctactgactagactgcgttgctgctgcaaagcagcttttcatcatatgccaaggatggtctggtgcaaaggtttgatcaaggggggagaatggcgcagaatatgttctgcagaagttttacctttcgctaggccagatttgtcgattcatggtcatctgtattgactgtattcaattgaaatgaaatgtatccgttgaacattc

SEQ ID NO: 31527 - DNA, 944 bp, Zea mays; identical to SEQ ID NO: 16957
  Clone ID: UC-ZMFLB73185A09_FLI

SEQ ID NO: 31528 - DNA, 810 bp, Zea mays
  Clone ID: UC-ZMFLB73185B05_FLI
aacaccaagctacatgtgcccagaacttcttgccgacataccgtatggtactaaatctgatatttggtctctaggatgttgtatttatgaaatggcagctctcagaccagcatttaaagcctttgacatgcaagccctcattagcaagatcacaaagtcgatagtatcgccgttgcccacgagatattctggttcctttaggggactcatcaagagcatgctacggaaaagcccagaacaccgaccaagcgctgcagaactgctgaagcacccacacctccagccatacgtgctgcaggtccagctgaagtccagcccctctcgcaccacgtccccaatctaccaagctctgacggacaaagtgaagaagatgacgttcgtgagcgacaccgccgattccgcgaggaggagggctgcgagacggagctctctggggagcgagaggaccgtgacgttctgcaagccatcccccgagcgcaactccgtcagctccacgcggagcatcaaggagtacacgacgacgacccagagtgccagggagctctctgtcggcagcagcctgcaggtcgacgacgaggtcacgagtaaggctgttgtgacgaagacggcaggcgttctacggactcccagcaagagccgtgctccggcatctaagacgttggtggcggctagaagccggctggatcctccgaagacgtcctatgccagaacgaaccgtgccgagttggactcaaggacgcctctgagcaagagcagcgcgcggacggcaaggagagcatccctcccgctggcggcgtacagagcacccag

SEQ ID NO: 31529 - DNA, 1483 bp, Zea mays
  Clone ID: UC-ZMFLB73185C12_FLI
cattccctcacctgccatggcgatccatccccggaccaccggcggtcgcaggcagccgctgccgctacccctgaagggggccctcctagccgccatcgctgtcgcgacggctctctccgtcctgttcgtcctgtccttcacggacacgctgaccttcacggacacgctgccctacctggggttccggccccgggacgtcgacaagagggacggcaaccggaggtacctctactggggaagccgcgtagactgccccggcaagcactgcggctcctgcgcgggcctcgggcaccaggagtccagcctccgctgcgccctcgaggaggccctcttcctcgacagggtgcttgtcatgcctgcaaagatgtgtctcagttcagtgcacaatacaaagggggtccttcaatcaagcaatgcaacttcacaacaaaggtgggaaacaggttcttgtgcaatggaatccttatacgatattgacctcatatcaagaaccgtacctgttattttggataatccacggtcatggtacgagataatatcaagaagtacaaaactcggtgaggatggcttggtggtgcatgtgcaaggggttagcagagctgaactcaaacaaaattcaaattactctggtgctctcctcataaaccgcacagcaagtcctcttgcttggtttatggagtgcaaggaccggaccaagcggagttctgtgatgttgccatacacttttctgccaacaatggcaacaaggaaactgagggatgcagcaaacaagatgaaagagatacttggtgactatgatgctattcatgtgagacgaggtgacctactgaagaataggaaagatagatttggagttgagcgaagtcttcatcctcatcttgacagagatactcgccctgagtttatcaagaaaagaatcgcaaagtggattcgaccaggtcacactcttttcatttcctcaaatgaaaggaccccaggcttcttttcatctctatcagacaagtacaggctggcatattcatctaacttcagcagcatattgaatccgataatcaagaacaactatcagctgttcatggtggaaaggttgataatgcaaggtgcgaggacgtttgtgaagacaatgaaagagttcgatgaagatcttgctctctgcgacgatccaaaaaagaataccaaagactggcgggaaccagtttatacagatgactgacgtcagctgttttgtgttcctagatgcttaggtccaactatatcaacgacatcaacaacaaaactttttagccccaagcaagttgggtctaactgtatcactgatcttaaaggtttcacaaagatgaccaattacatgccatttatgagatgacataatagcttgagatggatgcatgaactatatatggcatgacaggagaggaacagagaaagcgaatgttgtctgaagtctaagcttgaacatcaaatgtgactgctcttttgttcc

SEQ ID NO: 31530 - DNA, 1374 bp, Zea mays
  Clone ID: UC-ZMFLB73185D02_FLI
ctctagccgttgtggtttggctgcttgtctacaggcgaagcaagaaaagaagaagatcgcgagaagtgttaagtgcctcagctgctgcattggtagcaccgcaatggaaagtattcaccagtgaagaacttagatcgatcacaaagaacttcagcgagggtaaccggcttcccggcaacgcaaagacaggcggaacctatagtggaatcttaccggatggatccaaagtagcaatcaagaggcttaagaggtcgagcctgcaaaggaaaaaggacttctactctgagatccggagagttgcaaagctatatcaccctaatttggttgctgtaaaaggatgctgctatgatcatggtgaccggtttattgtctatgagtttgtcgcgaatggtcctttggatgtgtggctgcatcatattcccagaggagggcggagccttgattgggcaatgagaatgagagctgccacaactcttgctcagggaattgcgttcttgcacgacaaggtaaagccgcaggtggtgcaccgtgacatccgtgcaagcaacgtcctactcgacgaggatttcgggtcgcatctgatgggggtggggctttcgaagttcgtgccgtgggaggtgatgcacgagagaaccgtcaaggccgcgtcctacggctacctcgcccccgagttcatatacaggaacgagctgacgacgaagagcgacgtgtacagcttcggcgtgctcctcctggaaatcatcagcgggcgccgccccgcgcagtcggtcgagtccgtcgggtggcagaccatcttcgaatgggccactccgctggtgcagtcccaccgctacctggatctgctggacccgctcatccaggagtcgccggacgcgggggtcgtccagaaggtcgtcgaccttgtctactcctgcacccagcacgtcccttcggtgcgcccgaggatgtcgcacgtcgtgcatcagctgcagcagcttgagctcaagtctgcagcgtccgagcagcagctaaggagcgggacgagcaccagcgcgacgtctccaatgctgccgttggaggtccggactcctcgctgaaatgtgctgccagaaattgatagcctttttaagtactctctagctctgtaggtggtaccacattccttgtgggccaccgttatcttgatcagttgtagacttgtcatctgtaacctctaatctgctacatatgtcgtgggttttcaatgtgtgacctaaagaagctttaggcttatgctctcaagtctgaagaaacaactcatctgtatttcatagagtaataacagtagcttgtaatactatttcctatcaacacaactagcagttcgatttctatcatatttacatttggcggccc

SEQ ID NO: 31531 - DNA, 2239 bp, Zea mays
  Clone ID: UC-ZMFLB73185D11_FLI
gctgccgctgcccccgattgagccgccgccgcctcagattcgccgtcgccacctcagattcgccgccgccgccgccgatttggacgctgtcgccggcgattcagcctccgccgccctggatttggcctccgccgctcccgattcggcgctgccaccctgaaacagcgccgcccctttcccttcccctatgccctatgccctcttgctgcttctcacctaggcgacggggacgccttggatccttcgggcgcctggacgcctaggcgacgcctttaaaacaagggtcttctctgtattaaatattttctgatgtacagtagctaccttgttaattcatgcctccagcatgattctccgttgtgctccatctgtttgttgcttgaccttgcgccttgttattctgccatttggttgaggatagattaatcctcaattgtctgacaattgttcacgtctaatttaggttttttcggcatttgggtttgttcacaagatagctacttttgagaaagcagctggtttccaggcacttatccagtatactgatgccccaactgctcttgaagctaaaaactcattggatggaagaagcatcccaaaatatttacttccagaacatatcggtgcctgccacatgcgcataaccttttctgcgcataaggatttgaatatcaaatttcagtcgcatcgcagcagggattacaccaatccttaccttcctgtgaaccaaacagcaattgaggggattgtgcagcccacggtgggccctgatgggaaggtaaaggagcctgagagcaatgtacttttagcatcaattgagaacatgcaatatgctgtgacagtggatgttctgcacactgtgttttctgcttttggagctgttcaaaaaattgcaatgtttgagaagaatggtggaatgcaggctctaatccaatatccagagaggtgtcggagttcgtgaaggcttaaaatggacatctgcaactttccacagctataaagttgtttttagtaatactctctttcttactagaggcttgctttaaactttcattttgtcatcattgaacttcccttgtgacatgcgagtcctaatttaggtacctttacctgtttaatgtgttgggcattagaatatagtcagcacctctatatcattggttcttctgttgaaaaaacattttgacatctaatttgtgggccttatctagcttattgaaataaatatctttgaaaagtatggcaattcaaatgacatcaatcttgttggtgctcaatactgtttgtactggttagtggtagttgtaattgaactgctttgatgaaacaagaatctctaaatacctttgcacccacacttatcacattatgaccctggaatccagagtatcttaaaatttattctttatggtcaagtggaattgctagttctgtttcccccttagccatggaaatatatcattaatatttgatgtacaaatacataggttcatctgactaacaaaatctttttttagatataactaccgcagccgttgctaaacaagctttggagggacactgcatatatgatggtggttactgtaagcttcatctgtcatactctcgtcatactgatctcaatgtaaaggcacatgatgagagaagcagggactacactctttcagaccctaacgtgcagctgcaagctgctgcacaaacgccagttctaaggtctccgggagtggcatggcagaacactgcatcagtaccagctgctcctttttatgcaagcacagcgacttcaactcctattggagttggacaggtggctgcttggaatcctaacatgcaggcagggagttttgcatctgcatcgactgcataccccaaccaaccattaatggccaactccatgcctcactatcctgctattggatcgagttccggtgccccaccagtagcatttcaggcttcgcagcagatgacacagtatagcatgccccctggtgctccgccgcacgcaccaccagctggccaatcgatttactacccgaagtaagcggttttggttcaatattatcagagagcaatcaggcattgttacctgcgacaattgtggtccgcaaatgcaatcttgcgaattttgcaagtgcgctgtagcacttgtaacttgcgagcgcccttcgcaagaatgcatcagcgtctgctgtgtctgtaaaactgtcaaagatagtgtttacctattagcttgcatggt

SEQ ID NO: 31532 - DNA, 1068 bp, Zea mays
  Clone ID: UC-ZMFLB73185F07_FLI
taaaatgactaccctaagaaagcttctgcttactggaaatcctatgaggacacttaggagttcattggtttctggaccaacaacaacattgctgaagtatctgcgcagccggctttcatccgatgaggaagcatcaggatccagaagcaccccaactaaagatgaccaaattgctgcagcaaggcgcttgtccttatcttcaaaggaactggacttgagtggccttggagtgaccagtgtaccagctgccgcgtgggagacaagtgatgtggtgaaactggatctttctaaaaattcaatagaagatctaccaaatgagttgtcattatgctcatcacttcaatccttagttttgtctaataacaagataaaaaggtggcctcacacagtggtttcctcccttccctgtctgtcttccttaaagctggacaataaccccttggtagagatatcatccactgatcttgtgcctctgtccaaacttgaagtacttgatctaagtggcaatgcttcagcacttcctgaaccttctgcagtttctgcattaccacagctgcaagagctttacctaagacgaatgaaactccatgaatttcctaatggtttgctgggcctaaaactgcttaggattcttgacctgagtcagaatcaccttacaactgtgccggagggcatcaagaatttcactgcactcattgagcttgatctgtctgacaacaatataacagcactcccagcggagctgggattgcttgaagctaacctgcaagtgctgaaactggatggaaatccgctaagaagcataagacgaactctgttggagcgaggaacgaaagcagttctcaagtacctcaaagaaaaattgccgtctgaataatatttatagaacaaactattgttggagtaatggaataaaatgtttttttgccactgtatctcagttttctggactgaattttgtgcaaaagtatctggaccttgtgtgagaagagagctttgtgagtgtgttgttggatatactggttatagtccacatgttttattggaacaaaaatattttctctgttc

SEQ ID NO: 31533 - DNA, 974 bp, Zea mays
  Clone ID: UC-ZMFLB73186B05_FLI
gcggcgacggggctgccgtccgacgtgccgcgcggccacttcgcggtgtacgtgggcgagcggcgccgccgcttcgtggtgcccatcgcgctgctggaccgccccgagttccgctccctgctgcgccgcgccgaggaggagttcgggttcggcgccggcggcatcctcgtcctcccctgcgaggaggtcgccttccgctccctcacctccgcgcttgcctgcgcccggtgaaggggtgcgggttgcctgccacgccgcgtcgccgccgctatattcgttcgattcattggtatctcggcgagcttactcacctacactagctactagctcggcgagagctccagcggttacgttgatgatggcgtgtgtcgtacgtgtgtaaatatagattactcgtattagagaaaagcgctaagctaagaacaggccggtggcgcggccggccggctgctgcgcatgcgcggaggattgtgccagcgcgcccccggcccggccggcattggagacggccgaccgaagattcgaaggatgaagcacaaggacatcgacggatcagatgcatggagctgagcgagagcgagagctccagatcagcttcgctgcagtcggctacgtacggctatcatcatctatctagccgtacgttgccacgttggccgctgctagctgcattgcatgcatgtacgttgtttgtgatgcgtttcacttactggccccctgctggtgcaacaagtgaaccatcattttttcccttttttttcggtacatgcaaagatactgctggctgactgtggcctgtgggtacgtagccagaggcccagagctaggtagctggtatatgggcgaccgtacgcaccgacatcaagcattcagatatgcacacacagcatacaaacaagtgtgtgttccgtccatccttcaattccttgcagcttcggttcgtttttatatatcctgatgattcatcgatcaat

SEQ ID NO: 31534 - DNA, 1669 bp, Zea mays
  Clone ID: UC-ZMFLB73186B12_FLI
cggacggtggtggcatcgccaattcaactccgcatctgaatcggcactcggcagcgcgccagctccatagtgtaggaggagatggcgctcacaagaatcggtcttgctggccttgcggtcatggggcagaaccttgccctcaacattgcagagaaagggttccccatctctgtgtacaacaggacaacctccaaggtggacgagaccgtgcagcgtgccaaggcagaaggaaaccttcccgtctacggcttccatgaccccgcgtcctttgtgaagtccattcagaagccacgggtggtgatcatgctcgtcaaggccggcgcgccagttgaccagaccatcgcgacgctcgcagctcacttggagcagggcgactgcatcatcgatggggggaacgagtggtacgagaacacggagaggagggagaaggccatggaggagcgcggcctcctgtatcttggcatgggtgtctctggaggagaggagggtgcccgcaacggcccgtccttgatgcccggaggctcgttcgaggcttacaagtacgtcgaagacattgtcctcaaggtggctgctcaggtccctgacagtggcccgtgtgtcacgtacattggcaaaggtggatcgggcaactttgtcaagatggttcacaacggaatcgagtatggcgatatgcagctgatttccgaggcatacgacgttctcaagtcggtcggtaagctcaccaacagtgagctgcaccaggtgttctccgagtggaacaagggcgagctcctgagcttcttgatcgagatcacggccgacatctttggcatcaaggacgagcatggcgatggctacctggtggacaaggtccttgacaagaccgggatgaaagggacagggaagtggacggtgcagcaggccgccgagctgtcggtggccgctcctacgatcgaggcgtccttggactcgaggttcctgagcgggctgaaggacgagcgggtggaggcctccaagatcttccagggtgactactactccaccggctcgccggtggacaaggcgcagctggtggaggacgtgaggcaggccctgtacgcgtccaagatctgcagctacgcgcagggcatgaacatcatcaaggccaagagcgcggagaaaggctgggggctcaacctcggcgagctggccaggatctggaagggcgggtgcatcatccgcgccatcttcctggaccgcatcaagaaggcctacgacaggaacccgggcctcgccagcctgctcgtagaccccgagttcgcgcaggagatcatggacaggcaggcggcgtggcgcagggtggtgtgcctcgccatcaacaacggcgtcagcaccccgggaatgtccgctagcctggcctacttcgactcctaccgcagggacaggctgcctgccaacctggtgcaggcccagagggactacttcggggctcacacctacgagagggtcgacatgcctggctctttccacaccgagtggttcaagattgcgcgcaacatctccaacaactgatgagctgctcaacggatggcatgcccggtgttgactactccagtcggtaatgagatttcctgcaggaacttgtctattgatctttgtaagttaattatttatatgaataaaataagagcagacatgcttgtgtttgggc

SEQ ID NO: 31535 - DNA, 713 bp, Zea mays
  Clone ID: UC-ZMFLB73186C03_FLI
gcgaaccattctgatcctgcaacccgtggcgccgccgccgccgcatcgcattgcccggacgccaaaacctagctcctgaactctcctcggctcctcgcccacctctcgctagccgttcccgctctgcagtctccgtggccggacgccgcggcgacatggcatcgacctgtttccgcgccgccgcccgcgtggcctccgccgccggccgctcggcggcggccacccgatcggctccctccgcggcccgtgccgccgccgccgcccaccgcgcctcgtccttctccaggatgccggtggagctcgggtgctgcgcgggattgtcgctgctgccgctgcacagcgcggtggcggcggccaggctgacgtcgcggctgagcacggcgtcgagctgccgtgctctctctcaggagatgggtctatccgttcgaaggtgataaatcgctggaagacttgctcatgtcatgctgttggactcaaatcatttctatagattagtcatctaaatgaacatctggagcactacacttcatcaccccttcgacaatcgtggctatcttagatttttttcccccaaggttttgagttcatgccttgtgagatatcatttgatgaaaatatgcaaggacggtttgccgacgtctgggctgtattcagccagtacaattctgcgttaaaaggtggttgatgatacctgaggattgtcattttgcgtt

SEQ ID NO: 31536 - DNA, 749 bp, Zea mays
  Clone ID: UC-ZMFLB73186C06_FLI
aagcgaagcactccactccactccactccacctgttagaaacaagctagctcaagttctctcaacttcttgccaggaaagcgcgcaggaggtcgacgggaacgaccatggtcagcgccaagagacttgtgcaaatggccaagaagtggcagaggatggccgccacggcaaggaggcggatcgcactggcgccgccggcaaaaggagccgccgagggatcgtcgccgccgtgcagcacctcgcgtgtagctgtagccggcaagggccactgcgtggtgtactcggcggacggcaggcggttcgaggtcccgctgccgtacctcgacaccgccgtcttcggcgtgctcctcggcatgtcgcgggaggagttcgggttcgccggtggcgacggcaggatcacggtgccctgtgacgccgccgtcatggagtacgtcatgtgtttgcttcggagagacgcgtcggaagaggtggtgagggcgttcctgagctccgtggtgagccggccttgcagccactgtggaaatggctcgctggtgcagtccaccacgggagttcgccagcaagctgctgtttctagcttctgagctgaggattaattagcacttagctagattgttttattattattattattattattattattattattattattattattattattattattattattattattatccttgagtgatatatgtaaatagtttggagtttggaaatgaaggttagatacaattgttc

SEQ ID NO: 31537 - DNA, 975 bp, Zea mays
  Clone ID: UC-ZMFLB73186E03_FLI
tgctgttgtatcatcagatatttatattgggaacgaggagaagaaacttgagcctgcagccactgaaaataaagctcaaggtatggaatctgagaagatcaatggagaagagaaactgccaactaagagtaccttttcttacactgatgaagtgaaggagaggttcaacaggattctcaagtactatattgggacacacaatttccataacttcactacaagaaccaaagcagaggatcctgcagcaaaaagatttatcatttcctttgctgctgaccgtgttgtcagcctggatgggattgattttgtcaggtgtgaagttgttggacagagtttcatgctccatcagatccggaagatgattggtcttgctgtagctgtgatgaggaactgtgcacctgaatcaatttatgatgtcgcttttcgcaaggatgtcaatcttaatgtgcctactgcacctgaggtcggactgtacctagatgaatgtatgttcacatcatacaacaagaaatggaaggattcacatgaggcagtttccatggaaccttattctgaggaggccgaagagttcaaggtcaagtatattttcactcatattgcggcgatggaacacaaggagggagctgtagctttgtggttgcattcattgaaccacagaaattatccagatttccgttacatggaaactgccgagcacaatcctggtgctgaagttgagagtattgctgctggtgcagagcccaaggttggagctgaagttgagaatactgaagaagtacagatgccaagcgacaatctaagtgagtaataaattttgccaaggggcatgcaaaactgaagaaaatatctgtttgtcgtgttactgagagggacctcaaacatttctaatgagatatcgtaatatagagaatgaaaactcatatgttctccaatggaatatgaacatcaagaggttaatgtgcatcactttatgcc

SEQ ID NO: 31538 - DNA, 922 bp, Zea mays
  Clone ID: UC-ZMFLB73186E04_FLI
aaaccaaagaattccttaacacgggcatgagaagtctggatgaacacagtgggtttcaccgcaagctgaagcatttcgcagagcagtgccaaactgatgtttctttgttgcaagaggaagaaaagaaaattcggtccttggtcaggggcactgttgattatttccatgggagtacagggaaggacgagggcctgcggttatttgtggtagtacgagatttccttgcgatgctggacaaggtttgtaaagaggtgaaagaagcatcaaaagtggctccaaagaaaacaaagaccgctcagccatctcaagcatctttcaatgatcccaggcgcaaactattcccagcaattcaagacctaagggcagacagttcaagctctgatgaagacgattagctgtataccgaatcaaggagtccatgttttcaccttcgaatgcactgaatttgacccttcaaaacaatagtgcggtgatacataatacatggaaactgatgggaaatggtgaagtgacgctattttttgccatccactgatcaaaaaggcaacaatcaaattgggaaacctggcttggctttacactgacatgttggtaatgacaaatcatcagaccagatctggcattcttggccaatgggtttgtatggcactctcctatctagcaagaaggatgttcatatggtcgagacagcatctatataaaaggtgtggctggtggaaaatggataattcaaaggaaatggaagaaaactggctctagtttagaaccggtgtaaatgcaggaggaagtctgactaatactatttttctgttcattgtacacatgtaccattgtaccgaacgcagagaaatgcagcgcaaacttgtgaatccggtgccattacccttgcaaacaggaatacaaatgaagtgtttggtttgag

SEQ ID NO: 31539 - DNA, 2028 bp, Zea mays
  Clone ID: UC-ZMFLB73186E05_FLI
ctgctccaactctctccctgcccgcgaccacgccgcgatcacgccggtggggcggaggagcatgctgaagctggcgcagcggatgacggacaacttctgcgccggtgtgtgtgcgtcggcggcgcagaagtggcggcgcctggacgagtggcgcagcggcgagggaggagacgctgctgggaacggcggatcagcagccgcgggcgagggcgaggagaaggtgcggatgatggcgcggcacagcgtgggggcgcccggggatccccccggcgtggtgctcagcgccaccacgtcggtgcggctgcccgccacgtccccgcagcgcgtgttcgactacctccgcgacgagcagcgccgcggcgagtgggacatcctggccaacggtgaggcaatgcaggagatggaccacatcgccaagggccagcaccacggcaacgccgtctccctcctccgcccaaatgtaagcactactactgccctcctccttacttcaatttttactgccgtttttaccgttgcgatcaatgaatcatctctttgatttttttttggtcccacattgtaatgcaatactgtttctcatcaagtgtagtacagtaccgtggtgccggatttgtgtttatatgcatgcactgcagtattgcatgggttgagggacaccatgacacagagaaaaggacaaaccggaaaaggttaaaacactggcagtttaccagaaactggtccatggttgacatttgtgagggaaagctcctgtcacttttgtgtgtttggaaccacgcaggctgcccttgtccttgccttcatcatccctctctgatctactagtactcaacagtctatttttagaattttaagttttaattaaaccaatttaaaagtttaatcaatacaaaaatagtatgacaatattatatatatctaaacaacatgcagtataaataagttcgcaatacatattttttactctcttcattacccctgatgaatttctgatgagatgtgttgcaggcaactagtggcaaccaaaacaacatgctcatcctgcaagagacctgcaccgacccgtcaggctctctggtggtgtacgccccggtggacgtgcagtccatgcacgtcgtcatgaacggtggcgactccgcctacgtctctctcctcccctctgggttcgccatcctcccggacggccactgccagtcaccaaacactgcacatcagggttcaccaagctgcggcggtagcagcagcagcagcagcacggggtctctagtcacggtggcattccagatcctggtgaacaacctgcccaccgcgaagctcaccgtggagtcggtggagaccgtcagcaacctgctctcctgcaccatccagaagatcaagtctgcgctccaggccagcatcgtcacgccctagctattagcgggcatttgacatggattccggccgccggttctcagaaaaaaggacggagtagtcggatgccatgtcaaatgcttagctagaggacgacatgctgtgacggcgcagatgctaaacaaggctgtgctcgtacgtacgtcgatcgcttcacatcagaccggcggggaactggtgcttgagaaggcagtgaaagaaaataagggtattaaaataaattatgtagtagtgtggagtatttattgcatagagcaatatatatatggggtgaggtacacagggattaagtcaagaacgaaccgttcgctaggctttgattgcttgagcaaacacgttttgctatcgctcaagcttgttatatgctcatgtggtggttcgggtattgacttaagtctctggcaaaagaaagtgaaacaccacctattagggcttctcctatatataaaatatatatgtagcagtttgttttcaaccatcttgtgaagagttctgttcttttgtttctccgatatagcgaaatatagagatgagaatgtctctgtgtttgtaacgtttgtgtagtgttatttcgtttgagttgatatatatgacatgtacgctttgttcatgtgg

SEQ ID NO: 31540 - DNA, 980 bp, Zea mays
  Clone ID: UC-ZMFLB73186E10_FLI
gggacatagccgcacaaagggaaggataccctcgccaacctcgaagctagtccaaactagtgggaggttgagtgcagggatcgatcggggaagacgagacaagcttcttctgctgctgctgccgcccccgccagctctagttcaccagagttactacttactagccaatctgacaccgatccaccgccggcaccgaccgtccatggcgcggggcaaggtgcagcttcggcgcgtcgagaacccggtgcaccggcaggtgacattctgcaagcgccgcgcggggctgctcaagaaggcccgggagctctccgtcctctgcgacgccagcgtcggcatcatcgtcttctctgcgcacggcaagctctacgacctcgccaccaccgggaccatggaggagctgatcgagaggtacaaagctgccagcgccggagaagcgacgaccgacggctgcggcaggcacaacaggatggaccccaaacatgaaaccacggtgctgcaacaggaaatcaacctgcttcagaagggactgaggtacatctacgggaacagggcgaacgagcacatgaatgttgacgaactgaacgccctagagaggtacttggagatatggatgtacaacacccgctctgcaaagatgcagataatggctcaagagatccaagcactgaaaagcaaggaaggcatgttgaaagctgccaacgagattctccaggaaaagatagtagagcagagtagtttgcttgacgtaggcatggtggtagcggaccagcagaatgggcgttttagcacagtcccactggtagaagaggtgatcagtagtaacccactgactgtactgagtggctattctagctgtaggggttcagagatgggctactccttctgaccgtaataacaaacagcctgggggctccttctgttgattactactagtgtgtaatacatacagtcaataaagtctgtaatgggttggttgttct

SEQ ID NO: 31541 - DNA, 2159 bp, Zea mays
  Clone ID: UC-ZMFLB73186F01_FLI
cttcctcatccgtcccatcgaaccgcaaaccctaacctttcgattgccgccgcccgccgctcgctgctgcccgccgctcgccgcggccaatgatggcgaggggccgccgcggcccgggtggacgggggaggttcggcggcggcccgctgggcgacgagcggccagtccgtcacggcgtccgcgtcgaggagaacccgtacttcccattaccgcgtcgggcgtcgggctggggagtggcaccgccgtcgcggcacctgtgggtgggtggcctggcgcccagcgtcacggcgtccgacctgtcggagctgttcctccggtgcggcgacgtcgagggtgttgcccgcgaacccggccggaacttcgcgttcgtgagcttcctgcgggagggggacgctgtggccgcggtgcgggagctccagggggctcgcctggctggggcgcctgttaggatcgagttttccaagggggcctgagtttctggattgcactgctaggacaagtctagatatgctttctaagcactactatcaagctactggcagctgggtcgtattttttgtcccagaaaatgatgcggacatgacagcttataatgatttcatgagttatctaggtgataagcagcgtgcagcagtctgtaagcttggagagagcagcaccttgtttcttgttccaccttcagatttctcagagcaagtactgagagtgcctggaaatgtcagcatatctggagtcattctgaggtttcagcagtcaaatccagattacagctcaccaaatcgcaaaccattggatagagctcacccatcttctgcaagtaattttaacactgatgtaagaaattgtgaagatctgcatgcactgagaaggctcaatccttcagatatcagcacattccctcagggtccagattatgtctgctcatcaggtggaagctataccccagcaaatgcagattttattccgccctataagccagagagtgctcctccatatgtcgtccctcaatcaccgcaagaaaggccgccagcggagctccctatgggtattgcacaaggccaacaccagcaactcccaaacaggctgccctcaggatggtccaataacctggataatccaaatccaaatctaggttctggtaacttcagtttggcacagggtgcaatctctaacaggacacaggatccgtacacatttgctcctggagtagtatcaactgggacagcttcagggtatgcatcaggtgaagcatccaacagcatgtcctgggcttccatgcaatacaactcacagcaggtagctagatctgatcaacctactattccagtatcactgccacctgatcaacttgcacagctagctgcccttcttgcacgacaaaaccaacctagaaaagttggtttgcctgtggacagctcaaacaatctgtctggattcatacagagtcccaatcctcatggacatgctacaatgatgccaggcaactctggctccatccctatccagaactcactgccacctgttccatctatgcaacaattacatgccaatgtgccagtgtcaccaataggctcgctacctgcaaatccattcaatgtgccgaccagtgctcctgtactttgtaacagcacttcgcctatgctgcccagtcatgctttggtcaacccagctcattcttccatgccaatgagaccgttcattcctccacttcctgaaggtcctccaccctttcagcagcaaacatcaagtgctgtcacagtgcagcctttaggtccttctagccagcagtctagccaacaactactggctcaggaccttgatggagatcctcaaaagcgccttcaagcaacactgcaactggcagcaaccctgcttaagcagatacaaaatcaatcaaatcctggtggccagaaataaatataaggtattggtaaatgtctagctgcaaggatcatcatatggtgccatcctgaggagctttaaacttactgttgtggttttataccatcacctcctgtgatttgaatgtttatgatgagttctaagacgctttggctttcttatgtacatggttttttgctatgcatccagatatacattggctagaaaacgttgaaaggtcttttaagttggaatggagggagttagctgttgcctgc

SEQ ID NO: 31542 - DNA, 971 bp, Zea mays
  Clone ID: UC-ZMFLB73186G06_FLI
atgacatgcaacctctaccatggaattgcacggatcttgaccaagaccttcacgtctgatttccctcatgtcgagaggtatttctggaccatggttaaccagcctaacttcaagaaggtcattggtgaggtcaagcaggcagagtctgcacctcctattccgaaaaaggctgctccttctaaggagccaaaggcaaaggatgtcaagaaggaggctccaaaggaggcccccaagccaaaggtggttgaggcaccagcagaagaggaagcaccaaagccaaagccaaagaatcctcttgacttgctgccaccaagcaagatggtccttgatgactggaagaggctatactcaaacacaaagactaacttccgggaggttgccatcaaaggtttctgggacatgtacgacccagagggctactctttgtggttctgtgactacaagtacaatgatgagaacaccgtctcctttgtgaccctgaacaaggttggtggattcctgcagcggatggacctgtgccgcaagtacgcctttgggaagatgctcgtgataggctctgagccacccttcaagctgaagggcctttggctcttccgtggccaggatgttcccaagtttgtaatggacgaggtctatgacatggagctctacgagtggaccaaggtggacatctctgatgaggcccagaaggagcgtgtcaatgcgatgattgaggaccaggagccctttgagggcgaggccttgcttgacgcgaaatgcttcaagtgagtgtgcttgcctggagacagaactgtttagcccttgaatttgcctatggaagagtttgcccttttactagtgtcgatgttgatctggtataccttgctatgaactggttaaagtttgtgctggtttgggattttttgtgcatcttgtgatacctcaagtcttcatcatttaaatgtttagccgtaataatctggttatttttt

SEQ ID NO: 31543 - DNA, 1134 bp, Zea mays
  Clone ID: UC-ZMFLB73186H07_FLI
acaaagacgagggtttcgacttctccgccaaccgtgtgacacgcagcatagacgagagcctcgcccgactggggctggactacgtcgacatcctccacgctcatgacatcgagttcacccatctcgaacagattgtgaatgagacaattcccgcactccagaagatcaaggagaatgggaaggcacggttcattggcatcaccgggttgcctctcagcatctacccttatgtcctcgaccgtgtagcaccaggctcggtggacgtgattctatcttattgtcactacgggatcaatgacacctcccttgttgatctgctcccctacttgaagagcaaaggtgttggggttatcagtgcttcgcccctctccatgggtcttttaacagataatgggccaccggagtggcaccctgcaccagaagaacttaagtcagcatgcaaggctgcagcagatcactgtagaaagaaggggaaaagcattacgaagctagctatgcagtacagcttaatgaacaatgaaatctcgacagttcttgttggaatgaactctttggaacaggtggaggagaatgtggcggctgcactggagttgtcaacatcaggcatcgatgaagaacttatgcgtgaagttgaagcaattctcgagcctgtgaagaatctgacatggcctagcggcatccaacaagcctgacggccagaagcagctttgcctaactggagaagctggcatgatgagcgtataactgctgttcgatgcagtcaattgtgcacaccagcatcattggctgctgattgcaaaatttgcaatgcccgtatggtcattgatggaaggggacgattgggactgttgggcttttatggttgggccctgtggtaatttagacatgtcgaataaacgcgatacgagcaatgaaagatcgatgctgatcattgaataagcctttcccatacggccatacatctagggtggagtaaaacacctgttagttttgctgccagacaagcaattgcgcacccctcttagtgttgtttggttcacataatttagtgttgtttggttcacataattgtacgggtaatcgataacgttaaatcatatttgtttaaatccaaccgtaattaaatatcacact

SEQ ID NO: 31544 - DNA, 1692 bp, Zea mays
  Clone ID: UC-ZMFLB73187A02_FLI
aagcatactttgacctccataagaatgaagattggttaagaaataagtaccatcctacaaaccttgaaaatgtcattgaaagaaggaatgaactggcaagaactactgcaaatgatttcttcctaaaattgcaaagtggagatctggacatcggtccaggtttgacgggttcggcagtgagcaaatcaggaaataatagcagtaaaaatctagatgctgtggaaggggatggtaaaaagggaaaacatggaaagggttctgatgattcatattatgctgcttccaaggctcacccagttagttccgaggttcgtcgaattcgaattgacattgagcaagctcaagttctcattcgtaaacttgattctgagaagggtattgaaaacaacgttctctcaagtagtgaccatgaaaagtcagacagggataagtcacatggttcagtggggccaattgttataatacaaggatcatctactgtgaagggtcttgagggtgctgagttgctggacactcttgttacttatttatggcgtatccatggtgtggattattatggtatgtctgagacaaatgaacctaaaggcctaaggcatgtgaaagctgatgcaaggacatataatggggctagctcaaatggtgctgaatgggagaataaacttgattcattctggcaagacagaattcaaggtcaggatccattagaaatgttgaaaggaaaggagaagattgatggagctgctactgaagtcttggatccatatgtgaggaaaataagggatgagaaatatgggtggaaatatggatgtggagccaagggctgcacgaaacttttccatgccgctgagtttgtccagaagcatcttaaactgaagcatgcagacttggtggttgatctaacttcaaaagtgagagaggatatttactttgagaactatatgaatgacccaaaggcgcctggtggtacacctatcatgcagcaacctgctccaaggggaaaaggcagacaaaggccaccaatagagagtcggctgagggatgagcgtgggaatcataggttcgacaggaatgttgattcaccaaaacgtgatgggtctggtgaaaatcccgatgatcctatttatgattcgtttggtgatccagctatgcatggtgccttccctccagatatccctgctcccccggttctaatgcctgtgcctggtgctggtccgctcggaccgtttattcccgcaccacccgaagttgccatgcatatgttgagagatcagggtgcgccgccacctattgagccaaccggaggtccacatcctaggaaagcagggacgggtggtggtccttcaatgcgtggcccatccccaatctttggcgctccttcccctcatcatatgcatgatcctcgcagaatacgaagctaccaagacctcgatgctccggaggacgaagtgactgtcatggactaccgaagcttgtagacttcctccagttcttgtgcatccagatacctttgtagtcaacatttttagcgcgagagaaaaacaccttgctctttctagaatcgccgcggaggaaaccccggcaggctttttgtgtcgcgaccactgagatgtcagcttctcagtgttttgtaaaacgaaacacaggaagtacattacaacttctccccattaaacaaggtgaaagatttccatc

SEQ ID NO: 31545 - DNA, 1202 bp, Zea mays
  Clone ID: UC-ZMFLB73187A07_FLI
cttgagaaaccaagctttagccttcttggaatcatgctggttgtttcgtttggagttctactaacagttgctaaagagacagaatttaatctgtggggatttatatttattatgcttgctgctgttatgtctggtttccgctggtccatgactcagattcttctccagaaagaggaatacggattaaagaatccttttaccttgatgagccatgttaccccggtgatggcaatagtaacagcaattatttccattgtgatggatccatggcacgacttcagagcaagtcacttttttgatagttctgctcacataataagaagcagcttgttgctgcttttaggtggcgctttggcctttttcatggttttgacagaatatgtccttgtttctgtgactagtgctgtaacagtgactgtagcaggaattgtgaaggaagctgtcactattctggttgctgtgctattcttcaacgatccatttacatggttgaaggcgcttgggctagcaataataatatttggtgtcagtctattcaatatttacaagtataaaaggttcaaaaaagggcattacaatgaaaatgctgggacaaatacccaatcttccaattggacttcaaaatacgtcatccttgatgaagatactgaagctcaagatgatacaggctgatctgaatgtgatagaatgcagactatatatggcgcttccagagaagcaagatcatctgtgcctgcatagtcttactttcacaggctaactgacttcatattctttgagttcatcaattactctggtcagccatgcacgaacatgacgcttgcagccgtgtggcaagttgggaagattacacatacatggaacatacaagatacaacctggtatcagtacatatgttttgtcctttcattcaaaacaaagaacagtgcatatatctgaacgaggcattctgcattatgtccactaagaaaatgctccatcaaatacaattagaactacagctgacacacttaactttctggaagaggataggactcaattttatagtccattctgattgttgaagagagattcggcatcggaacgtagctttcttttctttatttatttttagatgaaaataaacactcgtatatgtaatgttgtatgtatgggactgtatactgttttacacacgagcaccacaagttgaagttcttccc

SEQ ID NO: 31546 - DNA, 425 bp, Zea mays
  Clone ID: UC-ZMFLB73187C05_FLI
aatcccgacacgccgcgccacctgaacaaagtcaccgaaacgcactgatagccgagaaagccgatgagacgcgccgaggagtcccagttgaagagccccacccatgatcagatcgtcctgcttagccccttgacggggccgatcgtcgcgttggccgacgtgcccgatccggtgttctccggcgggatgttcggcgacggcatcggcatcgacccgctcgcgggcaagctcgtcgcgccgtgcgcgggcatcgtgtcgcatctcgcgcgcacgggccacgcggtgacgatcacgacgccgcaaggcgcggaagtgctgctgcatatcggcatcgacaccgtcgagctgaacgggcagggcttcgccgcgcacgtcgaggccggcgcacgcgtcgaagcgggcgatctgctgatcgagttcgacca

SEQ ID NO: 31547 - DNA, 654 bp, Zea mays
  Clone ID: UC-ZMFLB73187D09_FLI
aagggccttgaagagcttgaagtccagagtgtttctacaggtatcaccacttcgaaccctggtaaacttgaagtgccagacagtaaggaaaagaaaaaggtcaaggaagctaagacgaagaaatctgaagagccgtaccatgccaataacagtagcttaaagaacaaagaagttcaatcttttgtctatgataccagcacgaaggacaagaaggaagccaagaggaagaaatttgttgacgaagaagatgtagatgctgaaggaattgacaatacagaaatctcgtttgcagatttaatgttttccaatgtgggcaatccagagactaagctaaagaacatctcaaccctggaagcagctcctgatggaaaatctgttggaggtctggtaattgatcacacaaagaagagaaagaaaccaaaaggtgttgtcaccatcactgactcctcagctcttaagatgttttcctcaatgccagaggtaggagcaggagggcttggcctgtcaggatgggatgagtagcgtctagctctctagtaccataagtttgctgcctgatgaatatcgttttttggtgaaaacctcaattttatgtgaactgagcagcattttcttctcttcccatcaagtgcatttatgatgtgtgatttgagg

SEQ ID NO: 31548 - DNA, 1063 bp, Zea mays
  Clone ID: UC-ZMFLB73187E07_FLI
tttatttcaaggcctgttgttgagccttcacccagcctgttaagaggcattcggcaatctttgctctcacacctcacccttgtattaggcaatgacgagcttgcagcccagtgcttgctgttgcatcttctatccagacttcgtaatagggtggatgtggtcaccgttggcagactctccttgaatttcactggcttcaacagggaaagtgcttccatatttgggaatcagctgtattctttgatccagaaattggtgccgtattcacaagccatacctctgtcaattgagtatctcaacacagctacacttcaacctagaaaggacaacaagtcaggaaggttggtcacaggagttctgcagctacctcaaggcactcatctgatctttgatgagactcttctgcagacaggatcattgacatccaaaggtgtggagaataccatgctgctcaagaacctgatggagtcgcagaaggttgactacgattttgagtactacaagctggaaatggcagctgatgtgcagctactcactctctctgaggggaaatcaaacatccttccttcagatttggtagtgcctttccggccatcctctgttccacagttaatgcaggtgctgaggaaactgagagctggaggtggtttttgaccacagtaaggtctcttcctcagtccactgaacctgaaacttaccagatgattcaggatgaaatggtcagtgccatgcgtgatgataggagcttgggttgttctgaacttagcagatggctaacaatggcacaaataatggcctccagctttggcgagaagagtctttctttggagcactggcagatggtgaaggagcttgagaggcttagaaagcagaggatgcaatgagaatgactcatcattagcatgtgtttttgcactctaattgtttatgttggtatgctgttatgtgtatagtactagacgtttgaatcaagacatggatctaaggcatttctgtaacaactgacaacttttatgatcctatgcatgtcagcatgtgtatctgctgctcattttctttgctc

SEQ ID NO: 31549 - DNA, 803 bp, Zea mays
  Clone ID: UC-ZMFLB73187E12_FLI
tcgagtcgtcggattcgttcctcccctgctcaccccatggccgacgtctcctctaccagtgctccttccagcgctcggcctccagctcctacgcgcgctccgtcttcccctgccgcgaccccgtggaactcccagctcgtgctcacaatccccatcacctatgcgtccactctagcatctccctcatgcgtcctctgcgcgagcgaatctgccttggtccgaccagcgatacctccgccggctccctgatgctcacgcgcgtcagctgcttctccgcctattgcacttgattcctgtaggtctcgccctccgagttcctttcggtcaccagacatgcatcgctgctgacctccctcatctgatcgggccctacatcagtagcgtgtcttctcgtcaagctcgtggccacggctccctgatgcctcgtcatccctgttctccctcacatctgagctcgcctctgcgtgttcgtatggcgccacagcggtctcataccagcaaccactgctgatgtccgtggttaggacagcaggtatgatcgacaaaatctcaatccgtgtgtagtgatctgtatttccctgtggtggtatggtatgtgtgtgtagcagtatacgactgtcgtggaaggctagagtgtgtaggcagtgaaggtccatgcagcgtccgttatgtgttcggcaaaacgcccaaaccatgattcaccgtcgatttgcaatttatcaaatcgttttggtcatggtgagcggatgggtattcgtgataattagatcattaaataaattaatgggttagtgtggtgatcc

SEQ ID NO: 31550 - DNA, 1250 bp, Zea mays
  Clone ID: UC-ZMFLB73187G09_FLI
cccgttcttcctccggtgggaggccctgcgccgctccgtccacctcctccgccccatcatcactaacgccgcgccgcgcatcacggccatcatcaccgacatcaccctgacctcctgcgtcatccccatcgccaaggagctggacgtcccgtgccacgtcctcttccccacagccgccaccatgctctcgctcaacgcctactaccccgtctatctcgagaagctcaagggtggaccggagccgggcgtgatcggcgacgccgtcgacatccccggcgtgttccgcgtcccgcgctccgccctcccgccggcgctcctcgacgtgaacaagctcttcacgaagcagttcatcgacaacggcagagcgatcgtcaaagccgacggcgtcctcgtcaacacgttcgacgccgtggagccggcaccgctggcagccctgagaggcggcaagatcgtccccgggtacccgccggtgtacaccatcggcccactcaagtcgcacgccacgaaagcgggcgacaagccaggtgacgcgttgcttgacgaatggctaggtaagcagcgagcgcgatctgtggtgtacgtggcgttcggcaaccgcagcgctgccaggctggaccagatccgggagatcgccgccgggctggaggacagtggctatcctttcctgtgggtgctcaagaccacgaaggtggaccgggaggacgacgccgagctggcggaggtgcttggagacggataccttgagcgcgtgaaagggcgcggcatcgtgaccaaggggtgggtggagcaggaggagctgctgaaacacccggctgtgggcatgttcgtgagccacggcgggtggaactcggcgctggaggcgtcgtccgccggcgtgccgctgctggtgtggccgcagctcggcgaccaccgcgtgaacgcgatggcggcagtgagggcaggcatcggggcgtgggcggagcactggagctgggacggggaggacacgctggtgaccaggcaggagatcgccgacaaggtgaaggaggttatggccgacgggaagttgagggcgagcgtggcggtggcccgcgaggaggccgcaaaggccgtcgcggagggcggcacgagttaccgtaacatgcatgacttcatcgccaagcttaagggaggagcttgaggcttgaggagatgatgttacgaacgcaacaatcatgcactgcacgtccattcccaccattccgacgagtgaagtgactgctgttacactc

SEQ ID NO: 31551 - DNA, 2492 bp, Zea mays
  Clone ID: UC-ZMFLB73188B05_FLI
cgtccatggggaacctgtcgcaactgatcttcctcgacttcaggcagaacgagctgtccggcgtgatcgcgccggagctcggtgagtgccagcaactcaaaatccttgatttggccgacaatgctctgtccgggtcgattcccgagacgtttgggaagctccgttcgctggagcagttcatgctgtacaacaactcgctctccggcgccatcccggacggcatgttcgagtgccggaacatcacgagggtcaacatcgcgcacaaccggctcagcggcagcctcctgccgctctgcggcacggcgaggctgttgtcgttcgacgccaccaacaactccttcgacggcgcgatcccagcgcagttcggccggtcgtcggggctccagcgcgtgcgcctggggagcaacatgctctccggaccgatcccgccgtcgctcggcggcatcaccgcgctgacgctgctggacgtgtcaagcaacgcgctcactggcggcttcccagcgacgctcgcgcagtgcacgaatctcagcctcgtcgtcctcagccacaaccgcctgtcaggggcgattccggactggctgggctcgctgccgcagctcggcgagctgacactctccaacaacgagttcaccggagcaatcccggtgcagctcagcaactgctccaatctcctgaagctgtcgctcgacaacaaccagatcaatggaacagtgccgcctgaactcggcagcttggcgtccctcaacgtgctcaatctcgcacacaaccagctctcaggtcagattccaacgacggttgcaaaactgagcagtctctatgagctgaatctgtcacagaattatctgtccggtccaatccctccggatatcagcaagctgcaagagctgcagagcctgttggacttgagcagcaacaatttcagtggccacatccctgcatcactcggctcactctccaagctggaagacctgaacctgtcccacaacgctctggtcggcgcggtgccgtcgcagctcgctggaatgagtagcttggtgcagctggacctgtccagcaaccagcttgaagggaggctgggcattgagttcggccggtggccccaggccgcgttcgccaacaatgcagggctctgcggtagccctctgagaggttgcagcagcaggaacagccggtcggcgttccacgcggcgtccgtcgcgttggtgactgcggtggtcacgctgttgatcgtgctcgtgatcatcgtgcttgcgctgatggcggtgcgccgccaggccccggggtcagaggagatgaactgctcggcgttctcgtcgtcgagctcgggcagcgcaaaccggcagctcgtcatcaagggctcggcgcggcgggagttccggtgggaggcgatcatggaggccacggcgaacctgagcgaccagttcgccatcggatccggcgggtcgggcacggtgtacagggcggagctgtccactggcgagacggtggccgtgaagaggatcgcggacatggacagcggcatgctgctgcacgacaagagcttcacgcgggaggtcaagaccctgggccgcgtccggcaccggcacctggtcaagctgctcggcttcgtcacgtcccgcgagtgcggcggcggcggcggcatgctcgtgtacgagtacatggagaacggcagcctctacgactggctgcacggcggcagcgatggccggaagaagcagacgctcagctgggacgcgcggctcaaggtcgccgccgggctcgcgcagggcgtggagtacctccaccacgactgtgtgccgcggatcgtgcaccgggacatcaagtccagcaacgtgctcctcgacggcgacatggaggcgcacctcggcgacttcggcctcgccaaggccgttcgggagaaccggcaggccgccttcggcaaagactgcaccgagtcaggttcctgcttcgccggatcatacgggtacatcgctccagagtgtgcttactccctgaaggcgacggagaggagcgacgtgtacagcatgggcatcgtgctgatggagctcgtcaccgggctcttaccgaccgacaagacctttggcggagacatggacatggtgaggtgggtgcagtcaaggatggacgcgccattgccggcccgggagcaggtgttcgatcctgctctgaagccgctggcgccgcgtgaggagtcgtcaatgacggaggtgctggaggtggcgctccggtgcacgagggcggcaccgggggagaggccgaccgcgcggcaggtctccgatctgctgctccacgtttcactcgattactaccgcgcctgcgaaaaacgttaggatttcgaaactgggggatgaagttgtcctagtagctgcttttctaagtcgtccttttaagctagcttaatcttttcattcatgaaactagggaaaaagagacttatttttagggtttgaagttgaatcgagtcaagaatgcccttcaaaattgtatttctt

SEQ ID NO: 31552 - DNA, 1697 bp, Zea mays
  Clone ID: UC-ZMFLB73188B06_FLI
cgcatctctcctgccctccagctccaaagcttcgtcgtctgcgtcgccccgcgccccgtcttgctcgctccaagctagacaccataccacccagatcccgaggcccctctccctcgatcgccgcctcccggtagcggatccggcgccggctcgcgccccccgacaggttttgttttatgcttgttcatttgtctatggacaatggactagttgctgcactgcttttgtgagtcaccatgggaagcagtggagcagatacatcgtctaagccaaacaaggcatccgccccacaggagcagcaacaacctgctacctcaggtgctgcaacaccggctgtttatccagactggtccagcttccaggcatatcctccaatcccaccacatgggttcttcccctcacctgtggcatcaagtccacagggtcatccttacatgtggggagctcagcctatgattccaccatatggagcaccgccatatgtcatgtaccctcctggagtgtatgcacacccatctatggcctcgggtgcacatccatttactccttatgccattacttctccaaatggcaatgctgatgctactggaactactgctgtagcttgtgatactgatggcaagccctctgaaggcaaagataaaagtccaactaagagacccaaaggaactttgggcagcttgaacatgcttactggaaagaaccccagtgaacatggtaagacctcaggtgcatcagctaatggagccacttctcaaagtggcgaaagtggcagtgacagttcaagcgaagggagtgaaggaaattctcataatgattcatacaagcatagtggacaggaacaagatggagacgtacgaagttcccagaatggtgcatcacgttctccatctgagggaaaatttaaccaagctatggcaatcatgcccatgccatcaagtggcccagtaactggtccaactacaaacctgaatattgggatggactattgggccaacacagcaagctctgctcctgtaattcatggcaaagtgaccccaacaacagttccaggggctgtggtcccagcagagcaatggatacaggatgaacgtgaactcaaaaggcaaaaaagaaaacagtctaatagggagtctgcacgcagatctaggttgcgtaaacaggctgaatgtgaggagttggctcaacgtgctgatgttttaaagcaggaaaatgcttcacttagagatgaagtaaaccgtatcagaaaagagtatgaggaacttctatcaaagaataattcactaaaggaaaaacttgaaggcaaacaacacaaaactgatgaggcaggacttaacaacaagctgcaacattctggcaatgacatccagaaaaaaggaaactaatcgagctatcatgcaatgcttgcatagcatggccctaactagattattgggaggcgcaattgtagtatgcgtgttaactccttactttattgcagttaattgttaccaggttgtgataatgttgatgccaaccttgtgtgtgggtgtttcctgtttcagatctatcttggcttatcttttagaagtcaagatgtgactgaagatgtaggctgtgacccagttcactgtatctgaaatagtggataaactcaaatttacaatttgtattgctgactaatattgttatgtatacctggcaaaaggttttctttg

SEQ ID NO: 31553 - DNA, 1013 bp, Zea mays
  Clone ID: UC-ZMFLB73188C11_FLI
gtgctgcatgctgcaataagctattcacttgcagattctgtcacgataaagttagtgaccatacaatggacaagtatcttcaccacaaccattcattttaccgtccacacctttcctgctgagggatgctttcaaggatttcattttaacatcgaaccaatatcaattaagcatggcattttatttggaaatagatgtttgtggtggtgccatggacctgtgcgtcccttgtgaaatgaattgattttctgtcattgaattttctaactgaagctttttcattcgtttgatttacttgagctcccttaagttgtattgtattatttaatcacaaatgtcatccttcctcttatagttatataatcaaatattagttttaatcctatctgcatggtttacaatgtattggtttgtgtcattgtgtgaagaatgtttggtggttagtctgaccacatgtgttagttgaatatgagtgccgagcagtagcatgcatataagttccactgcattcaatatttacattttttttcttatttccaggtaactcaagaggtccacttattgactcttatgaccatgtaattggtgttaatacaactacattaacatgtaaaggttggtagatctggaaggtcttgatggtctaatacctatctatgagtacggaagaaaaggcgggagaagtcggtctctgcagcatcgcgcgtgaaaaaaaatcagccaattccacgagcattgatgttgtcatgacttcaaaagaggagagaccatgctaagaataatgcattatgacatttgtcaggcttacatatcgactgtttgatatggatagatgtataggtttatgaccaatccagttcaaagcaattggagtatagaagaaataaggagaaacaggaaagctctgtacatcttgcattttgctgttgtttgtcgaagtttcaatgtctgtcgcgtgacaaaatatagttgtaatttatattttggcatgcacgaaacaggtgtatttattc

SEQ ID NO: 31554 - DNA, 1709 bp, Zea mays
  Clone ID: UC-ZMFLB73188D02_FLI
atgctattaatgattcattgaattcagcttacatcatgcacgatttgaatgtgaaccttcaaatcatgcactttagattgcagtctccagaccactccggttgcccatatcaagttctgaaaaaaaaggcaaagatagaaaatcaagatggtctcatgttagcttcagaatatggtatctttcaggagggatagcaaatatcagtaaaacaaaagaaagattggcaacagtttgatgtctttctcggagtatcccttttcccatcaattagtatttgataaaaactctgctaaaactagaatatatttagcttttgtatatatgccaatccgaactttttaatttgttctgaactttcatgtgccagtctgttgtagagtaaaaactttaccaaagcatttctccgagcataagtggtcacaagagcatagctctaaatgtgtccctcatcaaatctctcaagttgcagagaactaggcaatcacgttacctgctcttttactgcacaggccattcataataataatggggagaagatggatagtccatcaaacggtctctctattgtaggatatctgagacctgctttcatagaggaagagtcttacttgaggagcatgtttcatggtgacaatggtggttattcatctgactggaaagtaaatgaaaccgatgaatacaacagagaaactcggccagtttctggaaccaatcgcctcattgatgatgataaatcaagatttgacttcaatcatgctgaaactagaactgattcaatgatctacaagctggagataatgacaattgaactgttttccatgtatggaaagcagtttaagattgatccacaagattttcaagattcagaaccagatattcttgcaaattctgcttcatcgataatagaacggatcaaagaaaacagtgatcagtgtgccgcggctctcaggtcgctctgtcgccggaaaaagggcctcactgtcgaggaggcaagcttgattggtgttgacagccttggtattgatgtaagagccttttctggcttggaagttaagactgttcgattttcattcaatgcacaggcgctctctgaacgttcagctgaaaagaagatcaggcgaatgcttttcccccgttaccagcgtaaaaacgtgaaagcctctactgaagatgagtcttaacctatcagctgtttttcctgagaaagcatgcaaacacctggttcaaagacaaggtgtcaagggaatcaacacaatatcatcttatgcgagtttgctaggagatagcgcacaacctgtcgactatgagaatgaccaaaaacatcagagtaataaggtttgccatgcatggtctctaacatgcttccaagaatatagtttggtttctgacagataataaaaaaaaaacgaataaggtgccagttcatgtataaaagatgaactgcgactttatgctggcggaaactgattagctgaccaagctttgtcagctacaaattcccagtaataataacgagctgcgaggtgaaagggcagagtaataaggtctcgttggcctaaatcagttcttagtttcttacccacaacctgtaactaactttgttgtctcttttcatgtagacataaatgtcatgcaacgcaactgcgattatggcattgttttgttgaactatacataaaagaaaacttgataaagtttcgagtgctttt

SEQ ID NO: 31555 - DNA, 1161 bp, Zea mays
  Clone ID: UC-ZMFLB73188D09_FLI
tgacgtgcggaggaccgctgtgttggctctcggcttcgttctctacaacgagcctgaacagacacccagaatcgtgtccctactgtcggaatcatacaatccacatgtccgttacggtgcagctctagctgtcgggatctcctgcgccggaacaggattaagtgaagccatctccttactggagcctctgacatcagacgtcgtcgactttgtacggcagggcgcgctcatcgccatggcaatggtgatgatccagaccaacgagtcctacgatccacgcgttggagcattcaggcgccagttggaaaagataatcctcgacgccggtggcaggaatgtcaccatcaagctcaagtcgaggtcaaagcacgacaggctcaccgctgttgtcgggctagccgtcttcacccagttctggtactggtacccgctcacctacttcataagcctggccttctccccgacggccctcatcggcctcaactccgacctgaaagtgcccaagtttgagttcctgtcgaacgcgaagccgtcgctgttcgattaccccaagccagtgacccagcagaccacagccacgtcagtcaaggtgccggcggccatcctgtcgacctatgccaagtccaaatccagggcaaggaaggacgcagagagcaaggccaaggcgaaagcagaggactcttccagtgcttctacttcgatgcaggtggacggcgcttctgctgctggtgctgctgcagagaaggccccggagccagagcctacgttccagatcctgacgaacccggcccgggtcgttccagcccaggagaagttcataaagttcctggaagacagcaggtacaagccggtgaaggctgccccctcggggttcgtcctcctgcaggacctcgagcccacggaggccgaggagctcgccctaaccgacgcgccgtcaaccgctgccacgacaagcaccccggcatccagcgccggcgagccggttggcatggctgtcgacgacgagccccagccgcccccggccttcgagtacacgtcataaataagggtggtgatcgtcggatcaggatgtgtgggttgggttgtgttgtctgtaggaacttcgtactggtgttggatggcggaacccgggcgtaccactaagctcatttatttaacttg

SEQ ID NO: 31556 - DNA, 1310 bp, Zea mays
  Clone ID: UC-ZMFLB73188F01_FLI
cgctcaccgtgctcgcggcccccaagatccgcccgtcccgctggctcgccatcgacgcccgcgccgtcgacctcaggggctacttcaactccatgttctggaacctcaacttctgggacaaggccagcacgctcgccggcgaggtcgaggaccccaggaagacgttccccaaggcggtgttcggcgccgtcgggctcgtcgtcggcgcgtacctcattccgctgctggctggtaccggtgcgctgccgtcggagacggcggccgagtggaccgacggcttcttctccgaggtcgggcagcggatcggcgggccgtggctgcgcgtgtggatccaggccgccgccgccatgtccaacatggggctcttcgaggccgagatgagcagcgactccttccagcttctcggcatggccgagatgggcatgatccctgccatcttcgctcgcaggtccaagtacgggacgccgacgttcagcatcctgtgctcggcgaccggggttgtgatcctgtccttcatgagcttccaggagatcatcgagttcctcaacttcctctacgggctgggcatgctggccgtgttcgctgccttcgtgaagctgcgcgtgaagaacccggacctggcgcggccgtaccgggtccccgtcggcaccgcgggggccgccgccatgtgcgccccgcccgccgtgctcatcgccaccgtcatgtgcctagcgtcggccaggaccgtcctcatcaacgccgccgtggtcgtcgccggcgtcgcgctgtactacgtcgtggagcaggccaagaggcgcccgtgggccgagttcttggcgcccgtgccgcccgctgacagctcccacggaccagccacggcgcctgatgacgccgacgccgccgacctcgaggatgtccgcgccgggctgctcgcgggcgagccggccgacgaagaaggcagcaaggtcgagtactcaagactggagattcgtgcatgaacccgtttgccgttctgtgtacagtaattccagcgaatacatggcgaatcattgtgtgaaattcagaggaggaggtcaggtgatcgatcgcgctcacaagaagattcagaactgcaaaccgactactagataagtctgaaccatgaatcggagaagtgagaacagatctcaaattgtagaagctgtttttgttttgaccttttaagtgtagtgtgatgccaggcgaggtggtgccggtttgagaagaagctgtatttttccagcaagggggtcagataggttgtactgtacttgcattgagtcaacttgataattcagtaaagtaaccagcat

SEQ ID NO: 31557 - DNA, 1456 bp, Zea mays
  Clone ID: UC-ZMFLB73188G11_FLI
gcagaagcggccggcggcggacccctgctccccgaggaactcattatctgggagatcctaacccgtctgccggcgaagcccctcctccgatgccgcgctgtctgcctctcctggtgccgccgactcacctccgacgccaaattcctcctcgcccaccaccgtcgccagccctcgctcccgctcctcactgaaggggacaggagcaccgaggagaggaggatcgacgccctggactaccgcaccggcgagcggcgccccatcgcgcggacaacaggccggaccgccgccaacggggacgacctgaacgtgctggcttcctgcgaaggcctcctcatcctcctcgccaacggcggcctccagatctgcaacccggcgacccgccagcgcgcgccactcactcttctccacggcgcctattgcatctccgcgctttatcctcacatcccgtccaggtcgtaccgtgtgctctgctgcttcgagagagccgaggacggccacgccgtgtaccacgtgcacaccgtcgggtcgcgcgagctcaggtgcgtcggagaacctcccgcgccgtgggcgtccggggatatggtaatggcgatgccgatgatggtgtaccttcacccgcacgtcgtggcagacagcaggatctactggcagccggtaaagctgcccgtcggcaacggcaaggtcaacaacatgctcgtgttcgacacaatgaccgagtccttccagcaactgctgtcgcccgtggagggcccctttcttgaactgtttcagatgaacagcggcgcccttggattgtaccactgccgcagcggcaaggttgatctttgggtgttacaggatcacgggagctggtcctggtcgatgaaccaccggatcaaattggacgtgatgtttttctccctgctgccggtgctggacccggaaggagatgtgctagtgctttctaaaagaggggaaacaggcatcctgtggcaacatctgcatcacatttctggtgtcaatggcagtttgctggccctgtatcaatggagcgcttatctgaagcttagcaggcataggctcaaagaaagtctagtccaccatgacttcttctcgatggaaggtaatgagggtggtgtggatgaaaaaccattgttcgatggcttgtcaactgtggcattgcttcgtgatgataattctgagccacattgagaaacaaaggtattactcaagctgtttcatctcatcaggatggagtcactcctgcctagtaataacagcactgcagattagtaataacctgaaactatacctcgagtctgatttttcccttttcacatgagtcataaacactgttatgactggtattttattttcccttttcacgtgagtcatgaacactgttattactggtattttattttccattttcacatgagtcatgaacactgttatgagtggtatgtatgtgcgctgg

SEQ ID NO: 31558 - DNA, 812 bp, Zea mays
  Clone ID: UC-ZMFLB73188H12_FLI
ggtggtatcttcaccagattgatcaacagaaacactacaatccctacaaagaaaagtcaggtgttctcaactgctgctgacaatcagacccaagtgggtatccgtgtgttgcaaggtgagcgtgaaatggcagcagacaacaagcttcttggtgaatttgaccttgtgggcattccacctgccccaagaggcttgcctcagattgaggttgcattcgacatcgatgccaatggaatcgtgactgttgctgccaaagacaaggctactgggaaggagcagaacatcaccatccgatcctcgggtgggctgtctgaggctgacatccagaagatggtgcaagaagccgagctgcatgcccagaaggatcaggaacggaaagccctcattgacatcaggaacactgcggacaccactatctacagcatcgagaagagtcttggagagtacagggacaagatcccggcagaggttgcatctgagatcgaggcagccatcgctgacctccgccaggagatggcctcggatgacatcgagaagatcaaggccaagcttgaggctgccaacaaggctgtctcgaagattggtcagcacatgtcaggtggtggctctggcgactcacagtcgggatctggacctcagggtggcggtgaccaggcgccggaggcagagtatgaagaggttaaaaagtgaggctgcgggaagttgaggcgaaattgtagtgacctgtttagaagtagctactcttttttgggaacacagatagtcagatgagatgtaaaacctgtgttgtaataatcgttggatttgccccc

SEQ ID NO: 31559 - DNA, 1835 bp, Zea mays
  Clone ID: UC-ZMFLB73189A06_FLI
cttcaatctcgtgcactgggtatgattcgctcacatgtgttgtcaatacttaaaggtgcttcatcccaggttcaagctgcaattcgaagcagcgattctggcaaaaacattgtcacagagggtgtggaggcatctcttatctatgttcgcttcaaggcggctgctagcgagctaaaaccaatattaggtgaaattgaaagtagatcttctaggaaggagtacgcacagattctttctgagtgtcacagtttgttctgtgagcagcggctgtacttggtacgaggcatggtgcagcaacgaatcttggagtttgcaagaaaagaggccttgccttctttgacaaggtctggctgtgcctatctgatggaggcatgccagtttgagcaccagctttttgcccacttcttcccagcatctgctgctgatgtttctagtatggctcctttaatggaccctctgtgcacctacttgtatgatactctgaggcctagactgatatatgaaggaaacattgattctctttgcgaacttgttgatattctgaaagttgaagtgctgggggaacaactaagcagacgcggtgaatcagtagccggtctccgtccaatattgcaaaggatacttgcagatgttcatgagcggctagcattttgtgctcggactcatatccgtgaagagattgcaaatttccgtccttctgtcgaagatctagattatcctgggaaacttgaacgacctgtggatatgtcttcaagtgctactgttggtgacaactcagacatatatataacatggtacagaccattggagaaaacagtttcatgcctttcaaagctatatcgctgcttagagccttctgtcttcactggattagcccaggaagctgtagaagtttgctcaacatctcttcagaatgcaagcagggttatctcaaagaaagcaaccccaatggatggtcagctttttctgattaagcacctcctcattctacgagaacagattgctccatttgatattgagttctctgtcacacataaggagttggatttctcccatttattggatcacctaagaaggattctcaggggtcaggtctcattatttgattggtccaggtcaacatcactagctaggaccttttctcctcgtgttttggagaaccaaattgatgccagaaaagagttggagaaaagccttaaagctacctgtgaagagtttataatgtccataactaaattagtagttgacccaatgctttcttttgttactaaggtaactgccgtcaaagttgcattgtcctctggtagccagggtcagaaattagattcagttctagcaaaacctttgaagactcaagcttttgcttctcctgataaagttgctgagctagttcagaaggttgccgctgccattcaacaagatttgcccaaagtaatgaccaagatgaggttgtatttgcaaaatccatctactcggatgatcttattcaaacctatcaagacaaatatagttgaggctcatatacagctgcattcccttctgaagtcggagtactctagtgaagaaatgcaatccatcggtatgttgccgatacctgacctgcagtctcagcttgacagccttttgtagtttgcatacaccatacagcggcgctgctgtagtccatgttgacgttgcagtgcagttctttcaagtaacgcaagtaaagttgttaccacaatttcgaacctctctaccatatcgttgttgtaacttttcattgtttatattgaaaaatggaaatggaacgcctcccatgattcatgtgattgtggacaatctggaagtttgaactc

SEQ ID NO: 31560 - DNA, 803 bp, Zea mays
  Clone ID: UC-ZMFLB73189C09_FLI
ggcagacgcggtgggagatgttcgacctgctgtcgtcgctgccgtccacgtcctcggcctcgtcaacgacgaccgtgagctccacggcgtcctccggcgcgccgccgccgagccgcccggactggatgctcttctgacgagggagggacggcggccccgcaccggccggccaccggcgcgaaagcgaaaggcgagtgcttgatgcggtgcgatgcttgtgtgccaaaaattgcaccccaaatctggtagctcgtcgagtgtcctgatgaggccatgattgggcaggcgggggggctatctagctttggccacacagctgcattgcgttggccgttgggctgcatggtaccgtaccagccaattcgagttcatcaatcatgtggtgtgagagtatttttcttcttcacctctcctttttctttctttccttttgagcttttttttccctcctcctcctcctcctcctcttcttcttgttcatggaaggtttgggattcttttggagtgcatactatactattcagatagagaaacagaaagatggagttggttagggcaagtgaaacgtcttcagatagggaaataaataaaactagtcggtgtccaaactctgaagaaacgaacaaagaggtgcatggattgttagcttatcacactgttgtttgagagtgatgagagatgtatcgatcaagaggccacttggtcggtagtctgtcactccttgttgctgccgagtttcttcctcctcctcatcatcctgtataatgtaatcaagcaataatacaaaataaaaaagcgttttg

SEQ ID NO: 31561 - DNA, 634 bp, Zea mays
  Clone ID: UC-ZMFLB73189D11_FLI
ggcgagtgggccaaatgagtgtgggctgcgtcccagggtagtataagtactatgagtctgtaataatcaggacaagaagaatttaggtaaagtaatacatctatcgccatcttcctcctcgcctacggcttcttccaccgcggcatcgtgcccggcctctgcttcggcgcgggcctggggattacgctgttcggcatggcctacatgttcgtccacgacggcctggtccaccgccgctttccggtcggccccatcgccgacgtgccctacttccgccgagtggctgcctcgcacaagatacaccacatggacaagttcggcggcgtcccgtatgggctcttcctgggaccaaaggagctggaggaggttggtggcctggacgagcttgttagcagtccggtgagtgaagctactgatactgaagacgcaggagaagaaaagacgcgtccagttgtatgcgttgtccgaacaagcgtgttcatgggccagagtgtgccaaatgagttctagctttaggcgagtgggccaaatgagtgtgggctgcgtcccagggtagtataagtactatgagtctgtaataatcaggacaagaagaatttaggtaaagtaatacatctatcgccatcttcctttc

SEQ ID NO: 31562 - DNA, 2851 bp, Zea mays
  Clone ID: UC-ZMFLB73189F06_FLI
cgatctcccctcgaagctctcgcggcgccccgcgacgcgggcggtcctcgctagtgcctcctctcggctcgtcgccgacgaggtgagcggcaccccgtcctcccctttgccttcggcgactccgtggtcgtccattgccagcaccctccctgtgacgtccgcattattcacgtgcaccgtcgcgccgtcgcgcagggtgaggacctccccgtcggatgctaggagtcctccgcacagcagattcgtctccttcccgattcgatatggagtgcaacagagatgacgcggtgcgatcaaaggatattgctgaaacaaagttcagggagaatgacattacgggtgcgaagaagtttgccctcaaagcaaaggctctttttgagacgcttgagggcattgatcagatgattgtagccttagatgtccacgtaagggcacagacaaagattgcaggggaaaatgactggtatgggatcttagaggtgccacccatggctgatgaggaggcaatcaagaagaaatacaagaagttggccttccaaactcatcctgacaaaaatagctctgtttgtgctaaagccgcttttaatctcatctcggatgcttggaatgtgttgtccaatactgccaagaggacggtgtatgaccacaggaggcgtgtgcatgccctaggagtgcatcagaataacttcaaagcaactgcccgtaagaattccaactcctctatgtcaagtgtggatagattctgtgccagacgtagggaagtggcgccccacctcgcccatgaaggaatagaaacattctggacactctgctggtcatgtcttatgaacttccagtactccagggaatacttcaaccaccatctgaagtgtcataattgtcatgcagtgtttgttgctgctgaagttcgaccaccaagtgttcagatttacccgactgagccgatgcctatgtctactaataataacattggtggcaatacagttcctggcatggtggctccaggagtacaggcaggagtgtcacagggcaatcaaaattgtgatccaacagtgttcaaatctgcaacatgtgcaaaaagtactaaacatacggtccaacagacacatgatagtattagaaaagatgatgcagctggagctagtatacccgctaatgaagaagcaaattgcacaaaagttctgcagcatgctgcaaggaaacatgcacatgcagtctcttctgccagacgagcaaatgcagcaacaagggagcatgaagctgcaaagagaaaacacgccaatgctggcaagcaaggaacctggcagtcagcagcctcctaccctgatggtgatggatgcaaaccggtgttcccagtaaaaagaaagcctcgctcaacctctgaaacatcaggtgccaagaaacacaaggtgtcttctggtgattttaattgtgaatcttctagtgatgttggaaggaccagctttggcagagtgctcatgaagttagatgtccgtagcatcctaattgaaaaggggaaacttcaagctcagaaattgcaggagctcagtagcaagaaagccaatgtgaaaaagaaacaaaagatgcagaatggtaagaaaagcagcagaaaaggtgtttgcaacatagaaaatgaggtcaataaaattgagatgaagcaaagcagcagttcagttgatccaaaaaaagatgtcttggagttggttagcagaagggttgattctgaagaaaaggagaggcagaagagcagtaaacaggttgggttgaaagaaaagctgaagtcatggcctgtacctgaagtgcgcatagtatacacgaggagaaaccgcaagcaacacaagaaggaactgggagatgaagtaactggtgctactccgggaacagagcaccatatgcctgccagatatggctgtttgaaccaagtatgtcctgatgcaggctctgacaaaattcctgttcctgatgcagatttctacagtgttcctgatgcagatttttccagttttggtgatcattctgaaagttcatttcaaaatgatcaagtctgggccatgtatgatgaagaagatggtatgcctcgctattatgctttgatcagaaaagtcatttccactcgcccttttaaagttagactggtccacctcaaagcaaacgactctaatgagttcggagcctccagttggctctcgtgtggatactccaagacctgtggtgagttcaagtttgatgtgtccaaacatactgaccaagtgaatatcttctcacataaggtcaagtatgacaaaggtccaggaggcattatcagaatttttcctaagaaaggtgatatctgggctctgtaccagaattggtcccctgactgggatcaattcacagctgatgatatgatttacaagtatgaactggtcgagattcttgacagctacagtccttccagaggcatttctgtgatgcctattgtgaaggttcctgggtttgtgtcagtgtttaagcctgttcacaacgcaacgagaagctggaggataccaagggaagagatgatgtgtttttcacaccaagtgccattccatgtccttactggagaagaagctcataatgctcccaaggggtgctatgaattggatccaggctcaactccacaggagcttcttcatgtagttccaccatctggcgatgctaaataagtttgcacttgaagctggagcttgctctgtacttaaatttttgtgtttgaaactttttaatcctttgacctagcagcagttggcgtaagatgtttccttttgaagtgtaaattatataccttgttttgtgctgatgtagcagcttactgtcaggattatgcagactt

SEQ ID NO: 31563 - DNA, 1979 bp, Zea mays
  Clone ID: UC-ZMFLB73189G06_FLI
cctaacctgactcgtggcgggacggatgacatccccaaaaccctaaccacgcgacgctcgccgactcgccgtcacagccgcacctcaaccggagtcgaagcgccattgatgaactccgagcctgccgtcgccgcagctagcgatgcacaagctcctcccacgcgccgcctccttcctcgacgcagccgccgccgccgccgcggcccccctgctgctctccttcccacgcatgcccacgctgcgcctgtctggtagcccgttcgtagccatgcgtcctggcggaaaccctagccgcatccgtgcgccgccgtggctgcactgtgacgctgggtggaggcgaggactctgttccgccgaggctgcgaggcgcgggggcgatacagaggagatggagaaggatggcgggggtcgctcggcgccggagaggaagcagaaatgtcggaatgatgcgctggtgggaaggggggagctgcttaccattcccggagtcgggccacggaacctgaggaagctcgtggacaagggattcgatgacgtggcgcagctcaagcagctctacagggataagttctttggcaagtctaatgagaagatgattgaattcttgcaaaattcagttggcatcattcacaagaatcatgctgagagtataactttgttcattaaagagagtgttgatgaagagctgaaaggcaccgatacatctaagcttcctaaaaataggaggttgaccttttgtatagaagggaatatcagtgttgggaaaactaccttccttcaaagaatagctaatgaaactatcgaactacgtgaccttgtagaaattgtacctgaacctattgctaagtggcaggatgttggccccgaacacttcaatgtacttgatgctttctatgcagagccacagaggtatgcatacaccttccagaattatgtatttgtgacaagggtcatgcaagagaaggaatctgcgtgtggaataaaacctcttaggctgatggaaagaagcgttttcagtgatcgaatggtttttgttcgtgctgtgcatgaagcaaactggatgaacgagatggaaatcagcatttatgactcttggtttgacccagttgtgtcatcactcccaggtcttgtacctgatggttttatttatctaagagctagccctgatacttgtcacaaaagaatgatggtgcgaaaaagatcagaggaggctggtgttactcttgattaccttcgaggtttgcatgagaaacatgagagctggttacttccatccaagggaggaggttctggcgtgttgtccatcagtcagcttccagttcatatggagggctccctgcatgcggatatacgagatagggtattctacttggaaggagatcacatgcattcaagtatccagaaggttcctgctcttatcctggactgtgaacatgacattgattttaacaaggacatcgaagccaaacgacaatatgctcggcaagttgcggagttctttgactttgtgaagaaaaagaaggaatctcttacagcagagtcagagacggctgatggtgataagagtataaacaaacagattgtgctgccgcacggaggtggtttgtgggtgcccggaagcagcccgttaccagaatcagctctaaaatcatttgatttcaggagaacgatgtcttcctcgacttaaggtgggcaaacatcccaatggcgctatcaatttctgccgacaacctgcattggtgtggtccagcagcgtatcttgattgatatatatataccctgtaaatatttaaagattatataaagatttaggcttttagctagtgttggcgtacaatgtattatactagtggtatccaactctgttgcctgtagatgatcgagctgctttctgtttgcctggaaatgttgatcgaaccgctttcgagacagtgcttttgtaaatttggggtgcatcataggcgcagaatcttttgttt

SEQ ID NO: 31564 - DNA, 1341 bp, Zea mays
  Clone ID: UC-ZMFLB73190A05_FLI
cacgctgcaagtgctgcgacggtacaacggcgagctggagaggttcctccgctccgtcccgcgcgagcgcctgcactccctggtggtcggcatgttctgcaccgacgcggtcgacgtcggcgcaaagctgggcgtccccgtgtacacgttcttcgcctcggccgccgctactctggccgtcgtggcccagctgccggcgttgctctccggcaggcgagcgggcctcaaggagctcggggacacgccactccagttcctcggcgtcccgccgttcccagcgtcccatctcgtcagggagctgctggagcacccggacgacgacgagctgtgcaagaccatggtggacgtctggaagcgctgcacggacggcagcggcgtcttggtcaacacgttcgagtcgctggagagcccggccgtgcaggcgctgagggatccccggtgcgtgcccggccgcgtgctgcccccggtctactgcgtggggccgctgatcggtggcgacggcggcacaagagcagcagcggagcaagagcgcgcggcggagacgcggcacgagtgccttgcgtggctcgacgagcagcccgagaacagcgtcgtgttcctctgcttcggaagcagatgcgcgcactcggctgagcagctaaggggcatcgccgtcggccttgagaggtccgggcagcgcttcttgtggtctgtgcggacgccggccggcaccgacggcggttcggagaatctcggcgcgctctttccagaggggttcttgcagcggaccaaggaccggggcctcgtcgtgcggtcatgggcaccgcaggttgaggtgctacggcatccatcgacgggcgcgttcatgacgcactgcggatggaactcgacgctggaagccatcacagcaggggtgccgatgctatgctggccgttctacgcggagcagctgatgaacaaggtgttcgtgaccgagggcatgggcgtcggggtggagatggaggggtacacgacgggcttcatcaaatccgaggaggtggaagccaaggtgaggctggtgatggaatctgaggagggcaggcacctcaggggtcgagcggtagcactcaagaatgaagcacaagcagcgctgcgggatgacggcccatcggagacctcgttcgccaggttcctctttgatgcgaagaatcttcagggacacctcggtcacggatcggagtgaattttctttaattttctattgaggccttgttcgaaatttatattaggaataagatgcaggaagggttcttgaacttggcagtcatttgagtctcagggtcgacaatgtatcaaatacatatgtgttggagacttgttctc

SEQ ID NO: 31565 - DNA, 1028 bp, Zea mays
  Clone ID: UC-ZMFLB73190A12_FLI
gtatcatgtgttctaactccagactgtttgaacgattctgttgaggagtccactgcagagaaggatgtggcttctgatggggatgaggctgagtcaacagggattgttattagaagccatcaccctgctccaagatcaagctcagagagttcattcactcaacagggaactgctatgcaaaggctgcggctacagtcaggccttaacaaaggccagcgtcctagtactgatgattcatcaagctgcattatagacgaaccaggaagtcagcacaaagcagaaaaagcagagattgaagaggatgcgagtacaaacctcgctggaagtgctgatgatctacctggtaatatccatgatgatgagcaaaagaacatccctgaacatggtgctgaaatgacttctccagaagccaaatctgttctgaggttgcggaagacttctgaggaaggcaacaaggatgtcaagcaggagagttgtctcgagccacacgtgagagcaccaatgcagaagggaggcttccaatcatacatcatctggctggttcttccggtggctctgctcctgcttctctgtgttgggacatatggatgggtatgaaatctatcctggtgcggtgcaaggcatgacattttgcgcacatgggttcctggcgtcaacctggtgtgcggtcttctgtacataacctgtggcatcctttcaacagccgtaccctgcagtaagacatcccggcattgccaaggcagctgaaaaataaataaaaaaacaagtggtagaaatgacaaggtggaaaagagcgaggtgtgttattgttggttttagtacatcgtagtcttcttttgctgttgttgtagatgtcttgctaatgttgtcgctgttgtgtagttgcaattcaagcccagggctgccagttttatttcctaatgtaatgtagcaagagcgagaccctgttagacgggtgcgctgaaattctgaacctctgtaatatctgatgttcttgtggatacctgtttcagaattttcggttcctg

SEQ ID NO: 31566 - DNA, 1385 bp, Zea mays
  Clone ID: UC-ZMFLB73190B10_FLI
gcatacatgtacaggtactttgttagattgaatagagaaggtaatgcaggcggcagccaccaacttcctcacgtgttgcaagagaggttgcatgctttatctgctgctatcaacgcattgcagcttgttgatccctcatttgcatggctcgattctatttgtgaagccgatgataaaatttctccaagtaaaagaccccggaatcttttgatggagaactcggcttttggcacaaactcagaactttctagattgcaattttgtgttgacattgaaatccttgaaaaagaatacatattaacagaagcacagtatatgctcagcactttgaaatcaagttttgatttttcagaaagccaatctattgagtccctgatggatattcttataaatgagaaattgtatgatatagccttcacaattgtgctaaaattttggaaggagtcagaaataaaaaagcaattggaccgtgtattttcagtcattgcgcagcaatgctgctcgaacagatcagacaacaaatcaagtaaacaagtgccacttctgccttcttctgagaatgatgcatgggagatcaacaataggagtattgctgtgacccaacaattgcaggggagcaaccactgggaaacccttgaactatatttggataaatacaaagacctgcatcctaggttgccagtcattgttgctgagacgcttctttatactgatcctgagattgagctaccactttggttggttcagatgttcaaggctaataaggcagggaacaagatctcatggggcatgtctggaaaagaggcagatcctgctgctttattcagattgtacataaactacggacgccacgcagaagccaccaacctgctggtggagtatctagagtcgttcgcatcgtcgaggccagtggacgtcctccaccgcaagaagatgtccgccgtttggttcccctacaccgccgtcgagaggctctggtgccagcttggtgagatgcaacgggcagggcacagcgtggatcagtgcgaccggctcaagaagctgctgcacggagccctgatgagccacctgcagcaggtcgtggtcgactcggatgatgtgctgtcgtcagttggagatgggcaggggatggaggaccagagcagctgaagtcctgaagatcgtgttgttggcatgtgtagaaaacgatgtgccaccgctggatactgtatgtgattgtttgtgtggtcagctgaccaagagttacgcctgtgtcttttatatagaattattattagatgaaaacaaagacggagcgatggctccatttgtaacgtgagcatggaactgtcgctgatgacgagctgttcacttcccatgtgtagatgtagaaggtggattgacgc

SEQ ID NO: 31567 - DNA, 901 bp, Zea mays
  Clone ID: UC-ZMFLB73190C12_FLI
acatctaataagaataacactgctgatcgtggtagcaaatccgagattggaggcctcagtgccatcttaaagcttctatctccaaacttaatcagatcgactcttctactctggactgtctttcttggtcatgcctttctgtactatggtcttgttctactcacatcagaactaaatcatggaaataggatctgtggatcagaagagggggcagaagtgacaacaacagcccacatacatgatgagaatctctacagaaatgtatttataacaagctttggagaggtccctggtcttctcctgtcggctgccattgttgacatgatcgggcgcaagctctcgatgtcttccatgctttacatcagttgcctgtgcatatctccgcttatgttcgcccagacggaatcgctgacgaccatctttttgttctgtgcccgggtttgcatctctgcaagcttcactgttctgcacatctacgcccctgagatatacccaactgctgttagggccacgggtgtcgggtttgcaagctcgattgctcgctttggtggaatcctgtgccctctcgtggccgtcggcctggtgcacgcgtgccaccagatggcagctatcctgatattcatcacggtgatgctggcttcaggcatcgccgtgtcatacttccccctggaaacaagcggccgaaagctgagcgaccacgtcgccgccgcgtaagagctgattaattgaagaactgactttttgagagggatacaccaatacagaatcaaggcccaaggggccattattttttttgttcagttgttgacaaaggatacagtgggaaagaaagtgcaaaggaggcactagattgttacgttattatactgttgcttctcaatagaaatctacagatcactat

SEQ ID NO: 31568 - DNA, 830 bp, Zea mays
  Clone ID: UC-ZMFLB73190D02_FLI
tgccatctgccgccatgtcaaagcgaggtaagcagcctcttttaccaactggattcggccatttctcgtcgctcgatctggctataaatctcgcctgctcgtgcatgtgacatagttcggctgcttcaaggtgctcggaaaggggatgctgttgtccaaccccatcattgttagggccaagctcatctccaagatcatcgagaagaggatcaatgttactggaggcactgtcttgctgaccgccacatagatgctgtcgacggatatgcatagaagagaacatatatgcataaaagggagtaaaactaagatttggatattttcatccggacacagagtaaagaattctccactctcttgacttgacgaggctatataaccagaggccatcagaggagaactgaagactgagagcattctctgcttataatctttattcctctatattctaaattatttttttcaatccccttccacctggattcgattcgaatcccacaccaccacgtggtgttcttcctatatcgaataaacgttgtttcgcttgtctaatgatcgatagggcactgaaagagtcattcctagagactctacggaaggacacaacggagatggagcagcctgcttgagaagaggcggcggaggagaaggaagcgctcaacctagactcgtggtcgtcgaccagcatgcgccttgacgtcctctttttttgattcatttatttgattttttgaacaaaattgcccttgtctttgtccttcctcccttttttcattttcttaatgccctcatgtaaaatataaggcatgtgttgttcaaatctttctttt

SEQ ID NO: 31569 - DNA, 1262 bp, Zea mays
  Clone ID: UC-ZMFLB73190E09_FLI
tcttacgaagatttacgatcagctcagatgaggccaccaatggtgacggggttgcctgtggaagatcaagcagcaaaggtgtacactgcagaaatctttcagaagttcttcaatgaaataggacattcatttcattgcaattataatatacttgaacggaatgagtcagtggttacatacatagtttcggagcatgtcgatcaaacaaacaaggtagactacaaagttgcttatgataatgttcaaggtgacatatggtgcctctgccgtttgtaccaatccaaaggaatattgtgcaggcatgcactcactgtactgagacaggagcttgtgctgatgattccacaaaaatacatcattcatcgctggtgcaaggactgtaaacaaacttgtgcttccatatcccagcctgtctcagcaggtaatcaggaactgggaagctacgatgatctgtacaaacttggccacctatactttgcagaagttgtggaatttggttccatgaactcagaatcaaaagaatatgctttgtcaatcatgagggaagtcagggataaagtgatttcatatgagaaatcactaagagatcaaagggttgacagccatgtttcaacagccaactttgcatacaatcctgtgaatgaggattttactgatgatgctttgcctatctctcttagtacaaagggctgggatcttacccaaggccaatctaaacgttcccgaaagaagaagctggcgaccccaactgttcttgatactttgaaaaagaaaactaaaagggcatataacaaaaggaggaatgccactgcaaacaccctgaacacatctgccactgcaactgacggcataactgatggcacaaatgttcagcagaatcctgtaaatgagggatggcagctagcgtcgactagtgctcccgaaactttctcttatggagtaatcccggatataacctttccattttttacatctctttgctctttcaggagttggtgaaatttacacatatactaactaacgttcatttttgcaggtggagaacatttcgtttgatttgtcacaatacaacaatgccccaagcttccactggcctgaaagcagcagcaggtctcagctccactgagtaggcagcaatgcaattgtggatgccttccaaatagactaagttctgacagtcttgtaagggcttgttcggttattcctatcttctgtggattagatgagattggaaaaaaatatgaaagattttgacttgaaag

SEQ ID NO: 31570 - DNA, 1029 bp, Zea mays
  Clone ID: UC-ZMFLB73190F07_FLI
gcgaaccactgctcgcttctctgcctgcttctgcttgagtcgtgccagtgacccgtgaccgtgaccgcgagcttcagggacgcgggcggcggcgatcatggcgtggcgcggcccgctcggagccggagaggaggccctggacagcggcctcgagctcagcctcggcctcccggcctacttcgcccggccttcaggtttggacgccgccagggaggagcccgccgaggcctctgcctacgctatccaggccgccagtgggagcaatgtctccaaggcaagggtcaggccagcgggcgcggcgccggtggtggggtggccgccggtgcggtcgttccggaggaacctggccgcctcctcctccaggccgtcgtcggggaaacacacccgccaggagggcagcgccaaggacggcctgttcgtgaagatcaacatggacggcgtgccgatcgggcgcaaggtggacctcacggcgtacggcggctacgccgacctctccgccgccgtcggcaagctcttccgcggcctgcttgccgctcagagggaccgagcggccacggcgggtggcgaggaggaggaggagggggagggccccgtgatcggcggcgactacacgctggtgtacgaggacgacgagggcgacagggtccttgccggcgacgtcccctgggagatgttcgtggccaccgccaagaggctgcgcgtgctcaagagctccgacgtgccggcctcgtcggtgacgctgggagctgggggcccggagaggtctgcagccgactgctgctgctgaaacgtgctctgcttcgtcagctgcttgtaaaaagtcccgagtggaggagacgaggagtggccctatccctggcctcttttttgtgtgttgctcttgctgcctttctgctagtggtactagtattgggtgccagtaaaaagtaggagaacaaagtcatgacggtattaaggatgtaatgtgcaagattagcagtggtagtagtcgtaaggtgtttaatgaatctacggtctctgttttggggc

SEQ ID NO: 31571 - DNA, 1709 bp, Zea mays
  Clone ID: UC-ZMFLB73190H01_FLI
aaacttttgtcactacagaaggacatttcttctaaagaacaatctttattgtcagaattggagaatattttccaggagcacatggaacaagaagaaagaattaatcgcgcacatttcatgctcaataagatcgagaaagaaaagactcttgaagtagagaatcttgaaagggaggtcgtcagcctcgctgcacaggtctcctccacacacgaggagcgagaaagtgccactctgaatgctattcaagaggtatctgtcctgcgagcagacaatgctaaacttgaggctaatctccaagatgttagtgaacagctgagatgttacgagtctcaattggaagaccttcgtaaggagtctaaaagtaaaattaaaggattggttgattcccttaatgcctccaaacaaagcgaggaaatgttgacatcagatgctgaacatatgaaaaagttgatggaagctgctaaatccaatgaagatgcactaaggaagacttctaacgaactagaactgaagcttaaatccagtgattatgtgaaacaacaaatgctggaagaaatatctggcctgaaacttcaggttcagaaaataatgaatcttcaagatgaggtttccaaacttcagagttctcttgatgaggccaagttcgaaaaagggaaacttgaggagtttgtgcgctcggtgactgaggaatgtcaagaactaaaagcacagaaggctatgctaacagataaagtttcttatatgcaggagaccttgagaaatggtgaagaagaaaaccgaaacagaatagctatgcatgcaaagctcatgaggttggagagtgatctaacagcattagaagcatcacatgtacatgaagcagaattaaagaacgaactcagtaggatcaagagatcaaacagtgagtatcagaggaagatacaatctctcgggcaggaaaatgaggatctcactaggcgagttcaaattatggaaaagggttttgagcgaatgtcccacgctaaagagaaccttggaaagcaggagattggaggagataaccaggaagccatccagtcaacaattcagttactggaaattaagcttgcagaggcattggaggaaaataagatatacagagctcaacagaagagttcgatgtctgaggggcaacctgctggtggagatggcaaggagggcaataccgacaggattttgcagttggaaggagagctgagagatatgaaggaacgattactcaacatgagcttgcagtacgcagaggtagaggctcagagggaacggttagtgatggagcttaaagctatcaagaaaggcaggtggttttagcaggatgcggagttgttgcctgacataaaacatgaggctgacaccacaggtgggcatcatcaagccgtgctatgctccagcaccagtgagactaagagcaagcaagtgcaagtgcagagtcagacagtgatatagcctggacgtgctaactggtgctggagcatgtgtctctcactgaagctccgtatgatgcggtacccagcccttgtttaactggacgtgctaacttgcgttgtcccctagagtcatgatcccgttcttattggtatttatttttaatggtatataattaatatatacaccagtatgtattgagtttgactggagagtgatggtcagttgttgataccatccgatccctctgttttacatgattgatt

SEQ ID NO: 31572 - DNA, 876 bp, Zea mays
  Clone ID: UC-ZMFLB73191A04_FLI
gtcccggagatttttgttggtggtttattaggctcgatgcttatattcctgtttagtgcatgggcttgttcagcagttggcaaaactgcacaggaagttgttaatgaggtcaggagacaatttatcgagaggcctggtattatggactacaaagagaagcccgattatggacgctgtgtcgcaattgtggcctctgcatccttaagagaaatgataaaacctggggctctagcaattatatcacccatggccgttggcgttgtcttccggattttgggccactccactggtcagcctcttcttggagctaaagttgtagcctccatgcttatgtttgcgacggttgctggtattcttatggcactcttcttgaacactgctggcggcgcctgggataatgcaaagaagtacattgagactggtgcccttggtggcaaaggcagtgagtcccataaggctgcggttacaggcgacacggttggagacccattcaaagacactgcaggaccatcgctgcacgttcttatcaagatgctcgccacgatcacactggtcatggctcccatattcttgtgattaaccaaccagatttatcaagcttgccattaaccctgcggagatgtatctatgcgacttgtagatgaggtgtttacctgcatgtgatgtaatgatccaatcggttttagtgtgactacatgttgtacccaaagaaagaaagaaagaaagcagcgatctgtacccaggttttaatggtccaatcggttttagtgtgactatatgttgtacccaaagaaagaaagaaatcagcgatctgtacccaggtttgacggtagatattattctgaatttctgacgggtagtgatggtgcaaatgcc

SEQ ID NO: 31573 - DNA, 2063 bp, Zea mays
  Clone ID: UC-ZMFLB73191B07_FLI
tgaaggttgaaaattaaccaggccaacggtcttgagtcggaccctgtcaacacagggtggtcgatgttagagacatggcacaatctcgatcgtgacgtatgagaacccatctacacagggttgtgtttggcgtccatggaatgtttgtttgacttcaccgatagaattgctgatatgtaccatgatttcccagttcataggtcatacattttctaagaacatgcatcaggtttgtgtaagcagggctagctgttcattttggtaatgacatttttacttttttcacatcagaatcaactatcaaagaggacaaacaggttggttgatgagagcaaaggagccctccaagaagttgatcgatctgggcgtttgtttccttccgtttgatgtgaccatcagggagaccgtcgattgcttcagaagcaaagggctcatctagccatgtgaacatttccagatgtacgttttattctatagaactgctacagtaatacttggctcatattaaaccgcctaaacgcactggaaaaaactaaactatatgataatgatataggtaccagggttactattgcttactagaatgaggcgagagctgcttagctcctttgacattccttctacttagtggcaattggtttggttacttaaacctatgctccatatgatccacgctgattgaattttggtttgttaatatgttttgggcaagcagtgctatgagatggagatgatggttaggcatgatctttctataggttaaaagaacagattatccaacagctgatggaacctgcattagagatattatgttgatgtcacagatttagttgatgctcatgtgaaagcgctcaacaaggcagacactagaaaagtcagtatttacaacgttggaacaggaagaggtttggtaacacgagaattgtttatttatttgtataactattatttattcatgtggatagttgtaccctgcacaggttttaatcaatactttacttaatttacatggtaacaagatagagaggcccgcaaatagttaatctgggacaacatatctctgtactggccatagaggacaacaaaaagaatcaaaagttgaagaatcaccaacggtgcctcctttgcaccctccagctcaagaacctgggcccgagccagttcaacaagtcatgcccacagctgaagtgctgaaccaacagatttactgggaatcaatgaatcagcccgaggcacatctgaaatagatcaaaacaaggtagtcgccttggtcgtggttccacatgataatccgccaaaagcacttgcttctaccagtcctggaagcgtggcgactagctggagcaaatcagattctgtgcgatgaaaagcaagtgaaagaggtatatcttttttacattaaaatatcaaagtactttgcagattttatttcagctctgttgcatgatgcactcgcgctactgtctactgcaagtaccatcaccataaactctgaacgctctatgttcggtttcatctttttctttaactagattcgctttcatgtttcttataggctattgttcaggtactaatttgccatagtgttggtctatgactgaatggtacaaaatacatgcaatgaatggatgatactttccagttaaatcatgtaattggaatacagtggtgccgtcagcggtgcggattgggggcttctagagaaagggtctagcgtcgtgccctgcttgacgaacagtgtgttgatatgtgccatcatcgcactgggaacgaacgtgatggctagcacggggagcatcttgagcatctgctttgtctccaccactcaccatgctctgagcctgtgttggtatgcagacttttccctttgtttcagaagaagatgcagttgcattgcacattgttggaacccacgatcaccacaaaattgagggaatatgtcattactcatttgcataactcattagtcattaccttgtcaaggtttatgctttccatcacgaacggttggagttgcaacataacgatactttggtataccaaataaagttactctgttcacc

SEQ ID NO: 31574 - DNA, 1241 bp, Zea mays
  Clone ID: UC-ZMFLB73191D05_FLI
ccgccaccgccaccggctaccacctgccgcctgcgccctgccctccctctgtttttctagacccccggatcgctcagagattgagtcgtagtcgtacccgactagtcgccgcgtcctcctttccccgcgcagcagcagagcaccacccggtgaccgagcaatggaggcggggggcgtgggcctggcgctgcagacgcgggcggcggccttcggctccggccagcgccggggcggcctacagtcgcccatcgggaggctgagagtcgctgaaccggcgggagctgcggttgccgtgcgggttcgcgggtccaagcccgtcgtaccgctccgtgcgaagaaatcatccggaggtcatgaaaacttgcataactccgttgacgaagctctcctgttgaagagaaaatcagaagaagttctgttctacttaaacgggaggtgtatttacttagtgggaatgatgggttctggaaaaagtactgtggggaagatcatgtctgaagtcttgggttattcgttctttgatagtgacaaattagtggagcaagctgttggaatgccttcagttgctcaaatattcaaagttcacagtgaagccttctttcgggataatgagagtagcgtcttgagggatctgtcctccatgcgacgattagttgttgccaccggaggtggtgctgtcatccgaccagttaactggaaatatatgaagaagggcctatccgtttggttagatgtgcccttggatgctcttgctaggcgcattgctaaagtgggaaccgcttctcgtcctcttctggaccaaccgtccggtgatccatacacaatggccttttctaagctcagcatgcttgcagagcaaaggggtgatgcttatgcaaatgcggatgtaagggtttctctggaagagattgcatctaaacaaggtcatggcgatgtctctaagctgatgccgactgatatcgcaattgagtcacttcataagatcgagagtttcgtcatcgagcacgctgctgataatccagctagcgactcgcaagctgagtcacagatccaaaggatacagaccttgtaatatcttaatccttctgttttgtaccgaagcgtaccccctagagcatcgttggtttatttgttcgttgaagtgtcacgagggagagaaaaaaaaccctgaagtatttcttcttgtaagttgtaaaggaatggaataaaggagctaataatccgaagtgtaccgttggctg

SEQ ID NO: 31575 - DNA, 1330 bp, Zea mays
  Clone ID: UC-ZMFLB73191F07_FLI
cagtacccggcgaggtggtcctcgacgacgccatcgccttcgcgaggggccgcctcctggacatcatcagcaaaggcgaggtcaggtcaccggtgtcagagcagatcacacgagccctcgacatccccctcccacgatttacgaggcggctggaaaccatgcactatattgccgagtatgagcatgaagaggcacacgacggcctgctgcttgagctcgctaggctcaactttgtccttgtgagagcgcttcacctcagggagctgaaggacctgtcactatggtggagggagctctacaacactgtgaagctcccgtacgctcgggaccgtatggtggagatctacttttggacctgtggtatgcttcatgaggaggagtactccctggcacggatgttcttcgccaagacgttcgggatggtgtcactgatggacgacactttcgatgtccatgctactctagacgagtgtcacaagctcaaagaagctatgcagagatgggatgaaagtgaggtctccattctacccgagtatctacgcttgctgtatatcaaaacacttagcaacttcaaagagtttgaggagatcttggaaccgaacaagaagtaccgcatggcttacacaaaagaggcatacaagttgtgctccaaaaactacctaaaggaagccatctggtctaaccagaaataccagccaagcttcaaggagcatgaggagctatcaatcatgacctcaggcttgccgatgctcacgatcctaacactaatgggcttcggtgacgaggcaaccccggaggcgttcgaatgggtaagcagtgttcctgaaatggtccgcgctggttcgcaggtcactcgcttcctcaacgatttgtcttcttacaagttgggaaagaacaagaaagatatgcctggctctgtggagacctacatggtagagaatggcttaacaggagatgaggctgcagcggcaatcgcggcacttctagagaacaggtggagaatactaaaccaaacaaggatggagatagatcacacgctactgccagcggcgcaggtggtgctcaacatggcgagggcaaatgagatcatttacctccacggcagagacgcctacaccttcggtgctgacctcaaggaccttgtcaccacactcttcctcaagcaagtgctccctctctagacaatactctgatcacacaactagattggctatataacgattctcgtgttgtattacgctttgtgtttcattatgcacgctatatatatgatcaatgtacctgtttctatcatattgatggtaatataatattctaaatggatatagtt

SEQ ID NO: 31576 - DNA, 955 bp, Zea mays
  Clone ID: UC-ZMFLB73191H01_FLI
cggaactcatcccgctgtgcgcttcgtttcgtggcggcgaacggccggtcgagcgccgccgcccttggctgggtcttcactcagtccttcgccggcgacgagcgtccacctggtgtctactgaactgagcagacagtagcaagagccactatgctgttcttctcctacttcaaggagctcgtggggaaggaggtgacggtggaactcaagaatgacctggcgatccgcgggacgctccactcggtagaccagtacctcaacatcaagctggaaaacacccgcgttgtcgaccaggacaagtatccccacatgctgtcagtgcggaactgcttcatccggggctcggtggtgcggtacgtgctgctcccgcaggacggcgtggacgtggacatcctgcacgacgccaccaggagggaggcgcgcggaggctgatcggcatcggcatcggcccccctcacctgtgctgcttctcccccggggaggagattgatctgccttgccctgatctcgtctggttgtacgaaacatatgctgatctgagtggccccaactcccccagcacacacttgatccaccacccacccagctccctgcctggtacttgcatgttccttgctgtgtgtgtgtgtgttcagcacacacttgatccaccacccacccagctccctgcctggtacttgcatgttccttgctgtgtgtgtgtgtgttcagcacacacttgatccaccacccacccagctccctgcctggtacttgcatgttccttgctgtttgtgtgtgtgtctgtcagtcagtaatgctgtttgaccaagagggttagcgtaaccgaacaagccctaacggagtaacggacgctgtagcggttgatgaatcacaagagtcccaatgtaagcggggttgaatcacaagaatcccaagggatgtcaatggcgaattacccgtcaggggatggctc

SEQ ID NO: 31577 - DNA, 1891 bp, Zea mays
  Clone ID: UC-ZMFLB73191H11_FLI
ctcccatgggcaatcagaatgaaggttgcactcggagcagcaaagggtctggctttccttcatgaagaagcagaaagaccagtcatttatcgcgattttaaaacatctaatatactgctggatgcggtaagttaatgaataggattatgcagtgtgtgcttcatgatctatatactgctacatcatatgttatattgcttgtacaggagtataacgcaaagctctctgattttgggcttgcgaaagacggacctgtaggtgataaaactcatgtttctactcgagtaatgggaacctatggatatgcagcaccagaatatgtcatgactggtaagtatcttgtcatatttgccatgactgtgtccatcgaactctggtggtgagcaagtctggccactgccagtgctaccagtgagcaacgaaccattcactagattcagctttatctgcttgttgcgtatccaaatcgatgtttaagtatgctgggatataatcagttctccattatttgatgcttcattgaagacatttaaggttggaagctatgcttgttgggagacgttgtaatgctttacgttacatgccatacttgtttggataatatgataagtttccattagtggtatgtttgtaccgaggtaatgatgtttaccatatctgtctaaggcgggcagaggggtttgttcagaaccatacaatcctaatatacacaggaatacgcggaacacgtagttaccacacttgcaactttacatgtgtctttgtgctacaagacctttatgtagtggaagcttaaaacacactggcaggggcaaattgaaaaggtttatcagctaaattaactgtggaaatgggcatgggtagttcatgtagaatgtaggtattctcagtgagttgaccccagcaatcacatatcccaagataaaatcatttatgtttacatagaatttgtttggggtgaagtgcttagtgcttacctaggtttggattggcttcaaatccataatattgaaagaataatttgactaccttgctctcttaagattcaaacacccttttactctactgtttacacatctggtctttgcttgacatgcacttttgtctttctgttccacttttcaggtcatctgacatcaaagagtgatgtctacagcttcggggtggtgcttcttgagatgatgtcagggcgcaggtcgatggacaagaaccgcccgaacggggagcacaacctggtggaatgggcgcgccccctcctaggcgagaggcagcggttctacaagctaatcgaccctcgcctggagggcaacttctcggtgaagggcgcgcagaaggcggcgcagctagcgcgcgtgtgcctgagccgggaccccaaggcgcggcccctgatgagccaggtggtggaggtcctgaagccgctgcagaacctcaaggacatggcgagcgcctcctacttcttccagacgatgcaggccgagcggatggcgcactcgagcagcatgaacgggaggagcagcatgaacggcggcttcaagacgcagagcccgtttgggcggcatgggcagccgcctcccgtgaggagcctctctgacgggccccgcgcgtctccgttccgctactcgccgaagcctaacgtgaagtgagcggagtggtggaggcgcggttttctgccggctggaaggcacggcccctggatgaaacctggtttgttgggggtgactggttcgggccgtgcatttgcattgcattgcattgatgtgtgtgctgtagattgacatgtgcacaaagtaaaaggatataggcgaaaaagggtggtgtaggtatcggagtttgcttggcggatgtttgctctgaggttttaactgaatgaatgcggatgcaccgttgctat

SEQ ID NO: 31578 - DNA, 673 bp, Zea mays
  Clone ID: UC-ZMFLB73192A05_FLI
attggcatctgtctcctgtcgcgccggccaccacagcgcagaagaacacagcacccgcctgcctcgccgccgcaatggccgccgccgcctccgctgcgagatccttcctccggtccagcggctcatcgtctctccgcagcgcggtggccagagccgcctcgcgtgcgggaccgggaccggctccgctgccgaggcggatgcccacctctgccccccgtgtactcctaaggtcgccggtggaaatgagcagcgtgtgtctggagtccttgatgcccatgcacagcgccacggcttcagcgctcatgacgtcgcttctcgccgccccggcttgcaagggattcggttggctatcagaaggtcaagctgaaactagatgaacttcatgggacccaaaaggcctgtgattagtgcgatggaggtcaacttggatgaagactagactgctatttattttgccatctctgttgccttggttttgcccattataaatggaacatagagcaatgtagctttcgtcgctgttaatttatatgatgttattctagagcttgagcccagattattgtgtttctatttgtagatggatgatttgtcgttactggagatctgcagtgatggtatcttgtctggattatggatacctcgtgaatttaaagtacttggttggcgtctc

SEQ ID NO: 31579 - DNA, 422 bp, Zea mays
  Clone ID: UC-ZMFLB73192B12_FLI
gagcggtggcagcatgcatgttggtcctaatgatccgcgcttctttccttctaatcccttctctgccccatttggtgggcttgggagtgttccaccaggtagtcgctatgatccaattggcccacctgacgtcccagggtttgagccatctagctttgttaggcgtccaaggcggcctccaggcgggagcacccaccccgacctcgagttcttccagcaaggcccagacttctgagagtcgcgcagaggccggccggagcctcgccctaccctcacgaaataacttcaaaatgctgagccctcgagctagatatctcgcttggtgtgattgcaactgctgtatcaagtatagtcctagtgcgctttggctgtaaagatggatgtgaacatcgtcctagtgtatttactcttaattccaaacc

SEQ ID NO: 31580 - DNA, 1474 bp, Zea mays
  Clone ID: UC-ZMFLB73192C03_FLI
gctgcagtgcaaacgactgctagttcccctttccccgcatgatctctgccccttcccctaccttctcttgttcttgcttgcacgacccttttccttgtgcgctagctgccgcttcttcttcgtcttcctggagctccccgcatccacacatgccccaagaaccagacaataaaacaacacggaaccatcggagtctttttctactactatttccagcgatttgattatatggatgtgtgcacaggtgcacgtagataggtagaatagaagggagattatagctagctagaggcagcgagcagctcggttgctgggacacgcgatcgagctacagcaaagaagactgcagggtggcgcggcgggcatggaggatctgtacagcatccacccggggatctcgcgccacggggcggcggcgactagcgaggcgtccggggtcgccggtggaccgggctcacccccgcccccgcccccgccggcggcggatctgacggagctggtcaaggcgcagatcgccgggcacccacgctacccgtccctcctctccgcctacatcgactgccgcaaggtgggcgcgccgtcggaggtggccacgctgctggaggagatcggccgggagaggtgcgccgccgcctccgccggcggggaggtcgtcggcatggaccccgagctcgacgagttcatggagacgtactgccggttgctggagcggtacaaggaggagctgtcgcggccgttcgacgaggcggcgtccttcctcagcagcgtcaggacgcagctcagctccctctgcggcggcgccgcctcgctctccgatgaaatggtggagtcctctgaggacgagccatgctcaggcgacacagacgcgacgacagacccagggcaggagcacagctcgcgcctggccgaccgcgagctcaaggagatgctgctgaagaagtacagcggctgcctgagccggctgcggtccgagttcctgaagaagaggaagaaagggaagctgcccaaggacgctcggtcggcgctgatggactggtggaacacgcactaccgctggccgtaccctacggaggaggataaggtgaggctggcggccatgactgggctggacccgaagcagatcaacaactggttcatcaaccagcggaagcggcattggaagccgtcggaggacatgcggttcgcgctcatggagggcggcgtctccggatcctcctccgggacgacgctctacttcgacacgggcaccatcgggccgtgatcgatgcgatagatacctctgacgaattgggggcaaattgttggttgatactgagattagttacatgaagcaatatccgctgtcattttgtcggattcattgtgtatatgcatgggcgacaacgtgtattgtcgggtacacagtatgtagtggcatgtaaagacaccgtaacaatataacatgaattgttcaattgcctgttgcattttgatc

SEQ ID NO: 31581 - DNA, 1402 bp, Zea mays
  Clone ID: UC-ZMFLB73192C09_FLI
tcactctggttgtattttacgctgtaaatcaaaagaaacgggctcagaggcttgtgtccatcaacaatccttttgcgtcttggggatcattgggagaagatattggtgcagcaccacaactgaagagtgctaaattcttctcattggaagaactcaagttatgcaccaatgatttccgagaaattaatgcgattggagctggaggctatggaacggtttaccgaggaaaacttccagatgggcagttagtggcaatcaagagatccaaggaagggtccatgcagggtggccttgagttcaagacagaaatagaactcctttccagggttcatcacaataacttggttggactggttggtttctgctttgagaagggcgaaaagatgttagtttacgagttcatacctaatggaacactaagcgaggctttatatggtatgaaaggaatacaattagactggagcaggaggctcaagatagctttggattcagctaaagggctagcatacctccatgaccatgccaatcctcctatcattcacagagatgtgaagtccactaacattctccttaatgagaagatgaccgcaaaggtttcagactttggcctgtcgttgctggtaacagacagtgaggaagggcaactatgcacaaacgtcaaggggacactgggctacctggacccagagtactacatgacccaacaactcacagcaaagagcgatgtctacagcttcggcgtagtgctcctagaactcatagtgggtaagccaccaatacacaacaacaagtacattgtccgtgaggtgaaaatggcactagacgaagacgatggcacgcactatgggctcaaggatgtgatggaccctgttcttcagaaaattgggggcctctttggcttcccacggtttctaaaactagcactgcaatgcgttgaagaggtggcaaccgcccggccctcgatgaacagcattgtgagggagattgaggcgatcatgctggacaatgggctcacaccgggctcaatgtctacgagctcttcattcagcattgaatcaagaacgatgaaggttggacctaagcacccatactccagttcatccatgtcaacctcgacgtttgatatggatagcagggcctttgagtacagtggggtgttcccttcttctcatggtagcttgaagccctgaagatcagaacttttggactccaacaatctgtacgagctgttatatatgtttcagtaggactgtacagaattgatgaactttgattcgttttgcctagagagacaaaagtatcttttggtttttttctttttaaagaagagatgtatataatattggccaaaacttttctccagtgatattgaagcttaggtgaggatgaaccaattataatg

SEQ ID NO: 31582 - DNA, 1205 bp, Zea mays
  Clone ID: UC-ZMFLB73192D05_FLI
gcacgcgcacgcgacctcgacacgcacgcagcagccagcaggtgaccgccgtcacgcgaccgcttcccacactcccttccccaccagccgaaaccgaggctgacgctgcgcgagccaaccggcggtgatgcaggcggcagtcggccaccgcggcgccaaccttggctccccgtcactctcgcgcttccggtatggcttccgcctccccggccggtcccgcctcttctctgagggcgtggcggcggcgtcactccgcgtcggctctctgccccagccacggacccatggcagcggcggtttcgcgcacctcggggccatgggtggggaggcgccgaggctgccgcacgccctcaggagaatgcttatcgatcatcagaaaatggcatgtcccaaccttctgaaagctgctgtactttcaaccatgacattgctttctgtacctcttgaggcgtcagcggagatgtgccagccacctagttctttcgccaatatgccaatttttattgttgtagcactaataggagctgctgttggcggattattagcacgccaaagaaaggcggaattgaagcggctcaataatcaacttcgccagatcaatgcagcacttagaaggcaggcacagattgagtcatttgcgcctggccttacttatgcgccagttgggagaacaaatgaaactgatgttattgttgacccaaggaagcagcagttggtcacaaacctgagaaatgggaagaattacatgaggaatcaagatcttgataaggctatagtggagttcagaacagctctggagcttgcagagagcataggtgatcgttttgaagaaaagaaagctgcccgaggactaggcgcatcgctgcagaggctcgggaagtaccgagaagcaatgagacagtacagcaaggttctggagctgtccaaggagacaggtgaagattccggctgcaccgaggcctacggtgccatagcggactgctacaccgagctgggcgacctggagcgagcggcgaaggtgtatgacaagtacatatcgaggctgcagcccggcgagtaaggtagatttctttacagacgagacagcgagttccttcccgttcgttgagttttgcgttttgtcggtcttgttaaactcactgcaggtattggattgttttgagaacgattttaatattcgtatataaataactattgatttaatc

SEQ ID NO: 31583 - DNA, 914 bp, Zea mays
  Clone ID: UC-ZMFLB73192D07_FLI
gattttagccgccgccgctgctcatctcacatccctcgagaagacgcctgctcctcgccgatcgatacgatggccgtcttctccgacctccacaccgccgacggcctcaagtccctcgaggctcacctcgccggcaaaacctatgtgtctggtgactccattactaaggatgacattaaggtcttcgccgcggtgccgtcgaagcctggcgctgagtttcctaatgccgcccgctggtacgagaccgtctctgcggctgtagcctcaagattccctggtaaggctgttggtgtaaatctgcctgcgggatcagctcctgcggcagctgctcctgcggatgaggctgaggacgatgatgaccttgatctttttggtgatgaaactgaggaggacaagaaggcagctgatgagcgtgccgccgctgccaaggcctcttctaaaaagaaagaaagtggtaaatcctccgtccttatggatgtcaaaccatgggacgatgagactgatatgaagaagctggaggaggctgtccgcagtgtccagatggagggtctgacttggggagcatcaaagcttgtgcctgttggatacggcatcaagaagatgactatcatgttgacaattgtcgacgatcttgtgtccatcgacactctaattgaggaccaccttacgcaagagcccatcaatgagtacgtccagagttgcgacattgtggctttcaacaagatctagagttcagtttctgagtttgggcaacggcagcggctcagctcgtcaagtttgtgctgggatgccagtttatcccttctagtctattacagaaatgttgttcggagctgagtctattataaacatcttggtctgagtttattgttgagtggtgccagtttttttcaatatacatttatcttaaaaac

SEQ ID NO: 31584 - DNA, 2001 bp, Zea mays
  Clone ID: UC-ZMFLB73192D09_FLI
gctagcccaccacgccctgaacctagcccggacacccgccaggacaggccagcccaacgcgatgcgaccgccgcctcagggtccgcgcaccaccatgtccatgggctccccggtgcagctcaggcggctgaagcctctgtaccagctggtggtgaacaacatcctggccatcgtggccgtgccgctcgccgccgcggtcctgctcaaggcgtcgtcgctcgggcccgaggagatcctggcgctccggccggcgcacatgttcctggccgcgttcctgcctgccgcggccacggtgctatacctgatgctccggccgcgcgctgtgtacctggtggactacgcgtgcttccgcaccagccccaactgccgcgtcccgttcgcgacgttcctggagcactcccgcgtgtggccgggcttcgacgagcgcagcgtccggttcatgacgcgcctgctggagcggtcggggctcggggaggagacgtgcctgccgtacgcgcagcactacatcccgccgtcgcgcgacctggagtcctcccgcgccgaggccgagctcgtcatcttctcggccatcgacgacctgctcgccaagaccggggtctccccgcgggacatcgacatcctggtggtgaactgcagcctgttcgcgccgacgccgtccttcgcggacatggtcgcgcaccggtacaggctccgcggcgacgtgcgcaacgtgcacctcgccgggatggggtgcagcgcggggctcgtctccgtggagctggcccggaacctgctgcaggtggcgccgcggggcgcgcgcgcgctggtggtgtccacggagaccatcacccccaactactacatgggcgaggagcgcgcgatgctgctgcccaactgcctgttccgcatgggcggcgcggcggcgctgctgtccaccgacggcgccggcgcgcggttccgcctggcgcgcgtggtgcgcacgctgcgcggcgcgtcggacggcgcgtaccgctgcgtgtaccaggaggaggacgagcgcggcaacgtgggcatcaacctgtccaaggacctgatgagcatcgcgggcgacgcgctgaaggcgaacatcacggcgatggggcccctggtgctgccggcgtcggagcagctgctgttcgcgctgtccttcatcgcgcgcaaggtgctgaacaaccggatcaggccctacatcccggacttccgcacggcgttcgagcacttctgcatccacgcgggcgggcgcgccgtgatcgacgagctccagcgcagcctgacgctgtcggacgagcaggtggaggcgtcgcggatgacgctgcaccggttcggcaacacctccagcagctccctctggtacgagctcgcctacgtcgaggccaagggccgcatgcgcaggggcgaccgcgtctggatgatcggcttcggctccggcttcaagtgcaacagcgccgcctgggagtgcatccgccccgccgccaacgccgacgggccgtgggccaactgcatccaccggtaccccgtgcacattcccgacgtgctcaagcactgagcccggcgccagctccagtttcgtgccgtgccttgcctttcccttttcctcctcgcccggttgccattgcacctgctgctacatttggtttgtggacatcaaaacgaaccgctggaacagcgattggccgtggtcgtgaactaggttggtggaatatgtgatggagagtgacagagtacttgtcgtgtcgtatcaacgggggctcaaggcggcggggtggtcgtcataaaggaggcgaggtcgggccaggctgccgtacatgggcgcccggggaacggacgtgtgttgtgcttgtccggggcgttgttgtattatctaccatttactatttcttacaattcattcctgcagtataccatgaaaagagatatgacatgagctactagtagacgacaagacgagcaaaagctttgatgtatgtgtgcacctactctttatacaatcaagtgttctcattt

SEQ ID NO: 31585 - DNA, 997 bp, Zea mays
  Clone ID: UC-ZMFLB73192E07_FLI
gtggcaagctgctgcaccaacaagaagttgtcttggatactccttcctttgataaagacactttgattgatagagaccatgcttggcagttctctggagaaatttcatttgaattaaaagatccagcctgcatttacgtgatcttaaagaagccagatgacttgaatgcgctttcagcagatatcacaagatggctttctgaagtagaaaactcgaagatcagtaaattggatgcgatgtttgatctagcaaactttgctgtcaagggttgccaaaggactgatggctgttctggctcccagcacactccgtgcattcaaaagaagatcatacagtactttagtaagaactactccacctcagacagtggccaatgtactcagccacaaaggggcagcccattcttgcaagctgacataaaggtgttccttaaaagcaattcgtttgcgaaattcacgccaagggccgttgctaggattatgcatggcatatcaagcccggcttttccatctgccacctggtccaagaaccacttctggggccgctatttggaggttgatttcccagtggtcatggaagctgccaaggccgagctggtcaaactcgtgggaaaaggagagtagcagtgtagtacttaccggcacggcaataggaacagttgctttcactcggtacgtgtcctgtgccgagtagaatgcttgcaagccgcaaccgcaatcgatgatagagagctgctacatgttcgtgccttcttcccagcttgtccgcagttggtccaccacaagcattctaaatggttacacatctgcttggcatcacctcctcacttcatacagatggcggtatttattcaagcgatgctgatgcggccagccaagctggtgttagcacctagaagggaatatcggagagaagagaggtagaagaagggttgaagaagaagataacagcgaggaagacgatctgatttgatatctgatagccaaaatggttcatg

SEQ ID NO: 31586 - DNA, 1884 bp, Zea mays
  Clone ID: UC-ZMFLB73192F01_FLI
gaaaagtatcgcatactggtcaagatgcagacactgcatgttcagcatatcttcatctcaatggattttgccttctgatgattgcacatgatgaagcaaatattattttgagagaatccaaggttcatgatgctatccgatgctttttcagggctgcatccgggtatgaagctccaaaggctttggagaacttttcattggaaacagggtttcaagtttctggggaatctagatctatttctttgtggagacttaactactatgagtgggcaatgcaaatttttgagcaacactccatgagcgagggggcgtaccaatttgctcttgctgcactagaactagttgatatcgtcgacgggatagataatggaattgaagctgagggtcttccagagaccgcagcaatgattaaaggacgactatgggctaatgtattcaagtacagcttggatttgaaacactttcacgatgcatattgtgcgatcgtctcaaacccagatgatgatagcaaatatatctgtttgaggcgtttcatcatagttctttgtgatcttggggagacaaaggttctttgtgacggagagattccattcactggcttggtagagaaagtggagcaagagctcttctggaaggctgagcgctcagatctgtcgtctagaccaaatctctataaggttctttattcatttgaagcacataggaacaaatggaggaaagcagctgcatacatgtacagccgatgataaaatttctccaagtaaaagaccccggaatcttttgatggagaactcggcttttggcacaaactcagaactttctagattgcaattttgtgttgacattgaaatccttgaaaaagaatacatattaacagaagcacagtatatgctcagcactttgaaatcaagttttgatttttcagaaagccaatctattgagtccctgatggatattcttataaatgagaaattgtatgatatagccttcacaattgtgctaaaattttggaaggagtcagaaataaaaaagcaattggaccgtgtattttcagtcattgcgcagcaatgctgctcgaacagatcagacaacaaatcaagtaaacaagtgccacttctgccttcttctgagaatgatgcatgggagatcaacaataggagtattgctgtgacccaacaattgcaggggagcaaccactgggaaacccttgaactatatttggataaatacaaagacctgcatcctaggttgccagtcattgttgctgagacgcttctttatactgatcctgagattgagctaccactttggttggttcagatgttcaaggctaataaggcagggaacaagatctcatggggcatgtctggaaaagaggcagatcctgctgctttattcagattgtacataaactacggacgccacgcagaagccaccaacctgctggtggagtatctagagtcgttcgcatcgtcgaggccagtggacgtcctccaccgcaagaagatgtccgccgtttggttcccctacaccgccgtcgagaggctctggtgccagcttggtgagatgcaacgggcagggcacagcgtggatcagtgcgaccggctcaagaagctgctgcacggagccctgatgagccacctgcagcaggtcgtggtcgactcggatgatgtgctgtcgtcagttggagatgggcaggggatggaggaccagagcagctgaagtcctgaagatcgtgttgttggcatgtgtagaaaacgatgtgccaccgctggatactgtatgtgattgtttgtgtggtcagctgaccaagagttacgcctgtgtcttttatatagaattattattagatgaaaacaaagacggagcgatggctccatttgt

SEQ ID NO: 31587 - DNA, 1101 bp, Zea mays
  Clone ID: UC-ZMFLB73192F03_FLI
gcacaccgggcacaccccccgagctcagcttagctccactccagctccaatcacagtcgtgaccagagcgcgagagctagctagagggccgtgaaaatgccgatcaataggatcgccctggggagccaccaggaggtgtaccacccgggcgccctcaaggcggcgttcgctgagttcatctccaccctcatcttcgtcttcgccggccagggctccggcatggccttcagcaagctgaccggcggcggcccgacgaccccggcgggcctgatcgcggcggcggtggcgcacgcgttcgcgctgttcgtggcggtgtcggtgggcgcgaacatctccggcgggcacgtgaacccggccgtgaccttcggcgccttcgtgggcggcaacatcaccctgttccgagggctcctgtactgggtggcgcagctgctggggtccaccgtggcgtgcttcctgctccgcttctcgacgggcgggcaggccacgggcaccttcgggctgacgggcgtgtcggtgtgggaggcgctggtgctggagatcgtgatgaccttcgggctggtgtacacggtgtacgcgacggcggtggacccgaagaagggcagcctgggcaccatcgcccccattgccatcggcttcatcgtgggggccaacatcctggtgggcggcgccttcgacggcgcgtccatgaaccccgccgtgtccttcggccccgccctcgtcagctgggagtggggctaccagtgggtgtactgggtcggccccctcatcggcggcggcctcgccggcgtcatctacgagctgctcttcatctcccacacccacgagcagctcccctccaccgactactaaaagccgaagccgaccgacccaggggtgcgcagcgcagcgcagctagcatccagcgctctctccccgctcgccgccgtttagtttctctcgtgcacgtgcatgcatcgtagactgtctcaggccgccgctgcgccggcgccgctcgcatcgtttgcttccttggaccagcagtcgtcgccgtcaggctgaactgcttgtaaccgtgaattccggacccgtttgcttctgtaagatttgtgcatttgcctgagt

SEQ ID NO: 31588 - DNA, 452 bp, Zea mays
  Clone ID: UC-ZMFLB73192F04_FLI
gccgtcgtctgctgcggactccgcctccattttgctctgtttcttgcaagttgctcttgcggtagttcccccaactgccaccatgcagaacgaggagggtaagactgtggacctctatgtccccaggaagtgctcggccacaaacaggatcatcactgccaaggaccatgcctctgtccagatcaacattggccacttggatgcgaatggcctgtatgatggtcacttcacaacgtttgctctctctgggtttgtccgtgctcagggcgacgcagacagctccttggacaggctgtggcagaagaaggctgatatcaagcagtagattttacatctagtttaccaagaattggacactgccttagctatgttttgaattcatgtcactatatgcaatgttgtgatttcagctggtaccttaaatctgaagatttagtatctttgttgggttc

SEQ ID NO: 31589 - DNA, 3014 bp, Zea mays
  Clone ID: UC-ZMFLB73192F09_FLI
aacccaacagcagtaggatattgaataccatataccacaacataaaaaggattaaaacatggtcaaaaggagtgtcaaaagtcaaaaacaatataaaaatttaaaaccaaatccatcttaggctgtactgtccgtagcatcaaatagacatggtcatcgggagaatcttttgaggcgttggttgaggtttgatttcccatgatgccttttcatccgactcttgggggagaatgaacggctgtgaaatctccttgatcatcaaatcaccgcagaaggggcactcgcttgctacagcatcatccaactgtgatctcagcttatcaactggggttgtgctcgtaataggttcgccattaacacttgccccattgtcttttgctgctttcctgtccatcaagctaagccgtttctgaaggtccaatattctctcagcttgcacctggttactgcaacgagtcacatgtccaatcaagcaatttgcatggaaggcatgtccacagggaaacacataaaagggggccatgtgtccaacagatgtatagcttctccctacctggtgcaaccctccaacagtcaatattttgcgccggcaaaccccacaatcctgctcacggtcaattactgtatatctctgagcgagggcaccaatatcacttctgatattatctgccccacgtgtggcatcatccatctcctgcttgagctgctcaatctggctgttgtagtccttcagagatttgcatatttcctctttgaaatcgtcaatcaatacgaagtctgggaagaatggtaagatatcctcaatctttaacaagttattggtctccgaaaggaattctattgctttctttatattctctctcttgacacctttctcttgctcgatgacatgtttagcaaccttaagccacaacttcttcctaagctcttcatcgtcttctactttgtcagcttctgcctttgcaagttccaaatccacctagtgagaaccaaataaagataagaaatataggaacacaaaaaattaaactatcaacatgtagaggctgttaggaaagtaatccttgattggtgctagtttacttattctgttttaggaaatagctagtatggtagtggatcagtcttatatggacggatccaatcagcaagatcaggactgatagcagtccggattattaccttgtaatagctagtttgtttccttatgaaagtctataaatatatggccttagaggctaagaaaaggcagtcaataggacgccaccaaatctgctgtgttcctctccaaatcgtgtgcgtgtgagtccctgggaggttttctcatacctgaagaacttacctgggaggtaggaactcgccggcaacctgcagggttgtctctccggcgcagtttccaacaagtggtatcagagccaaggaggagcaagatgtcgaaaactgttgatagcagtgcgacattcaggaagtccagcgacgacacctccaaagatggagcagtggtccagcgagtaattcgtgaggtgagtgcagggagtggatatcccacactcaccaagaccaattactcggactgggcgctcctgatgaaggtgaagctgagggcgaggatgttgtgggacatcatcgagcacggaggagcagacatccatgaagaaatgatggcactcgacgctctctgcagcgcactgccaccagagatggtgtcttcgatcgcagacaagtccacggcaaaggaggcgtggaagaccattgcagacctacgggttggcgatgatcgcatgaagactgctgctgtgctgcttcggaggaagttcgacttggcaacgtttaatgacggtgagtccgttgaagatttcgcgctgcgcctaaatggcatggcagcggaactctccactcttggagctggcgtggaagaagagaagatcgtggagaaaattgctcgcagcgttccaccacgcttcaagcaaatcgtcctctccatcatgactctcctcgacctgtcaaccctcactgtgtctgacatggtggggaggttgagagcagcggaggacgcctttgaggaggccccaggatcactgcagcacagtggtcgactctacctcacggaagaagagtggaatgcccggcgcaagaaggaagtcgagcaccatcctggcagcagctcgggtggaagatcagggcgccatgatggaggataccgtgggcgtggtcggggccgtggtcgcagtcgtggcagaggagggcgctcatcaggtggaccaccggctggaaaggtcactggtgatgagtgcagaaggtgtggcaagatgggacattgggcgcgagagtgtccgtcaaggcacaagaaggagcaagcacatgctgtccaagaagaagaggaggctacacttcttgtggcaaagacgttcccggtaaaaacctcaacacttaaaccatgctgcaagatgtctagttctcatctagagatcagggaggagaaggtgttcttacagcatgaagaggaggagaaattagaggagggaacctggatcctggacactggagccacaaatcatatgtccggatccagggctgttttcaccgatctggataccagagtgttgggtactgtcaggttcggtgacaactcggtggctcagattgagggacgaggaaccatcaagtttatgtgcaagaatggcgagacccggtcgtttgttgggccttattttattcctcgcctgacaacaaatatcatcagtattgggcaacttgatgaagcaaagtacaagattcatgttgatgatggggtgatgcatattagggaacctgatggaagattactggcaagaatagtgcgagctgaaaacaggttgtacctccttcatttgaagatacaacagtctgtgtgcctagcagtgcgtgggcgcgaagatgaagtagcctggcggtggcatgagaggtttggtcatgttaatatggctgcactgcggaaactggagaaagaagaactggtctgaggcttgcccaag

SEQ ID NO: 31590 - DNA, 1061 bp, Zea mays
  Clone ID: UC-ZMFLB73192F10_FLI
cttttttcgagggaaggcacgaacaggcacaggcaggcgcgcggcacggggtaggaacccgtcgcgattggcccgtccgacgacgaaccggtcgcgggcctcgtgcccgtggtggatctgactccacctgcgcgcggtcgcggtcgcgggcgccttgcttccccctcccccgctcatcgccgcggcgtccacggggcaatttccatccgcggggcgccgccgtgtcgactccatcttcctcggcggtcaatgcgggcgcggagatgagagccggcggcggggaggaggaagaggaggaggaggtgttctacgagtcgcgagaccgcgtgctctcctcctcctgctcctccacctccgcctcggacgatgacgacaacgaccacccgcgacggcgacgggacggggccgcctctgcggcggcggcggcgctcgacgtgtggacgtcggagccggcgcccgtgcaggagcggcgccggaagctgctccagatgatggggctcgccggggaccccgccctagcgcgcctcgagatgggccgatcggtctcctacgacgggcccgtccgcccggcgccggcctcgcccatcccccgatccagatcagacggcgccgtgccggtctcgtcgaccaagcccccgctgggcgggcggtcgcgccaggcgtcgtcgggctcctccgaggccacgcccgaaggggaggacgctggcccgaggtgcctaatccggaacctcgacgacggcaccgagttcgtggtcaaggaggagttccagctccgcgaggtcggcacgggccgccacttcaccatggaggagtttgttgacctctgcgtaggctgctcgcctatcgtccaggagctcatgcgacgcgataacgtggggagctccggctcgaacaacggcgcgtccacccccatccagaggtccaactccgactccagcaacggggctacgcgccaccggcggcacagcagctggcttcggagccttcgaaacgttgccggctccatggcggtcacctcccgcgaccgccgcagcagcgacgagaaggacacgtcctcggag

SEQ ID NO: 31591 - DNA, 883 bp, Zea mays
  Clone ID: UC-ZMFLB73193A01_FLI
ccgggttaggaattaggataggacgtgtaatttattctgcatctgaacctagctttatcagctgcagctttcaagtatatgcatcgatggatgattagattcaaagactaacaaatttaggacgacggcttatacagaatagaatagaatagaaggctggctacgttaattggaagccaatgctctgttttctattttttttatttttgatgggtttcagctatggagctgactctggctctggaaaagctggttaatgagaagctgcacagcctgcatggtgtaagttgctctcacatgcttgtttatttacagagaaatatatattgcgtgcttcgcttaaggcatatatacagacttggataatgtatgtgcagatataaattgaatgagtgttgggtcactacatgtaacatgctattattgtaattaacaggtggcaacaaggtgcaatgatcctcagctgatagacttcatcgagagtgagttcctcgaggagcaggtggaagccataaataaggtctccaagtatgtcgcgcagctgaggagagtgggcaacaaggggcacggttagtctgttgctaataaacttggtttcatctgctatatatgtctcgtgcccaaagttacgatattgttgagacgtggcttgcgtgcaggggtgtggcactttgatcagatgctgcttcaggaaggggcctgaaggccaacaagggtggcgtggacggagctgagctctgggtggtgtattcttttctttttcttttctttccagttggttagtgttttagttgtagaacggtgttgcgttgcccacatgacatgatggatgttacgtggaggattgtctcttatatttgaacattatattgtcgttcgtttt

SEQ ID NO: 31592 - DNA, 1658 bp, Zea mays
  Clone ID: UC-ZMFLB73193A08_FLI
gctgacagcgccgcgaccgtcctgccgattctcgcggagctcctcaagaacgacctcagggtgtgggtgtacagtggagacaccgacgggagagtgccggtgacttccagcaggtactccgtcaaccagctccagctccccgtggctgcaaaatggagggcatggttcagcagcactcagggggccggggaggtgggtggctacgtggtgcagtacaagggcaaggagaagggcagcctcagcctggtcaccgtgaggggagccggccacgaggtgcccagctaccagccgaagcgagcgctcgtgcttgtccagggcttcctcgcgggcaaggcgctccccgactgcgaaacctgcgagtcgggttaagcgtagctagctgctagcgtttggaagcagcacgcagcacacaagagaagagagcgctgcaacagcatgtaccccctatccatttgatccactacgacagacatagtcagagatagaaacatacgcacgcacccaccgtaccttgcagaaatcatgcaaaaatgcagtcatacacagagcaatctgtacacgaatgaagatggaatcacacggatctttaagcaaatctttacagtgatgaaatgaatgagctatcactagagaagtgtgctaaaaaaagaactgattttatatagagagaaccactgttgtgaaaaagcaaactttaggtgcaaatctagtactgaacaccatcagttattttctaggcttacaggaacgctgacaaggcttgtattagaagcaagaggctctaagaaggtactacctcaaacaacttctgtatcagatagacaagttacaccgtgtgtaccttaaaaatctagtactggacaccatcagttattttcttttctttcgaatacaccacggtaccgtcagctaaccacaccaaccaaagcaataggcgccaccgcgccagcagccagtagcccagtagatctcttagaattgagaacaagaagtcttccagtccattgaaacaagaagagggggaagaaaaatgaaattctcctcaatcactccgaaataaaaccgtactatacagaccatttactaaaacagaacctagtttctttggtggtctgagttcaggaccagccttttgaaagggcatgtcaggtcaggtgacacccatgctcactgaaacgtgggtccaggaaggtacatggcagctgaacccaagcctaaccattatctcttctgtcatagagctacagattcggcattatattgcactctcctcactcctcattgtcgtcgcccttgtggaggttatgcaggatgtagagagaggccgacgacaagaagatgcagatcgagtagctgaggaggtccagccccgtggcgattgtcaccatcttgctcctctcgaacatcttcaccagcaggatcatcacgatgacgtgccccactattgtcttcagctcgtcgagggaggtgatcttcatccacttggggcgttcctgcacgaacaagaattaatcactagaaatgatgagtgcagttctcagacatgatgcatgcgtgtgcgagtccaatgtaagcaaacagaagaatatgacttgtttcatatatactgtacttcaaaaggtatataaaacaaaataaatgatggatatttcaaattc

SEQ ID NO: 31593 - DNA, 1774 bp, Zea mays
  Clone ID: UC-ZMFLB73193B04_FLI
gtgacagaatttcatggcttctgtattctcctgtatggttatggatatcatgtaggtggcgagatgttaaacttcgcgcgtttgacaatgcgaagcaccgtacctatgttgatcttaaggtaagaactgtcaaatgcttgactttgacttcaactaaagactaaagcaaaaatatctttgctttgcatatactcgtcaaatctgataactagttttcttactgtcctttcctgatttatttattgatcctctcgatttccttctcttttttttttttgccaaaccttttaattgcctgtgaaaaggagtcttttgcatgggtttgtctacgtaatacgtatgctttatgcaaattcctagtgaggttaggttacttggccgatttaatcaatagtttggcacttgtgggttttaggcctactcacctaacaggtgcgtgctgtttctgtgttctttatttgaaagttttctgccagactcttgttcttgaaaaacttgtgtccttgtgattcagttggtgctgttcccacgcatcagctttgtagtttggctgggtcatgttagctttagtaccagaatgcttcacctggaaacaaaggagacccattcttgcacgtcaactaacccgatccggactttggagaaaaaacaagtccagctcagggatcagataacctttcctttattagactggaagcttcttggctgctttgcactgtacattgctgcattctctggtcagattttaacgatgactttgaaagtttgaacaggcaatggattaaccgtgtcgaaattgtggtgcgaacaggacaaatggaagacgctggtgcacaccgcgagcatctcgccgcagcagcggcgtggcgagccggtgcctcaggagctgctcgaccgggtcctggcggcccaggcctactggtcccagcagcaagccaagctccagcctaagacgcccccgctgctggctgaggctcgcttgctcacctaataaattcgatgatcctggctgatggcctcctccgaggccgttgcagcctttgtataaagtcagtaagtcagtcagtcccttcacaggaggtttaaggaagatatattaggaaaaaaaagaatacacatataaggtacaagaagcattgaccgatttgttgtaatatctactcaccaacagatattctttaagccaggattctctctccttgtgaatttaaccaaaggaaagggtatttctttggcaaattgtacatgttgatggtggaagaagaagatgatccatgaactgagatctggggtgccattgctcacaatttttgcagttgtgactgagaaattgaaggtcctgcttgaccaagctcggctccggctccggcttttggattctcctgcgaagaagttgttgcctcctcgcagaagctgagagccgaacagtgtatttggtttgaattgcagcctatagtataatttgattcacccgtacagacggccacaaaaagccgtaaagggagggtagcttcttttgttgagtctaggcttgcgagctgggccaaagcggcaccgaaagaaagcttcagattcttttgttcaattaaattcattcttttgttagtggacagtgacggaaggataggacattaggagggatggatctttggttctcttttccttttttttcttctattaaattagttgtactatgttatgtcaccaatcttgtagttaccctcaaatttgtaattgatgaaattaagaaattggaaggaaatgctttcgtacc

SEQ ID NO: 31594 - DNA, 1274 bp, Zea mays
  Clone ID: UC-ZMFLB73193D01_FLI
cgccacttcaccgcccccacccaaaatcgtctcgatggaaccgctgcggcgcgtgctgcgcctccgactcggacggcctctcgctataaaccccgcccactgaatacggccgttccatttttgactctattccccgcttcccgattcaagtcagcggtttttagggttcgagatctcggcatcgtgtcgcggaagccatggcgacaagcatgcttagtaccgtgaaggtgagcaatgtatcactgaaagcagcacaacgtgatataaaggaattcttttccttttctggtgacattgtgcatgttgaaatgcagagtttcgatgagctttctcaagttgcctacattacttttaaagacaaacaaggagcagagacggcaatgcttctcacgggggccaccatagttgatatggctgtaatcgtcacaccagcaaatgattatgagctaccatcttctgttttagctgctcttgagcccaaagacacaaaaccttctgcccttcaaaaggccgaggacattgttgggaccatgctggcaaagggatttatcctcggtagggatgcactggacaaagcgaaagctttggatgagaagcatcagctgacgtcgactgccacagctagagtatcttccttcgacaagagaatcggtctaagtgagaagatcagtgttggcacttcagttgtaaacgataaagtgaaggaaatggatcagaaataccaagtctctgagaagacaaagtcagcactggcagctgctgaacatagtgtctcgactgctggatctgctatcatgaagaacaggtatgtgctaaccggagctgcatgggtaactggtgctttcagcaaggtcaccagtgcagccaacgaggccggtgcaaaggctaaggaaaaaatagcagtcgagcaggagcacaagaatgctgagggtggacctgcacaagcgaacatctcagagacccatgaagcgcacaggggtttggacggcggattctcaaggctacatgactctgaaacccctgaagatatccccatctctactgcgagtgtcccagctgttacggatgaggagcccagcaaggcttctccaccagctggtgttcctgaaaagccagaagctgcgcacgaattggtactataattgatgcggttttgcttcatacatgcatgtaaatagacatgaaatgggatagccctggaactcattctgtggtcttgtggttggcatcttcagattgaaaacctctttgaaggttgaaagttattgggatct

SEQ ID NO: 31595 - DNA, 589 bp, Zea mays
  Clone ID: UC-ZMFLB73193D12_FLI
gaacaaatacatggatgaagcacggaactatcgaagagatggctatctgcagaccttgttgcatgcacttatcatttggatatgttctgttgcttgattctgccagggcctctgctgtgtgtacactttatatgcttaagcgccaacatttgaagtatcaattgaatggttttgcttttatgttattgaggtcctgggatggagatcgctggaccctcctctcctcatcatggcttctcatccccatcaacagtgctccatgtgattaacaaaggctcagatgtcctaatgcgatcctccacaacatgtcagaatcgtatagaaagcaaaatctcacagattttcatcttcgcctctatggaagccaatttggacttgaccaatcaccacttaaaaaaagttggctcaaagcatccttaggccttgttcgtttgtgtcggattgatgggtcggaacgaatccgagccggattgcttctttaatttatataaactttgattagccggaatgattccgggtgcaatccgatgtaaacgaacaaggccttatgcttgtattcgtgagaaaagcagaagtgaaaagcattggc

SEQ ID NO: 31596 - DNA, 1056 bp, Zea mays
  Clone ID: UC-ZMFLB73193E09_FLI
ctctgccacggcggacggctcctcgatgaggtggccagggagggtaaactctcagagcgccgcgccgccaatgtgatcaaggagctcatggcggtcctcaagtactgccacgagatgggcgtcgtgcatagggacgtcaagccggagaatgttctgctcaccaagtctggaaggttgaagcttgcagattttggattggccgtgcgagttgctgatggtgtgtcaagagtcgaagtggtgctaacttggtagttgcagtcgagttgttgtcatctggaggtagttgttacttccacggagttctggatatttgggttcacagcatcaatagattgacatcatgatggtcaggtcagcaattgactggtgttgctggcagcccggcatatctggcacctgaggttctactaggaaattactcccaaaaggtagatgtatgggctgccggggtgcttctgcatgttctgttgatgggcactcttccgttccaaggaaaatctgtcgaagctatctttgatgctataaagactgctgaacttgactttcacagcagtcagtgggcatctgtgtcactgcttgctcgtgatctcattggccgaatgcttaatcgagaggtctcttcaaggcccgatgccgaagatgttctccggcacccttgggtcttattctacactgattgcccgcagaaagctgaattctctaacctatggggtactaacaaaactgcagctcccatgattcatcaggagatagtcaggtttggttactgcgagtcttcatcttcaaaatcctcaagtgacaactctgaagagcgagatgaatgcggtatagttgacgcactggcgacagcaataacacaggtgaggatctcagagcccaagaggagtcggctgttcagcctacccaacgggttgttgccaccaagcaggaacagtctccgaacatgaagaggatgaatccgtgtgtggctttctaacttgacctacctagctcccatccccatgcatgtataaacgagataaacgagctctgtgattttatagatggaaaattttc

SEQ ID NO: 31597 - DNA, 2526 bp, Zea mays
  Clone ID: UC-ZMFLB73193F01_FLI
gtcagtaagaaagcgggataggaaaaaggagactaaagtttattacgaaacaaggcctcgacctttccagaaatatacataccgaggatataaggctgtttcagatcgaagtgggcgagaccctacaggcggtttcaaaggccctgtaaaaaaggaaccagagatgcaagctccactaaactcatcagccttggatgtcaagacaagtgacactacagaaatattttctgctactatcaatgttgcccagactgatgctaagaacaccacttctcagcctttatctaaagtgcagcatggttggggtggtattccaggtcgcccttccatggctgaaatagtgaagatgggcaggcctcaagctaaagttgggagcagatctgttgcaagtagcactgcgttgccaaccgttggtgattcagtcatttccaatacaccaaatcttgtgcctgaggaatataacagaactgtttttgcatcagaagcaggccatgtcgcagcagataaattgccaaacggtgctgttgaggtgcactctctacctaaagatgcttccgcatttgatatgttaccttcagctgagggaacagatgttgaagccccttccatgagtgctaatgcacaagggtcatcaacgccagatgccaatgaagatgacattgaaaaatatgcaaatttggaagagggcaatacagaaagcttgatatctcctggacaagtttctgcttctggtaaagatatacaatcagaatatactgaagttgtcagccatgtggatgaaggctcgatagagaaaacaaatgactttcagctcaatggccttccatttgagcacaaccaaaatctgaatggagacgtgtctacagcgacaacacaatttgatcatttgactctgcatgagggaccaaaattgtccgatgataatccggctgtaataattcctgatcatcttcaggtttcgaatgctgattgtgcgcatttgacgtttggtagttttgtgtctggaacacttgattcatccttgacaacaaaacctcttgaaagtcatggggatgctgcggcagttcctgatgatgattcaattgaccaatcagatggcaggatccatgacgatgaaggcaaggtgactttagctactgatgttaatgaatatgttacttctgcggcaaacagcaacgaggagaatcttgatattacatcagtacagcaatctgaagtcactagagctgatttcttggatgtcacaagcaatactgaatacaacctaacatcaactccagattatgcaacttcaagtgcaccgttgcaagattctgcttcacagagtttacaggaaaaccgacaattccagaacatctctcctttctcaagcttcatgcaaatgcaaaatggtctcctgccaccagcaattccaccattgcgtgaatttgatccagcattttcactattgctcacccatcctcctatgatgcatggtacaatgtcatcatccatgagcaatacaactgtttctacgcagccccaagagaatgccaatccagttggtttacccaaccctcaattgactcaatctcagcaaagcaccagcattgcttcagggcctccactccctcagcatcttcttcatccctatgctcaaccaacccttcctcttggctacgcaagcatgattggctatccatctcttccaccaagctatgcatatctcccgcctgccgcttttcagcaaccatacatgaacagtggcttgttccaccaggcagcagcggcagttcccacctcaagtgtgaaataccctctaccgcagtacaaaagcaacattgcccttgctagcttaccacagccaggctctttgctctcaagctacgttgggggctttggaactgcaagcaacatgcctggaaatttccctctgaatcaaagcacagcagcagcaacaacaactcttgggtttgatgggacggtcccttcacatttcaaagatggaaatcaatttatttctcttcagcagaatgagaaccctgcaatgtggatgcatggtgctagttcacgagggatgcccccacttgcagccagtaccatgtatggctatcaagggcagagtcatcaggccggccttcggcagggccaactaccttcacaatttggctctgcgcttgggcagtcacagccaggcctgggccctgaacaccgaaaccctagcgatagtaacctaagtggcgctgctcaggctaaccaaatgtggccaaatacctactgatccatcccccttgtcgacttctgtggaaggcggtcctgttgtgtgtgcaacgccggtgaggccatgcagtgcttgtgttctgatccaggcacgcggataccagctgtgcctgtgcgcatgagtcgctgtcgtgacattttgaggcacaagagacatatgttcgagcatgctctacctgtagggtttctaggatatggcaaaagaaaatgtagctcgatctatttattcaaattctgatagagaaaggacttcctcttttctatttt

SEQ ID NO: 31598 - DNA, 844 bp, Zea mays
  Clone ID: UC-ZMFLB73193F08_FLI
ccctccccattctatctcattcccaattcctcatctgcttcgcttccccccaaatcgaatcctcatcgctccgtctatggcgactctaaccatgcagccgatcggtcccacccctgctccggctgcgcagcaagacccaagcaagggagagaatcctcctaccgtggatggtaccgatctgggtgacatcgactcgggctgggttatcctcaagaactcggatgtcgtttccgcggatttggcagccgccgccgtctgtggcggtcagcgtctaggctcttctacgattcctagctgggcacggtgggttctcggaggtgtggtttacacgctcgtgccgttctacaacagagttaggcatctcgaagacgagacggtgggattcgtggagaatgctgtggaggttgtggagcatttagctgaagtaacagagaagctagctgcgaatgtggctaagcaacttcctgaagatgggtctctgcagaaagcagtggaagaggttgaacacattgctgaggtagtggatgatgatgcggagaaggttgaagcagtcactgaaaagatcgacaaggtcagtgatgagattgatgctgctgtggagccggtcatcgcggagcttgaaaaggaactcgatcagagcacaacctcagacgatggagttgacacaaagaattgatcaactgcatgttaggtgtgctcttcattgtacatagcgtgtgtactgttgtttttcttctctctctcctctttggagaaactgcttgtacatatgtatgtatggaccatgaagattattggtactgtatcaagtcactatccataaataaatacacgttggcctgtg

SEQ ID NO: 31599 - DNA, 940 bp, Zea mays
  Clone ID: UC-ZMFLB73193F11_FLI
ccctttcctcctcctcctcttcttcctcctcacctcacctcctatttagccgtccgaattgcttgtcagcatcttcccagcttcttcttcttcttccaaccgcgctacgctctcttgtccccggtgctcgcttggattcttctctcttcataggaaggaaggattggctaccgagatattcctactagtccagggctgtagtgcatcctgcgcgcttggtttattctgcagccagtaccagtaccagtaccccagctgagccggtgaggagaggagatagagagagcgagcgggagcgggagcgggagcgggagcagaggaggagggccatggaaggcgacagcttctccggcggcgccatggccaacggcggcggcggcggcggcggcggcagcgggcaggtggtggacgggaagctgatccacacgttccacaggagcttcgtgcaggtgcagagcctgctggaccagaaccggatgctcatcagcgagatcaaccagaaccacgagtcccgcgcgcccgacaacctcacccgcaacgtcggcctcatccgcgagctcaacaacaacatccgccgcgtcgtcggcctctacgccgacctctccgcctccttcgcgcgcaccatggaccacgcgtcctccgagggcgactcctccggcaccggcaataacggccgcgccggcgccggcgccggccacaagcgcgtccgccccgcctagagctagcttttagtttttttcttcttcttcttctgctgggtctagcttggcgtggcaatcctaggtgttgccattgccactaggaggcgtatttagtcttttctcttgcggttcttcttgttcgccttcttcctttgtgctcgctagctgcgacgaacgccggtgattagtgtatggtaatttagtgtcaaacagagagctgccatgtggatgttgctcct
